United States Patent Application Publication US 2025/0320254 A1 - sequence listing, part 7

SEQ ID NO: 24428 - protein, 197 aa, Homo sapiens
VPWLWEKVFTMPALPISRIQVRLGEHNIEVLEGNEQFINAAKIIRHPQYDRKTLNNDIMLIKLSSRAVINARVSTISLPTAPPATGTKCLISGWGNTASSGADYPDELQCLDAPVLSQAKCEASYPGKITSNMFCVGFLEGGKDSCQGDSGGPVVCNGQLQGVVSWGDGCAQKNKPGVYTKVYNYVKWIKNTIAANS

SEQ ID NO: 24429 - protein, 540 aa, Homo sapiens
MATEGAAQLGNRVAGMVCSLWVLLLVSSVLALEEVLLDTTGETSEIGWLTYPPGGWDEVSVLDDQRRLTRTFEACHVAGAPPGTGQDNWLQTHFVERRGAQRAHIRLHFSVRACSSLGVSGGTCRETFTLYYRQAEEPDSPDSVSSWHLKRWTKVDTIAADESFPSSSSSSSSSSSAAWAVGPHGAGQRAGLQLNVKERSFGPLTQRGFYVAFQDTGACLALVAVRLFSYTCPAVLRSFASFPETQASGAGGASLVAAVGTCVAHAEPEEDGVGGQAGGSPPRLHCNGEGKWMVAVGGCRCQPGYQPARGDKACQACPRGLYKASAGNAPCSPCPARSHAPNPAAPVCPCLEGFYRASSDPPEAPCTGPPSAPQELWFEVQGSALMLHWRLPRELGGRGDLLFNVVCKECEGRQEPASGGGGTCHRCRDEVHFDPRQRGLTESRVLVGGLRAHVPYILEVQAVNGVSELSPDPPQAAAINVSTSHEGELFSLAFRIPCLRSFEPPSLLLISSLVHPCRPPLKADPAPRDSYPHNNFPFAL

SEQ ID NO: 24430 - protein, 1021 aa, Homo sapiens
MATEGAAQLGNRVAGMVCSLWVLLLVSSVLALEEVLLDTTGETSEIGWLTYPPGGWDEVSVLDDQRRLTRTFEACHVAGAPPGTGQDNWLQTHFVERRGAQRAHIRLHFSVRACSSLGVSGGTCRETFTLYYRQAEEPDSPDSVSSWHLKRWTKVDTIAADESFPSSSSSSSSSSSAAWAVGPHGAGQRAGLQLNVKERSFGPLTQRGFYVAFQDTGACLALVAVRLFSYTCPAVLRSFASFPETQASGAGGASLVAAVGTCVAHAEPEEDGVGGQAGGSPPRLHCNGEGKWMVAVGGCRCQPGYQPARGDKACQACPRGLYKASAGNAPCSPCPARSHAPNPAAPVCPCLEGFYRASSDPPEAPCTGPPSAPQELWFEVQGSALMLHWRLPRELGGRGDLLFNVVCKECEGRQEPASGGGGTCHRCRDEVHFDPRQRGLTESRVLVGGLRAHVPYILEVQAVNGVSELSPDPPQAAAINVSTSHEVPSAVPVVHQVSRASNSITVSWPQPDQTNGNILDYQLRYYDQAEDESHSFTLTSETNTATVTQLSPGHIYGFQVRARTAAGHGPYGGKVYFQTLPQGELSSQLPERLSLVIGSILGALAFLLLAAITVLAVVFQRKRRGTGYTEQLQQYSSPGLGVKYYIDPSTYEDPCQAIRELAREVDPAYIKIEEVIGTGSFGEVRQGRLQPRGRREQTVAIQALWAGGAESLQMTFLGRAAVLGQFQHPNILRLEGVVTKSRPLMVLTEFMELGPLDSFLRQREGQFSSLQLVAMQRGVAAAMQYLSSFAFVHRSLSAHSVLVNSHLVCKVARLGHSPQGPSCLLRWAAPEVIAHGKHTTSSDVWSFGILMWEVMSYGERPYWDMSEQEVLNAIEQEFRLPPPPGCPPGLHLLMLDTWQKDRARRPHFDQLVAAFDKMIRKPDTLQAGGDPGERPSQALLTPVALDFPCLDSPQAWLSAIGLECYQDNFSKFGLCTFSDVAQLSLEDLPALGITLAGHQKKLLHHIQLLQQHLRQQGSVEV

SEQ ID NO: 24431 - protein, 161 aa, Homo sapiens
LGDVRSKEELVLHQESSKRSPASGCLCPTGSLSAMRFLTAVNLEHPEMLEKASRELWMRVWSRNEDITEPQSILAAAEKAGMSAEQAQGLLEKIATPKVKNQLKETTEAACRYGAFGLPITVAHVDGQTHMLFGSDRMELLAHLLGEKWMGPIPPAVNARL

SEQ ID NO: 24432 - protein, 355 aa, Homo sapiens
LAPSGNEVIAVDWKGLKDVDQINMDSTSSLHGSSLHRPSTEQTRTDFSWDGINLSMEDTTSILPKLKRNSNAYGIGALAKSSFSGISRSMKDHVTKPTAMGQGRVAHMIEWQGWGKTPAVQPQHSHESVRRDTDAYSDLSDGEKEARFLAGVMEQFAISEATLMAWSSMDGEDMSVNSTQEPLGCNYSDNYQELMDSQDALAQAPMDGWPHSYVSQGMYCLGSSDAWEASDQSLIASPATGSYLGPAFDDSQPSLHEMGPSQPASGYSALEPPPLLGGDTDWAPGVGAVDLARGPAEEEKRPLAPEEEEDAGCRDLESLSPREDPEMSTALSRKVSDVTSSGVQSFDEEEGEANN

SEQ ID NO: 24433 - protein, 15 aa, Homo sapiens
LSFLPPPIRFVHGMR

SEQ ID NO: 24434 - protein, 687 aa, Homo sapiens
LSRAGAAGAAVSGVGASGPRRSLRPEAGSGPLPGGVSCLVRPSPLSPPPLRAAPCMVWAPLSPRPLSSPSLLLPCVPPRPAGGCSGPGRRVCGPGAEAATRDAARTLRPAQPGPAMAAPRPSPAISVSVSAPAFYAPQKKFGPVVAPKPKVNPFRPGDSEPPPAPGAQRAQMGRVGEIPPPPPEDFPLPPPPLAGDGDDAEGALGGAFPPPPPPIEESFPPAPLEEEIFPSPPPPPEEEGGPEAPIPPPPQPREKVSSIDLEIDSLSSLLDDMTKNDPFKARVSSGYVPPPVATPFSSKSSTKPAAGGTAPLPPWKSPSSSQPLPQVPAPAQSQTQFHVQPQPQPKPQVQLHVQSQTQPVSLANTQPRGPPASSPAPAPKFSPVTPKFTPVASKFSPGAPGGSGSQPNQKLGHPEALSAGTGSPQPPSFTYAQQREKPRVQEKQHPVPPPAQNQNQVRSPGAPGPLTLKEVEELEQLTQQLMQDMEHPQRQNVAVNELCGRCHQPLARAQPAVRALGQLFHIACFTCHQCAQQLQGQQFYSLEGAPYCEGCYTDTLEKCNTCGEPITDRMLRATGKAYHPHCFTCVVCARPLEGTSFIVDQANRPHCVPDYHKQYAPRCSVCSEPIMPEPGRDETVRVVALDKNFHMKCYKCEDCGKPLSIEADDNGCFPLDGHVLCRKCHTARAQT

SEQ ID NO: 24435 - protein, 474 aa, Homo sapiens
MERRWPLGLGLVLLLCAPLPPGARAKEVTLMDTSKAQGELGWLLDPPKDGWSEQQQILNGTPLYMYQDCPMQGRRDTDHWLRSNWIYRGEEASRVHVELQFTVRDCKSFPGGAGPLGCKETFNLLYMESDQDVGIQLRRPLFQKVTTVAADQSFTIRDLVSGSVKLNVERCSLGRLTRRGLYLAFHNPGACVALVSVRVFYQRCPETLNGLAQFPDTLPGPAGLVEVAGTCLPHARASPRPSGAPRMHCSPDGEWLVPVGRCHCEPGYEEGGSGEACVACPSGSYRMDMDTPHCLTCPQQSTAESEGATICTCESGHYRAPGEGPQVACTGPPSAPRNLSFSASGTQLSLRWEPPADTGGRQDVRYSVRCSQCQGTAQDGGPCQPCGVGVHFSPGARGLTTPAVHVNGLEPYANYTFNVEAQNGVSGLGSSGHASTSVSISMGHAGERLRGAGTGTWWRQKGLRPQNKLMGRKP

SEQ ID NO: 24436 - protein, 731 aa, Homo sapiens
LHGISELDISNSDCFPSQLLVHGALAFPLGLDSYHGCVIAAARYGRGRVVVTGHKVLFTVGKLGPFLLNAVRWLDGGRRGKIVVQTELRTLSGLLAVGGIDTSIEPNLTSDASVYCFEPVSEVGVKELQEFVAEGGGLFVGAQAWWWAFKNPGVSPLARFPGNLLLNPFGISITSQSLNPGPFRTPKAGIRTYHFRSTLAEFQVIMGRKRGNVEKGWLAKLGPDGAAFLQIPAEEIPAYMSVHRLLRKLLSRYRLPVATRENPVINDCCRGAMLSLATGLAHSGSDLSLLVPEIEDMYSSPYLRPSESPITVEVNCTNPGTRYCWMSTGLYIPGRQIIEVSLPEAAASADLKIQIGCHTDDLTRASKLFRGPLVINRCCLDKPTKSITCLWGGLLYIIVPQNSKLGSVPVTVKGAVHAPYYKLGETTLEEWKRRIQENPGPWGELATDNIILTVPTANLRTLENPEPLLRLWDEVMQAVARLGAEPFPLRLPQRIVADVQISVGWMHAGYPIMCHLESVQELINEKLIRTKGLWGPVHELGRNQQRQEWEFPPHTTEATCNLWCVYVHETVLGIPRSRANIALWPPVREKRVRIYLSKGPNVKNWNAWTALETYLQMNVPSSHYALAVPQSPHYVGNPRVLTDLDKELQEAFGWEPFIRLFTEYRNQTNLPTENVDKMNLWVKMFSHQVQKNLAPFFEAWAWPIQKEVATSLAYLPEWKENIMKLYLLTQM

SEQ ID NO: 24437 - protein, 52 aa, Homo sapiens
LTLRLEGVLIGDLSLGLMSVCLATFSSLLLDHIVVCFEYHSLGYVESRVASH

SEQ ID NO: 24438 - protein, 940 aa, Homo sapiens
LDQERPAVTEAWAPETNRAMATPSAAFEALMNGVTSWDVPEDAVPCELLLIGEASFPVMVNDMGQVLIAASSYGRGRLVVVSHEDYLVEAQLTPFLLNAVGWLCSSPGAPIGVHPSLAPLAKILEGSGVDAKVEPEVKDSLGVYCIDAYNETMTEKLVKFMKCGGGLLIGGQAWDWANQGEDERVLFTFPGNLVTSVAGIYFTDNKGDTSFFKVSKKMPKIPVLVSCEDDLSDDREELLHGISELDISNSDCFPSQLLVHGALAFPLGLDSYHGCVIAAARYGRGRVVVTGHKVLFTVGKLGPFLLNAVRWLDGGRRGKVVVQTELRTLSGLLAVGGIDTSIEPNLTSDASVYCFEPVSEVGVKELQEFVAEGGGLFVGAQAWWWAFKNPGVSPLARFPGNLLLNPFGISITSQSLNPGPFRTPKAGIRTYHFRSTLAEFQVIMGRKRGNVEKGWLAKLGPDGAAFLQIPAEEIPAYMSVHRLLRKLLSRYRLPVATRENPVINDCCRGAMLSLATGLAHSGSDLSLLVPEIEDMYSSPYLRPSESPITVEVNCTNPGTRYCWMSTGLYIPGRQIIEVSLPEAAASADLKIQIGCHTDDLTRASKLFRGPLVINRCCLDKPTKSITCLWGGLLYIIVPQNSKLGSVPVTVKGAVHAPYYKLGETTLEEWKRRIQENPGPWGELATDNIILTVPTANLRTLENPEPLLRLWDEVMQAVARLGAEPFPLRLPQRIVADVQISVGWMHAGYPIMCHLESVQELINEKLIRTKGLWGPVHELGRNQQRQEWEFPPHTTEATCNLWCVYVHETVLGIPRSRANIALWPPVREKRVRIYLSKGPNVKNWNAWTALETYLQLQEAFGWEPFIRLFTEYRNQTNLPTENVDKMNLWVKMFSHQVQKNLAPFFEAWAWPIQKEVATSLAYLPEWKENIMKLYLLTQMPH

SEQ ID NO: 24439 - protein, 27 aa, Homo sapiens
LLQRCYAFPGHRAGPLWKRPLSVSPRN

SEQ ID NO: 24440 - protein, 47 aa, Homo sapiens
LVPSDPPRGRVLDSEPTSGEDRTLSKMVSLEATTSPWRVEIFAGQRY

SEQ ID NO: 24441 - protein, 53 aa, Homo sapiens
LVPSDPPRGRVLDSEPTSGEDRTLSKMVSLEATTSPWRVEIFAGQSKKALCRC

SEQ ID NO: 24442 - protein, 48 aa, Homo sapiens
VIVTQWALTVNGAYSTFLEVALALLRACADGGANRLYDITEGERERFL

SEQ ID NO: 24443 - protein, 24 aa, Homo sapiens
LEHSGTLDIAGIKDGHRCLTVMHF

SEQ ID NO: 24444 - protein, 106 aa, Homo sapiens
MELSGPGEGEGAWKTFFFSLADPSGEQHSQDAVCVNTAAASAAGHPGPGAGQRELELGPGSAPGGGLPPGAGAARGNGRGNAAHAGSRMGHGRPAANAFSVPTLSR

SEQ ID NO: 24445 - protein, 141 aa, Homo sapiens
LLCSTPCRRLGKRPKDSPSRWCTCSIAPGAASRGATVSISASCMAWHRVGWYAPGPLFVSKMTFPALAVGPAFLPAGITVGSRHPAPLWRASCFRPRPHLRCSAFLRPLFAVQREFLTLNKRYPDCRLHVHRAGGSPACLQ

SEQ ID NO: 24446 - protein, 79 aa, Homo sapiens
MNLWLPALFVLVALESLLLSPCPGTSSTLTRTFFPSLVSCVQVPFSWIPCLECFLIYFLILAEDVLQLFSGNANMQVNQ

SEQ ID NO: 24447 - protein, 164 aa, Homo sapiens
LGRGGQRRAMEEAAAAPISPWTMAATIQAMERKIESQAAHLLSLEGQTGMAEKKLADCEKTAVEFGNQLEGKWAVLGTLLQEYGLLQRRLENVENLLHNRNFWILRLPPGSKGESPKTTPSPSPRSSPRLNKGRSPATGAALTPRFQMFLWTPVQMQKLRPSRD

SEQ ID NO: 24448 - protein, 127 aa, Homo sapiens
LGRGGQRRAMEEAAAAPISPWTMAATIQAMERKIESQAAHLLSLEGQTGMAEKKLADCEKTAVEFGNQLEGKWAVLGTLLQEYGLLQRRLENVENLLHNRNFWILRLPPGSKGESPKVPMTFDDVAV

SEQ ID NO: 24449 - protein, 21 aa, Homo sapiens
LAIILECAPGGLGGVTKCRDS

SEQ ID NO: 24450 - protein, 379 aa, Homo sapiens
MLLPALLFGMAWALADGRWCEWTETIRVEEEVAPRQEDLVPCASLDHYSRLGWRLDLPWSGRSGLTRSPAPGLCPIYKPPETRPAKWNRTVRTCCPGWGGAHCTEALAKASPEGHCFAMWQCQLQAGSANASAGSLEECCARPWGQSWWDGSSQACRSCSSRHLPGSASSPALLQPLAGAVGQLWSQHQRPSATCASWSGFHYRTFDGRHYHFLGRCTYLLAGAADSTWAVHLTPGDRCPQPGHCQRVQVTMGPEEVLIQAGNVSVKGQLVPEGQSWLLHGLSLQWLGDWLVLSGGLGVVVRLDRTGSISISVDHELWGQTQGLCGLYNGWPEDDFMEPGGGLAMLAATFGNSWRLPGSESGCLDAVEVAQGCDSPWGS

SEQ ID NO: 24451 - protein, 377 aa, Homo sapiens
MLLPALLFGMAWALADGRWCEWTETIRVEEEVAPRQEDLVPCASLDHYSRLGWRLDLPWSGRSGLTRSPAPGLCPIYKPPETRPAKWNRTVRTCCPGWGGAHCTEALAKASPEGHCFAMWQCQLQAGSANASAGSLEECCARPWGQSWWDGSSQACRSCSSRHLPGSASSPALLQPLAGAVGQLWSQHQRPSATCASWSGFHYRTFDGRHYHFLGRCTYLLAGAADSTWAVHLTPGDRCPQPGHCQRVTMGPEEVLIQAGNVSVKGQLVPEGQSWLLHGLSLQWLGDWLVLSGGLGVVVRLDRTGSISISVDHELWGQTQGLCGLYNGWPEDDFMEPGGGLAMLAATFGNSWRLPGSESGCLDAVEVAQGCDSPWGS

SEQ ID NO: 24452 - protein, 4776 aa, Homo sapiens
LGLIDADVEPGHLRAEAQDVCHQLLEGPFGQCHAQVSPAEYHEACLFAYCAGAMAGSGQEGRQQAVCATFASYVQACARRHIHIRWRKPGFCERLCPGGQLYSDCVSLCPPSCEAVGQGEEESCREECVSGCECPRGLFWNGTLCVPAAHCPCYYCRQRYVPGDTVRQLCNPCVCRDGRWHCAQALCPAECAVGGDGHYLTFDGRSYSFWGGQGCRYSLVQDYVKGQLLILLEHGACDAGSCLHAISVSLEDTHIQLRDSGAVLVNGQDVGLPWIGAEGLSVRRASSAFLLLRWPGAQVLWGLSDPVAYITLDPRHAHQVQGLCGTFTQNQQDDFLTPAGDVETSIAAFASKFQVAGKGRCPSEDSALLSPCTTHSQRHAFAEAACAILHSSVFQECHRLVDKEPFYLRCLAAVCGCDPGSDCLCPVLSAYARRCAQEGASPPWRNQTLCPVMCPGGQEYRECAPACGQHCGKPEDCGELGSCVAGCNCPLGLLWDPEGQCVPPSLCPCQLGARRYAPGSATMKECNRCICQERGLWNCTARHCPSQAFCPRELVYAPGACLLTCDSPSANHSCPAGSTDGCVCPPGTVLLDERCVPPDLCPCRHSGQWYLPNATIQEDCNVCVCRGRQWHCTGQRRSGRCQASGAPHYVTFDGLAFTYPGACEYLLVREASGLFTVSAQNLPCGASGLTCTKALAVRLEGTVVHMLRGRAVTVNGVSVTPPKVYTGPGLSLRRAGLFLLLSTHLGLTLLWDGGTRVLVQLSPQFRGRVAGLCGDFDGDASNDLRSRQGVLEPTAELAAHSWRLSPLCPEPGDLPHPCTMNTHRAGWARARCGALLQPLFTLCHAEVPPQQHYEWCLYDACGCDSGGDCECLCSAIATYADECARHGHHVRWRSQELCSLQCEGGQVYEACGPTCPPTCHEQHPEPGWHCQVVACVEGCFCPEGTLLHGGACLEPASCPCEWGRNSFPPGSVLQKDCGNCTCQEGQWHCGGDGGHCEELVPACAEGEALCQENGHCVPHGWLCDNQDDCGDGSDEEGCAAPGCGEGQMTCSSGHCLPLALLCDRQDDCGDGTDEPSYPCPQGLLACADGRCLPPALLCDGHPDCLDAADEESCLGQVTCVPGEVSCVDGTCLGAIQLCDGVWDCPDGADEGPGHCPLPSLPTPPASTLPGPSPGSLDTASSPLASASPAPPCGPFEFRCGSGECTPRGWRCDQEEDCADGSDERGCGGPCAPHHAPCARGPHCVSPEQLCDGVRQCPDGSDEGPDACGGLPALGGPNRTGLPCPEYTCPNGTCIGFQLVCDGQPDCGRPGQVGPSPEEQGCGAWGPWSPWGPCSRTCGPWGQGRSRRCSPLGLLVLQNCPGPEHQSQACFTAACPVDGEWSTWSPWSVCSEPCRGTMTRQRQCHSPQNGGRTCAALPGGLHSTRQTKPCPQDGCPNATCSGELMFQPCAPCPLTCDDISGQVTCPPDWPCGSPGCWCPEGQVLGSEGWCVWPRQCPCLVDGARYWPGQRIKADCQLCICQDGRPRRCRLNPDCAVDCGWSSWSPWAKCLGPCGSQSIQWSFRSSNNPRPSGRGRQCRGIHRKARRCQTEPCEGCEHQGQVHRVGERWHGGPCRVCQCLHNLTAHCSPYCPLGSCPQGWVLVEGTGESCCHCALPGENQTVQPMATPAAAPAPSPQIRFPLATYILPPSGDPCYSPLGLAGLAEGSLHASSQQLEHPTQAALLGAPTQGPSPQGWHAGGDAYAKWHTRPHYLQLDLLQPRNLTGILVPETGSSNAYASSFSLQFSSNGLHWHDYRDLLPGILPLPKLFPRNWDDLDPAVWTFGRMVQARFVRVWPHDVHHSDVPLQVELLGCEPGSPPAPLCPGVGLRCASGECVLRGGPCDGVLDCEDGSDEEGCVLLPEGTGRFHSTAKTLALSSAQPGQLLHWPREGLAETEHWPPGQESPTSPTETRPVSPGPASGVPHHGESVQMVTTTPIPQMEARTLPPGMAAVTVVPPHPVTPATPAGQSVAPGPFPPVQCGPGQTPCEVLGCVEQAQVCDGREDCLDGSDERHCARNLLMWLPSLPALWAASTVPFMMPTMALPGLPASRALCSPSQLSCGSGECLSAERRCDLRPDCQDGSDEDGCVDCVLAPWSVWSSCSRSCGLGLTFQRQELLRPPLPGGSCPRDRFRSQSCFVQACPVAGAWAMWEAWGPCSVSCGGGHQSRQRSCVDPPPKNGGAPCPGASQERAPCGLQPCSGGTDCELGRVYVSADLCQKGLVPPCPPSCLDPKANRSCSGHCVEGCRCPPGLLLHDTRCLPLSECPCLVGEELKWPGVSFLLGNCSQCVCEKGELLCQPGGCPLPCGWSAWSSWAPCDRSCGSGVRARFRSPSNPPAAWGGAPCEGDRQELQGCHTVCGTEVFGWTPWTSWSSCSQSCLAPGGGPGWRSRSRLCPSPGDSSCPGDATQEEPCSPPVCPVPSIWGLWAPWSTCSAPCDGGIQTRGRSCSSLAPGDTTCPGPHSQTRDCNTQPCTAQCPENMLFRSAEQCHQEGGPCPRLCLTQGPGIECTGFCAPGCTCPPGLFLHNASCLPRSQCPCQLHGQLYASGAMARLDSCNNCTCVSGKMACTSERCPVACGWSPWTLWSLCSCSCNVGIRRRFRAGTAPPAAFGGAECQGPTMEAEFCSLRPCPGPGGEWGPWSPCSVPCGGGYRNRTRGSSRSLMEFSTCGLQPCAGPVPGMCPRDKQWLDCAQGPASCAELSAPRGTNQTCHPGCHCPSGMLLLNNVCVPTQDCPCAHEGHLYPPGSTVVRPCENCSCVSGLIANCSSWPCAEGEPTWSPWTPWSQCSASCGPARCHRHRFCARSPSAVPSTVAPLPLPATPTPLCSGPEAEEEPCLLQGCDRAGGWGPWGPWSHCSRSCGGGLRSRTRACDQPPPQGLGDYCEGPRAQGEVCQALPCPVTNCTAIEGAEYSPCGPPCPRSCDDLVHCVWRCQPGCYCPPGQVLSSNGAICVQPGHCSCLDLLTGQRHHPGARLARPDGCNHCTCLEGRLNCTDLPCPVPGGWCPWSEWTMCSQPCRGQTRSRSRACACPTPQHGGAPCTGEAGEAGAQHQREACPSYATCPVDGAWGPWGPWSPCDMCLGQSHRSRACSRPPTPEGGRPCPGNHTQSRPCQENSTQCTDCGGGQSLHPCGQPCPRSCQDLSPGSVCQPGSVGCQPTCGCPLGQLSQDGLCVPPAHCRCQYQPGAMGIPENQSRSAGSRFSSWESLEPGEVVTGPCDNCTCVAGILQCQEVPDCPDPGVWSSWGPWEDCSVSCGGGEQLRSRRCARPPCPGPARQSRTCSTQVCREAGCPAGRLYRECQPGEGCPFSCAHVTQQVGCFSEGCEEGCHCPEGTFQHRLACVQECPCVLTAWLLQELGATIGDPGQPLGPGDELDSGQTLRTSCGNCSCAHGKLSCSLDDCFEADGGFGPWSPWGPCSRSCGGLGTRTRSRQCVLTMPTLSGQGCRGPRQDLEYCPSPDCPGAEGSTVEPVTGLPGGWGPWSSWSPCSRSCTDPARPAWRSRTRLCLANCTMGDPLQERPCNLPSCTELPVCPGPGCGAGNCSWTSWAPWEPCSRSCGVGQQRRLRAYRPPGPGGHWCPNILTAYQERRFCNLRACPVPGGWSRWSPWSWCDRSCGGGQSLRSRSCSSPPSKNGGAPCAGERHQARLCNPMPCEAGCPAGMEVVTCANRCPRRCSDLQEGIVCQDDQVCQKGCRCPKGSLEQDGGCVPIGHCDCTDAQGHSWAPGSQHQDACNNCSCQAGQLSCTAQPCPPPTHCAWSHWSAWSPCSHSCGPRGQQSRFRSSTSGSWAPECREEQSQSQPCPQPSCPPLCLQGTRSRTLGDSWLQGECQRCSCTPEGVICEDTECAVPEAWTLWSSWSDCPVSCGGGNQVRTRACRAAAPHHRSPPCLGPDTQTRQQPCPGLLEACSWGPWGPCSRSCGPGLASRSGSCPCLMAKADPTCNSTFLHLDTQGCYSGPCPEECVWSSWSSWTRCSCRVLVQQRYRHQGPASRGARAGAPCTRLDGHFRPCLISNCSEDSCTPPFEFHACGSPCAGLCATHLSHQLCQDLPPCQPGCYCPKGLLEQAGGCIPPEECNCWHTSAAGAGMTLAPGDRLQLGCKECECRRGELHCTSQGCQGLLPLSEWSEWSPCGPCLPPSALAPASRTALEEHWLRDPTGLSPTLAPLLASEQHRHRLCLDPATGRPWTGAPHLCTAPLSQQRLCPDPGACPDSCQWSLWGPWSPCQVPCSGGFRLRWREAEALCGGGCREPWAQESCNGGPCPESCEAQDTVFTLDCANQCPHSCADLWDRVQCLQGPCRPGCRCPPGQLVQDGRCVPISSCRCGLPSANASWELAPAQAVQLDCQNCTCVNESLVCPHQECPVLGPWSAWSSCSAPCGGGTMERHRTCEGGPGVAPCQAQDTEQRQECNLQPCPECPPGQVLSACATSCPCLCWHLQPGAICVQEPCQPGCGCPGGQLLHNGTCVPPTACPCTQHSLPWGLTLTLEEQAQELPPGTVLTRNCTRCVCHGGAFSCSLVDCQVPPGETWQQVAPGELGLCEQTCLEMNATKTQSNCSSARASGCVCQPGHFRSQAGPCVPEDHCECWHLGRPHLPGSEWQEACESCLCLSGRPVCTQHCSPLTCAQGEEMVLEPGSCCPSCRREAPEEQSPSCQLLTELRNFTKGTCYLDQVEVSYCSGYCPSSTHVMPEEPYLQSQCDCCSYRLDPESPVRILNLRCLGGHTEPVVLPVIHSCQCSSCQGGDFSKR

SEQ ID NO: 24453 - protein, 1250 aa, Homo sapiens
LGSDRKAVRSVRRKSQLSALILGPPALPPPDVRERSSWAALPPYLGALPLREPGSPGRSRRLHPQARPRGEGAARASESGAMEPRESGKAPVTFDDITVYLLQEEWVLLSQQQKELCGSNKLVAPLGPTVANPELFRKFGRGPEPWLGSVQGQRSLLEHHPGKKQMGYMGEMEVQGPTRESGQSLPPQKKAYLSHLSTGSGHIEGDWAGRNRKLLKPRSIQKSWFVQFPWLIMNEEQTALFCSACREYPSIRDKRSRLIEGYTGPFKVETLKYHAKSKAHMFCVNALAARDPIWAARFRSIRDPPGDVLASPEPLFTADCPIFYPPGPLGGFDSMAELLPSSRAELEDPGGDGAIPAMYLDCISDLRQKEITDGIHSSSDINILYNDAVESCIQDPSAEGLSEEVPVVFEELPVVFEDVAVYFTREEWGMLDKRQKELYRDVMRMNYELLASLGPAAAKPDLISKLERRAAPWIKDPNGPKWGKGRPPGNKKMVAVREADTQASAADSALLPGSPVEARASCCSSSICEEGDGPRRIKRTYRPRSIQRSWFGQFPWLVIDPKETKLFCSACIERPNLHDKSSRLVRGYTGPFKVETLKYHEVSKAHRLCVNTVEIKEDTPHTALVPEISSDLMANMEHFFNAAYSIAYHSRPLNDFEKILQLLQSTGTVILGKYRNRTACTQFIKYISETLKREILEDVRNSPCVSVLLDSSTDASEQACVGIYIRYFKQMEVKESYITLAPLYSETADGYFETIVSALDELDIPFRKPGWVVGLGTDGSAMLSCRGGLVEKFQEVIPQLLPVHCVAHRLHLAVVDACGSIDLVKKCDRHIRTVFKFYQSSNKRLNELQEGAAPLEQEIIRLKDLNAVRWVASRRRTLHALLVSWPALARHLQRVAEAGGQIGHRAKGMLKLMRGFHFVKFCHFLLDFLSIYRPLSEVCQKEIVLITEVNATLGRAYVALESLRHQAGPKEEEFNASFKDGRLHGICLDKLEVAEQRFQADRERTVLTGIEYLQQRFDADRPPQLKNMEVFDTMAWPSGIELASFGNDDILNLARYFECSLPTGYSEEALLEEWLGLKTIAQHLPFSMLCKNALAQHCRFPLLSKLMAVVVCVPISTSCCERGFKAMNRIRTDERTKLSNEVLNMLMMTAVNGVAVTEYDPQPAIQHWYLTSSGRRFSHVYTCAQVPARSPASARLRKEEMGALYVEEPRTQKPPILPSREAAEVLKDCIMEPPERLLYPHTSQEAPGMS

SEQ ID NO: 24454 - protein, 89 aa, Homo sapiens
MAWQRPGPEEPSGASPRKKTDGLHGRNGGARSHQGEWTVPPASEESLPFPPQYRQWTHRGRLGRKKQETSEAPVHPEVVVCAVSVADHE

SEQ ID NO: 24455 - protein, 40 aa, Homo sapiens
LAGVPALVATLLLACSLDSIRMYVSWHFPSLSLMTDTHRV

SEQ ID NO: 24456 - protein, 124 aa, Homo sapiens
LLCTLSWLPAILCLPVCPQPFPAGIFVRLEFKLQQTSCRKRDWKKPECKVRPNGRKRKCLACIKLGSEDKVLGRLVHCPIETQVLREAEEHQETQCLRVQRAGEDPHSFYFPGQFAFSKALPRS

SEQ ID NO: 24457 - protein, 88 aa, Homo sapiens [sequence omitted]

SEQ ID NO: 24458 - protein, 13 aa, Homo sapiens
LDSLPHRSVPTTA

SEQ ID NO: 24459 - protein, 320 aa, Homo sapiens
LLFILFLFLFQERMGGFQRGKYGTMAEGRSEDNLSATPPALRIILVGKTGCGKSATGNSILGQPVFESKLRAQSVTRTCQVKTGTWNGRKVLVVDTPSIFESQADTQELYKNIGDCYLLSAPGPHVLLLVIQLGRFTAQDTVAIRKVKEVFGTGAMRHVVILFTHKEDLGGQALDDYVANTDNCSLKDLVRECERRYCAFNNWGSVEEQRQQQAELLAVIERLGREREGSFHSNDLFLDAQLLQRTGAGACQEDYRQYQAKVEWQVEKHKQELRENESNWAYKALLRVKHLMLLHYEIFVFLLLCSILFFIIFLFIFHYI

SEQ ID NO: 24460 - protein, 138 aa, Homo sapiens
LSMLSTRLTLLLMVATPALMGVGTLMGSGLRKLSRQCQEQIARAMGVADEALGNVRTVRAFAMEQREEERYGAELEACRCRAEELGRGIALFQGLSNIAFNCMVLGTLFIGGSLVAGQQLTGGDLMSFLVASQTVQRL

SEQ ID NO: 24461 - protein, 281 aa, Homo sapiens
LGAAASPKSSCVAPLHFRTSASGQHGYPCRPGFEVLKDFTLTLPPGKIVALVGQSGGGKTTVASLLERFYDPTAGVVMLDGRDLRTLDPSWLRGQVVGFISQEPVLFGTTIMENIRFGKLEASDEEVYTAAREANAHEFITSFPEGYNTVVGERGTTLSGGQKQRLAIARALIKQPTVLILDEATSALDAESERVVQEALDRASAGRTVLVIAHRLSTVRGAHCIVVMADGRVWEAGTHEELLKKGGLYAELIRRQALDAPRTAAPPPKKPEGPRSHQHKS

SEQ ID NO: 24462 - protein, 243 aa, Homo sapiens
MRRPRGEPGPRAPRPTEGATCAGPGESCFPSDGPLVCALEQERRLRLPPKPPPPLQPLLRGGQGLEAALSCPRFLRYPRQHLISSLAEARPEELTPHVMVLLAQHLARHRLREPQLLEAIAHFLVVQETQLSSKVVQKLVLPFGRLNYLPLEQQFMPCLERILAREAGVAPLATVNILMSLCQLRCLPFRALHFVFSPGFINYISGTQPGWLAGPLRAGEAGEQGGLQPRAPVPASPQAPLML

SEQ ID NO: 24463 - protein, 15 aa, Homo sapiens
VGRRIDTLGGEVWLG

SEQ ID NO: 24464 - protein, 18 aa, Homo sapiens
LEYLCLCTYLMCVCMMSQ

SEQ ID NO: 24465 - protein, 7 aa, Homo sapiens
VASLFLF

SEQ ID NO: 24466 - protein, 18 aa, Homo sapiens
MPCKMAPSAMALLRGCQC

SEQ ID NO: 24467 - protein, 19 aa, Homo sapiens
LAPSLVPTGPAAVAQQPLQ

SEQ ID NO: 24468 - protein, 43 aa, Homo sapiens
MPEAGILPERPTEAGSGSSGWGCCFDGSCAFPLPLITCCHLLT

SEQ ID NO: 24469 - protein, 12 aa, Homo sapiens
LIVSFITVLAGG

SEQ ID NO: 24470 - protein, 787 aa, Homo sapiens
LRLCPWGTHLAGPTTMRLSSLLALLRPALPLILGLSLGCSLSLLRVSWIQGEGEDPCVEAVGERGGPQNPDSRARLDQSDEDFKPRIVPYYRDPNKPYKKVLRTRYIQTELGSRERLLVAVLTSRATLSTLAVAVNRTVAHHFPRLLYFTGQRGARAPAGMQVVSHGDERPAWLMSETLRHLHTHFGADYDWFFIMQDDTYVQAPRLAALAGHLSINQDLYLGRAEEFIGAGEQARYCHGGFGYLLSRSLLLRLRPHLDGCRGDILSARPDEWLGRCLIDSLGVGCVSQHQGQQYRSFELAKNRDPEKEGSSAFLSAFAVHPVSEGTLMYRLHKRFSALELERAYSEIEQLQAQIRNLTVLTPEGEAGLSWPVGLPAPFTPHSRFEVLGWDYFTEQHTFSCADGAPKCPLQGASRADVGDALETALEQLNRRYQPRLRFQKQRLLNGYRRFDPARGMEYTLDLLLECVTQRGHRRALARRVSLLRPLSRVEILPMPYVTEATRVQLVLPLLVAEAAAAPAFLEAFAANVLEPREHALLTLLLVYGPREGGRGAPDPFLGVKAAAAELERRYPGTRLAWLAVRAEAPSQVRLMDVVSKKHPVDTLFFLTTVWTRPGPEVLNRCRMNAISGWQAFFPVHFQEFNPALSPQRSPPGPPGAGPDPPSPPGADPSRGAPIGGRFDRQASAEGCFYNADYLAARARLAGELAGQEEEEALEGLEVMDVFLRFSGLHLFRAVEPGLVQKFSLRDCSPRLSEELYHRCRLSNLEGLGGRAQLAMALFEQEQANST

SEQ ID NO: 24471 - protein, 630 aa, Homo sapiens
LASPGMKTNGGRCRIRALCWSRREWRGAGMAQKKYLQAKLTQFLREDRIQLWKPPYTDENKKVGLALKDLAKQYSDRLECCENEVEKVIEEIRCKAIERGTGNDNYRTTGIATIEVFLPPRLKKDRKNLLETRLHITGRELRSKIAETFGLQENYIKIVINKKQLQLGKTLEEQGVAHNVKAMVLELKQSEEDARKNFQLEEEEQNEAKLKEKQIQRTKRGLEILAKRAAETVVDPEMTPYLDIANQTGRSIRIPPSERKALMLAMGYHEKGRAFLKRKEYGIALPCLLDADKYFCECCRELLDTVDNYAVLQLDIVWCYFRLEQLECLDDAEKKLNLAQKCFKNCYGENHQRLVHIKGNCGKEKVLFLRLYLLQGIRNYHSGNDVEAYEYLNKARQLFKELYIDPSKVDNLLQLGFTAQEARLGLRACDGNVDHAATHITNRREELAQIRKEEKEKKRRRLENIRFLKGMGYSTHAAQQILLSNPQMWWLNDSNPETDNRQESPSQENIDRLVYMGFDALVAEAALRVFRGNVQLAAQTLAHNGGSLPPELPLSPEDSLSPPATSPSDSAGTSSASTDEDMETEAVNEILEDIPEHEEDYLDSTLEDEEIIIAEYLSYVENRKSATKKN

SEQ ID NO: 24472 - protein, 644 aa, Homo sapiens
LASPGMKTNGGRCRIRALCWSRREWRGAGMAQKKYLQAKLTQFLREDRIQLWKPPYTDENKKVGLALKDLAKQYSDRLECCENEVEKVIEEIRCKAIERGTGNDNYRTTGIATIEVFLPPRLKKDRKNLLETRLHITGRELRSKIAETFGLQENYIKIVINKKQLQLGKTLEEQGVAHNVKAMVLELKQSEEDARKNFQLEEEEQNEAKLKEKQIQRTKRGLEILAKRAAETVVDPEMTPYLDIANQTGRSIRIPPSERKALMLAMGYHEKGRAFLKRKEYGIALPCLLDADKYFCECCRELLDTVDNYAVLQLDIVWCYFRLEQLECLDDAEKKLNLAQKCFKNCYGENHQRLVHIKGNCGKEKVLFLRLYLLQGIRNYHSGNDVEAYEYLNKARQLFKELYIDPSKVDNLLQLGFTAQEARLGLRACDGNVDHAATHITNRREELAQIRKEEKEKKRRRLENIRFLKGMGYSTHAAQQVLHAASGNLDEALKILLSNPQMWWLNDSNPETDNRQESPSQENIDRLVYMGFDALVAEAALRVFRGNVQLAAQTLAHNGGSLPPELPLSPEDSLSPPATSPSDSAGTSSASTDEDMETEAVNEILEDIPEHEEDYLDSTLEDEEIIIAEYLSYVENRKSATKKN

SEQ ID NO: 24473 - protein, 86 aa, Homo sapiens
LSNTIWHLLVCLFFLTNRIPIMLVGNKKDLHMERVISYEEGKALAESWNAAFLESSAKENQVTDSINLILHCVLISRRDVFLAVGI

SEQ ID NO: 24474 - protein, 27 aa, Homo sapiens
LVSDPSRLPASHCVPYPLKHAPAPALP

SEQ ID NO: 24475 - protein, 52 aa, Homo sapiens [sequence omitted]

SEQ ID NO: 24476 - protein, 2414 aa, Homo sapiens
MPRPLNNSQMNNPVGLPQHFSPQSLPVQQHNILGQAYIELRHRAPDGRQRLPFSAPPGSVVEASSNLRHGNFIPRPDFPGPRHTDPMRRPPQGLPNQLPVHPDLEQVPPSQQEQGHSVHSSSMVMRTLNHPLGGEFSEAPLSTSVPSETTSDNLQITTQPSDGLEEKLDSDDPSVKELDVKDLEGVEVKDLDDEDLENLNLDTEDGKVVELDTLDNLETNDPNLDDLLRSGEFDIIAYTDPELDMGDKKSMFNEELDLPIDDKLDNQCVSVEPKKKEQENKTLVLSDKHSPQKKSTVTNEVKTEVLSPNSKVESKCETEKNDENKDNVDTPCSQASAHSDLNDGEKTSLHPCDPDLFEKRTNRETAGPSANVIQASTQLPAQDVINSCGITGSTPVLSSLLANEKSDNSDIRPSGSPPPPTLPASPSNHVSSLPPFIAPPGRVLDNAMNSNVTVVSRVNHVFSQGVQVNPGLIPGQSTVNHSLGTGKPATQTGPQTSQSGTSSMSGPQQLMIPQTLAQQNRERPLLLEEQPLLLQDLLDQERQEQQQQRQMQAMIRQRSEPFFPNIDFDAITDPIMKAKMVALKGINKVMAQNNLGMPPMVMSRFPFMGQVVTGTQNSEGQNLGPQAIPQDGSITHQISRPNPPNFGPGFVNDSQRKQYEEWLQETQQLLQMQQKYLEEQIGAHRKSKKALSAKQRTAKKAGREFPEEDAEQLKHVTEQQSMVQKQLEQIRKQQKEHAELIEDYRIKQQQQCAMAPPTMMPSVQPQPPLIPGATPPTMSQPTFPMVPQQLQHQQHTTVISGHTSPVRMPSLPGWQPNSAPAHLPLNPPRIQPPIAQLPIKTCTPAPGTVSNANPQSGPPPRVEFDDNNPFSESFQERERKERLREQQERQRIQLMQEVDRQRALQQRMEMEQHGMVGSEISSSRTSVSQIPFYSSDLPCDFMQPLGPLQQSPQHQQQMGQVLQQQNIQQGSINSPSTQTFMQTNERRQVGPPSFVPDSPSIPVGSPNFSSVKQGHGNLSGTSFQQSPVRPSFTPALPAAPPVANSSLPCGQDSTITHGHSYPGSTQSLIQLYSDIIPEEKGKKKRTRKKKRDDDAESTKAPSTPHSDITAPPTPGISETTSTPAVSTPSELPQQADQESVEPVGPSTPNMAAGQLCTELENKLPNSDFSQATPNQQTYANSEVDKLSMETPAKTEEIKLEKAETESCPGQEEPKLEEQNGSKVEGNAVACPVSSAQSPPHSAGAPAAKGDSGNELLKHLLKNKKSSSLLNQKPEGSICSEDDCTKDNKLVEKQNPAEGLQTLGAQMQGGFGCGNQLPKTDGGSETKKQRSKRTQRTGEKAAPRSKKRKKDEEEKQAMYSSTDTFTHLKQQLSLLPLMEPIIGVNFAHFLPYGSGQFNSGNRLLGTFGSATLEGVSDYYSQLIYKQNNLSNPPTPPASLPPTPPPMACQKMANGFATTEELAGKAGVLVSHEVTKTLGPKPFQLPFRPQDDLLARALAQGPKTVDVPASLPTPPHNNQEELRIQDHCGDRDTPDSFVPSSSPESVVGVEVSRYPDLSLVKEEPPEPVPSPIIPILPSTAGKSSESRRNDIKTEPGTLYFASPFGPSPNGPRSGLISVAITLHPTAAENISSVVAAFSDLLHVRIPNSYEVSSAPDVPSMGLVSSHRINPGLEYRQHLLLRGPPPGSANPPRLVSSYRLKQPNVPFPPTSNGLSGYKDSSHGIAESAALRPQWCCHCKVVILGSGVRKSFKDLTLLNKDSRESTKRVEKDIVFCSNNCFILYSSTAQAKNSENKESIPSLPQSPMRETPSKAFHQYSNNISTLDVHCLPQLPEKASPPASPPIAFPPAFEAAQVEAKPDELKVTVKLKPRLRAVHGGFEDCRPLNKKWRGMKWKKWSIHIVIPKGTFKPPCEDEIDEFLKKLGTSLKPDPVPKDYRKCCFCHEEGDGLTDGPARLLNLDLDLWVHLNCALWSTEVYETQAGALINVELALRRGLQMKCVFCHKTGATSGCHRFRCTNIYHFTCAIKAQCMFFKDKTMLCPMHKPKGIHEQELSYFAVFRRVYVQRDEVRQIASIVQRGERDHTFRVGSLIFHTIGQLLPQQMQAFHSPKALFPVGYEASRLYWSTRYANRRCRYLCSIEEKDGRPVFVIRIVEQGHEDLVLSDISPKGVWDKILEPVACVRKKSEMLQLFPAYLKGEDLFGLTVSAVARIAESLPGVEACENYTFRYGRNPLMELPLAVNPTGCARSEPKMSAHVKRPHTLNSTSTSKSFQSTVTGELNAPYSKQFVHSKSSQYRKMKTEWKSNVYLARSRIQGLGLYAARDIEKHTMVIEYIGTIIRNEVANRKEKLYESQNRGVYMFRMDNDHVIDATLTGGPARYINHSCAPNCVAEVVTFERGHKIIISSSRRIQKGEEVRV

SEQ ID NO: 24477 - protein, 101 aa, Homo sapiens
MGAMAKPDCIITCDSKNLTIKTESTLKTTQFSGTLGEKFEENTADGRRTQTVCNFTDGALVQHQEWDGKESTITRKLKDGKLVVERVMNHVACTRIYEKAQ

SEQ ID NO: 24478 - protein, 19 aa, Homo sapiens
VLCYYFYPSLFSMLICLEL

SEQ ID NO: 24479 - protein, 377 aa, Homo sapiens
LRAGLAGGGADGDGALSGCRRGRAPRVPSMAGSLPPCVVDCGTGYTKLGYAGNTEPQFIIPSCIAIRESAKVVDQAQRRVLRGVDDLDFFIGDEAIDKPTYATKWPIRHGIIEDWDLMERFMEQVVFKYLRAEPEDHYFLMTEPPLNTPENREYLAEIMFESFNVPGLYIAVQAVLALAASWTSRQVGERTLTGIVIDSGDGVTHVIPVAEGYVIGSCIKHIPIAGRDITYFIQQLLREREVGIPPEQSLETAKAIKEKYCYICPDIVKEFAKYDVDPRKWIKQYTGINAINQKKFVIDVGYERFLGPEIFFHPEFANPDFMESISDVVDEVIQNCPIDVRRPLYKPEFFQVCHTKKDYEEYGPSICRHNPVFGVMS

SEQ ID NO: 24480 - protein, 447 aa, Homo sapiens
LRAGLAGGGADGDGALSGCRRGRAPRVPSMAGSLPPCVVDCGTGYTKLGYAGNTEPQFIIPSCIAIRESAKVVDQAQRRVLRGVDDLDFFIGDEAIDKPTYATKWPIRHGIIEDWDLMERFMEQVVFKYLRAEPEDHYFLMTEPPLNTPENREYLAEIMFESFNVPGLYIAVQAVLALAASWTSRQVGERTLTGIVIDSGDGVTHVIPVAEGYVIGSCIKHIPIAGRDITYFIQQLLREREVGIPPEQSLETAKAIKEKYCYICPDIVKEFAKYDVDPRKWIKQYTGINAINQKKFVIDVGYERFLGPEIFFHPEFANPDFMESISDVVDEVIQNCPIDVRRPLYKNVVLSGGSTMFRDFGRRLQRDLKRVVDARLRLSEELSGGRIKPKPVEVQVVTHHMQRYAVWFGGSMLASTPEFFQVCHTKKDYEEYGPSICRHNPVFGVMS

SEQ ID NO: 24481 - protein, 769 aa, Homo sapiens
LPRWWEAPGQTMTTAKEPSASGKSVQQQEQELVGSNPPQRNWKGIAIALLVILVICSLIVTSVILLTPAEDNSLSQKKKVTVEDLFSEDFKIHDPEAKWISDTEFIYREQKGTVRLWNVETNTSTVLIEGKKIESLRAIRYEISPDREYALFSYNVEPIFIFENNIYYCAHVGKQAIRVVSTGKEGVIYNGLSDWLYEEEILKTHIAHWWSPDGTRLAYAAINDSRVPIMELPTYTGSIYPTVKPYHYPKAGSENPSISLHVIGLNGPTHDLEMMPPDDPRMREYYITMVKWATSTKVAVTWLNRAQNVSILTLCDATTGVCTKKHEDESEAWLHRQNEEPVFSKDGRKFFFIRAIPQGGRGKFYHITVSSSQPNSSNDNIQSITSGDWDVTKILAYDEKGNKIYFLSTEDLPRRRQLYSANTVGNFNRQCLSCDLVENCTYFSASFSHSMDFFLLKCEGPGVPMVTVHNTTDKKKMFDLETNEHVKKAINDRQMPKVEYRDIEIDDYNLPMQILKPATFTDTTHYPLLLVVDGTPGSQSVAEKFEVSWETVMVSSHGAVVVKCDGRGSGFQGTKLLHEVRRRLGLLEEKDQMEAVRTMLKEQYIDRTRVAVFGKDYGGYLSTYILPAKGENQGQTFTCGSALSPITDFKLYASAFSERYLGLHGLDNRAYEMTKVAHRVSALEEQQFLIIHPTADEKIHFQHTAELITQLIRGKANYSLQIYPDESHYFTSSSLKQHLYRSIINFFVECFRIQDKLLTVTAKEDEEED

SEQ ID NO: 24482 - protein, 27 aa, Homo sapiens
MTRNSCLKALNGGFNISPTEHEIHLLK

SEQ ID NO: 24483 - protein, 126 aa, Homo sapiens
LNLSPNLGDSKPESGLTKDARMSGEVSWMQAVCAGTRAPATDEVAGVHRSLLRSSRGFQGRLTRFLGRRFMTAEFLLEDPSSGSLIPQESSWKTRACEGSAAAPRQPDSQPRTAGVDMHGSLDAIS

SEQ ID NO: 24484 - protein, 1035 aa, Homo sapiens
MVFLQNHVRFFLESLPAFLRVLIQAGALCWSLPELSQGEVGKGACPAEVGKHRDHLPSSDPVLMQAEASVVMCWVSSEDRSALWALVTFYGGDCQLTLNKKCTHLIVPEPKGEKYECALKRASIKIVTPDWVLDCVSEKTKKDEAFYHPRLIIYEEEEEEEEEEEEVENEEQDSQNEGSTDEKSSPASSQEGSPSGDQQFSPKSNTEKSKGELMFDDSSDSSPEKQERNLNWTPAEVPQLAAAKRRLPQGKEPGLINLCANVPPVPGNILPPEVRGNLMAAGQNLQSSERSEMIATWSPAVRTLRNITNNADIQQMNRPSNVAHILQTLSAPTKNLEQQVNHSQQGHTNANAVLFSQVKVTPETHMLQQQQQAQQQQQQHPVLHLQPQQIMQLQQQQQQQISQQPYPQQPPHPFSQQQQQQQQAHPHQFSQQQLQFPQQQLHPPQQLHRPQQQLQPFQQQHALQQQFHQLQQHQLQQQQLAQLQQQHSLLQQQQQQQIQQQQLQRMHQQQQQQQMQSQTAPHLSQTSQALQHQVPPQQPPQQQQQQQPPPSPQQHQLFGHDPAVEIPEEGFLLGCVFAIADYPEQMSDKQLLATWKRIIQAHGGTVDPTFTSRCTHLLCESQVSSAYAQAIRERKRCVTAHWLNTVLKKKKMVPPHRALHFPVAFPPGGKPCSQHIISVTGFVDSDRDDLKLMAYLAGAKYTGYLCRSNTVLICKEPTGLKYEKAKEWRIPCVNAQWLGDILLGNFEALRQIQYSRYTAFSLQDPFAPTQHLVLNLLDAWRVPLKVSAELLMSIRLPPKLKQNEVANVQPSSKRARIEDVPPPTKKLTPELTPFVLFTGFEPVQVQQYIKKLYILGGEVAESAQKCTHLIASKVTRTVKFLTAISVVKHIVTPEWLEECFRCQKFIDEQNYILRDAEAEVLFSFSLEESLKRAHVSPLFKAKYFYITPGICPSLSTMKAIVECAGGKVLSKQPSFRKLMEHKQNSSLSEIILISCENDLHLCREYFARGIDVHNAEFVLTGVLTQTLDYESYKFN

SEQ ID NO: 24485 - protein, 548 aa, Homo sapiens
MHRLKCMVKAFFLTFCQVSSEDRSALWALVTFYGGDCQLTLNKKCTHLIVPEPKGEKYECALKRASIKIVTPDWVLDCVSEKTKKDEAFYHPRLIIYEEEEEEEEEEEEVENEEQDSQNEGSTDEKSSPASSQEGSPSGDQQFSPKSNTEKSKGELMFDDSSDSSPEKQERNLNWTPAEVPQLAAAKRRLPQGKEPGLINLCANVPPVPGNILPPEVRGNLMAAGQNLQSSERSEMIATWSPAVRTLRNITNNADIQQMNRPSNVAHILQTLSAPTKNLEQQVNHSQQGHTNANAVLFSQVKVTPETHMLQQQQQAQQQQQQHPVLHLQPQQIMQLQQQQQQQISQQPYPQQPPHPFSQQQQQQQQAHPHQFSQQQLQFPQQQLHPPQQLHRPQQQLQPFQQQHALQQQFHQLQQHQLQQQQLAQLQQQHSLLQQQQQQQIQQQQLQRMHQQQQQQQMQSQTAPHLSQTSQALQHQVPPQQPPQQQQQQQPPPSPQQHQLFGHDPAVEIPEEGFLLGCVFAIADYPEQMSDKQLLATWKRVRLCLEEG

SEQ ID NO: 24486 - protein, 11 aa, Homo sapiens
MTSATLFVLAW

SEQ ID NO: 24487 - protein, 29 aa, Homo sapiens
VKLLLIILSSRSAVLLVVERSKVTPKGFR

SEQ ID NO: 24488 - protein, 33 aa, Homo sapiens
VKLLLIILSSRSAVLLVVERSKVTPKEEAPFMC

SEQ ID NO: 24489 - protein, 55 aa, Homo sapiens
VKLLLIILSSRSAVLLVVERSKVTPKGEAEEYMKLKLTFADFDKSSLTIEDLILY

SEQ ID NO: 24490 - protein, 28 aa, Homo sapiens
MPHFFLLLFIIVHIRSFSVRHRKCSFPL

SEQ ID NO: 24491 - protein, 68 aa, Homo sapiens
MTFFGNLVATASVTSVFLKAVPAGLPCSSADVHSGLPFPVACGVRVAFFQPQMRRVCVIIETAFRNCG

SEQ ID NO: 24492 - protein, 465 aa, Homo sapiens
MGEMLLLARCLLLVLVSSLLVCSGLACGPGRGFGKRRHPKKLTPLAYKQFIPNVAEKTLGASGRYEGKISRNSERFKELTPNYNPDIIFKDEENTGADRLMTQRCKDKLNALAISVMNQWPGVKLRVTEGWDEDGHHSEESLHYEGRAVDITTSDRDRSKYGMLARLAVEAGFDWVYYESKAHIHCSVKAENSVAAKSGGCFPGSATVHLEQGGTKLVKDLSPGDRVLAADDQGRLLYSDFLTFLDRDDGAKKVFYVIETREPRERLLLTAAHLLFVAPHNDSATGEPEASSGSGPPSGGALGPRALFASRVRPGQRVYVVAERDGDRRLLPAAVHSVTLSEEAAGAYAPLTAQGTILINRVLASCYAVIEEHSWAHRAFAPFRLAHALLAALAPARTDRGGDSGGGDRGGGGGRVALTAPGAADAPGAGATAGIHWYSQLLYQIGTWLLDSEALHPLGMAVKSS

SEQ ID NO: 24493 - protein, 88 aa, Homo sapiens
MFPRCTDLLGKTREGHPRTPALPGRASPRIASWPLEPSLCILCCSSLGLHLGCGLDTLARCFPSLKDHSPALPVVRCLETIVFFGLIL

SEQ ID NO: 24494 - protein, 88 aa, Homo sapiens
LMGCLLLLLCTPVGLSRMFTVMGQLLVKPTILEDLDEQIYIITLEEEALQRRLNGLSSSVEYNIMELEQELENVKTLKTKLGIVLFFS

SEQ ID NO: 24495 - protein, 47 aa, Homo sapiens
LFLSTFTLAVSAGAVLLLPFSIISNEILLSFPQNYYIQWLNGSLIHG

SEQ ID NO: 24496 - protein, 1007 aa, Homo sapiens
LSAAGQAAGMGPPLPLLLLLLLLLPPRVLPAAPSSVPRGRQLPGRLDGVFGRCQKVPAMDFYRYEVSPVALQRLRVALQKLSGTGFTWQDDYTQYVMDQELADLPKTYLRRPEASSPARPSKHSVGSERRYSREGGAALANALRRHLPFLEALSQAPASDVLARTHTAQDRPPAEGDDRFSESILTYVAHTSALTYPPGSRTQLREDLLPRTLGQLQPDELSPKVDSGVDRHHLMAALSAYAAQRPPAPPGEGSLEPQYLLRAPSRMPRPLLAPAAPQKWPSPLGDSEDPSSTGDGARIHTLLKDLQRQPAEVRGLSGLELDGMAELMAGLMQGVDHGVARGSPGRAALGESGEQADGPKATLRGDSFPDDGVQDDDDRLYQEVHRLSATLGGLLQDHGSRLLPGALPFARPLDMERKKSEHPESSLSSEEETAGVENVKSQTYSKDLLGQQPHSEPGAAAFGELQNQMPGPSKEEQSLPAGAQEALSDGLQLEVQPSEEEARGYIVTDRDPLRPEEGRRLVEDVARLLQVPSSAFADVEVLGPAVTFKVSANVQNVTTEDVEKATVDNKDKLEETSGLKILQTGVGSKSKLKFLPPQAEQEDSTKFIALTLVSLACILGVLLASGLIYCLRHSSQHRLKEKLSGLGGDPGADATAAYQELCRQRMATRPPDRPEGPHTSRISSVSSQFSDGPIPSPSARSSASSWSEEPVQSNMDISTGHMILSYMEDHLKNKNRLEKEWEALCAYQAEPNSSFVAQREENVPKNRSLAVLTYDHSRVLLKAENSHSHSDYINASPIMDHDPRNPAYIATQGPLPATVADFWQMVWESGCVVIVMLTPLAENGVRQCYHYWPDEGSNLYHIYEVNLVSEHIWCEDFLVRSFYLKNLQTNETRTVTQFHFLSWYDRGVPSSSRSLLDFRRKVNKCYRGRSCPIIVHCSDGAGRSGTYVLIDMVLNKMAKGAKEIDIAATLEHLRDQRPGMVQTKEQFEFALTAVAEEVNAILKALPQ

SEQ ID NO: 24497 - protein, 322 aa, Homo sapiens
VLFLLLIYLLVFGQFCSEGKVYLSMLEDTGFWLESKILSFIQDQEEDYLKLHRVIYQQIIQTYLTVCKDVVMVGLGDHQFQMQLLQRSLGIMQTVKGFFYVSLLLDILKEITGSSLIQKTDSDEEVAMLLDTVQKVFQKMLECIARSFRKQPEEGLRLLYSVQRPLHEFITAVQSRHTDTPVHRGVLSTLIAGPVVEISHQLRKVSDVEELTPPEHLSDLPPFSRCLIGIIIKSSNVVRSFLDELKACVASNDIEGIVCLTAAVHIILVINAGKHKSSKVREVAATVHRKLKTFMEITLEEDSIERFLYESSSRTLGELLNS

SEQ ID NO: 24498 - protein, 894 aa, Homo sapiens
VMTPPSRAEAGVRRSRVPSEGRWRGAEPPGISASTQPASAGRAARHCGAMSGARGEGPEAGAGGAGGRAAPENPGGVLSVELPGLLAQLARSFALLLPVYALGYLGLSFSWVLLALALLAWCRRSRGLKALRLCRALALLEDEERVVRLGVRACDLPAWVHFPDTERAEWLNKTVKHMWPFICQFIEKLFRETIEPAVRGANTHLSTFSFTKVDVGQQPLRINGVKVYTENVDKRQIILDLQISFVGNCEIDLEIKRYFCRAGVKSIQIHGTMRVILEPLIGDMPLVGALSIFFLRKPLLEINWTGLTNLLDVPGLNGLSDTIILDIISNYLVLPNRITVPLVSEVQIAQLRFPVPKGVLRIHFIEAQDLQGKDTYLKGLVKGKSDPYGIIRVGNQIFQSRVIKENLSPKWNEVYEALVYEHPGQELEIELFDEDPDKDDFLGSLMIDLIEVEKERLLDEWFTLDEVPKGKLHLRLEWLTLMPNASNLDKVLTDIKADKDQANDGLSSALLILYLDSARNLPSGKKISSNPNPVVQMSVGHKAQESKIRYKTNEPVWEENFTFFIHNPKRQDLEVEVRDEQHQCSLGNLKVPLSQLLTSEDMTVSQRFQLSNSGPNSTIKMKIALRVLHLEKRERPPDHQHSAQVKRPSVSKEGRKTSIKSHMSGSPGPGGSNTAPSTPVIGGSDKPGMEEKAQPPEAGPQGLHDLGRSSSSLLASPGHISVKEPTPSIASDISLPIATQELRQRLRQLENGTTLGQSPLGQIQLTIRHSSQRNKLIVVVHACRNLIAFSEDGSDPYVRMYLLPDKRRSGRRKTHVSKKTLNPVFDQSFDFSVSLPEVQRRTLDVAVKNSGGFLSKDKGLLGKVLVALASEELAKGWTQWYDLTEDGTRPQAMT

SEQ ID NO: 24499 - protein, 41 aa, Homo sapiens [sequence omitted]

SEQ ID NO: 24500 - protein, 19 aa, Homo sapiens
LTFMFKFIFLLAHLGLLKP

SEQ ID NO: 24501 - protein, 53 aa, Homo sapiens
LLPIESKEIVNDALAAGKSTLNHGGGDRGPEGVGSPGSVGRVESRYQHRSRQR

SEQ ID NO: 24502 - protein, 96 aa, Homo sapiens
LKVLCTPEGIRLQCFMKYFTDEMKVNWCHKDAKISSSEHMRIGGSEEMAWLQICEPTEKDKGKYTFEIFDGKDNHQRSLDLSGQELLLLQRRIVAG

SEQ ID NO: 24503 - protein, 86 aa, Homo sapiens
MKTLMPMKGDSQASLPDSGKEMQPPPLDWRRTKVTLQSTVRCGRCQNCLWEMGFVLGLSASCNQSPGSQGLTCASLVEHRGGTRHK

SEQ ID NO: 24504 - protein, 52 aa, Homo sapiens
MIPIEWVCRRIATGSFLKRNPGVKEGYKFTHLKWSCFSRMLPIMTHSGLRNS

SEQ ID NO: 24505 - protein, 82 aa, Homo sapiens [sequence omitted]

SEQ ID NO: 24506 - protein, 54 aa, Homo sapiens [sequence omitted]

SEQ ID NO: 24507 - protein, 101 aa, Homo sapiens
MGASCIFLGPMTMLAWRGTWLTRPPHRWTSSQSLATGGLLAGETNIAGWSAKRVPRYGPADKWHSLRHSCGADRDRITEHNKYRASAAFMCLAGDSGSRGK

SEQ ID NO: 24508 - protein, 86 aa, Homo sapiens
MGASCIFLGPMTMLAWRGTWLTRPPHRWTSSQSLATGGLLAGETNIAGWSAKRVPRYGPADKWHSLRHSCGADRDRITEVGPLQSP

SEQ ID NO: 24509 - protein, 72 aa, Homo sapiens
LPVAMRTSYLLLFTLCLLLSEMASGGNFLTGLGHRSDHYNCVSSGGQCLYSACPIFTKIQGTCYRGKAKCCK

SEQ ID NO: 24510 - protein, 392 aa, Homo sapiens
LLSLAQAGDQGRRDKSLLLHSLCPPGSASAPWVPPRGRRWVRFLVTNQPRLMLASTPCPGDHIPHVPCQDCGPSGRLSSLLEVSDFPRASSSRSCASSQPVRAACPCLLLPLPLLPYHFFSSPSLSFSPACVLLSSISADPWTQLCGARTRRGRGTGSPCVSDAHVAALLFWASRRGVYSAEEQHSHLSTPSKKQLLPQQPTGAVRGTQCGLGLGVEAPRLSFTMCLFPQIAEGMAYIERMNSIHRDLRAANILVSEALCCKIADFGLARIIDSEYTAQEGAKFPIKWTAPEAIHFGVFTIKADVWSFGVLLMEVVTYGRVPYPGMSNPEVIRNLERGYRMPRPDTCPPELYRGVIAECWRSRPEERPTFEFLQSVLEDFYTATERQYELQP

SEQ ID NO: 24511 - protein, 20 aa, Homo sapiens
LWVMITVLLVAHGRAFSATV

SEQ ID NO: 24512 - protein, 292 aa, Homo sapiens
LRISVLPGRALVAWSGMDMNRRASCLLPDLCGQGWGWRLFPASCAYLGSVPWRVWGLGGLLAPLAAAGGGSTSGLGHLGSTQWSGELVVLLSEVFIRGCLFSCNGGYPAEAWNFWTRKGLVSGGLYESHVGCRPYSIPPCEHHVNGSRPPCTGEGDTPKCSKICEPGYSPTYKQDKHYGYNSYSVSNSEKDIMAEIYKNGPVEGAFSVYSDFLLYKSGVYQHVTGEMMGGHAIRILGWGVENGTPYWLVANSWNTDWGDNGFFKILRGQDHCGIESEVVAGIPRTDQYWEKI

SEQ ID NO: 24513 - protein, 164 aa, Homo sapiens
MWQLWASLCCLLVLANARSRPSFHPLSDELVNYVNKRNTTWQAGHNFYNVDMSYLKRLCGTFLGGPKPPQRVMFTEDLKLPASFDAREQWPQCPTIKEIRDQGSCGSCWVRPCWLAGKRWRESGSNTGESWGIRGGDNSDKASYRNFLSPSFHQYKNHNPSGHE

SEQ ID NO: 24514 - protein, 92 aa, Homo sapiens
LFLSMCLVTVLGNPLILLSVSPESHLHTPMYFFLSNLSLPDIGFTSTAVPKMIVDIQSHSRVISYAGRLTQMSLFAIFGGMEERHAPECDGL

SEQ ID NO: 24515 - protein, 27 aa, Homo sapiens
MGSVSNPETKKTTSWSVGIDYSNLIHF

SEQ ID NO: 24516 - protein, 363 aa, Homo sapiens
LGAHGYRAWRRHCPAAMGARGAPSRRRQAGRRLRYLPTGSFPFLLLLLLLCIQLGGGQKKKENLLAEKVEQLMEWSSRRSIFRMNGDKFRKFIKAPPRNYSMIVMFTALQPQRQCSVCRQANEEYQILANSWRYSSAFCNKLFFSMVDYDEGTDVFQQLNMNSAPTFMHFPPKGRPKRADTFDLQRIGFAAEQLAKWIADRTDVHIRVFRPPNYSGTIALALLVSLVGGLLYLRRNNLEFIYNKTGWAMVSLCIVFAMTSGQMWNHIRGPPYAHKNPHNGQVSYIHGSSQAQFVAESHIILVLNAAITMGMVLLNEAATSKGDVGKRRIICLVGLGLVVFFFSFLLSIFRSKYHGYPYSFLIK

SEQ ID NO: 24517 - protein, 205 aa, Homo sapiens
MKKIRQVIRKYNYVAMDTEFPGVVARPIGEFRSNADYQYQLLRCNVDLLKIIQLGLTFMNEQGEYPPGTSTWQFNFKFNLTEDMYAQDSIELLTTSGIQFKKHEEEGIETQYFAELLMTSGVVLCEGVKWLSFHSGYDFGYLIKILTNSNLPEEELDFFEILRLFFPVIYDVKYLMKSCKNLKVRLRMALSTAAHCSDQVTVMRA

SEQ ID NO: 24518 - protein, 683 aa, Homo sapiens
LQPAAHRRLLGATPTQPQSPSSDVRMIPCRAALTFARCLIRRKIVTLDSLEDTKLCRCLSTMDLIALGVGSTLGAGVYVLAGEVAKADSGPSIVVSFLIAALASVMAGLCYAEFGARVPKTGSAYLYTYVTVGELWAFITGWNLILSYVIGTSSVARAWSGTFDELLSKQIGQFLRTYFRMNYTGLAEYPDFFAVCLILLLAGLLSFGVKESAWVNKVFTAVNILVLLFVMVAGFVKGNVANWKISEEFLKNISASAREPPSENGTSIYGAGGFMPYGFTGTLAGAATCFYAFVGFDCIATTGEEVRNPQKAIPIGIVTSLLVCFMAYFGVSAALTLMMPYYLLDEKSPLPVAFEYVGWGPAKYVVAAGSLCALSTSLLGSIFPMPRVIYAMAEDGLLFKCLAQINSKTKTPIIATLSSGAVAALMAFLFDLKALVDMMSIGTLMAYSLVAACVLILRYQPGLSYDQPKCSPEKDGLGSSPRVTSKSESQVTMLQRQGFSMRTLFCPSLLPTQQSASLVSFLVGFLAFLVLGLSVLTTYGVHAITRLEAWSLALLALFLVLFVAIVLTIWRQPQNQQKVAFMVPFLPFLPAFSILVNIYLMVQLSADTWVRFSIWMAIGFLIYFSYGIRHSLEGHLRDENNEEDAYPDNVHAAAEEKSAIQANDHHPRNLSSPFIFHEKTSEF

SEQ ID NO: 24519 - protein, 18 aa, Homo sapiens
MIILIDHLLQRTCESLHP

SEQ ID NO: 24520 - protein, 34 aa, Homo sapiens
MQKSYFLMIISAFEPLLPPLLLLFLISLTQRVNC

SEQ ID NO: 24521 - protein, 324 aa, Homo sapiens
MLKVIVNSLKNMINTFVPSGKIMQVVDEKLPGLLGNFPGPFEEEMKGIAAVTDIPLGEIISFNIFYELFTICTSIVAEDKKGHLIHGRNMDFGVFLGWNINNDTWVITEQLKPLTVNLDFQRNNKTVFKASSFAGYVGMLTGFKPGLFSLTLNERFSINGGYLGILEWILGKKDVMWIGFLTRTVLENSTSYEEAKNLLTKTKILAPAYFILGGNQSGEGCVITRDRKESLDVYELDAKQGRWYVVQTNYDRWKHPFFLDDRRTPAKMCLNRTSQENISFETMYDVLSTKPVLNKLTVYTTLIDVTKGQFETYLRDCPDPCIGW

SEQ ID NO: 24522 - protein, 379 aa, Homo sapiens
LAARAMPGRSCVALVLLAAAVSCAVAQHAPPWTEDCRKSTYPPSGPTYRGAVPWYTINLDLPPYKRWHELMLDKAPVLKVIVNSLKNMINTFVPSGKIMQVVDEKLPGLLGNFPGPFEEEMKGIAAVTDIPLEDKKGHLIHGRNMDFGVFLGWNINNDTWVITEQLKPLTVNLDFQRNNKTVFKASSFAGYVGMLTGFKPGLFSLTLNERFSINGGYLGILEWILGKKDVMWIGFLTRTVLENSTSYEEAKNLLTKTKILAPAYFILGGNQSGEGCVITRDRKESLDVYELDAKQGRWYVVQTNYDRWKHPFFLDDRRTPAKMCLNRTSQENISFETMYDVLSTKPVLNKLTVYTTLIDVTKGQFETYLRDCPDPCIGW

SEQ ID NO: 24523 - protein, 293 aa, Homo sapiens
LAARAMPGRSCVALVLLAAAVSCAVAQHAPPWTEDCRKSTYPPSGPTYRGAVPWYTINLDLPPYKRWHELMLDKAPVLKVIVNSLKNMINTFVPSGKIMQVVDEKLPGLLGNFPGPFEEEMKGIAAVTDIPLGILEWILGKKDVMWIGFLTRTVLENSTSYEEAKNLLTKTKILAPAYFILGGNQSGEGCVITRDRKESLDVYELDAKQGRWYVVQTNYDRWKHPFFLDDRRTPAKMCLNRTSQENISFETMYDVLSTKPVLNKLTVYTTLIDVTKGQFETYLRDCPDPCIGW

SEQ ID NO: 24524 - protein, 377 aa, Homo sapiens
VALAARAMPGRSCVALVLLAAAVSCAVAQHAPPWTEDCRKSTYPPSGPTYRGAVPWYTINLDLPPYKRWHELMLDKAPVLKVIVNSLKNMINTFVPSGKIMQVVDEKLPGLLGNFPGPFEEEMKGIAAVTDIPLGHLIHGRNMDFGVFLGWNINNDTWVITEQLKPLTVNLDFQRNNKTVFKASSFAGYVGMLTGFKPGLFSLTLNERFSINGGYLGILEWILGKKDVMWIGFLTRTVLENSTSYEEAKNLLTKTKILAPAYFILGGNQSGEGCVITRDRKESLDVYELDAKQGRWYVVQTNYDRWKHPFFLDDRRTPAKMCLNRTSQENISFETMYDVLSTKPVLNKLTVYTTLIDVTKGQFETYLRDCPDPCIGW

SEQ ID NO: 24525 - protein, 382 aa, Homo sapiens
VALAARAMPGRSCVALVLLAAAVSCAVAQHAPPWTEDCRKSTYPPSGPTYRGAVPWYTINLDLPPYKRWHELMLDKAPVLKVIVNSLKNMINTFVPSGKIMQVVDEKLPGLLGNFPGPFEEEMKGIAAVTDIPLAEDKKGHLIHGRNMDFGVFLGWNINNDTWVITEQLKPLTVNLDFQRNNKTVFKASSFAGYVGMLTGFKPGLFSLTLNERFSINGGYLGILEWILGKKDVMWIGFLTRTVLENSTSYEEAKNLLTKTKILAPAYFILGGNQSGEGCVITRDRKESLDVYELDAKQGRWYVVQTNYDRWKHPFFLDDRRTPAKMCLNRTSQENISFETMYDVLSTKPVLNKLTVYTTLIDVTKGQFETYLRDCPDPCIGW

SEQ ID NO: 24526 - protein, 373 aa, Homo sapiens
VALAARAMPGRSCVALVLLAAAVSCAVAQHAPPWTEDCRKSTYPPSGPTYRGAVPWYTINLDLPPYKRWHELMLDKAPVPGLLGNFPGPFEEEMKGIAAVTDIPLGEIISFNIFYELFTICTSIVAEDKKGHLIHGRNMDFGVFLGWNINNDTWVITEQLKPLTVNLDFQRNNKTVFKASSFAGYVGMLTGFKPGLFSLTLNERFSINGGYLGILEWILGKKDVMWIGFLTRTVLENSTSYEEAKNLLTKTKILAPAYFILGGNQSGEGCVITRDRKESLDVYELDAKQGRWYVVQTNYDRWKHPFFLDDRRTPAKMCLNRTSQENISFETMYDVLSTKPVLNKLTVYTTLIDVTKGQFETYLRDCPDPCIGW

SEQ ID NO: 24527 - protein, 409 aa, Homo sapiens
VKLPAPPTGRGSGSVRLLPAVGEGDGSRHAPKAIATLLLQWTEDCRKSTYPPSGPTYRGAVPWYTINLDLPPYKRWHELMLDKAPVLKVIVNSLKNMINTFVPSGKIMQVVDEKLPGLLGNFPGPFEEEMKGIAAVTDIPLGEIISFNIFYELFTICTSIVAEDKKGHLIHGRNMDFGVFLGWNINNDTWVITEQLKPLTVNLDFQRNNKTVFKASSFAGYVGMLTGFKPGLFSLTLNERFSINGGYLGILEWILGKKDVMWIGFLTRTVLENSTSYEEAKNLLTKTKILAPAYFILGGNQSGEGCVITRDRKESLDVYELDAKQGRWYVVQTNYDRWKHPFFLDDRRTPAKMCLNRTSQENISFETMYDVLSTKPVLNKLTVYTTLIDVTKGQFETYLRDCPDPCIGW

SEQ ID NO: 24528 - protein, 365 aa, Homo sapiens
VGCYISVETLWIRFVGTEDAWWTEDCRKSTYPPSGPTYRGAVPWYTINLDLPPYKRWHELMLDKAPVLKVIVNSLKNMINTFVPSGKIMQVVDEKLPGLLGNFPGPFEEEMKGIAAVTDIPLGHLIHGRNMDFGVFLGWNINNDTWVITEQLKPLTVNLDFQRNNKTVFKASSFAGYVGMLTGFKPGLFSLTLNERFSINGGYLGILEWILGKKDVMWIGFLTRTVLENSTSYEEAKNLLTKTKILAPAYFILGGNQSGEGCVITRDRKESLDVYELDAKQGRWYVVQTNYDRWKHPFFLDDRRTPAKMCLNRTSQENISFETMYDVLSTKPVLNKLTVYTTLIDVTKGQFETYLRDCPDPCIGW

SEQ ID NO: 24529 - protein, 247 aa, Homo sapiens
VALAARAMPGRSCVALVLLAAAVSCAVAQHAPPWTEDCRKSTYPPSGPTYRGAVPWYTINLDLPPYKRWHELMLDKAPVLKVIVNSLKNMINTFVPSGKIMQVVDEKLPGLLGNFPGPFEEEMKGIAAVTDIPLGEIISFNIFYELFTICTSIVAEDKKGHLIHGRNMDFGVFLGWNINNDTWVITEQLKPLTVNLDFQRNNKTVFKASSFAGYVGMLTGFKPVRSLLLHNYTGSLLSCYRYVKVEI

SEQ ID NO: 24530 - protein, 172 aa, Homo sapiens
VKLPAPPTGRGSGSVRLLPAVGEGDGSRHAPKAIATLLLQWTEDCRKSTYPPSGPTYRGAVPWYTINLDLPPYKRWHELMLDKAPVLKVIVNSLKNMINTFVPSGKIMQVVDEKLPGLLGNFPGPFEEEMKGIAAVTDIPLGEIISFNIFYELFTICTSIVAEDKKDYCTAY

SEQ ID NO: 24531 - protein, 178 aa, Homo sapiens
LAARAMPGRSCVALVLLAAAVSCAVAQHAPPWTEDCRKSTYPPSGPTYRGAVPWYTINLDLPPYKRWHELMLDKAPVLKVIVNSLKNMINTFVPSGKIMQVVDEKLPGLLGNFPGPFEEEMKGIAAVTDIPLGEIISFNIFYELFTICTSIVAEDKKGNCALREGGQHEALHKEKSSK

SEQ ID NO: 24532 - protein, 118 aa, Homo sapiens
VALAARAMPGRSCVALVLLAAAVSCAVAQHAPPWTEDCRKSTYPPSGPTYRGAVPWYTINLDLPPYKRWHELMLDKAPVLKVIVNSLKNMINTFVPSGKIMQVVDEKLVRDIISHNKC

SEQ ID NO: 24533 - protein, 69 aa, Homo sapiens
VALAARAMPGRSCVALVLLAAAVSCAVAQHAPPWTEDCRKSTYPPSGPTYRGAVPWYTINLDLPPYKRC

SEQ ID NO: 24534 - protein, 49 aa, Homo sapiens
VALAARAMPGRSCVALVLLAAAVSCAVAQHAPPWTEDCRKSTYPPSGPT

SEQ ID NO: 24535 - protein, 86 aa, Homo sapiens
LAARAMPGRSCVALVLLAAAVSCAVAQHAPPVSELEPRRREGRAGAGADGGAGVAARAVDRGLQKINLSSFRTNVQRCSSMVHHKS

SEQ ID NO: 24536 - protein, 80 aa, Homo sapiens
LAARAMPGRSCVALVLLAAAVSCAVAQHAPPVSELEPRRREGRAGAGADGGAVDRGLQKINLSSFRTNVQRCSSMVHHKS

SEQ ID NO: 24537 - protein, 74 aa, Homo sapiens
VALAARAMPGRSCVALVLLAAAVSCAVAQHAPPVSELEPRRREGRAVDRGLQKINLSSFRTNVQRCSSMVHHKS

SEQ ID NO: 24538 - protein, 39 aa, Homo sapiens
LAIIAYRSLMITMFLEFKPGRSSNLSSGLKLKINLLSTY

SEQ ID NO: 24539 - protein, 82 aa, Homo sapiens
LTICRSGPDLPLVVRPIQLLLLLWLCEEVPSCCWLHIRKAVMGMKVKTWRFHFSHCFCLQDHPLKVEKLLCVVVNSKRQNSF

SEQ ID NO: 24540 - protein, 1344 aa, Homo sapiens
MSRGKVIRLHRRKQDNISGGDSSATESWDEELSPSTVLYTATQHTPTSITLTVRRTKPKKRKKSPEKGRAAPKTKKIKAFREGSRKSLRMKNSPSEAQNLDENTTEGWENRIRLWTDQYEEAFTNQYSADVQNALEQHLHSSKEFVGKPTILDTINKTELACNNTVIGSQMQLQLGRVTRVQKHRKILRAARDLALDTLIIEYRGKVMLRQQFEVNGHFFKKPYPFVLFYSKFNGVEMCVDARTFGNDARFIRRSCTPNAEVRHMIADGMIHLCIYAVSAITKDAEVTIAFDYEYSNCNYKVDCACHKGNRNCPIQKRNPNATELPLLPPPPSLPTIGAETRRRKARRKELEMEQQNEASEENNDQQSQEVPEKVTVSSDHEEVDNPEEKPEEEKEEVIDDQENLAHSRRTREDRKVEAIMHAFENLEKRKKRRDQPLEQSNSDVEITTTTSETPVGEETKTEAPESEVSNSVSNVTIPSTPQSVGVNTRRSSQAGDIAAEKLVPKPPPAKPSRPRPKSRISRYRTSSAQRLKRQKQANAQQAELSQAALEEGGSNSLVTPTEAGSLDSSGENRPLTGSDPTVVSITGSHVNRAASKYPKTKKYLVTEWLNDKAEKQECPVECPLRITTDPTVLATTLNMLPGLIHSPLICTTPKHYIRFGSPFIPERRRRPLLPDGTFSSCKKRWIKQALEEGMTQTSSVPQETRTQHLYQSNENSSSSSICKDNADLLSPLKKWKSRYLMEQNVTKLLRPLSPVTPPPPNSGSKSPQLATPGSSHPGEEECRNGYSLMFSPVTSLTTASRCNTPLQFELCHRKDLDLAKVGYLDSNTNSCADRPSLLNSGHSDLAPHPSLGPTSETGFPSRSGDGHQTLVRNSDQAFRTEFNLMYAYSPLNAMPRADGLYRGSPLVGDRKPLHLDGGYCSPAEGFSSRYEHGLMKDLSRGSLSPGGERACEGVPSAPQNPPQRKKVSLLEYRKRKQEAKENSAGGGGDSAQSKSKSAGAGQGSSNSVSDTGAHGVQGSSARTPSSPHKKFSPSHSSMSHLEAVSPSDSRGTSSSHCRPQENISSRWMVPTSVERLREGGSIPKVLRSSVRVAQKGEPSPTWESNITEKDSDPADGEGPETLSSALSKGATVYSPSRYSYQLLQCDSPRTESQSLLQQSSSPFRGHPTQSPGYSYRTTALRPGNPPSHGSSESSLSSTSYSSPAHPVSTDSLAPFTGTPGYFSSQPHSGNSTGSNLPRRSCPSSAASPTLQGPSDSPTSDSVSQSSTGTLSSTSFPQNSRSSLPSDLRTISLPSAGQSAVYQASRVSAVSNSQHYPHRGSGGVHQYRLQPLQGSGVKTQTGLS

SEQ ID NO: 24541 - protein, 97 aa, Homo sapiens
VAAAAAVAAVAAESPEPDVPAASGWRLESARVMSAQGDCEFLVQRARELVPQDLWAAKAWLITARSLYPADFNIQEGQRAMLDELGAFWAGVSDQGA

SEQ ID NO: 24542 - protein, 99 aa, Homo sapiens
MESKALLVLTLAVWLQSLTASRGGVAAADQRRDFIDIESKFALRTPEDTAEDTCHLIPGVAESVATCHFNHSSKTFMVIHGWTVREALWGRVDWGGEVS

SEQ ID NO: 24543 - protein, 85 aa, Homo sapiens [sequence omitted]

SEQ ID NO: 24544 - protein, 32 aa, Homo sapiens
LITVLLFGSLRPYLSTPSRVPVSEVIMLWSLH

SEQ ID NO: 24545 - protein, 196 aa, Homo sapiens
MILANVFCLFFFLDETLRSLASPSSLQGPELHGWRPPVDCVRANELCAAESNCSSRYRTLRQCLAGRDRNTMLANKECQAALEVLQESPLYDCRCKRGMKKELQCLQIYWSIHLGLTEEMGSRYVAQAYLKLPGSSSTPTLVSQSSGLTGGAFSLATWIPRTSMSKGRNTVLRVLHSILQEIRRCLHPEPDSVAYK

SEQ ID NO: 24546 - protein, 163 aa, Homo sapiens
VPLFTLLTLVSQTSLDESTPAKKTDIPWRLKQMLDILVYEEQQQAAAGEAGPCLEYLLQHKILETLCTLGKAEVGGPLRAGPGRGGRPLRAWPGRGGRPLCAGPGRGGRPSECWARLRWAVGSGQPGAPWIPGLSAYALPSPDTESGSSGERSKQDGHCGCLT

SEQ ID NO: 24547 - protein, 1111 aa, Homo sapiens
LARGPARPSTVPAPRGAELGRKPALQRAHFPKKGGGSRREGGRERKKERKRRKGRGRRLEPEDERGAADRAGGGRQEGGRRAEGRGRGRGARAGAVAVAIEQASGREDALPWPPVRRFPRRRPASMPGVARLPLLLGLLLLPRPGRPLDLADYTYDLAEEDDSEPLNYKDPCKAAAFLGDIALDEEDLRAFQVQQAVDLRRHTARKSSIKAAVPGNTSTPSCQSTNGQPQRGACGRWRGRSRSRRAATSRPERVWPDGVIPFVIGGNFTGSQRAVFRQAMRHWEKHTCVTFLERTDEDSYIVFTYRPCGCCSYVGRRGGGPQAISIGKNCDKFGIVVHELGHVVGFWHEHTRPDRDRHVSIVRENIQPGQEYNFLKMEPQEVESLGETYDFDSIMHYARNTFSRGIFLDTIVPKYEVNGVKPPIGQRTRLSKGDIAQARKLYKCPACGETLQDSTGNFSSPEYPNGYSAHMHCVWRISVTPGEKIILNFTSLDLYRSRLCWYDYVEVRDGFWRKAPLRGRFCGSKLPEPIVSTDSRLWVEFRSSSNWVGKGFFAVYEAICGGDVKKDYGHIQSPNYPDDYRPSKVCIWRIQVSEGFHVGLTFQSFEIERHDSCAYDYLEVRDGHSESSTLIGRYCGYEKPDDIKSTSSRLWLKFVSDGSINKAGFAVNFFKEVDECSRPNRGGCEQRCLNTLGSYKCSCDPGYELAPDKRRCEAACGGFLTKLNGSITSPGWPKEYPPNKNCIWQLVAPTQYRISLQFDFFETEGNDVCKYDFVEVRSGLTADSKLHGKFCGSEKPEVITSQYNNMRVEFKSDNTVSKKGFKAHFFSDKDECSKDNGGCQQDCVNTFGSYECQCRSGFVLHDNKHDCKEAGCDHKVTSTSGTITSPNWPDKYPSKKECTWAISSTPGHRVKLTFMEMDIESQPECAYDHLEVFDGRDAKAPVLGRFCGSKKPEPVLATGSRMFLRFYSDNSVQRKGFQASHATECGGQVRADVKTKDLYSHAQFGDNNYPGGVDCEWVIVAEEGYGVELVFQTFEVEEETDCGYDYMELFDGYDSTAPRLGRYCGSGPPEEVYSAGDSVLVKFHSDDTITKKGFHLRYTSTKFQDTLHSRK

SEQ ID NO: 24548 - protein, 256 aa, Homo sapiens
LEPEDERGAADRAGGGRQEGGRRAEGRGRGRGARAGAVAVAIEQASGREDALPWPPVRRFPRRRPASMPGVARLPLLLGLLLLPRPGRPLDLADYTYDLAEEDDSEPLNYKDPCKAAAFLGDIALDEEDLRAFQVQQAVDLRRHTARKSSIKAAVPGNTSTPSCQSTNGQPQRGACGRWRGRSRSRRAATSRPERVWPDGVIPFVIGGNFTGSQRAVFRQAMRHWEKHTCVTFLERTDEDSYIVFTYRPCGSGPPP

SEQ ID NO: 24549 - protein, 369 aa, Homo sapiens
LEPEDERGAADRAGGGRQEGGRRAEGRGRGRGARAGAVAVAIEQASGREDALPWPPVRRFPRRRPASMPGVARLPLLLGLLLLPRPGRPLDLADYTYDLAEEDDSEPLNYKDPCKAAAFLGDIALDEEDLRAFQVQQAVDLRRHTARKSSIKAAVPGNTSTPSCQSTNGQPQRGACGRWRGRSRSRRAATSRPERVWPDGVIPFVIGGNFTGSQRAVFRQAMRHWEKHTCVTFLERTDEDSYIVFTYRPCGCCSYVGRRGGGPQAISIGKNCDKFGIVVHELGHVVGFWHEHTRPDRDRHVSIVRENIQPGVLHSSLLLLSCGSRNGASFPCSLESSIHQALCWTGLFLRPSPFPRLPLAAPRTLRAGV

SEQ ID NO: 24550 - protein, 797 aa, Homo sapiens
LEPEDERGAADRAGGGRQEGGRRAEGRGRGRGARAGAVAVAIEQASGREDALPWPPVRRFPRRRPASMPGVARLPLLLGLLLLPRPGRPLDLADYTYDLAEEDDSEPLNYKDPCKAAAFLGDIALDEEDLRAFQVQQAVDLRRHTARKSSIKAAVPGNTSTPSCQSTNGQPQRGACGRWRGRSRSRRAATSRPERVWPDGVIPFVIGGNFTGSQRAVFRQAMRHWEKHTCVTFLERTDEDSYIVFTYRPCGCCSYVGRRGGGPQAISIGKNCDKFGIVVHELGHVVGFWHEHTRPDRDRHVSIVRENIQPGQEYNFLKMEPQEVESLGETYDFDSIMHYARNTFSRGIFLDTIVPKYEVNGVKPPIGQRTRLSKGDIAQARKLYKCPACGETLQDSTGNFSSPEYPNGYSAHMHCVWRISVTPGEKIILNFTSLDLYRSRLCWYDYVEVRDGFWRKAPLRGRFCGSKLPEPIVSTDSRLWVEFRSSSNWVGKGFFAVYEAICGGDVKKDYGHIQSPNYPDDYRPSKVCIWRIQVSEGFHVGLTFQSFEIERHDSCAYDYLEVRDGHSESSTLIGRYCGYEKPDDIKSTSSRLWLKFVSDGSINKAGFAVNFFKEVDECSRPNRGGCEQRCLNTLGSYKCSCDPGYELAPDKRRCEAACGGFLTKLNGSITSPGWPKEYPPNKNCIWQLVAPTQYRISLQFDFFETEGNDVCKYDFVEVRSGLTADSKLHGKFCGSEKPEVITSQYNNMRVEFKSDNTVSKKGFKAHFFSEKRPALQPPRGRPHQLKFRVQKRNRTPQ

SEQ ID NO: 24551 - protein, 72 aa, Homo sapiens
VRRFPRRRPASMPGVARLPLLLGLLLLPRPGRPLDLADYTYDLAEEDDSEPLNYKDPCKLPFLGTLPWTKRT

SEQ ID NO: 24552 - protein, 142 aa, Homo sapiens
LQAAFLGDIALDEEDLRAFQVQQAVDLRRHTARKSSIKAAVPGNTSTPSCQSTNGQPQRGACGRWRGRSRSRRAATSRPERVWPDGVIPFVIGGNFTGSQRAVFRQAMRHWEKHTCVTFLERTDEDSYIVFTYRPCGSGPPP

SEQ ID NO: 24553 - protein, 180 aa, Homo sapiens
LHSSLGDRVRLHFKKKKKERYNTSLSVEAFVWQMHIYVNFAAFLGDIALDEEDLRAFQVQQAVDLRRHTARKSSIKAAVPGNTSTPSCQSTNGQPQRGACGRWRGRSRSRRAATSRPERVWPDGVIPFVIGGNFTGSQRAVFRQAMRHWEKHTCVTFLERTDEDSYIVFTYRPCGSGPPP

SEQ ID NO: 24554 - protein, 749 aa, Homo sapiens
LLPGPSGQEYNFLKMEPQEVESLGETYDFDSIMHYARNTFSRGIFLDTIVPKYEVNGVKPPIGQRTRLSKGDIAQARKLYKCPACGETLQDSTGNFSSPEYPNGYSAHMHCVWRISVTPGEKIILNFTSLDLYRSRLCWYDYVEVRDGFWRKAPLRGRFCGSKLPEPIVSTDSRLWVEFRSSSNWVGKGFFAVYEAICGGDVKKDYGHIQSPNYPDDYRPSKVCIWRIQVSEGFHVGLTFQSFEIERHDSCAYDYLEVRDGHSESSTLIGRYCGYEKPDDIKSTSSRLWLKFVSDGSINKAGFAVNFFKEVDECSRPNRGGCEQRCLNTLGSYKCSCDPGYELAPDKRRCEAACGGFLTKLNGSITSPGWPKEYPPNKNCIWQLVAPTQYRISLQFDFFETEGNDVCKYDFVEVRSGLTADSKLHGKFCGSEKPEVITSQYNNMRVEFKSDNTVSKKGFKAHFFSDKDECSKDNGGCQQDCVNTFGSYECQCRSGFVLHDNKHDCKEAGCDHKVTSTSGTITSPNWPDKYPSKKECTWAISSTPGHRVKLTFMEMDIESQPECAYDHLEVFDGRDAKAPVLGRFCGSKKPEPVLATGSRMFLRFYSDNSVQRKGFQASHATECGGQVRADVKTKDLYSHAQFGDNNYPGGVDCEWVIVAEEGYGVELVFQTFEVEEETDCGYDYMELFDGYDSTAPRLGRYCGSGPPEEVYSAGDSVLVKFHSDDTITKKGFHLRYTSTKFQDTLHSRK

SEQ ID NO: 24555 - protein, 124 aa, Homo sapiens
LGPAQLVLLDAVPLWTPLSPGLPLPATWPGQLCQLLLCPGGRKSSQASTSPGASQPQPCTDPASALICSPADKDECSKDNGGCQQDCVNTFGSYECQCRSGFVLHDNKHDCKEDLHGDGHRVPA

SEQ ID NO: 24556 - protein, 355 aa, Homo sapiens
LGPAQLVLLDAVPLWTPLSPGLPLPATWPGQLCQLLLCPGGRKSSQASTSPGASQPQPCTDPASALICSPADKDECSKDNGGCQQDCVNTFGSYECQCRSGFVLHDNKHDCKEAGCDHKVTSTSGTITSPNWPDKYPSKKECTWAISSTPGHRVKLTFMEMDIESQPECAYDHLEVFDGRDAKAPVLGRFCGSKKPEPVLATGSRMFLRFYSDNSVQRKGFQASHATECGGQVRADVKTKDLYSHAQFGDNNYPGGVDCEWVIVAEEGYGVELVFQTFEVEEETDCGYDYMELFDGYDSTAPRLGRYCGSGPPEEVYSAGDSVLVKFHSDDTITKKGFHLRYTSTKFQDTLHSRK

SEQ ID NO: 24557 - protein, 537 aa, Homo sapiens
VRGVGARVYADAPAKLLLPPPAAWDLAVRLRGAEAASERQVYSVTMKLLLLHPAFQSCLLLTLLGLWRTTPEAHASSLGAPAISAASFLQDLIHRYGEGDSLTLQQLKALLNHLDVGVGRGNVTQHVQGHRNLSTCFSSGDLFTAHNFSEQSRIGSSELQEFCPTILQQLDSRACTSENQENEENEQTEEGRPSAVEVWGFGFLSVSLINLASLLGVLVLPCTEKAFFSRVLTYFIALSIGTLLSNALFQLIPEAFGFNPLEDYYVSKSAVVFGGFYLFFFTEKILKILLKQKNEHHHGHSHYASESLPSKKDQEEGVMEKLQNGDLDHMIPQHCSSELDGKAPMVDEKVIVGSLSVQDLQASQSACYWLKGVRYSDIGTLAWMITLSDGLHNFIDGLAIGASFTVSVFQGISTSVAILCEEFPHELGDFVILLNAGMSIQQALFFNFLSACCCYLGLAFGILAGSHFSANWIFALAGGMFLYISLADMFPEMNEVCQEDERKGSILIPFIIQNLGLLTGFTIMVVLTMYSGQIQIG

SEQ ID NO: 24558 - protein, 526 aa, Homo sapiens
VRGVGARVYADAPAKLLLPPPAAWDLAVRLRGAEAASERQVYSVTMKLLLLHPAFQSCLLLTLLGLWRTTPEAHASSLGAPAISAASFLQDLIHRYGEGDSLTLQQLKALLNHLDVGVGRGNVTQHVQGHRNLSTCFSSGDLFTAHNFSEQSRIGSSELQEFCPTILQQLDSRACTSENQENEENEQTEEGRPSAVEVWGYGLLCVTVISLCSLLGASVVPFMKKTFYKRLLLYFIALAIGTLYSNALFQLIPEAFGFNPLEDYYVSKSAVVFGGFYLFFFTEKILKILLKQKNEHHHGHSHYASESLPSKKDQEEGVMEKLQNGDLDHMIPQHCSSELDGKAPMVDEKVIVGSLSVQDLQASQSACYWLKGVRYSDIGTLAWMITLSDGLHNFIDGLAIGASFTVSVFQGISTSVAILCEEFPHELGDFVILLNAGMSIQQALFFNFLSACCCYLGLAFGILAGSHFSANWIFALAGGMFLYISLADMMEFCSVAQAGVQWCHLSSLQPLPLGLKRLSCLSLPSN

SEQ ID NO: 24559 - protein, 32 aa, Homo sapiens
LWDWKSGPGLPDRQPEDLPSTMHHGRGRSMKN

SEQ ID NO: 24560 - protein, 17 aa, Homo sapiens
LPLRRPGALALLFTVDL

SEQ ID NO: 24561 - protein, 26 aa, Homo sapiens
LLRELWCPLLLPLAPLLLPYSAPRAG

SEQ ID NO: 24562 - protein, 59 aa, Homo sapiens
LGGCCGWWALTTCLSALPPGGTPAFLPSSLSPQSSLPASRALATPPKLHTCEKCSTSIA

SEQ ID NO: 24563 - protein, 139 aa, Homo sapiens
LVASPRLCWETRRWRLLRPERRARERGSRRVARSRFRVWSARELPSHQPVEETTGRASGERAHTVSSPAPASSIFPGLAWRVLADVFERRNVIGALSSPSPRQLLWGWRGIVRGALSCWEAWVLFPTTLKEDSVPNVPV

SEQ ID NO: 24564 - protein, 72 aa, Homo sapiens
LGPSPAPQKREDPLSWPIPSLLPSPLPPNFPSRMLFPCTTDRLSDAACLEAALGASGGGGGGGGGGGSSGVL

SEQ ID NO: 24565 - protein, 131 aa, Homo sapiens
VPMGWTMRLVTAALLLGLMMVVTGDEDENSPCAHEALLDEDTLFCQGLEVFYPELGNIGCKVVPDCNNYRQKITSWMEPIVKFPGAVDGATYILVMVDPDAPSRAEPRQRFWRHWLVTDIKMGKAEPREVE

SEQ ID NO: 24566 - protein, 87 aa, Homo sapiens
MAAIQSQLEINRGLWALMVPSSRMKVTSVQKKHHRRTGERSWENKPQGEPRSLLLNPEDSGHGTNPLPAGENQASRAWQPQLQDTRS

SEQ ID NO: 24567 - protein, 130 aa, Homo sapiens
LRCCHPLLTLLLLSPSAFTPLLFRITPSTLQGPGGPRNQDPEGGALLTSHRGSAREELSPVEQNGNHLQRSPDPKQDGRQLLGGAKSPGILSLGLRALESKGKPPSLQGFSVCLGCCSGQGGSPTPSKQK

SEQ ID NO: 24568 - protein, 55 aa, Homo sapiens
LRLYQLFFSFIFSSHFFLVLVPCVLHDIVPRVTETRFLVFFQFHFPLHFRWNDIY

SEQ ID NO: 24569 - protein, 59 aa, Homo sapiens
LVWSVFWIFTILIEIHGSIRVVRAPLAPLCGYSPVPFSEATGQKPLYNALPNSRILKET

SEQ ID NO: 24570 - protein, 846 aa, Homo sapiens
LLSPAIGDQSRPLCSRKGLSGGGSGGGPPWRARSQPGHCGSLKPKSSCCFCTPPVPPSCAGPLRGIISPKTGMERPLCSHLCSCLAMLALLSPLSLAQYDSWPHYPEYFQQPAPEYHQPQAPANVAKIQLRLAGQKRKHSEGRVEVYYDGQWGTVCDDDFSIHAAHVVCRELGYVEAKSWTASSSYGKGEGPIWLDNLHCTGNEATLAACTSNGWGVTDCKHTEDVGVVCSDKRIPGFKFDNSLINQIENLNIQVEDIRIRAILSTYRKRTPVMEGYVEVKEGKTWKQICDKHWTAKNSRVVCGMFGFPGERTYNTKVYKMFASRRKQRYWPFSMDCTGTEAHISSCKLGPQVSLDPMKNVTCENGLPAVVSCVPGQVFSPDGPSRFRKAYKPEQPLVRLRGGAYIGEGRVEVLKNGEWGTVCDDKWDLVSASVVCRELGFGSAKEAVTGSRLGQGIGPIHLNEIQCTGNEKSIIDCKFNAESQGCNHEEDAGVRCNTPAMGLQKKLRLNGGRNPYEGRVEVLVERNGSLVWGMVCGQNWGIVEAMVVCRQLGLGFASNAFQETWYWHGDVNSNKVVMSGVKCSGTELSLAHCRHDGEDVACPQGGVQYGAGVACSETAPDLVLNAEMVQQTTYLEDRPMFMLQCAMEENCLSASAAQTDPTTGYRRLLRFSSQIHNNGQSDFRPKNGRHAWIWHDCHRHYHSMEVFTHYDLLNLNGTKVAEGHKASFCLEDTECEGDIQKNYECANFGDQGITMGCWDMYRHDIDCQWVDITDVPPGDYLFQVVINPNFEVAESDYSNNIMKCRSRYDGHRIWMYNCHIGGSFSEETEKKFEHFSGLLNNQLSPQ

SEQ ID NO: 24571 - protein, 48 aa, Homo sapiens
LVLAFSSHRRPEPPPLLEKGAQRRRKRRGTTVESAVPARPLRIPETKF

SEQ ID NO: 24572 - protein, 176 aa, Homo sapiens
MGGDYNAAKFTKAAKDYCATKWSILRERFDRGLYASHADLHRLKYQCFKSAWMFEVFHRGFSFPVNYKSLKTALQVYDKEVQWTLGAILYRTRFLPLSHRRPEPPPLLEKGAQRRRKRRGTTVESAVPARPLRIPETKKIGMLIIPCSGGCPKLCCAVWQPPPYGATKHLQCAAWN

SEQ ID NO: 24573 - protein, 68 aa, Homo sapiens
MSCTPKDSVLQLHPPVSLNINSERANLTGERTTRMRMSPTELNLSPEASCWPWNMAKALSVPVKERGK

SEQ ID NO: 24574 - protein, 330 aa, Homo sapiens
LQQQQQQRRWQQQQQRRQQQQQRRHRWQQQHHQQQQQKKILIKSSPKLSVYPDPHLHSSQERERGKGGRKKKKPNNLAETSQRMLQNSAVLLVLVISASATHEAEQNDSVSPRKSRVAAQNSAEVVRCLNSALQVGCGAFACLENSTCDTDGMYDICKSFLYSAAKFDTQGKAFVKESLKCIANGVTSKVFLAIRRCSTFQRMIAEVQEECYSKLNVCSIAKRNPEAITEVVQLPNHFSNRYYNRLVRSLLECDEDTVSTIRDSLMEKIGPNMASLFHILQTDHCAQTHPRADFNRRRTNEPQKLKVLLRNLRGEEDSPSHIKRTSHESA

SEQ ID NO: 24575 - protein, 65 aa, Homo sapiens
VLLESPSMLQGLLPVSLLLSVAVSAIKELPGVKKYEVVYPIRLHPLHKREAKEPEQQFLSSMKIS

SEQ ID NO: 24576 - protein, 224 aa, Homo sapiens
VLLESPSMLQGLLPVSLLLSVAVSAIKELPGVKKYEVVYPIRLHPLHKREAKEPEQQEQFETELKYKMTINGKIAVLYLKKNKNLLAPGYTETYYNSTGKEITTSPQIMDDCYYQGHILNEKVSDASISTCRGLRGYFSQGDQRYFIEPLSPIHRDGQEHALFKYNPDEKNYDSTCGMDGVLWAHDLQQNIALPATKLVKLKDRKVQEHEKYIEYYLVLDNGEF

SEQ ID NO: 24577 - protein, 547 aa, Homo sapiens
VLLESPSMLQGLLPVSLLLSVAVSAIKELPGVKKYEVVYPIRLHPLHKREAKEPEQQEQFETELKYKMTINGKIAVLYLKKNKNLLAPGYTETYYNSTGKEITTSPQIMDDCYYQGHILNEKVSDASISTCRGLRGYFSQGDQRYFIEPLSPIHRDGQEHALFKYNPDEKNYDSTCGMDGVLWAHDLQQNIALPATKLVKLKDRKVQEHEKYIEYYLVLDNGEFKRYNENQDEIRKRVFEMANYVNMLYKKLNTHVALVGMEIWTDKDKIKITPNASFTLENFSKWRGSVLSRRKRHDIAQLITATELAGTTVGLAFMSTMCSPYSVGVVQDHSDNLLRVAGTMAHEMGHNFGMFHDDYSCKCPSTICVMDKALSFYIPTDFSSCSRLSYDKFFEDKLSNCLFNAPLPTDIISTPICGNQLVEMGEDCDCGTSEECTNICCDAKTCKIKATFQCALGECCEKCQFKKAGMVCRPAKDECDLPEMCNGKSGNCPDDRFQVNGFPCHHGKGHCLMGTCPTLQEQCTELWGPGRRTNPFPCACAKENHFR

SEQ ID NO: 24578 - protein, 782 aa, Homo sapiens
VLLESPSMLQGLLPVSLLLSVAVSAIKELPGVKKYEVVYPIRLHPLHKREAKEPEQQEQFETELKYKMTINGKIAVLYLKKNKNLLAPGYTETYYNSTGKEITTSPQIMDDCYYQGHILNEKVSDASISTCRGLRGYFSQGDQRYFIEPLSPIHRDGQEHALFKYNPDEKNYDSTCGMDGVLWAHDLQQNIALPATKLVKLKDRKVQEHEKYIEYYLVLDNGEFKRYNENQDEIRKRVFEMANYVNMLYKKLNTHVALVGMEIWTDKDKIKITPNASFTLENFSKWRGSVLSRRKRHDIAQLITATELAGTTVGLAFMSTMCSPYSVGVVQDHSDNLLRVAGTMAHEMGHNFGMFHDDYSCKCPSTICVMDKALSFYIPTDFSSCSRLSYDKFFEDKLSNCLFNAPLPTDIISTPICGNQLVEMGEDCDCGTSEECTNICCDAKTCKIKATFQCALGECCEKCQFKKAGMVCRPAKDECDLPEMCNGKSGNCPDDRFQVNGFPCHHGKGHCLMGTCPTLQEQCTELWGPGTEVADKSCYNRNEGGSKYGYCRRVDDTLIPCKANDTMCGKLFCQGGSDNLPWKGRIVTFLTCKTFDPEDTSQEIGMVANGTKCGDNKVCINAECVDIEKAYKSTNCSSKCKGHAVCDHELQCQCEEGWIPPDCDDSSVVFHFSIVVGVLFPMAVIFVVVAMVIRHQSSREKQKKDQRPLSTTGTRPHKQKRKPQMVKAVQPQEMSQMKPHVYDLPVEGNEPPASFHKDTNALPPTVFKDNPVSTPKDSNPKA

SEQ ID NO: 24579 - protein, 14 aa, Homo sapiens
MMEDVYEGGTVKHL

SEQ ID NO: 24580 - protein, 576 aa, Homo sapiens
VIGRALKIGFSPKGSDGNGQDTIQQLENELRGTKWEMARHLREYQDLLNVKMALDIEIAAYRKLLEGEETRFSTFAGSITGPLYTHRPPITISSKIQKPKVEAPKLKVQHKFVEEIIEETKVEDEKSEMEEALTAITEELAVSMKEEKKEAAEEKEEEPEAEEEEVAAKKSPVKATAPEVKEEEGEKEEEEGQEEEEEEDEGAKSDQAEEGGSEKEGSSEKEEGEQEEGETEAEAEGEEAEAKEEKKVEEKSEEVATKEELVADAKVEKPEKAKSPVPKSPVEEKGKSPVPKSPVEEKGKSPVPKSPVEEKGKSPVPKSPVEEKGKSPVSKSPVEEKAKSPVPKSPVEEAKSKAEVGKGEQKEEEEKEVKEAPKEEKVEKKEEKPKDVPEKKKAESPVKEEAVAEVVTITKSVKVHLEKETKEEGKPLQQEKEKEKAGGEGGSEEEGSDKGAKGSRKEDIAVNGEVEGKEEVEQETKEKGSGREEEKGVVTNGLDLSPADEKKGGDKSEEKVVVTKTVEKITSEGGDGATKYITKSVTVTQKVEEHEETFEEKLVSTKKVEKVTSHAIVKEVTQSD

SEQ ID NO: 24581 - protein, 110 aa, Homo sapiens
LVGTIFEMSQIFLCYLDICGKAESFLTVKAEVSTGGNLLVVSPTTLPRVLSTKEVKRTEKEISISAARAGICLPDSLCFLFHRHPFRRELHQFIMRVREAKALRCVQGVT

SEQ ID NO: 24582 - protein, 205 aa, Homo sapiens
LFRKCFVQARILYTLPFLCCFVLFLVFEEPEDPSNRSFFSEIISSISDVKFSHSGRYMMTRDYLSVKIWDLNMENRPVETYQVHEYLRSKLCSLYENDCIFDKFECCWNGSDSVVMTGSYNNFFRMFDRNTKRDITLEASRENNKPRTVLKPRKVCASGKRKKDEISVDSLDFNKKILHTAWHPKENIIAVATTNNLYIFQDKVN

SEQ ID NO: 24583 - protein, 121 aa, Homo sapiens
LSVIRDIGAIAQVHAENGDIIAEEQQRILDLGITGPEGHVLSRPEEVEAEAVNRAITIANQTNCPLYITKVMSKSSAEVIAQARKKESAVKMVAVTDSFFQAVTQGSRLSLEDIWGVMYLP

SEQ ID NO: 24584 - protein, 56 aa, Homo sapiens
MNIFVSVSLSLCVSSSPCLGDGVFLPCPIIFSPPRSTISWWSLGPPKGFERLPLQA

SEQ ID NO: 24585 - protein, 24 aa, Homo sapiens
LFFLYRVMVIFGCFGCFLKKQVKT

SEQ ID NO: 24586 - protein, 1014 aa, Homo sapiens
LLPERMSGVSEPLSRVKLGTLRRPEGPAEPMVVVPVDVEKEDVRILKVCFYSNSFNPGKNFKLVKCTVQTEIREIITSILLSGRIGPNIRLAECYGLRLKHMKSDEIHWLHPQMTVGEVQDKYECLHVEAEWRYDLQIRYLPEDFMESLKEDRTTLLYFYQQLRNDYMQRYASKVSEGMALQLGCLELRRFFKDMPHNALDKKSNFELLEKEVGLDLFFPKQMQENLKPKQFRKMIQQTFQQYASLREEECVMKFFNTLAGFANIDQETYRCELIQGWNITVDLVIGPKGIRQLTSQDAKPTCLAEFKQIRSIRCLPLEEGQAVLQLGIEGAPQALSIKTSSLAEAENMADLIDGYCRLQGEHQGSLIIHPRKDGEKRNSLPQIPMLNLEARRSHLSESCSIESDIYAEIPDETLRRPGGPQYGIAREDVVLNRILGEGFFGEVYEGVYTNHKGEKINVAVKTCKKDCTLDNKEKFMSEAVIMKNLDHPHIVKLIGIIEEEPTWIIMELYPYGELGHYLERNKNSLKVLTLVLYSLQICKAMAYLESINCVHRDIAVRNILVASPECVKLGDFGLSRYIEDEDYYKASVTRLPIKWMSPESINFRRFTTASDVWMFAVCMWEILSFGKQPFFWLENKDVIGVLEKGDRLPKPDLCPPVLYTLMTRCWDYDPSDRPRFTELVCSLSDVYQMEKDIAMEQERNARYRTPKILEPTAFQEPPPKPSRPKYRPPPQTNLLAPKLQFQVPEGLCASSPTLTSPMEYPSPVNSLHTPPLHRHNVFKRHSMREEDFIQPSSREEAQQLWEAEKVKMRQILDKQQKQMVEDYQWLRQEEKSLDPMVYMNDKSPLTPEKEVGYLEFTGPPQKPPRLGAQSIQPTANLDRTDDLVYLNVMELVRAVLELKNELCQLPPEGYVVVVKNVGLTLRKLIGSVDDLLPSLPSSSRTEIEGTQKLLNKDLAELINKMRLAQQNAVTSLSEECKRQMLTASHTLAVDAKNLLDAVDQAKVLANLAHPPAE

SEQ ID NO: 24587 - protein, 52 aa, Homo sapiens
LQPPRESSARHQVTRPQPPGPQLRPASPRSGSCTLTLDSAAHGKNRIAPACN

SEQ ID NO: 24588 - protein, 484 aa, Homo sapiens
LLQAAGGRDASRLSSCSHDGLLFSAEACKDSRIGGMMKTLLLFVGLLLTWESGQVLGDQTVSDNELQEMSNQGSKYVNKEIQNAVNGVKQIKTLIEKTNEERKTLLSNLEEAKKKKEDALNETRESETKLKELPGVCNETMMALWEECKPCLKQTCMKFYARVCRSGSGLVGRQLEEFLNQSSPFYFWMNGDRIDSLLENDRQQTHMLDVMQDHFSRASSIIDELFQDRFFTREPQDTYHYLPFSLPHRRPHFFFPKSRIVRSLMPFSPYEPLNFHAMFQPFLEMIHEAQQAMDIHFHSPAFQHPPTEFIREGDDDRTVCREIRHNSTGCLRMKDQCDKCREILSVDCSTNNPSQAKLRRELDESLQVAERLTRKYNELLKSYQWKMLNTSSLLEQLNEQFNWVSRLANLTQGEDQYYLRVTTVASHTSDSDVPSGVTEVVVKLFDSDPITVTVPVEVSRKNPKFMETVAEKALQEYRKKHREE

SEQ ID NO: 24589 - protein, 501 aa, Homo sapiens
MQVCSQPQRGCVREQSAINTAPPSAHNAASPGGARGHRVPLTEACKDSRIGGMMKTLLLFVGLLLTWESGQVLGDQTVSDNELQEMSNQGSKYVNKEIQNAVNGVKQIKTLIEKTNEERKTLLSNLEEAKKKKEDALNETRESETKLKELPGVCNETMMALWEECKPCLKQTCMKFYARVCRSGSGLVGRQLEEFLNQSSPFYFWMNGDRIDSLLENDRQQTHMLDVMQDHFSRASSIIDELFQDRFFTREPQDTYHYLPFSLPHRRPHFFFPKSRIVRSLMPFSPYEPLNFHAMFQPFLEMIHEAQQAMDIHFHSPAFQHPPTEFIREGDDDRTVCREIRHNSTGCLRMKDQCDKCREILSVDCSTNNPSQAKLRRELDESLQVAERLTRKYNELLKSYQWKMLNTSSLLEQLNEQFNWVSRLANLTQGEDQYYLRVTTVASHTSDSDVPSGVTEVVVKLFDSDPITVTVPVEVSRKNPKFMETVAEKALQEYRKKHREE

SEQ ID NO: 24590 - protein, 428 aa, Homo sapiens
VPLTEACKDSRIGGMMKTLLLFVGLLLTWESGQVLGDQTVSDNELQEMSNQGSKYVNKEIQNAVNGVKQIKTLIEKTNEERKTLLSNLEEAKKKKEDALNETRESETKLKELPGVCNETMMALWEECKPCLKQTCMKFYARVCRSGSGLVGRQLEEFLNQSSPFYFWMNGDRIDSLLENDRQQTHMLDVMQDHFSRASSIIDELFQDRFFTREPQDTYHYLPFSLPHRRPHFFFPKSRIVRSLMPFSPYEPLNFHAMFQPFLEMIHEAQQAMDIHFHSPAFQHPPTEFIREGDDDRTVCREIRHNSTGCLRMKDQCDKCREILSVDCSTNNPSQAKLRRELDESLQVAERLTRKYNELLKSYQWKMLNTSSLLEQLNEQFNWVSRLANLTQGEDQYYLRVTTVSCVPATCCGSGARAVIGSRGMCAFD

SEQ ID NO: 24591 - protein, 127 aa, Homo sapiens
VPLTEACKDSRIGGMMKTLLLFVGLLLTWESGQVLGDQTVSDNELQEMSNQGSKYVNKEIQNAVNGVKQIKTLIEKTNEERKTLLSNLEEAKKKKEVRRSRYRLPALTIPLEGREGVTARCPAGLPW

SEQ ID NO: 24592 - protein, 102 aa, Homo sapiens
LSAAAPRWSHRTAPGIMVFYFTSSSVNSSAYTIYMGKDKYENEDLIKHGWPEDIWFHVDKLSSAHVYLRLHKGENIEDIPKEVLMDCAHLVKANSIQGAIHH

SEQ ID NO: 24593 - protein, 108 aa, Homo sapiens
LSAAAPRWSHRTAPGIMVFYFTSSSVNSSAYTIYMGKDKYENEDLIKHGWPEDIWFHVDKLSSAHVYLRLHKGENIEDIPKEVLMDCAHLVKANSIQGKNCDSGEESK

SEQ ID NO: 24594 - protein, 31 aa, Homo sapiens
LAGSPELRRAGVHVTRNGRNEGCFWPGTASS

SEQ ID NO: 24595 - protein, 63 aa, Homo sapiens
LSLWLHFYLWWLCYGGAEMRQKRKGDLSPAELMMLTIGDVIKQLIEAHEQGKDIDLNKLLSWL

SEQ ID NO: 24596 - protein, 175 aa, Homo sapiens
LSLWLHFYLWWLCYGGAEMRQKRKGDLSPAELMMLTIGDVIKQLIEAHEQGKDIDLNKVKTKTAAKYGLSAQPRLVDIIAAVPPQYRKVLMPKLKAKPIRTASGIAVVAVMCKPHRCPHISFTGNICVYCPGGPDSDFEYSTQSYTGYEPTSMRAIRARYDPFLQTRHRIEQVHF

SEQ ID NO: 24597 - protein, 565 aa, Homo sapiens
LSLWLHFYLWWLCYGGAEMRQKRKGDLSPAELMMLTIGDVIKQLIEAHEQGKDIDLNKVKTKTAAKYGLSAQPRLVDIIAAVPPQYRKVLMPKLKAKPIRTASGIAVVAVMCKPHRCPHISFTGNICVYCPGGPDSDFEYSTQSYTGYEPTSMRAIRARYDPFLQTRHRIEQLKQLGHSVDKVEFIVMGGTFMALPEEYRDYFIRNLHDALSGHTSNNIYEAVKYSERSLTKCIGITIETRPDYCMKRHLSDMLTYGCTRLEIGVQSVYEDVARDTNRGHTVKAVCESFHLAKDSGFKVVAHMMPDLPNVGLERDIEQFTEFFENPAFRPDGLKLYPTLVIRGTGLYELWKSGRYKSYSPSDLVELVARILALVPPWTRVYRVQRDIPMPLVSSGVEHGNLRELALARMKDLGIQCRDVRTREVGIQEIHHKVRPYQVELVRRDYVANGGWETFLSYEDPDQDILIGLLRLRKCSEETFRFELGGGVSIVRELHVYGSVVPVSSRDPTKFQHQGFGMLLMEEAERIAREEHGSGKIAVISGVGTRNYYRKIGYRLQGPYMVKMLK

SEQ ID NO: 24598 - protein, 153 aa, Homo sapiens
LDPRSLCRCAQTPPKDGFVIADVQLVTSNSPEEKQSPLSAFRSSSSLRKKNNSGEKALPPWRSSDKHPTDIIRFNYLDNRDPMETVQQGRRKRNQMTPDFSRQSHDKKNKLQDRTRLRKAQSMVSIVYERFITITLMKISRSLILFAKLNSFI

SEQ ID NO: 24599 - protein, 77 aa, Homo sapiens
VIGLLEAGRGEGLEGVGEKADLMKLWQRQRLRLEEGDKLKEDIQLFHDGICTSKKHRWSQNADKDEHLDTPKPSAIE

SEQ ID NO: 24600 - protein, 8 aa, Homo sapiens
LVTLLGLL

SEQ ID NO: 24601 - protein, 128 aa, Homo sapiens [sequence omitted]

SEQ ID NO: 24602 - protein, 334 aa, Homo sapiens
LLLGLHLFLLTAGPALGWNDPDRMLLRDVKALTLHYDRYTTSRRLDPIPQLKCVGGTAGCDSYTPKVIQCQNKGWDGYDVQWECKTDLDIAYKFGKTVVSCEGYESSEDQYVLRGSCGLEYNLDYTELGLQKLKESGKQHGFASFSDYYYKWSSADSCNMSGLITIVVLLGIAFVVYKLFLSDGQYSPPPYSEYPPFSHRYQRFTNSAGPPPPGFKSEFTGPQNTGHGATSGFGSAFTGQQGYENSGPGFWTGLGTGGILGYLFGSNRAATPFSDSWYYPSYPPSYPGTWNRAYSPLHGGSGSYSDMVVPGDDKVESWSQTLDAEILDFSSLSL

SEQ ID NO: 24603 - protein, 154 aa, Homo sapiens [sequence omitted]

SEQ ID NO: 24604 - protein, 167 aa, Homo sapiens
LGLPAAAAAAAASGRGARSDVTAMAGIKALISLSFGGAIGLMFLMLGCALPIYNKYWPLFVLFFYILSPIPYCIARRLVDDTDAMSNACKELAIFLTTGIVVSAFGLPIVFARAHLGPDVCIGDISLLSRALTKLRPKARCVEEGVVQDPVGVVDGAPTLLQQDGNS

SEQ ID NO: 24605 - protein, 229 aa, Homo sapiens [sequence omitted]

SEQ ID NO: 24606 - protein, 212 aa, Homo sapiens [sequence omitted]

SEQ ID NO: 24607 - protein, 316 aa, Homo sapiens
VGGRPRRRRRKGAASRARLPFSLSIMDPSLLRERELFKKRALSTPVVEKRSASSESSSSSSKKKKTKVEHGGSSGSKQNSDHSNGSFNLKALSGSSGYKFGVLAKIVNYMKTRHQRGDTHPLTLDEILDETQHLDIGLKQKQWLMTEALVNNPKIEVIDGKYAFKPKYNVRDKKALLRLLDQHDQRGLGGILLEDIEEALPNSQKAVKALGDQILFVNRPDKKKILFFNDKSCQFSVDEEFQKLWRSVTVDSMDEEKIEEYLKRQGISSMQESGPKKVAPIQRRKKPASQKKRRFKTHNEHLAGVLKDYSDITSSK

SEQ ID NO: 24608 - protein, 171 aa, Homo sapiens
MASRGVVGIFFLSAVPLVCLELRRGIPDIVYLKEEEEKNEKRQKLVRKKQQEAQGEKASRYIENVLKPHQEMKLRKLEERFYQMTGEAWKLSSGHKLGGDEGTSQTSFETSNREAAKSQNLPKPLTEFPSPAEQPTCKEIPDLPEEPSQTAEEVVTVALRCPSGNVLRRRF

SEQ ID NO: 24609 - protein, 88 aa, Homo sapiens
LLCGRILLLLALLTLTISVTTSWLNSFKSPQVYLKEEEEKNEKRQKLVRKKQQEAQGEKASRYIENVLKPHQEMKLRKLEERFYQMTG

SEQ ID NO: 24610 - protein, 159 aa, Homo sapiens
LHPGGIRRSENIPAARSSFPSSHLSSPLALPLHPTRRASVRECTEEERRPPLPLSRLCRGRRGPPPAPRRRSPRLPFPPLLAGAGPVSEVRRRPPQRPQEGRLRWAPRAMPLPGCSGGGQCERRRRGRRRGAAAAAAAAEGPRAGGGGGGGREGHRRRR

SEQ ID NO: 24611 - protein, 56 aa, Homo sapiens
LLIWCLAWMPGLQALLVVALHSHPAEEDLLDWIFSGFLSDIVLYLPMKTLFFGLCK

SEQ ID NO: 24612 - protein, 198 aa, Homo sapiens
MLEGRYFTTTRSTSVNKEPDSMLVHMFKDKGVWGNKQDHRGAFLIDRSPVYFEPILNYLLCGQLIVNNGINLLGVLEAARFFEIYSLIEHLEVAIKNSQPPEDHSPIPRKEFVQFLLATPTKSELRCQVLDCANLQGVKMLCSNAEGASLKLCNFEDPSALKANLEGANLKGADMEGSQMTGINLRVATLKKSKVEEL

SEQ ID NO: 24613 - protein, 26 aa, Homo sapiens
MLSWCCFLVAASPLRFHLELDVSYQI

SEQ ID NO: 24614 - protein, 56 aa, Homo sapiens
LSDSRICVLNPIHKEAIMSQPLFLRFTDVRVQFTRMPSYTGLWNQKLQLVIKCDAI

SEQ ID NO: 24615 - protein, 13 aa, Homo sapiens
VMTITFPVMRRVV

SEQ ID NO: 24616 - protein, 69 aa, Homo sapiens
LAARDRPRLGRCGPGPRSWVSVLGLGMRAVLVGAPRERAAGRACPGVLRPRANLSKALTLGIAPDFLLH

SEQ ID NO: 24617 - protein, 14 aa, Homo sapiens
MIISSTIILFRVIF

SEQ ID NO: 24618 - protein, 1339 aa, Homo sapiens
LMGAGGRRMRGAPARLLLPLLPWLLLLLAPEARGAPGCPLSIRSCKCSGERPKGLSGGVPGPARRRVVCSGGDLPEPPEPGLLPNGTVTLLLSNNKITGLRNGSFLGLSLLEKLDLRNNIISTVQPGAFLGLGELKRLDLSNNRIGCLTSETFQGLPRLLRLNISGNIFSSLQPGVFDELPALKVVDLGTEFLTCDCHLRWLLPWAQNRSLQLSEHTLCAYPSALHAQALGSLQEAQLCCEGALELHTHHLIPSLRQVVFQGDRLPFQCSASYLGNDTRIRWYHNRAPVEGDEQAGILLAESLIHDCTFITSELTLSHIGVWASGEWECTVSMAQGNASKKVEIVVLETSASYCPAERVANNRGDFRWPRTLAGITAYQSCLQYPFTSVPLGGGAPGTRASRRCDRAGRWEPGDYSHCLYTNDITRVLYTFVLMPINASNALTLAHQLRVYTAEAASFSDMMDVVYVAQMIQKFLGYVDQIKELVEVMVDMASNLMLVDEHLLWLAQREDKACSRIVGALERIGGAALSPHAQHISVNARNVALEAYLIKPHSYVGLTCTAFQRREGGVPGTRPGSPGQNPPPEPEPPADQQLRFRCTTGRPNVSLSSFHIKNSVALASIQLPPSLFSSLPAALAPPVPPDCTLQLLVFRNGRLFHSHSNTSRPGAAGPGKRRGVATPVIFAGTSGCGVGNLTEPVAVSLRHWAEGAEPVAAWWSQEGPGEAGGWTSEGCQLRSSQPNVSALHCQHLGNVAVLMELSAFPREVGGAGAGLHPVVYPCTALLLLCLFATIITYILNHSSIRVSRKGWHMLLNLCFHIAMTSAVFAGGITLTNYQMVCQAVGITLHYSSLSTLLWMGVKARVLHKELTWRAPPPQEGDPALPTPSPMLRFYLIAGGIPLIICGITAAVNIHNYRDHSPYCWLVWRPSLGAFYIPVALILLITWIYFLCAGLRLRGPLAQNPKAGNSRASLEAGEELRGSTRLRGSGPLLSDSGSLLATGSARVGTPGPPEDGDSLYSPGVQLGALVTTHFLYLAMWACGALAVSQRWLPRVVCSCLYGVAASALGLFVFTHHCARRRDVRASWRACCPPASPAAPHAPPRALPAAAEDGSPVFGEGPPSLKSSPSGSSGHPLALGPCKLTNLQLAQSQVCEAGAAAGGEGEPEPAGTRGNLAHRHPNNVHHGRRAHKSRAKGHRAGEACGKNRLKALRGGAAGALELLSSESGSLHNSPTDSYLGSSRNSPGAGLQLEGEPMLTPSEGSDTSAAPLSEAGRAGQRRSASRDSLKGGGALEKESHRRSYPLNAASLNGAPKGGKYDDVTLMGAEVASGGCMKTGLWKSETTV

SEQ ID NO: 24619 - protein, 191 aa, Homo sapiens
VSRREWVGGRRGIPRGSSVLELGGAAARTTNPRGVGRERRKGRPGAGRHGARRSEAGGAGGQREVRGCSAQETMSGGSSCSQTPSRAIPATRRVVLGDGVQLPPGDYSTTPGGTLFSTTPGGTRIIYDRKFLMECRNSPVTKTPPRDLPTIPGVTSPSSDEPPMEASQSHLRNSPEDKRAGGEESQFEMDI

SEQ ID NO: 24620 - protein, 462 aa, Homo sapiens
LGLAGVVRPPSLLSIRNRPRAPARWVGRGERGGKRFRAADPMSALRRSGYGPSDGPSYGRYYGPGGGDVPVHPPPPLYPLRPEPPQPPISWRVRGGGPAETTWLGEGGGGDGYYPSGGAWPEPGRAGGSHQSLNSYTNGAYGPTYPPGPGANTASYSGAYYAPGYTQTSYSTEVPSTYRSSGNSPTPVSRWIYPQQDCQTEAPPLRGQVPGYPPSQNPGMTLPHYPYGDGNRSVPQSGPTVRPQEDAWASPGAYGMGGRYPWPSSAPSAPPGNLYMTESTSPWPSSGSPQSPPSPPVQQPKDSSYPYSQSDQSMNRHNFPCSVHQYESSGTVNNDDSDLLDSQVQYSAEPQLYGNATSDHPNNQDQSSSLPEECVPSDESTPPSIKKIIHVLEKVQYLEQEVEEFVGKKTDKAYWLLEEMLTKELLELDSVETGGQDSVRQARKEAVCKIQAILEKLEKKGL

SEQ ID NO: 24621 - protein, 498 aa, Homo sapiens
LGLAGVVRPPSLLSIRNRPRAPARWVGRGERGGKRFRAADPMSALRRSGYGPSDGPSYGRYYGPGGGDVPVHPPPPLYPLRPEPPQPPISWRVRGGGPAETTWLGEGGGGDGYYPSGGAWPEPGRAGGSHQEQPPYPSYNSNYWNSTARSRAPYPSTYPVRPELQGQSLNSYTNGAYGPTYPPGPGANTASYSGAYYAPGYTQTSYSTEVPSTYRSSGNSPTPVSRWIYPQQDCQTEAPPLRGQVPGYPPSQNPGMTLPHYPYGDGNRSVPQSGPTVRPQEDAWASPGAYGMGGRYPWPSSAPSAPPGNLYMTESTSPWPSSGSPQSPPSPPVQQPKDSSYPYSQSDQSMNRHNFPCSVHQYESSGTVNNDDSDLLDSQVQYSAEPQLYGNATSDHPNNQDQSSSLPEECVPSDESTPPSIKKIIHVLEKVQYLEQEVEEFVGKKTDKAYWLLEEMLTKELLELDSVETGGQDSVRQARKEAVCKIQAILEKLEKKGL

SEQ ID NO: 24622 - protein, 55 aa, Homo sapiens
VGVRLALFAAFLVTELLPPFQRLIQPEEMWLYRNPYVEAEYFPTKPMFLPALPWL

SEQ ID NO: 24623 - protein, 77 aa, Homo sapiens
VGVRLALFAAFLVTELLPPFQRLIQPEEMWLYRNPYVEAEYFPTKPMFVRGERSSFLPPHDPASRGHLLLHFSLHCL

SEQ ID NO: 24624 - protein, 55 aa, Homo sapiens
LKLGGGGCSEPRLRHCTPAWATEKTKRKTNDEGLQKLKPRHVSAPSMWAWFCQCF

SEQ ID NO: 24625 - protein, 734 aa, Homo sapiens
LKGEEEEGTWGHGACSAKCQALLTGVGQMGKTPPGPGLGPAPEPDQLLLSTLPVSLGFPRAAVAPYWTSPEKMEKKLHAVPAAKTVKFKCPSSGTPNPTLRWLKNGKEFKPDHRIGGYKVRYATWSIIMDSVVPSDKGNYTCIVENEYGSINHTYQLDVVERSPHRPILQAGLPANKTVALGSNVEFMCKVYSDPQPHIQWLKHIEVNGSKIGPDNLPYVQILKTAGVNTTDKEMEVLHLRNVSFEDAGEYTCLAGNSIGLSHHSAWLTVLEALEERPAVMTSPLYLEIIIYCTGAFLISCMVGSVIVYKMKSGTKKSDFHSQMAVHKLAKSIPLRRQVTVSADSSASMNSGVLLVRPSRLSSSGTPMLAGVSEYELPEDPRWELPRDRLVLGKPLGEGCFGQVVLAEAIGLDKDKPNRVTKVAVKMLKSDATEKDLSDLISEMEMMKMIGKHKNIINLLGACTQDGPLYVIVEYASKGNLREYLQARRPPGLEYCYNPSHNPEEQLSSKDLVSCAYQVARGMEYLASKKCIHRDLAARNVLVTEDNVMKIADFGLARDIHHIDYYKKTTNGRLPVKWMAPEALFDRIYTHQSDVWSFGVLLWEIFTLGGSPYPGVPVEELFKLLKEGHRMDKPSNCTNELYMMMRDCWHAVPSQRPTFKQLVEDLDRIVALTSNQEYLDLSMPLDQYSPSFPDTRSSTCSSGEDSVFSHEPLPEEPCLPRHPAQLANGGLKRR

SEQ ID NO: 24626 - protein, 947 aa, Homo sapiens
LRSGGGGHKVWRPRVADGSPPPAPPPGHQLRLHCSRPGWRRRAPSAAGSRAPAAELLRPRQDPNRARGRRAGAGDAGTRPLAQATADSPEAEPPRRARVSLKRRIELTVEYPWRCGALSPTSNCRTGMWSWKCLLFWAVLVTATLCTARPSPTLPEQAQPWGAPVEVESFLVHPGDLLQLRCRLRDDVQSINWLRDGVQLAESNRTRITGEEVEVQDSVPADSGLYACVTSSPSGSDTTYFSVNVSDALPSSEDDDDDDDSSSEEKETDNTKPNPVAPYWTSPEKMEKKLHAVPAAKTVKFKCPSSGTPNPTLRWLKNGKEFKPDHRIGGYKVRYATWSIIMDSVVPSDKGNYTCIVENEYGSINHTYQLDVVERSPHRPILQAGLPANKTVALGSNVEFMCKVYSDPQPHIQWLKHIEVNGSKIGPDNLPYVQILKTAGVNTTDKEMEVLHLRNVSFEDAGEYTCLAGNSIGLSHHSAWLTVLEALEERPAVMTSPLYLEIIIYCTGAFLISCMVGSVIVYKMKSGTKKSDFHSQMAVHKLAKSIPLRRQVTVSADSSASMNSGVLLVRPSRLSSSGTPMLAGVSEYELPEDPRWELPRDRLVLGKPLGEGCFGQVVLAEAIGLDKDKPNRVTKVAVKMLKSDATEKDLSDLISEMEMMKMIGKHKNIINLLGACTQDGPLYVIVEYASKGNLREYLQARRPPGLEYCYNPSHNPEEQLSSKDLVSCAYQVARGMEYLASKKCIHRDLAARNVLVTEDNVMKIADFGLARDIHHIDYYKKTTNGRLPVKWMAPEALFDRIYTHQSDVWSFGVLLWEIFTLGGSPYPGVPVEELFKLLKEGHRMDKPSNCTNELYMMMRDCWHAVPSQRPTFKQLVEDLDRIVALTSNQEYLDLSMPLDQYSPSFPDTRSSTCSSGEDSVFSHEPLPEEPCLPRHPAQLANGGLKRR

SEQ ID NO: 24627 - protein, 949 aa, Homo sapiens
LRSGGGGHKVWRPRVADGSPPPAPPPGHQLRLHCSRPGWRRRAPSAAGSRAPAAELLRPRQDPNRARGRRAGAGDAGTRPLAQATADSPEAEPPRRARVSLKRRIELTVEYPWRCGALSPTSNCRTGMWSWKCLLFWAVLVTATLCTARPSPTLPEQAQPWGAPVEVESFLVHPGDLLQLRCRLRDDVQSINWLRDGVQLAESNRTRITGEEVEVQDSVPADSGLYACVTSSPSGSDTTYFSVNVSDALPSSEDDDDDDDSSSEEKETDNTKPNRMPVAPYWTSPEKMEKKLHAVPAAKTVKFKCPSSGTPNPTLRWLKNGKEFKPDHRIGGYKVRYATWSIIMDSVVPSDKGNYTCIVENEYGSINHTYQLDVVERSPHRPILQAGLPANKTVALGSNVEFMCKVYSDPQPHIQWLKHIEVNGSKIGPDNLPYVQILKTAGVNTTDKEMEVLHLRNVSFEDAGEYTCLAGNSIGLSHHSAWLTVLEALEERPAVMTSPLYLEIIIYCTGAFLISCMVGSVIVYKMKSGTKKSDFHSQMAVHKLAKSIPLRRQVTVSADSSASMNSGVLLVRPSRLSSSGTPMLAGVSEYELPEDPRWELPRDRLVLGKPLGEGCFGQVVLAEAIGLDKDKPNRVTKVAVKMLKSDATEKDLSDLISEMEMMKMIGKHKNIINLLGACTQDGPLYVIVEYASKGNLREYLQARRPPGLEYCYNPSHNPEEQLSSKDLVSCAYQVARGMEYLASKKCIHRDLAARNVLVTEDNVMKIADFGLARDIHHIDYYKKTTNGRLPVKWMAPEALFDRIYTHQSDVWSFGVLLWEIFTLGGSPYPGVPVEELFKLLKEGHRMDKPSNCTNELYMMMRDCWHAVPSQRPTFKQLVEDLDRIVALTSNQEYLDLSMPLDQYSPSFPDTRSSTCSSGEDSVFSHEPLPEEPCLPRHPAQLANGGLKRR

SEQ ID NO: 24628 - protein, 947 aa, Homo sapiens
LRSGGGGHKVWRPRVADGSPPPAPPPGHQLRLHCSRPGWRRRAPSAAGSRAPAAELLRPRQDPNRARGRRAGAGDAGTRPLAQATADSPEAEPPRRARVSLKRRIELTVEYPWRCGALSPTSNCRTGMWSWKCLLFWAVLVTATLCTARPSPTLPEQAQPWGAPVEVESFLVHPGDLLQLRCRLRDDVQSINWLRDGVQLAESNRTRITGEEVEVQDSVPADSGLYACVTSSPSGSDTTYFSVNVSDALPSSEDDDDDDDSSSEEKETDNTKPNRMPVAPYWTSPEKMEKKLHAVPAAKTVKFKCPSSGTPNPTLRWLKNGKEFKPDHRIGGYKVRYATWSIIMDSVVPSDKGNYTCIVENEYGSINHTYQLDVVERSPHRPILQAGLPANKTVALGSNVEFMCKVYSDPQPHIQWLKHIEVNGSKIGPDNLPYVQILKTAGVNTTDKEMEVLHLRNVSFEDAGEYTCLAGNSIGLSHHSAWLTVLEALEERPAVMTSPLYLEIIIYCTGAFLISCMVGSVIVYKMKSGTKKSDFHSQMAVHKLAKSIPLRRQVSADSSASMNSGVLLVRPSRLSSSGTPMLAGVSEYELPEDPRWELPRDRLVLGKPLGEGCFGQVVLAEAIGLDKDKPNRVTKVAVKMLKSDATEKDLSDLISEMEMMKMIGKHKNIINLLGACTQDGPLYVIVEYASKGNLREYLQARRPPGLEYCYNPSHNPEEQLSSKDLVSCAYQVARGMEYLASKKCIHRDLAARNVLVTEDNVMKIADFGLARDIHHIDYYKKTTNGRLPVKWMAPEALFDRIYTHQSDVWSFGVLLWEIFTLGGSPYPGVPVEELFKLLKEGHRMDKPSNCTNELYMMMRDCWHAVPSQRPTFKQLVEDLDRIVALTSNQEYLDLSMPLDQYSPSFPDTRSSTCSSGEDSVFSHEPLPEEPCLPRHPAQLANGGLKRR

SEQ ID NO: 24629 - protein, 860 aa, Homo sapiens
LRSGGGGHKVWRPRVADGSPPPAPPPGHQLRLHCSRPGWRRRAPSAAGSRAPAAELLRPRQDPNRARGRRAGAGDAGTRPLAQATADSPEAEPPRRARVSLKRRIELTVEYPWRCGALSPTSNCRTGMWSWKCLLFWAVLVTATLCTARPSPTLPEQDALPSSEDDDDDDDSSSEEKETDNTKPNRMPVAPYWTSPEKMEKKLHAVPAAKTVKFKCPSSGTPNPTLRWLKNGKEFKPDHRIGGYKVRYATWSIIMDSVVPSDKGNYTCIVENEYGSINHTYQLDVVERSPHRPILQAGLPANKTVALGSNVEFMCKVYSDPQPHIQWLKHIEVNGSKIGPDNLPYVQILKTAGVNTTDKEMEVLHLRNVSFEDAGEYTCLAGNSIGLSHHSAWLTVLEALEERPAVMTSPLYLEIIIYCTGAFLISCMVGSVIVYKMKSGTKKSDFHSQMAVHKLAKSIPLRRQVTVSADSSASMNSGVLLVRPSRLSSSGTPMLAGVSEYELPEDPRWELPRDRLVLGKPLGEGCFGQVVLAEAIGLDKDKPNRVTKVAVKMLKSDATEKDLSDLISEMEMMKMIGKHKNIINLLGACTQDGPLYVIVEYASKGNLREYLQARRPPGLEYCYNPSHNPEEQLSSKDLVSCAYQVARGMEYLASKKCIHRDLAARNVLVTEDNVMKIADFGLARDIHHIDYYKKTTNGRLPVKWMAPEALFDRIYTHQSDVWSFGVLLWEIFTLGGSPYPGVPVEELFKLLKEGHRMDKPSNCTNELYMMMRDCWHAVPSQRPTFKQLVEDLDRIVALTSNQEYLDLSMPLDQYSPSFPDTRSSTCSSGEDSVFSHEPLPEEPCLPRHPAQLANGGLKRR

SEQ ID NO: 24630 - protein, 858 aa, Homo sapiens
LRSGGGGHKVWRPRVADGSPPPAPPPGHQLRLHCSRPGWRRRAPSAAGSRAPAAELLRPRQDPNRARGRRAGAGDAGTRPLAQATADSPEAEPPRRARVSLKRRIELTVEYPWRCGALSPTSNCRTGMWSWKCLLFWAVLVTATLCTARPSPTLPEQDALPSSEDDDDDDDSSSEEKETDNTKPNPVAPYWTSPEKMEKKLHAVPAAKTVKFKCPSSGTPNPTLRWLKNGKEFKPDHRIGGYKVRYATWSIIMDSVVPSDKGNYTCIVENEYGSINHTYQLDVVERSPHRPILQAGLPANKTVALGSNVEFMCKVYSDPQPHIQWLKHIEVNGSKIGPDNLPYVQILKTAGVNTTDKEMEVLHLRNVSFEDAGEYTCLAGNSIGLSHHSAWLTVLEALEERPAVMTSPLYLEIIIYCTGAFLISCMVGSVIVYKMKSGTKKSDFHSQMAVHKLAKSIPLRRQVTVSADSSASMNSGVLLVRPSRLSSSGTPMLAGVSEYELPEDPRWELPRDRLVLGKPLGEGCFGQVVLAEAIGLDKDKPNRVTKVAVKMLKSDATEKDLSDLISEMEMMKMIGKHKNIINLLGACTQDGPLYVIVEYASKGNLREYLQARRPPGLEYCYNPSHNPEEQLSSKDLVSCAYQVARGMEYLASKKCIHRDLAARNVLVTEDNVMKIADFGLARDIHHIDYYKKTTNGRLPVKWMAPEALFDRIYTHQSDVWSFGVLLWEIFTLGGSPYPGVPVEELFKLLKEGHRMDKPSNCTNELYMMMRDCWHAVPSQRPTFKQLVEDLDRIVALTSNQEYLDLSMPLDQYSPSFPDTRSSTCSSGEDSVFSHEPLPEEPCLPRHPAQLANGGLKRR

SEQ ID NO: 24631 - protein, 355 aa, Homo sapiens
LRSGGGGHKVWRPRVADGSPPPAPPPGHQLRLHCSRPGWRRRAPSAAGSRAPAAELLRPRQDPNRARGRRAGAGDAGTRPLAQATADSPEAEPPRRARVSLKRRIELTVEYPWRCGALSPTSNCRTGMWSWKCLLFWAVLVTATLCTARPSPTLPEQDALPSSEDDDDDDDSSSEEKETDNTKPNPVAPYWTSPEKMEKKLHAVPAAKTVKFKCPSSGTPNPTLRWLKNGKEFKPDHRIGGYKVRYATWSIIMDSVVPSDKGNYTCIVENEYGSINHTYQLDVVERSPHRPILQAGLPANKTVALGSNVEFMCKVYSDPQPHIQWLKHIEVNGSKIGPDNLPYVQILKPWKRGRQ

SEQ ID NO: 24632 - protein, 494 aa, Homo sapiens
LRSGGGGHKVWRPRVADGSPPPAPPPGHQLRLHCSRPGWRRRAPSAAGSRAPAAELLRPRQDPNRARGRRAGAGDAGTRPLAQATADSPEAEPPRRARVSLKRRIELTVEYPWRCGALSPTSNCRTGMWSWKCLLFWAVLVTATLCTARPSPTLPEQAQPWGAPVEVESFLVHPGDLLQLRCRLRDDVQSINWLRDGVQLAESNRTRITGEEVEVQDSVPADSGLYACVTSSPSGSDTTYFSVNVSVPIDALPSSEDDDDDDDSSSEEKETDNTKPNPVAPYWTSPEKMEKKLHAVPAAKTVKFKCPSSGTPNPTLRWLKNGKEFKPDHRIGGYKVRYATWSIIMDSVVPSDKGNYTCIVENEYGSINHTYQLDVVERSPHRPILQAGLPANKTVALGSNVEFMCKVYSDPQPHIQWLKHIEVNGSKIGPDNLPYVQILKHSGINSSDAEVLTLFNVTEAQSGEYVCKVSNYIGEANQSAWLTVTRPVAKDCWS

SEQ ID NO: 24633 - protein, 429 aa, Homo sapiens
LRSGGGGHKVWRPRVADGSPPPAPPPGHQLRLHCSRPGWRRRAPSAAGSRAPAAELLRPRQDPNRARGRRAGAGDAGTRPLAQATADSPEAEPPRRARVSLKRRIELTVEYPWRCGALSPTSNCRTGMWSWKCLLFWAVLVTATLCTARPSPTLPEQDALPSSEDDDDDDDSSSEEKETDNTKPNRMPVAPYWTSPEKMEKKLHAVPAAKTVKFKCPSSGTPNPTLRWLKNGKEFKPDHRIGGYKVRYATWSIIMDSVVPSDKGNYTCIVENEYGSINHTYQLDVVERSPHRPILQAGLPANKTVALGSNVEFMCKVYSDPQPHIQWLKHIEVNGSKIGPDNLPYVQILKVIMAPVFVGQSTGKETTVSGAQVPVGRLSCPRMGSFLTLQAHTLHLSRDLATSPRTSNRGHKVEVSWEQRAAGMGGAGL

SEQ ID NO: 24634 - protein, 427 aa, Homo sapiens
LRSGGGGHKVWRPRVADGSPPPAPPPGHQLRLHCSRPGWRRRAPSAAGSRAPAAELLRPRQDPNRARGRRAGAGDAGTRPLAQATADSPEAEPPRRARVSLKRRIELTVEYPWRCGALSPTSNCRTGMWSWKCLLFWAVLVTATLCTARPSPTLPEQDALPSSEDDDDDDDSSSEEKETDNTKPNPVAPYWTSPEKMEKKLHAVPAAKTVKFKCPSSGTPNPTLRWLKNGKEFKPDHRIGGYKVRYATWSIIMDSVVPSDKGNYTCIVENEYGSINHTYQLDVVERSPHRPILQAGLPANKTVALGSNVEFMCKVYSDPQPHIQWLKHIEVNGSKIGPDNLPYVQILKVIMAPVFVGQSTGKETTVSGAQVPVGRLSCPRMGSFLTLQAHTLHLSRDLATSPRTSNRGHKVEVSWEQRAAGMGGAGL

SEQ ID NO: 24635 - protein, 169 aa, Homo sapiens
LSPTSNCRTGMWSWKCLLFWAVLVTATLCTARPSPTLPEQDALPSSEDDDDDDDSSSEEKETDNTKPNRMPVAPYWTSPEKMEKKLHAVPAAKTVKFKCPSSGTPNPTLRWLKNGKEFKPDHRIGGYKSGPLTGPSCKQGCPPTKQWPWVATWSSCVRCTVTRSRTSSG

SEQ ID NO: 24636 - protein, 117 aa, Homo sapiens
LSLPSSPLPVFLSRPLASLPGPVVAAAQPWGAPVEVESFLVHPGDLLQLRCRLRDDVQSINWLRDGVQLAESNRTRITGEEVEVQDSVPADSGLYACVTSSPSGSDTTYFSVNVSGW

SEQ ID NO: 24637 - protein, 14 aa, Homo sapiens
LFLAIFFFFWLLSI

SEQ ID NO: 24638 - protein, 407 aa, Homo sapiens
LPLGAGAGGAALMAFSPWQILSPVQWAKWTWSAVRGGAAGEDEAGGPEGDPEEEDSQAETKSLSFRSGCKVKKHETQSLALDACSRDEGAVISQISDISNRDGHATDEEKLASTSCGQKSAGAEVKGEPEEDLEYFECSNVPVSTINHAFSSSEAGIEKETCQKMEEDGSTVLGLLESSAEKAPVSVSCGGESPLDGICLSESDKTAVLTLIREEIITKEIEANEWKKKYEETRQEVLEMRKIVAEYEKTIAQMIEDEQRTSMTSQKSFQQLTMEKEQALADLNSVERSLSDLFRRYENLKGVLEGFKKNEEALKKCAQDYLARVKQEEQRYQALKIHAEEKLDKANEEIAQVRTKAKAESAALHAGLRKEQMKVESLERALQQKNQEIEELTKICDELIAKLGKTD

SEQ ID NO: 24639 - protein, 39 aa, Homo sapiens
LVPRGFECGFCLLNWMLNRLLALILGLRCACAQHRVCCW

SEQ ID NO: 24640 - protein, 172 aa, Homo sapiens
LMKKCLLPVLITCMQTAICKDRMMMIMILLVNYRPDEFIECEDPVDHVGNATASQELGYGCLKFGGQAYSDVEHTSVQCHALDGIECASPRTFLRENKPCIKYTGHYFITTLLYSFFLGCFGVDRFCLGHTGTAVGKLLTLGGLGIWWFVDLILLITGGLMPSDGSNWCTVY

SEQ ID NO: 24641 - protein, 120 aa, Homo sapiens
MVLGGCPVSYLLLCGQAALLLGNLLLLHCVSRSHSQNATAEPELTSAGAAQPEGPGGAASWEYGDPHSPVILCSYLPDEFIECEDPVDHVGNATASQELGYGCLKVSFCFVVRANPSITK

SEQ ID NO: 24642 - protein, 96 aa, Homo sapiens
LDVLASGRTLRALRVPDAKHREHPVSGASGERCPMNVRGAAPGVRASPRPWQFPTSQRLPAGSPEAAPCSASGCCWPGSAASWRQDPVFKIHFYRS

SEQ ID NO: 24643 - protein, 722 aa, Homo sapiens
LDVLASGRTLRALRVPDAKHREHPVSGASGERCPMNVRGAAPGVRASPRPWQFPTSQRLPAGSPEAAPCSASGCCWPGSAASWRQDPEQISYIIPIDEKLYTVHLKQRYFLADNFMIYLYNQGSMNTYSSDIQTQCYYQGNIEGYPDSMVTLSTCSGLRGILQFENVSYGIEPLESAVEFQHVLYKLKNEDNDIAIFIDRSLKEQPMDDNIFISEKSEPAVPDLFPLYLEMHIVVDKTLYDYWGSDSMIVTNKVIEIVGLANSMFTQFKVTIVLSSLELWSDENKISTVGEADELLQKFLEWKQSYLNLRPHDIAYLLIYMDYPRYLGAVFPGTMCITRYSAGVALQCGPASCCDFRTCVLKDGAKCYKGLCCKDCQILQSGVECRPKAHPECDIAENCNGTSPECGPDITLINGLSCKNNKFICYDGDCHDLDARCESVFGKGSRNAPFACYEEIQSQSDRFGNCGRDRNNKYVFCGWRNLICGRLVCTYPTRKPFHQENGDVIYAFVRDSVCITVDYKLPRTVPDPLAVKNGSQCDIGRVCVNRECVESRIIKASAHVCSQQCSGHGVCDSRNKCHCSPGYKPPNCQIRSKGFSIFPEEDMGSIMERASGKTENTWLLGFLIALPILIVTTAIVLARKQLKKWFAKEEEFPSSESKSEGSTQTYASQSSSEGSTQTYASQTRSESSSQADTSKSKSEDSAEAYTSRSKSQDSTQTQSSSN

SEQ ID NO: 24644 - protein, 159 aa, Homo sapiens
MDFHAKIISLFVMTETAMISMHVVRVYLEKVCVNRECVESRIIKASAHVCSQQCSGHGVCDSRNKCHCSPGYKPPNCQIRSKGFSIFPEEDMGSIMERASGKTENTWLLGFLIALPILIVTTAIVLARKQLKKWFAKEEEFPSSESKSQDSTQTQSSSN

SEQ ID NO: 24645 - protein, 349 aa, Homo sapiens
LRLLSPEVPGSLRQDARGEAAEAAPTSRRTGRRAGMGIGRSEGGRRGAALGVLLALGAALLAVGSASEYDYVSFQSDIGPYQSGRFYTKPPQCVDIPADLRLCHNVGYKKMVLPNLLEHETMAEVKQQASSWVPLLNKNCHAGTQVFLCSLFAPVCLDRPIYPCRWLCEAVRDSCEPVMQFFGFYWPEMLKCDKFPEGDVCIAMTPPNATEASKPQGTTVCPPCDNELKSEAIIEHLCASEFALRMKIKEVKKENGDKKIVPKKKKPLKLGPIKKKDLKKLVLYLKNGADCPCHQLDNLSHHFLIMGRKVKSQYLLTAIHKWDKKNKEFKNFMKKMKNHECPTFQSVFK

SEQ ID NO: 24646 - protein, 36 aa, Homo sapiens
MYPLADRRVSLPPLQSIIPFYLLPEPRCHLLQGLTF

SEQ ID NO: 24647 - protein, 54 aa, Homo sapiens
MVTYLLRMMTSWAIVCSVWYLPPMTREADEDAVQFANRVKSAIARQGGLVDLLW

SEQ ID NO: 24648 - protein, 31 aa, Homo sapiens
MLLLMGLLKGGEEARWAADWAMGRTCVRTPG

SEQ ID NO: 24649 - protein, 28 aa, Homo sapiens
LWINWNFLCCLSLCQFQYESSSNGKSLP

SEQ ID NO: 24650 - protein, 49 aa, Homo sapiens
LPVFAICPAFCLCCCLQVELRGSGLQPDLIEGRKGAQIVKRASLKRGKQ

SEQ ID NO: 24651 - protein, 114 aa, Homo sapiens
MDLGMGKHAQNLFIIKKSLTFFTYHMDRICVKVNYLYFKMYVSPHCLQLPMLSFLNVIYISRVNQTLSSKPNLSFPTSFQQEALRGDSDGDMENNPSSLNLLLLLILLLLLLIK

SEQ ID NO: 24652 - protein, 29 aa, Homo sapiens
MAAVSVWGISAVRPGAPGSRLSFLPDSFY

SEQ ID NO: 24653 - protein, 126 aa, Homo sapiens
MKGQLPPQAMVAETKAMGRCRRLRNQQEVPAGNTERIWRKLLFCPYSFGDPDGISGTPCLLYNWDPWKSDRIWQQMSKKGHFLADLRYIGDIKKRIIHQSLQILQAKLKQARQVLFVFLRDLESLT

SEQ ID NO: 24654 - protein, 91 aa, Homo sapiens
VFLFCFVLFFLLNFFSASDKLLLAWREMEQAVELCGRVGDSFWVSELTKGVRFCAPTFHFLIKHWVDLCQKSGVPHHALSLTGPAEKRPRE

SEQ ID NO: 24655 - protein, 32 aa, Homo sapiens
MCNTPTYCDLGKAAKDVFNKGYGIFYFWSCLH

SEQ ID NO: 24656 - protein, 56 aa, Homo sapiens
MMQISVFLPAAWLQLILAGEETSQLSQIGRKNMECVLPLTEHNQMNCPDSSLQTSS

SEQ ID NO: 24657 - protein, 29 aa, Homo sapiens
MMQISVFLPAAWLQLILAGVSSMSCKSRS

SEQ ID NO: 24658 - protein, 68 aa, Homo sapiens
MDFVFRNKRRIMRIFSVPPTEETLSEPNFYDTISKIRLRQQLEMYSISRKYDYQQPQNQADSVQLSLE

SEQ ID NO: 24659 - protein, 74 aa, Homo sapiens [sequence omitted]

SEQ ID NO: 24660 - protein, 117 aa, Homo sapiens
LGVCLGIYCGNPGNCRGRQHGKAAPEQQERPRPPRGAASCWAAADHGPDEYSALPLPRPLLHRSSTIHCGPHTLSLWSLQDRTDEKLLTLAVLRGAENRSETAEACWGRSCKESLSV

SEQ ID NO: 24661 - protein, 215 aa, Homo sapiens
LAALLLAASVLSAALLAPGGSSGRDAQAAPPRDLDKKRHAELKMDQALLLIHNELLWTNLTVYWKSECCYHCLFQVLVNVPQSPKAGKPSAAAASVSTQHGSILQLNDTLEEKEVCRLEYRFGEFGNYSLLVKNIHNGVSEIACDLAVNEDPVDSNLPVSIAFLIGLAVIIVISFLRLLLRVLLCHPGWSAVAPSRLTPSSASRVHTILLPQPPE

SEQ ID NO: 24662 - protein, 217 aa, Homo sapiens
MSSKVSCDTLYKAVREVLHGNQCKRHKFLETMELHISLKNYDPQKDKRFSGTVRLKSTPHPKFSVCVLGDQQHCDEAKAIDIPHMDIKTLKNLNKNKKLVKKLVKKYDAFLASESLIKQIPRILSPGLNKAGKFPSLLTQNENMVAKVDEVKSTIKFQMKKVLCLAVAVGHVKMTDDELVYNTHLAVNFLGSLLKKNWQNVRALYIKSTMGKPQRLY

SEQ ID NO: 24663 - protein, 9 aa, Homo sapiens
LVLFVFMVG

SEQ ID NO: 24664 - protein, 118 aa, Homo sapiens
LMQGRLIRAHRIPLVASGCLLVAWTLPAPSRSPSQTWPMYQPPAFTDPVAATWAEPAPWRCCAHSRIACWWHPILLQTPQTNQKLEYYKCVYLDQPAPFSRDQTKILPQLSFLIFIES

SEQ ID NO: 24665 - protein, 102 aa, Homo sapiens
VDSESASVVGKRPPFHGTPSTMSSPASTPSRRGSRRGRATPAQTPRSEDARSSPSQRRRGEDSTSTGELQPMPTSPGVDLQSPAAQDVLFSSPPQMHSSVHH

SEQ ID NO: 24666 - protein, 884 aa, Homo sapiens
VDSESASVVGKRPPFHGTPSTMSSPASTPSRRGSRRGRATPAQTPRSEDARSSPSQRRRGEDSTSTGELQPMPTSPGVDLQSPAAQDVLFSSPPQMHSSAIPLDFDVSSPLTYGTPSSRVEGTPRSGVRGTPVRQRPDLGSAQKGLQVDLQSDGAAAEDIVASEQSLGQKLVIWGTDVNVAACKENFQRFLQRFIDPLAKEEENVGIDITEPLYMQRLGEINVIGEPFLNVNCEHIKSFDKNLYRQLISYPQEVIPTFDMAVNEIFFDRYPDSILEHQIQVRPFNALKTKNMRNLNPEDIDQLITISGMVIRTSQLIPEMQEAFFQCQVCAHTTRVEMDRGRIAEPSVCGRCHTTHSMALIHNRSLFSDKQMIKLQESPEDMPAGQTPHTVILFAHNDLVDKVQPGDRVNVTGIYRAVPIRVNPRVSNVKSVYKTHIDVIHYRKTDAKRLHGLDEEAEQKLFSEKRVELLKELSRKPDIYERLASALAPSIYEHEDIKKGILLQLFGGTRKDFSHTGRGKFRAEINILLCGDPGTSKSQLLQYVYNLVPRGQYTSGKGSSAVGLTAYVMKDPETRQLVLQTGALVLSDNGICCIDEFDKMNESTRSVLHEVMEQQTLSIAKAGIICQLNARTSVLAAANPIESQWNPKKTTIENIQLPHTLLSRFDLIFLLLDPQDEAYDRRLAHHLVALYYQSEEQAEEELLDMAVLKDYIAYAHSTIMPRLSEEASQALIEAYVDMRKIGSSRGMVSAYPRQLESLIRLAEAHAKVRLSNKVEAIDVEEAKRLHREALKQSATDPRTGIVDISILTTGMSATSRKRKEELAEALKKLILSKGKTPALKYQQLFEDIRGQSDIAITKDMFEEALRALADDDFLTVTGKTVRLL

SEQ ID NO: 24667 - protein, 100 aa, Homo sapiens
LIIFLFFAFQTNYENRIYSLKVECGPKYPEAPPSVRFVTKINMNGINNSSGMVDARSIPVLAKWQNSYSIKVVLQELRRLMMSKENMKLPQPPEGQTYNN

SEQ ID NO: 24668 - protein, 46 aa, Homo sapiens
MTWTFVRIYLIYVHPLCFQVTGGKMQHNFFSLERHCHLNINLEYSK

SEQ ID NO: 24669 - protein, 361 aa, Homo sapiens
LNTIMGGAVSAGEDNDDLIDNLKEAQYIRTERVEQAFRAIDRGDYYLEGYRDNAYKDLAWKHGNIHLSAPCIYSEVMEALKLQPGLSFLNLGSGTGYLSTMVGLILGPFGINHGIELHSDVVEYAKEKLESFIKNSDSFDKFEFCEPAFVVGNCLQIASDSHQYDRIYCGAGVQKDHENYMKILLKVGGILVMPIEDQLTQIMRTGQNTWESKNILAVSFAPLVQPSKNDNGKPDSVGLPPCAVRNLQDLARIYIRRTLRNFINDEMQAKGIPQRAPPKRKRKRVKQRINTYVFVGNQLIPQPLDSEEDEKMEEDNKEEEEKDHNEAMKPEEPPQNLLREKIMKLPLPESLKAYLTYFRDK

SEQ ID NO: 24670 - protein, 41 aa, Homo sapiens
MVGLILGPFGINHGIELHSDVVEYAKEKLESFIKNSDSFDK

SEQ ID NO: 24671 - protein, 12 aa, Homo sapiens
LSVLLILFWSRD

SEQ ID NO: 24672 - protein, 45 aa, Homo sapiens
VGLVGNSLVMFVIIRLEFQWKTTKPCDELRDPKGTGVKPGREALD

SEQ ID NO: 24673 - protein, 83 aa, Homo sapiens
MLLLTALWSEQVTSSLLLAGVLGSVVIHRSGEGAEAGVPGLQRSPLHCCGLNCALHPTKLICCQPHPPHLRMWLYLDIGSLQR

SEQ ID NO: 24674 - protein, 127 aa, Homo sapiens
MDWEILVKALIDQEVKNGIPSNRIILGGFSQGGALSLYTALTTQQKLAGVTALSCWLPLRASFPQCHGDCDPLVPLMFGSLTVEKLKTLVNPANVTFKTYEGMMHSSCQQEMMDVKQFIDKLLPPID

SEQ ID NO: 24675 - protein, 271 aa, Homo sapiens
LARTRLSVRPVGPAGTRRSHALGPRPGARSSFRLRCELRRCMCGNNMSTPLPAIVPAARKATAAVIFLHGLGDTGHGWAEAFAGIRSSHIKYICPHAPVRPVTLNMNVAMPSWFDIIGLSPDSQEDESGIKQAAENIKALIDQEVKNGIPSNRIILGGFSQGGALSLYTALTTQQKLAGVTALSCWLPLRASFPQGPIGGANRDISILQCHGDCDPLVPLMFGSLTVEKLKTLVNPANVTFKTYEGMMHSSCQQEMMDVKQFIDKLLPPID

SEQ ID NO: 24676 - protein, 237 aa, Homo sapiens
LARTRLSVRPVGPAGTRRSHALGPRPGARSSFRLRCELRRCMCGNNMSTPLPAIVPAARKATAAVIFLHGLGDTGHGWAEAFAGIRSSHIKYICPHAPVRPVTLNMNVAMPSWFDIIGLSPDSQEDESGIKQAAENIKALIDQEVKNGIPSNRIILGGFSQGPIGGANRDISILQCHGDCDPLVPLMFGSLTVEKLKTLVNPANVTFKTYEGMMHSSCQQEMMDVKQFIDKLLPPID

SEQ ID NO: 24677 - protein, 301 aa, Homo sapiens
LDLRVMAGPLQGGGARALDLLRGLPRVSLANLKPNPGSKKPERRPRGRRRGRKCGRGHKGERQRGTRPRLGFEGGQTPFYIRIPKYGFNEGHSFRRQYKPLSLNRLQYLIDLGRVDPSQPIDLTQLVNGRGVTIQPLKRDYGVQLVEEGADTFTAKVNIEVQLASELAIAAIEKNGGVVTTAFYDPRSLDIVCKPVPFFLRGQPIPKRMLPPEELVPYYTDAKNRGYLADPAKFPEARLELARKYGYILPDITKDELFKMLCTRKDPRQIFFGLAPGWVVNMADKKILKPTDENLLKYYTS

SEQ ID NO: 24678 - protein, 106 aa, Homo sapiens
LPVQRVADVSREESTDLLCCCPHRHQLRAPLLCCLTFWEQETTRAKDATEWEEEEDEGGLTHLSPTEPAHLPRCLPQRRWYLCRDLTMRRCSGTASASSMPSTWRA

SEQ ID NO: 24679 - protein, 389 aa, Homo sapiens [sequence omitted]

SEQ ID NO: 24680 - protein, 114 aa, Homo sapiens
LVRTLLLLTHRCSLSPRNKSVRKPARNSHVCADLIRGAKEKNLKVKGPVRMPTKTLRITTRKTPCGEGSKTWDRFQMRIHKRLIDLHSPSEIVKQITSISIEPGVEVEVTIADA

SEQ ID NO: 24681 - protein, 127 aa, Homo sapiens
VFGAGDGLGAGEAEAGVNTRGTHAKEGTFGNPNLECLVFRIRKEKEMKCEETHAPNSNWVYVMLPSKKTVRMPSVTQRLRDPDINPCLSILFYLLNDASLISVRNLMLPPDVWMKITMTGKGVPLTS

SEQ ID NO: 24682 - protein, 32 aa, Homo sapiens
VSFLLALSAMPMVCCCWLCCGMSLHDFLEAWS

SEQ ID NO: 24683 - protein, 44 aa, Homo sapiens
MFLQKLKSCLVKAFHKMVCVWDQEDRRLLKKRTGTLTHFRLLHV

SEQ ID NO: 24684 - protein, 161 aa, Homo sapiens
LLAEDFKREIPLELQRLVHGGQVNLDMEDHQDQEYIKPRLRFKAFSGEGQKLGSLTPEIVSTPSSPEEEDKSILNAVVLIDDSVPTTKIQIRLADGSRLIQRFNSTHRILDVRNFIVQSRPEFAALDFILVTSFPNKELTDESLTLLEADILNTVLLQQLK

SEQ ID NO: 24685 - protein, 367 aa, Homo sapiens
LLGPPDALPTRVSGTLGPNARLLALTLRFTPGGALALTLPLTRAHTPPRALRSGSSPAPSEGAGTAAESAEGPRGLPMADLSFIEDTVAFPEKEEDEEEEEEGVEWGYEEGVEWGLVFPDANGEYQSPINLNSREARYDPSLLDVRLSPNYVVCRDCEVTNDGHTIQVILKSKSVLSGGPLPQGHEFELYEVRFHWGRENQRGSEHTVNFKAFPMELHLIHWNSTLFGSIDEAVGKPHGIAIIALFVQIGKEHVGLKAVTEILQDIQYKGKSKTIPCFNPNTLLPDPLLRDYWVYEGSLTIPPCSEGVTWILFRYPLTISQLQIEEFRRLRTHVKGAELVEGCDGILGDNFRPTQPLSDRVIRAAFQ

SEQ ID NO: 24686 - protein, 142 aa, Homo sapiens
LVGQEVPPAEESPEVTTEAAEASALEAGSEVSEKPGQEATVLPKDGAVNGPSAVGDQTPTEPQTSIERLTETKDGSGLEEKVRAKLVPSQEETKLSVEESEAAGDGVDTKVAQGATEKSPEDKVQIAANEETKERGRTDKRG

SEQ ID NO: 24687 - protein, 28 aa, Homo sapiens
MAVIDLVKQLLSRSRSLGRNTKDVLNEL

SEQ ID NO: 24688 - protein, 328 aa, Homo sapiens
LKEVRQPSPAPADRAMAQRKNAKSSGNSSSSGSGSGSTSAGSSSPGARRETKHGGHKNGRKGGLSGTSFFTWFMVIALLGVWTSVAVVWFDLVDYEEVLGKLGIYDADGDGDFDVDDAKVLLGLKERSTSEPAVPPEEAEPHTEPEEQVPVEAEPQNIEDEAKEQIQSLLHEMVHAEHVEGEDLQQEDGPTGEPQQEDDEFLMATDVDDRFETLEPEVSHEETEHSYHVEETVSQDCNQDMEEMMSEQENPDSSEPVVEDERLHHDTDDVTYQVYEEQAVYEPLENEGIEITEVTAPPEDNPVEDSQVIVEEVSIFPVEEQQEVPPDT

SEQ ID NO: 24689 - protein, 342 aa, Homo sapiens
LKEVRQPSPAPADRAMAQRKNAKSSGNSSSSGSGSGSTSAGSSSPGARRETKHGGHKNGRKGGLSGTSFFTWFMVIALLGVWTSVAVVWFDLVDYEEVLAKAKDFRYNLSEVLQGKLGIYDADGDGDFDVDDAKVLLGLKERSTSEPAVPPEEAEPHTEPEEQVPVEAEPQNIEDEAKEQIQSLLHEMVHAEHVEGEDLQQEDGPTGEPQQEDDEFLMATDVDDRFETLEPEVSHEETEHSYHVEETVSQDCNQDMEEMMSEQENPDSSEPVVEDERLHHDTDDVTYQVYEEQVYEPLENEGIEITEVTAPPEDNPVEDSQVIVEEVSIFPVEEQQEVPPDT

SEQ ID NO: 24690 - protein, 285 aa, Homo sapiens
LKEVRQPSPAPADRAMAQRKNAKSSGNSSSSGSGSGSTSAGSSSPGARRETKHGGHKNGRKGGLSGTSFFTWFMVIALLGVWTSVAVVWFDLVDYEEVLGKLGIYDADGDGDFDVDDAKVLLGLKERSTSEPAVPPEEAEPHTEPEEQVPVEAEPQNIEDEAKEQIQSLLHEMVHAEHETEHSYHVEETVSQDCNQDMEEMMSEQENPDSSEPVVEDERLHHDTDDVTYQVYEEQAVYEPLENEGIEITEVTAPPEDNPVEDSQVIVEEVSIFPVEEQQEVPPDT

SEQ ID NO: 24691 - protein, 58 aa, Homo sapiens [sequence omitted]

SEQ ID NO: 24692 - protein, 92 aa, Homo sapiens
VEPLREGYKYPVYGVQWHPEKAPYEWKNLDGISHAPNAVKTAFYLAEFFVNEARKNNHHFKSESEEEKALIYQFSPIYTGNISSFQQCYIFD

SEQ ID NO: 24693 - protein, 205 aa, Homo sapiens
MASPGCLLCVLGLLLCGAASLELSRPHGDTAKKPIIGILMQKCRNKVMKNYGRYYIAASYVKYLESAGARVVPVRLDLTEKDYEILFKSINGILFPGGSVDLRRSDYAKVAKIFYNLSIQSFDDGDYFPVWGTCLGFEELSLLISGECLLTATDTVDVAMPLNFTGGQLHSRMFQNFPTELLLSLAVEPLTANFHKWSLSVKVSH

SEQ ID NO: 24694 - protein, 143 aa, Homo sapiens
MASPGCLLCVLGLLLCGAASLELSRPHGDTAKKPIIGILMQKCRNKVMKNYGRYYIAASYVKYLESAGARVVPVRLDLTEKDYEILFKSINGILFPGGSVDLRRSDYAKVAKIFYNLSIQVNISYCLLFQMGFCKFLCEWFIF

SEQ ID NO: 24695 - protein, 92 aa, Homo sapiens
MASPGCLLCVLGLLLCGAASLELSRPHGDTAKKPIIGILMQKCRNKVMKNYGRYYIAASYVKYLESAGARVVPVRLDLTEKDYEILFKSING

SEQ ID NO: 24696 - protein, 16 aa, Homo sapiens
MVFISASALILFTKHT

SEQ ID NO: 24697 - protein, 40 aa, Homo sapiens
LPASAFALWLPELVRLLAIAAAGAANRRARSAPPGSLPHP

SEQ ID NO: 24698 - protein, 53 aa, Homo sapiens
LPCSAPLFLSLFLFFLPHKGQEPTPALPGSKMQGWCWQTRSGNSYSIWMLMMA

SEQ ID NO: 24699 - protein, 10 aa, Homo sapiens
LSSMTHPREC

SEQ ID NO: 24700 - protein, 21 aa, Homo sapiens
LKSVFLSAAWTMSTLHLHSIL

SEQ ID NO: 24701 - protein, 23 aa, Homo sapiens
MPVWWRRRRLRARSWALRAYRLL

SEQ ID NO: 24702 - protein, 19 aa, Homo sapiens
VKVYESHHNRCFPKTCRRL

SEQ ID NO: 24703 - protein, 315 aa, Homo sapiens
MKCLGKRRGQAAAFLPLCWLFLKILQPGHSHLYNNRYAGDKVIRFIPKTEEEAYALKKISYQLKVDLWQPSSISYVSEGTVTDVHIPQNGSRALLAFLQEANIQYKVLIEDLQKTLEKGSSLHTQRNRRSLSGYNYEVYHSLEEIQNWMHHLNKTHSGLIHMFSIGRSYEGRSLFILKLGRRSRLKRAVWIDCGIHAREWIGPAFCQWFVKEALLTYKSDPAMRKMLNHLYFYIMPVFNVDGYHFSWTNDRFWRKTRSRNSRFRCRGVDANRNWKVKWCGKFGTNWDPDPKVSAGFTLQNMSPEDSHGRLMFFCM

SEQ ID NO: 24704 - protein, 160 aa, Homo sapiens [sequence omitted]

SEQ ID NO: 24705 - protein, 885 aa, Homo sapiens
MKYSCCALVLAVLGTELLGSLCSTVRSPRFRGRIQQERKNIRPNIILVLTDDQDVELGSLQVMNKTRKIMEHGGATFINAFVTTPMCCPSRSSMLTGKYVHNHNVYTNNENCSSPSWQAMHEPRTFAVYLNNTGYRTAFFGKYLNEYNGSYIPPGWREWLGLIKNSRFYNYTVCRNGIKEKHGFDYAKDYFTDLITNESINYFKMSKRMYPHRPVMMVISHAAPHGPEDSAPQFSKLYPNASQHITPSYNYAPNMDKHWIMQYTGPMLPIHMEFTNILQRKRLQTLMSVDDSVERLYNMLVETGELENTYIIYTADHGYHIGQFGLVKGKSMPYDFDIRVPFFIRGPSVEPGSIVPQIVLNIDLAPTILDIAGLDTPPDVDGKSVLKLLDPEKPGNRFRTNKKAKIWRDTFLVERGKFLRKKEESSKNIQQSNHLPKYERVKELCQQARYQTACEQPGQKWQCIEDTSGKLRIHKCKGPSDLLTVRQSTRNLYARGFHDKDKECSCRESGYRASRSQRKSQRQFLRNQGTPKYKPRFVHTRQTRSLSVEFEGEIYDINLEEEEELQVLQPRNIAKRHDEGHKGPRDLQASSGGNRGRMLADSSNAVGPPTTVRVTHKCFILPNDSIHCERELYQSARAWKDHKAYIDKEIEALQDKIKNLREVRGHLKRRKPEECSCSKQSYYNKEKGVKKQEKLKSHLHPFKEAAQEVDSKLQLFKENNRRRKKERKEKRRQRKGEECSLPGLTCFTHDNNHWQTAPFWNLGSFCACTSSNNNTYWCLRTVNETHNFLFCEFATGFLEYFDMNTDPYQLTNTVHTVERGILNQLHVQLMELRSCQGYKQCNPRPKNLDVGNKDGGSYDLHRMLLFLVPCSAPLTSRAMVSDASF

SEQ ID NO: 24706 - protein, 121 aa, Homo sapiens
LFCCVFLFYPTVGSFCACTSSNNNTYWCLRTVNETHNFLFCEFATGFLEYFDMNTDPYQLTNTVHTVERGILNQLHVQLMELRSCQGYKQCNPRPKNLDVGNKDGGSYDLHRGQLWDGWEG

SEQ ID NO: 24707 - protein, 89 aa, Homo sapiens
LVARSSGMICMVVPVTENDAGIRRAEIKQGIREVILCKDQDGKIGLRLKSIDNDIFVQLVQANSPASLVGLRFGDQVLQISGENCRVEL

SEQ ID NO: 24708 - protein, 20 aa, Homo sapiens
LLLYGFMHFFKGHLRGGLLL

SEQ ID NO: 24709 - protein, 519 aa, Homo sapiens
MFPSNAWAFYFLSFLTNSRPYPHILPTPSSQTMAAYGQTQFTTGMQQATAYATYPQPGQPYGISSYGALWAGIKTEGGLSQSQSPGQTGFLSYGTSFSTPQPGQAPYSYQMQGSSFTTSSGIYTGNNSLTNSSGFNSSQQDYPSYPSFGQGQYAQYYNSSPYPAHYMTSSNTSPTTPSTNATYQLQEPPSGITSQAVTDPTAEYSTIHSPSTPIKDSDSDRLRRGSDGKSRGRGRRNNNPSPPPDSDLERVFIWDLDETIIVFHSLLTGSYANRYGRDPPTSVSLGLRMEEMIFNLADTHLFFNDLEECDQVHIDDVSSDDNGQDLSTYNFGTDGFPAAATSANLCLATGVRGGVDWMRKLAFRYRRVKEIYNTYKNNVGGLLGPAKREAWLQLRAEIEALTDSWLTLALKALSLIHSRTNCVNILVTTTQLIPALAKVLLYGLGIVFPIENIYSATKIGKESCFERIIQRFGRKVVYVVIGDGVEEEQGAKKHAMPFWRISSHSDLMALHHALELEYL

SEQ ID NO: 24710 - protein, 66 aa, Homo sapiens
MGRSFRWILLDPSPFPGTVIVTGGGCGCHCTAPTATAAPDLGDHVLPLQKELPFVTRRGRRSTLGP

SEQ ID NO: 24711 - protein, 32 aa, Homo sapiens
MWNHRLNRTGTHLMGLFVKCECLGATERRESS

SEQ ID NO: 24712 - protein, 69 aa, Homo sapiens
MSLETTGPQERQALSVLLLPWKKPAPTMPSATSKSSLRPPQKQMLSCFLYSCRTNLTLSPRLLGCNGVA

SEQ ID NO: 24713 - protein, 64 aa, Homo sapiens
MSLETTGPQERQALSVLLLPWKKPAPTMPSATSKSSLRPPQKQMLSCFLYSCRTTSNHPNTREH

SEQ ID NO: 24714 - protein, 144 aa, Homo sapiens
LFSIALLSFWSQLQTFLFYFRSHKNLFLSKLQHGTQQQDLNKKERRVGTPQSTKKKKESRRATESRIPVSKSQPVTPEKHRARKRQAWLWEEDKNLRSGVRKYGEGNWSKILLHYKFNNRTSVMLKDRWRTMKKLKLISSDSED

SEQ ID NO: 24715 - protein, 266 aa, Homo sapiens
LAMRTLWMALCALSRLWPGAQAGCAEAGRCCPGRDPACFARGWRLDRVYGTCFCDQACRFTGDCCFDYDRACPARPCFVGEWSPWSGCADQCKPTTRVRRRSVQQEPQNGGAPCPPLEERAGCLEYSTPQGQDCGHTYVPAFITTSAFNKERTRQATSPHWSTHTEDAGYCMEFKTESLTPHCALENWPLTRWMQYLREGYTVCVDCQPPAMNSVSLRCSGDGLDSDGNQTLHWQAIGNPRCQGTWKKVRRVDQCSCPAVHSFIFI

SEQ ID NO: 24716 - protein, 530 aa, Homo sapiens
LVFAGRDGEATSSPPPPPSRKVQDPLNRALHSGGRSRRGMVARPLHSTEGQPESLGKMFSVQLSLGEQTWESEGSSIKKAQQAVANKALTESTLPKPVQKPPKSNVNNNPGSITPTVELNGLAMKRGEPAIYRPLDPKPFPNYRANYNFRGMYNQRYHCPVPKIFYVQLTVGNNEFFGEGKTRQAARHNAAMKALQALQNEPIPERSPQNGESGKDVDDDKDANKSEISLVFEIALKRNMPVSFEVIKESGPPHMKSFVTRVSVGEFSAEGEGNSKKLSKKRAATTVLQELKKLPPLPVVEKPKLFFKKRPKTIVKAGPEYGQGMNPISRLAQIQQAKKEKEPDYVLLSERGMPRRREFVMQVKVGNEVATGTGPNKKIAKKNAAEAMLLQLGYKASTNLQDQLEKTGENKGWSGPKPGFPEPTNNTPKGILHLSPDVYQEMEASRHKVISGTTLGYLSPKDMNQPSSSFFSISPTSNSSATIARELLMNGTSSTAEAIGLKGSSPTPPCSPVQPSKQLEYLARIQGFQV

SEQ ID NO: 24717 - protein, 54 aa, Homo sapiens
LAPLAVYMWIYSFWRYNGKETAVSLAVWPRLECPAGLKFLTSSDLPPKVLRLQV

SEQ ID NO: 24718 - protein, 280 aa, Homo sapiens
VSRSRGLVQLGRPQPLVTRVMLFLALGSPWAVELPLCGRRTALCAAAALRGPRASVSRASSSSGPSGPVAGWSTGPSGAARLLRRPGRAQIPVYWEGYVRFLNTPSDKSEDGRLIYTGNMARAVFGVKCFSYSTSLIGLTFLPYIFTQNNAISESVPLPIQIIFYGIMGSFTVITPVLLHFITKGYVIRLYHEATTDTYKAITYNAMLAETSTVFHQNDVKIPDAKHVFTTFYAKTKSLLVNPVLFPNREDYIHLMGYDKEEFILYMEETSEEKRHKDDK

SEQ ID NO: 24719 - protein, 52 aa, Homo sapiens
LSGSWLGSLAAAMAFKHTRKTPVESEVAIHRIHITLTSCNVKSLDKVCADLI

SEQ ID NO: 24720 - protein, 103 aa, Homo sapiens [sequence omitted]

SEQ ID NO: 24721 - protein, 112 aa, Homo sapiens
LDALPAISSRLREPQRRRLAYSCSQHPRRPRTLGAQALRERGSPSAVPCEGSGRLQRPAVRFGSPLPGNFTLESQKEWKSLSWRFSWGNPEVIHYEVYRAGVAQSNHSAVHG

SEQ ID NO: 24722 - protein, 73 aa, Homo sapiens
LDALPAISSRLREPQRRRPAVRFGSPLPGNFTLESQKEWKSLSWRFSWGNPEVIHYEVYRAGVAQSNHSAVHG

SEQ ID NO: 24723 - protein, 76 aa, Homo sapiens
VVWNLTCSVSELLASMRQGFHRRTWSKNSHCHSYRLSSLEGAAGTGKRDLQRRHGFQKRECEECKQSAKNKPVGCT

SEQ ID NO: 24724 - protein, 140 aa, Homo sapiens
VAFAYWAGSVHTALVFLGLNAGGKGSPKNVESFASMLRHSPLTQMGPAKDKLVIGRIFHIVENDLYIDFGGKFHCVCRRPEVDGEKYQKGTRVRLRLLDLELTSRFLGATTDTTVLEANAVLLGIQESKDSRSKEEHHEK

SEQ ID NO: 24725 - protein, 71 aa, Homo sapiens
LVVNFFVFLVLHDHAGNSPTFKSFEEKVENLKSKVGGTKPAGGDFGEVLNSAANASATTTEPLPEKTQESL

SEQ ID NO: 24726 - protein, 80 aa, Homo sapiens
LVVNFFVFLVLHDHAGLQAFSHSFRNSPTFKSFEEKVENLKSKVGGTKPAGGDFGEVLNSAANASATTTEPLPEKTQESL

SEQ ID NO: 24727 - protein, 271 aa, Homo sapiens
VTPQESAPGRGRAAPPRPTPLGVGTSRESPAEARRSSARRGGRSEPGRAAGGGAAEDTRRRAGDMDRGEQGLLRTDPVPEEGEDVAATISATETLSEEEQEELRRELAKVEEEIQTLSQVLAAKEKHLAEIKRKLGINSLQELKQNIAKGWQDVTATSAYKKTSETLSQAGQKASAAFSSVGSVITKKLEDVKLQAFSHSFSIRSIQHSISMPAMRNSPTFKSFEEKVENLKSKVGGTKPAGGDFGEVLNSAANASATTTEPLPEKTQESL

SEQ ID NO: 24728 - protein, 56 aa, Homo sapiens
VIPLEPETPTRGSERRAPGLEAAAALGSARPGAVASVPAAASLSRVPWRMPGARHS

SEQ ID NO: 24729 - protein, 106 aa, Homo sapiens
VVMLLFLRLIFFLVAIYSCHLELLMTSKYSFEQRHSILNFFLPPSAHCHYIFLCLQSTITLDGGVLVHVQKWDGKSTTIKRKREDDKLVVECVMKGVTSTRVYERA

SEQ ID NO: 24730 - protein, 275 aa, Homo sapiens
MSKSESPKEPKQLRKLFTGRLSFETIDESLRSHFEQWGTLTNCAVMRNPNTRCSRGFGFVTYATVGEVDAAVNARPQKVDGRVVEPKRAVSREDSQRPVAYLTVKKIFIGGIKEDTEEHHLRDYFEQCGKMEVIEIMTDQGSGKKRGFAFVTFHDHDSMDKTVIQKHYTMNGHNCEVRKTCQSKRWLVLHPGKEVEVVLETLVVVVEVFSVGMTTLVVEETSGVMVALLTAVVVGDMVAVGMAIRDLVMMEATLEVVEATMILAVTTISLQILDP

SEQ ID NO: 24731 - protein, 45 aa, Homo sapiens
MKGGNFGGRSSGPHGGGGQYFAKPRNQGGYGGSSSSSSYGSGRRF

SEQ ID NO: 24732 - protein, 392 aa, Homo sapiens
LPLPLLPPLVLPLSGARLPVAAAAASPARVGLRGLPPSQPRSFPAACKSAWLRVTCQCLRQRLREKNALHSFFHRHTVFYTKSHFYSNILLPLGLKQGEPIMTGKTQTSNVTNKNDPKSINSRVFIGNLNTAIVKKVDIEAIFSKYGKIVGCSVHKGYAFVQYMSERHARAAVAGENARVIAGQPLDINMAGEPKPYRPKPGNKRPLSALYRLESKEPFLSVGGYVFDYDYYRDDFYNRLFDYHGRVPPPPRAVIPLKRPRVAVTTTRRGKGVFSMKGGSRSTASGSTGSKLKSDELQTIKKELTQIKTKIDSLLGRLEKIEKQQKAEAEAQKKQLEESLVLIQEECVSEIADHSTEEPAEGGPDADGEEMTDGIEEDFDEDGGHELFLQIK

SEQ ID NO: 24733 - protein, 310 aa, Homo sapiens
LLLLFAMSKRRRLKQGEPIMTGKTQTSNVTNKNDPKSINSRVFIGNLNTAIVKKVDIEAIFSKYGKIVGCSVHKGYAFVQYMSERHARAAVAGENARVIAGQPLDINMAGEPKPYRPKPGNKRPLSALYRLESKEPFLSVGGYVFDYDYYRDDFYNRLFDYHGRVPPPPRAVIPLKRPRVAVTTTRRGKGVFSMKGGSRSTASGSTGSKLKSDELQTIKKELTQIKTKIDSLLGRLEKIEKQQKAEAEAQKKQLEESLVLIQEECVSEIADHSTEEPAEGGPDADGEEMTDGIEEDFDEDGGHELFLQIK

SEQ ID NO: 24734 - protein, 33 aa, Homo sapiens
LNVLYNFIFKNLVNVQALAHFKNKLHKQIFPIT

SEQ ID NO: 24735 - protein, 69 aa, Homo sapiens
LSWHEKSITMLHVAHWNSAKYSSLAEAASKADGLAVIGVLMKVGEANPKLQKVLDALQAIKTKVNTLNK

SEQ ID NO: 24736 - protein, 152 aa, Homo sapiens
MPWYQRRIAKMLFATPPSSTYEKALGYFHRAEQVDPNFYSKNLLLLGKTYLKLHNKKLAAFWLMKAKDYPAHTEEDKQEPDSPRVTLVRDVSPLRVRPITENKPQESLTFSFPCSPHLIVLVWIPELTAGLRCLFPHVHVYQRFCVASPSAS

SEQ ID NO: 24737 - protein, 317 aa, Homo sapiens
LQVMALAARLWRLLPFRRGAAPGSRLPAGTSGSRGHCGPCRFRGFEVMGNPGTFKRGLLLSALSYLGFETYQVISQAAVVHATAKVEEILEQADYLYESGETEKLYQLLTQYKESEDAELLWRLARASRDVAQLSRTSEEEKKLLVYEALEYAKRALEKNESSFASHKWYAICLSDVGDYEGIKAKIANAYIIKEHFEKAIELNPKDATSIHLMGIWCYTFAEMPWYQRRIAKMLFATPPSSTYEKALGYFHRAEQVDPNFYSKNLLLLGKTYLKLHNKKLAAFWLMKAKDYPAHTEEDKQIQTEAAQLLTSFSEKN

SEQ ID NO: 24738 - protein, 18 aa, Homo sapiens
LFSTVARLPPLRLPRNSG

SEQ ID NO: 24739 - protein, 30 aa, Homo sapiens
LFSTVARLPPLRLPRECGRLPVPGPETQVE

SEQ ID NO: 24740 - protein, 28 aa, Homo sapiens
LFSTVARLPPLRLPQLKTWLPSVSQRWR

SEQ ID NO: 24741 - protein, 618 aa, Homo sapiens
LQARSGSRYLEADSGATEPGQPRQRRGARQGRPADPATPSQRAPRAGSLAGGGGGGHGGRARAPLAQRSMPVWCCRCSLAGHFRNYSDTETEGEIFNSLVQYFGDNLGRKVKAMPLVEETSLLEDSSVTFPVVIIGNGPSGICLSYMLSGYRPYLSSEAIHPNTILNSKLEEARHLSIVDQDLEYLSEGLEGRSSNPVAVLFDTLLHPDADFGYDYPSVLHWKLEQHHYIPHVVLGKGPPGGAWHNMEGSMLTISFGSWMELPGLKFKDWVSSKRRSLKGDRVMPEEIARYYKHYVKVMGLQKNFRENTYITSVSRLYRDQDDDDIQDRDISTKHLQIEKSNFIKRNWEIRGYQRIADGSHVPFCLFAENVALATGTLDSPAHLEIEGEDFPFVFHSMPEFGAAINKGKLRGKVDPVLIVGSGLTAADAVLCAYNSNIPVIHVFRRRVTDPSLIFKQLPKKLYPEYHKVYHMMCTQSYSVDSNLLSDYTSFPEHRVLSFKSDMKCVLQSVSGLKKIFKLSAAVVLIGSHPNLSFLKDQGCYLGHKSSQPITCKGNPVEIDTYTYECIKEANLFALGPLVGDNFVRFLKGGALGVTRCLATRQKKKHLFVERGGGDGIA

SEQ ID NO: 24742 - protein, 121 aa, Homo sapiens
MLLILIFRSLAAEWGKYGMRFNVIQPGPIKTKGAFSRLDPTGTFEKEMIGRIPCGRLGTVEELANLAAFLCSDYASWINGAVIKFDGGEEVLISGEFNDLRKVTKEQWDTIEELIRKTKGS

SEQ ID NO: 24743 - protein, 30 aa, Homo sapiens
LSGRRESMPGEPGAMKGSCLTGAAAEGLAG

SEQ ID NO: 24744 - protein, 95 aa, Homo sapiens
MYYSAVDPTKDIFTGLIGPMKICKKGSLHANWRQKDVDKEFYLFPIVFNENEGLLLEDNIRMFTTAPDQVDKADEDFQESNKMHWTFNVECLTAS

SEQ ID NO: 24745 - protein, 26 aa, Homo sapiens
LDTFIYLSALTATLYMVHLDEMGTRS

SEQ ID NO: 24746 - protein, 118 aa, Homo sapiens
LALETSYPLAALQSLDLAASKTQRKQAFWRSKMGRKDAATIKLPVDQYRKQIGKQDYKKTKPILRATKLKAEAKKTAIGIKEVGLVLAAILALLLAFYAFFYLRLTTDVDPDLDQDED

SEQ ID NO: 24747 - protein, 1008 aa, Homo sapiens
LLWFELSMAVVIRLLGLPFIAGPVDIRHFFTGLTIPDGGVHIIGGEIGEAFIIFATDEDARRAISRSGGFIKDSSVELFLSSKAEMQKTIEMKRTDRVGRGRPGSGTSGVDSLSNFIESVKEEASNSGYGSSINQDAGFHTNGTGHGNLRPRKTRPLKAENPYLFLRGLPYLVNEDDVRVFFSGLCVDGVIFLKHHDGRNNGDAIVKFASCVDASGGLKCHRSFMGSRFIEVMQGSEQQWIEFGGNAVKEGDVLRRSEEHSPPRGINDRHFRKRSHSKSPRRTRSRSPLGFYVHLKNLSLSIDERDLRNFFRGTDLTDEQIRFLYKDENRTRYAFVMFKTLKDYNTALSLHKTVLQYRPVHIDPISRKQMLKFIARYEKKRSGSLERDRPGHVSQKYSQEGNSGQKLCIYIRNFPFDVTKVEVQKFFADFLLAEDDIYLLYDDKGVGLGEALVKFKSEEQAMKAERLNRRRFLGTEVLLRLISEAQIQEFGVNFSVMSSEKMQARSQSRERGDHSHLFDSKDPPIYSVGAFENFRHQLEDLRQLDNFKHPQRDFRQPDRHPPEDFRHSSEDFRFPPEDFRHSPEDFRRPREEDFRRPSEEDFRRPWEEDFRRPPEDDFRHPREEDWRRPLEEDWRRPLEEDFRRSPTEDFRQLPEEDFRQPPEEDLRWLPEEDFRRPPEEDWRRPPEEDFRRPLQGEWRRPPEDDFRRPPEEDFRHSPEEDFRQSPQEHFRRPPQEHFRRPPPEHFRRPPPEHFRRPPPEHFRRPPPEHFRRPPPEHFRRPPPEHFRRPPQEHFRRPPQEHFRRSREEDFRHPPDEDFRGPPDEDFRHPPDEDFRSPQEEDFRCPSDEDFRQLPEEDLREAPEEDPRLPDNFRPPGEDFRSPPDDFRSHRPFVNFGRPEGGKFDFGKHNMGSFPEGRFMPDPKINCGSGRVTPIKIMNLPFKANVNEILDFFHGYRIIPDSVSIQYNEQGLPTGEAIVAMINYNEAMAAIKDLNDRPVGPRKVKLTLL

SEQ ID NO: 24748 - protein, 888 aa, Homo sapiens
LLWFELSMAVVIRLLGLPFIAGPVDIRHFFTGLTIPDGGVHIIGGEIGEAFIIFATDEDARRAISRSGGFIKDSSVELFLSSKAEMQKTIEMKRTDRVGRGRPGSGTSGVDSLSNFIESVKEEASNSGYGSSINQDAGFHTNGTGHGNLRPRKTRPLKAENPYLFLRGLPYLVNEDDVRVFFSGLCVDGVIFLKHHDGRNNGDAIVKFASCVDASGGLKCHRSFMGSRFIEVMQGSEQQWIEFGGNAVKEGDVLRRSEEHSPPRGINDRHFRKRSHSKSPRRTRSRSPLGFYVHLKNLSLSIDERDLRNFFRGTDLTDEQIRFLYKDENRTRYAFVMFKTLKDYNTALSLHKTVLQYRPVHIDPISRKQMLKFIARYEKKRSGSLERDRPGHVSQKYSQEGNSGQKLCIYIRNFPFDVTKVEVQKFFADFLLAEDDIYLLYDDKGVGLGEALVKFKSEEQAMKAERLNRRRFLGTEVLLRLISEAQIQEFGVNFSVMSSEKMQARSQSRERGDHSHLFDSKDPPIYSVGAFENFRHQLEDLRQLDNFKHPQRDFRQPDRHPPEDFRHSSEDFRFPPEDFRHSPEDFRRPREEDFRRPSEEDFRRPWEEDFRRPPEDDFRHPREEDWRRPPPEHFRRPPPEHFRRPPPEHFRRPPPEHFRRPPPEHFRRPPQEHFRRPPQEHFRRSREEDFRHPPDEDFRGPPDEDFRHPPDEDFRSPQEEDFRCPSDEDFRQLPEEDLREAPEEDPRLPDNFRPPGEDFRSPPDDFRSHRPFVNFGRPEGGKFDFGKHNMGSFPEGRFMPDPKINCGSGRVTPIKIMNLPFKANVNEILDFFHGYRIIPDSVSIQYNEQGLPTGEAIVAMINYNEAMAAIKDLNDRPVGPRKVKLTLL

SEQ ID NO: 24749 - protein, 7 aa, Homo sapiens
VVIIAVV

SEQ ID NO: 24750 - protein, 80 aa, Homo sapiens
VAMAVWSLLSARAVTAFLLLFLPRFLQAQTFSFPFQQPEKCDNNQYFDISALSCVPCGANQRQDARERCYRRWLELHFLP

SEQ ID NO: 24751 - protein, 144 aa, Homo sapiens
LHGGFRNCLLNLKRTMVGKARSSNFTLSEKLDLLKLVKPYVKILEEHTNKHSVIVEKNRCWDIIAVNYNAIGVDRPPRTAQGLRTLYKRLKEYAKQELLQQKETQSDFKSNISEPTKKVMEMIPQISSFCLVRDRNHIQSSFGS

SEQ ID NO: 24752 - protein, 314 aa, Homo sapiens
LHGGFRNCLLNLKRTMVGKARSSNFTLSEKLDLLKLVKPYVKILEEHTNKHSVIVEKNRCWDIIAVNYNAIGVDRPPRTAQGLRTLYKRLKEYAKQELLQQKETQSDFKSNISEPTKKVMEMIPQISSFCLVRDRNHIQSANLDEEAQAGTSSLQVMLDHHPVAITVEVKQEEDIKPPPPLVLNSQQSDTLEQREEHELVHVMERSLSPSLSSVDMRMTSSPSSIPRRDDFFRHESGEHFRSLLGYDPQILQMLKEEHQIILENQKNFGLYVQEKRDGLKRRQQLEEELLRAKIEVEKLKAIRLRHDLPEYNSL

SEQ ID NO: 24753 - protein, 531 aa, Homo sapiens
LLISWVLRNEIFCSFSFLKNIDNLMTPEGVGLTTALRVLCNVACPPPPVEGQQKDLKWNLAVIQLFSAEGMDTFIRVLQKLNSILTQPWRLHVNMGTTLHRVTTISMARCTLTLLKTMLTELLRGGSFEFKDMRVPSALVTLHMLLCSIPLSGRLDSDEQKIQNDIIDILLTFTQGVNEKLTISEETLANNTWSLMLKEVLSSILKVPEGFFSGLILLSELLPLPLPMQTTQVIEPHDISVALNTRKLWSMHLHVQAKLLQEIVRSFSGTTCQPIQHMLRRICVQLCDLASPTALLIMRTVLDLIVEDLQSTSEDKEKQYTSQTTRLLALLDALASHKACKLAILHLINGTIKGDERYAEIFQDLLALVRSPGDSVIRQQCVEYVTSILQSLCDQDIALILPSSSEGSISELEQLSNSLPNKELMTSICDCLLATLANSESSYNCLLTCVRTMMFLAEHDYGLFHLKSSLRKNSSALHSLLKRVVSTFSKDTGELASSFLEFMRQILNSDTIVSMCVFVFVYICMYVFGVS

SEQ ID NO: 24754 - protein, 144 aa, Homo sapiens
LDKRACALSFGGVKKFELVKPNRNLQQAACSIPGSLLIANRHLKCEFGIRCLHYFQLKWHHRCFLSFKSWIKTPPVSTISTMNSVKEASFLYIPALFSSFPCLLHNHAFLLSNSSIRSWNNKITILGERIKLLFSQSLGHDDIL

SEQ ID NO: 24755 - protein, 19 aa, Homo sapiens
LQIRVWTFEILLLLSPFCC

SEQ ID NO: 24756 - protein, 64 aa, Homo sapiens
LEPGSGPGGSGGGGRMSAEAADREAATSSRPCTPPQTCWFEFLLEESLLEKHLRKPCPVCLFQY

SEQ ID NO: 24757 - protein, 306 aa, Homo sapiens
LEPGSGPGGSGGGGRMSAEAADREAATSSRPCTPPQTCWFEFLLEESLLEKHLRKPCPDPAPVQLIVQFLEQASKPSVNEQNQVQPPPDNKRNRILKLLALKVAAHLKWDLDILEKSLSVPVLNMLLNELLCISKVPPGTKHVDMDLATLPPTTAMAVLLYNRWAIRTIVQSSFPVKQAKPGPPQLSVMNQMQQEKELTENILKVLKEQAADSILVLEAALKLNKDLYVHTMRTLDLLAMEPGMVNGETESSTAGLKVKTEEMQCQVCYDLGAAYFQQGSTNSAVYENAREKFFRTKELIAEMRSG

SEQ ID NO: 24758 - protein, 711 aa, Homo sapiens
LEPGSGPGGSGGGGRMSAEAADREAATSSRPCTPPQTCWFEFLLEESLLEKHLRKPCPDPAPVQLIVQFLEQASKPSVNEQNQVQPPPDNKRNRILKLLALKVAAHLKWDLDILEKSLSVPVLNMLLNELLCISKVPPGTKHVDMDLATLPPTTAMAVLLYNRWAIRTIVQSSFPVKQAKPGPPQLSVMNQMQQEKELTENILKVLKEQAADSILVLEAALKLNKDLYVHTMRTLDLLAMEPGMVNGETESSTAGLKVKTEEMQCQVCYDLGAAYFQQGSTNSAVYENAREKFFRTKELIAEIGSLSLHCTIDEKRLAGYCQACDVLVPSSDSTSQQLTPYSQVHICLRSGNYQEVIQIFIEDNLTLSLPVQFRQSVLRELFKKAQQGNEALDEICFKVCACNTVRDILEGRTISVQFNQLFLRPNKEKIDFLLEVCSRSVNLEKASESLKGNMAAFLKNVCLGLEDLQYVFMISSHELFITLLKDEERKLLVDQMRKRSPRVNLCIKPVTSFYDIPASASVNIGQLEHQLILSVDPWRIRQILIELHGMTSERQFWTVSNKWEVPSVYSGVILGIKDNLTRDLVYILMAKGLHCSTVKDFSHAKQLFAACLELVTEFSPKLRQVMLNEMLLLDIHTHEAGTGQAGERPPSDLISRVRGYLEMRLPDIPLRQVIAEECVAFMLNWRENEYLTLQVPAFLLQSNPYVKVVNV

SEQ ID NO: 24759 - protein, 773 aa, Homo sapiens
LEPGSGPGGSGGGGRMSAEAADREAATSSRPCTPPQTCWFEFLLEESLLEKHLRKPCPDPAPVQLIVQFLEQASKPSVNEQNQVQPPPDNKRNRILKLLALKVAAHLKWDLDILEKSLSVPVLNMLLNELLCISKVPPGTKHVDMDLATLPPTTAMAVLLYNRWAIRTIVQSSFPVKQAKPGPPQLSVMNQMQQEKELTENILKVLKEQAADSILVLEAALKLNKDLYVHTMRTLDLLAMEPGMVNGETESSTAGLKVKTEEMQCQVCYDLGAAYFQQGSTNSAVYENAREKFFRTKELIAEIGSLSLHCTIDEKRLAGYCQACDVLVPSSDSTSQQLTPYSQVHICLRSGNYQEVIQIFIEDNLTLSLPVQFRQSVLRELFKKAQQGNEALDEICFKVCACNTVRDILEGRTISVQFNQLFLRPNKEKIDFLLEVCSRSVNLEKASESLKGNMAAFLKNVCLGLEDLQYVFMISSHELFITLLKDEERKLLVDQMRKRSPRVNLCIKPVTSFYDIPASASVNIGQLEHQLILSVDPWRIRQILIELHGMTSERQFWTVSNKWEVPSVYSGVILGIKDNLTRDLVYILMAKGLHCSTVKDFSHAKQLFAACLELVTEFSPKLRQVMLNEMLLLDIHTHEAGTGQAGERPPSDLISRVRGYLEMRLPDIPLRQVIAEECVAFMLNWRENEYLTLQVPAFLLQSNPYVKLGQLLAATCKELPGPKESRRTAKDLWEVVVQICSVSSQHKRGNDGRVSLIKQRESTLGIMYRYVLE

SEQ ID NO: 24760 - protein, 1010 aa, Homo sapiens
LEPGSGPGGSGGGGRMSAEAADREAATSSRPCTPPQTCWFEFLLEESLLEKHLRKPCPDPAPVQLIVQFLEQASKPSVNEQNQVQPPPDNKRNRILKLLALKVAAHLKWDLDILEKSLSVPVLNMLLNELLCISKVPPGTKHVDMDLATLPPTTAMAVLLYNRWAIRTIVQSSFPVKQAKPGPPQLSVMNQMQQEKELTENILKVLKEQAADSILVLEAALKLNKDLYVHTMRTLDLLAMEPGMVNGETESSTAGLKVKTEEMQCQVCYDLGAAYFQQGSTNSAVYENAREKFFRTKELIAEIGSLSLHCTIDEKRLAGYCQACDVLVPSSDSTSQQLTPYSQVHICLRSGNYQEVIQIFIEDNLTLSLPVQFRQSVLRELFKKAQQGNEALDEICFKVCACNTVRDILEGRTISVQFNQLFLRPNKEKIDFLLEVCSRSVNLEKASESLKGNMAAFLKNVCLGLEDLQYVFMISSHELFITLLKDEERKLLVDQMRKRSPRVNLCIKPVTSFYDIPASASVNIGQLEHQLILSVDPWRIRQILIELHGMTSERQFWTVSNKWEVPSVYSGVILGIKDNLTRDLVYILMAKGLHCSTVKDFSHAKQLFAACLELVTEFSPKLRQVMLNEMLLLDIHTHEAGTGQAGERPPSDLISRVRGYLEMRLPDIPLRQVIAEECVAFMLNWRENEYLTLQVPAFLLQSNPYVKLGQLLAATCKELPGPKESRRTAKDLWEVVVQICSVSSQHKRGNDGRVSLIKQRESTLGIMYRSELLSFIKKLREPLVLTIILSLFVKLHNVREDIVNDITAEHISIWPSSIPNLQSVDFEAVAITVKELVRYTLSINPNNHSWLIIQADIYFATNQYSAALHYYLQAGAVCSDFFNKAVPPDVYTDQVIKRMIKCCSLLNCHTQVAILCQFLREIDYKTAFKSLQEQNSHDAMDSYYDYIWDVTILEYLTYLHHKRGETDKRQIAIKAIGQTELNASNPEEVLQLAAQRRKKKFLQAMAKLYF

SEQ ID NO: 24761 - protein, 356 aa, Homo sapiens
LPAMDTPRVLLSAVFLISFLWDLPGFQQASISSSSSSAELGSTKGMRSRKEGKMQRAPRDSDAGREGQEPQPRPQDEPRAQQPRAQEPPGRGPRVVPHEYMLSIYRTYSIAEKLGINASFFQSSKSANTITSFVDRGLDDLSHTPLRRQKYLFDVSMLSDKEELVGAELRLFRQAPSAPWGPPAGPLHVQLFPCLSPLLLDARTLDPQGAPPAGWEVFDVWQGLRHQPWKQLCLELRAAWGELDAGEAEARARGPQQPPPPDLRSLGFGRRVRPPQERALLVVFTRSQRKNLFAAGVRGLSLRGCMRLPAALAPGAHQPRHHPDADELHGPRLHPAQLLRAHQIDSHQHSIHRRGQ

SEQ ID NO: 24762 - protein, 476 aa, Homo sapiens
LEKKMKFLIFAFFGGVHLLSLCSGKAICKNGISKRTFEEIKEEIASCGDVAKAIINLAVYGKAQNRSYERLALLVDTVGPRLSGSKNLEKAIQIMYQNLQQDGLEKVHLEPVRIPHWERGEESAVMLEPRIHKIAILGLGSSIGTPPEGITAEVLVVTSFDELQRRASEARGKIVVYNQPYINYSRTVQYRTQGAVEAAKVGALASLIRSVASFSIYSPHTGIQEYQDGVPKIPTACITVEDAEMMSRMASHGIKIVIQLKMGAKTYPDTDSFNTVAEITGSKYPEQVVLVSGHLDSWDVGQGAMDDGGGAFISWEALSLIKDLGLRPKRTLRLVLWTAEEQGGVGAFQYYQLHKVNISNYSLVMESDAGTFLPTGLQFTGSEKARAIMEEVMSLLQPLNITQVLSHGEGTDINFWIQAGVPGASLLDDLYKYFFFHHSHGDTMTVMDPKQMNVAAAVWAVVSYVVADMEEMLPRS

SEQ ID NO: 24763 - protein, 448 aa, Homo sapiens
LPWRDPLGPDRELASGAAGSQRVFEAASAATMSGRSRGRKSSRAKNRGKGRAKARVRPAPDDAPRDPDPSQYQSLGEDTQAAQVQAGAGWGGLEAAASAQLLRLGEEAACRLPLDCGLALRARAAGDHGQAAARPGPGKAASLSERLAADTVFVGTAGTVGRPKNAPRVGNRRGPAGKKAPETCSTAGRGPQVIAGGRQKKGAAGENTSVSAGEEKKEERDAGSGPPATEGSMDTLENVQLKLENMNAQADRAYLRLSRKFGQLRLQHLERRNHLIQNIPGFWGQAFQNHPQLASFLNSQEKEVLSYLNSLEVEELGLARLGYKIKFYFDRNPYFQNKVLIKEYGCGPSGQVVSRSTPIQWLPGHDLQSLSQGNPENNRSFFGWFSNHSSIESDKIVEIINEELWPNPLQFYLLSEGARVEKGKEKEGRQGPGKQPMETTQPGVSQSN

SEQ ID NO: 24764 - protein, 28 aa, Homo sapiens
LALAPRRRLAAATGDTPSRLPGLLAAAE

SEQ ID NO: 24765 - protein, 1027 aa, Homo sapiens
LAEMSNAKERKHAKKMRNQPTNVTLSSGFVADRGVKHHSGGEKPFQAQKQEPHPGTSRQRQTRVNPHSLPDPEVNEQSSSKGMFRKKGGWKAGPEGTSQEIPKYITASTFAQARAAEISAMLKAVTQKSSNSLVFQTLPRHMRRRAMSHNVKRLPRRLQEIAQKEAEKAVHQKKEHSKNKCHKARRCHMNRTLEFNRRQKKNIWLETHIWHAKRFHMVKKWGYCLGERPTVKSHRACYRAMTNRCLLQDLSYYCCLELKGKEEEILKALSGMCNIDTGLTFAAVHCLSGKRQGSLVLYRVNKYPREMLGPVTFIWKSQRTPGDPSESRQLWIWLHPTLKQDILEEIKAACQCVEPIKSAVCIADPLPTPSQEKSQTELPDEKIGKKRKRKDDGENAKPIKKIIGDGTRDPCLPYSWISPTTGIIISDLTMEMNRFRLIGPLSHSILTEAIKAASVHTVGEDTEETPHRWWIETCKKPDSVSLHCRQEAIFELLGGITSPAEIPAGTILGLTVGDPRINLPQKKSKALPNPEKCQDNEKVRQLLLEGVPVECTHSFIWNQDICKSVTENKISDQDLNRMRSELLVPGSQLILGPHESKIPILLIQQPGKVTGEDRLGWGSGWDVLLPKGWGMAFWIPFIYRGVRVGGLKESAVHSQYKRSPNVPGDFPDCPAGMLFAEEQAKNLLEKYKRRPPAKRPNYVKLGTLAPFCCPWEQLTQDWESRVQAYEEPSVASSPNGKESDLRRSEVPCAPMPKKTHQPSDEVGTSIEHPREAEEVMDAGCQESAGPERITDQEASENHVAATGSHLCVLRSRKLLKQLSAWCGPSSEDSRGGRRAPGRGQQGLTREACLSILGHFPRALVWVSLSLLSKGSPEPHTMICVPAKEDFLQLHEDWHYCGPQESKHSDPFRSKILKQKEKKKREKRQKPGRASSDGPAGEEPVAGQEALTLGLWSGPLPRVTLHCSRTLLGFVTQGDFSMAVGCGEALGFVSLTGLLDMLSSQPAAQRGLVLLRPPASLQYRFARIAIEV

SEQ ID NO: 24766 - protein, 65 aa, Homo sapiens
MFIIMIASCVFQVKFLNQATKLYNTTTVVPVNHIFFTISAIIAGIIFYQEFLGAPFLTVFIYLFG

SEQ ID NO: 24767 - protein, 46 aa, Homo sapiens
LGRDAGGDGARRACCWRVMALQGCGLRPHRESTARGSPKSEVLGER

SEQ ID NO: 24768 - protein, 335 aa, Homo sapiens
LPRLTFLREGFLYVLLSHWVFVGAPRPPASDSWKKGLVPSAPPASRKMGSKALPAPIPLHPSLQLTNYSFLQAVNTFPATVDHLQGLYGLSAVQTMHMNHWTLGYPNVHEITRSTITEMAAAQGLVDARFPFPALPFTTHLFHPKQGAIAHVLPALHKDRPRFDFANLAVAATQEDPPKMGDLSKLSPGLGSPISGLSKLTPDRKPSRGRLPSKTKKEFICKFCGRHFTKSYNLLIHERTHTDERPYTCDICHKAFRRQDHLRDHRYIHSKEKPFKCQECGKGFCQSRTLAVHKTLHMQVSLFSCLKTVAGSCYHYCFAKGVQWQTLSLKRLYLD

SEQ ID NO: 24769 - protein, 323 aa, Homo sapiens
LPRLTFLREGFLYVLLSHWVFVGAPRPPASDSWKKGLVPSAPPASRKMGSKALPAPIPLHPSLQLTNYSFLQAVNTFPATVDHLQGLYGLSAVQTMHMNHWTLGYPNVHEITRSTITEMAAAQGLVDARFPFPALPFTTHLFHPKQGAIAHVLPALHKDRPRFDFANLAVAATQEDPPKMGDLSKLSPGLGSPISGLSKLTPDRKPSRGRLPSKTKKEFICKFCGRHFTKSYNLLIHERTHTDERPYTCDICHKAFRRQDHLRDHRYIHSKEKPFKCQECGKGFCQSRTLAVHKTLHMQTSSPTAASSAAKCSGETVICGGTA

SEQ ID NO: 24770 - protein, 359 aa, Homo sapiens
LPRLTFLREGFLYVLLSHWVFVGAPRPPASDSWKKGLVPSAPPASRKMGSKALPAPIPLHPSLQLTNYSFLQAVNTFPATVDHLQGLYGLSAVQTMHMNHWTLGYPNVHEITRSTITEMAAAQGLVDARFPFPALPFTTHLFHPKQGAIAHVLPALHKDRPRFDFANLAVAATQEDPPKMGDLSKLSPGLGSPISGLSKLTPDRKPSRGRLPSKTKKEFICKFCGRHFTKSYNLLIHERTHTDERPYTCDICHKAFRRQDHLRDHRYIHSKEKPFKCQECGKGFCQSRTLAVHKTLHMQESPHKCPTCGRTFNQRSNLKTHLLTHTDIKPYSCEQCGKVFRRNCDLRRHSLTHTPRQDF

SEQ ID NO: 24771 - protein, 9 aa, Homo sapiens
MYKLSIARD

SEQ ID NO: 24772 - protein, 14 aa, Homo sapiens
LILGAFGIDWVLMA

SEQ ID NO: 24773 - protein, 141 aa, Homo sapiens
LRTIRSSSISYSQESGAAADDIKPCPRCAAYIIKMNDGSCNHMTCAVCGCEFCWLCMKEISDLHYLSPSGCTFWGKKPWSRKKKILWQLGTLVGAPVGIALIAGIAIPAMIIGIPVYVGRKVKCILLVSPLSYSKSLGVFF

SEQ ID NO: 24774 - protein, 29 aa, Homo sapiens
LKLPLSLLLVRVAGVFHPPHQNNVVCFCK

SEQ ID NO: 24775 - protein, 648 aa, Homo sapiens
VKQPRPTRPPAAPQQLQEGTKRPRPSRCPDPTPPPSLPAGSRQPAAVDRPRSAAVEDMITRRSLGYAYVNFQQPADAERALDTMNFDVIKGKPVRIMWSQRDPSLRKSGVGNIFIKNLDKSIDNKALYDTFSAFGNILSCKVVCDENGSKGYGFVHFETQEAAERAIEKMNGMLLNDRKVFVGRFKSRKEREAELGARAKEFTNVYIKNFGEDMDDERLKDLFGKFGPALSVKVMTDESGKSKGFGFVSFERHEDAQKAVDEMNGKELNGKQIYVGRAQKKVERQTELKRKFEQMKQDRITRYQGVNLYVKNLDDGIDDERLRKEFSPFGTITSAKVMMEGGRSKGFGFVCFSSPEEATKAVTEMNGRIVATKPLYVALAQRKEERQAHLTNQYMQRMASVRAVPNPVINPYQPAPPSGYFMAAIPQTQNRAAYYPPSQIAQLRPSPRWTAQGARPHPFQNMPGAIRPAAPRPPFSTMRPASSQVPRVMSTQRVANTSTQTMGPRPAAAAAAATPAVRTVPQYKYAAGVRNPQQHLNAQPQVTMQQPAVHVQGQEPLTASMLASAPPQEQKQMLGERLFPLIQAMHPTLAGKITGMLLEIDNSELLHMLESPESLRSKVDEAVAVLQAHQAKEAAQKAVNSATGVPTV

SEQ ID NO: 24776 - protein, 291 aa, Homo sapiens
LSRGSDLGGAWRGVVAIRGPENLHFKVRVCPFSFHSNRRLKSEHPVMDKNELVQKAKLAEQAERYDDMAACMKSVTEQGAELSNEERNLLSVAYKNVVGARRSSWRVVSSIEQKTEGAEKKQQMAREYREKIETELRDICNDVLSLLEKFLIPNASQAESKVFYLKMKGDYYRYLAEVAAGDDKKGIVDQSQQAYQEAFEISKKEMQPTHPIRLGLALNFSVFYYEILNSPEKACSLAKTAFDEAIAELDTLSEESYKDSTLIMQLLRDNLTLWTSDTQGDEAEAGEGGEN

SEQ ID NO: 24777 - protein, 251 aa, Homo sapiens
LREHPVMDKNELVQKAKLAEQAERYDDMAACMKSVTEQGAELSNEERNLLSVAYKNVVGARRSSWRVVSSIEQKTEGAEKKQQMAREYREKIETELRDICNDVLSLLEKFLIPNASQAESKVFYLKMKGDYYRYLAEVAAGDDKKGIVDQSQQAYQEAFEISKKEMQPTHPIRLGLALNFSVFYYEILNSPEKACSLAKTAFDEAIAELDTLSEESYKDSTLIMQLLRDNLTLWTSDTQGDEAEAGEGGEN

SEQ ID NO: 24778 - protein, 256 aa, Homo sapiens
LARRRPPEHPVMDKNELVQKAKLAEQAERYDDMAACMKSVTEQGAELSNEERNLLSVAYKNVVGARRSSWRVVSSIEQKTEGAEKKQQMAREYREKIETELRDICNDVLSLLEKFLIPNASQAESKVFYLKMKGDYYRYLAEVAAGDDKKGIVDQSQQAYQEAFEISKKEMQPTHPIRLGLALNFSVFYYEILNSPEKACSLAKTAFDEAIAELDTLSEESYKDSTLIMQLLRDNLTLWTSDTQGDEAEAGEGGEN

SEQ ID NO: 24779 - protein, 270 aa, Homo sapiens
LDASLPFPSHKRSRTASPEPAEHPVMDKNELVQKAKLAEQAERYDDMAACMKSVTEQGAELSNEERNLLSVAYKNVVGARRSSWRVVSSIEQKTEGAEKKQQMAREYREKIETELRDICNDVLSLLEKFLIPNASQAESKVFYLKMKGDYYRYLAEVAAGDDKKGIVDQSQQAYQEAFEISKKEMQPTHPIRLGLALNFSVFYYEILNSPEKACSLAKTAFDEAIAELDTLSEESYKDSTLIMQLLRDNLTLWTSDTQGDEAEAGEGGEN

SEQ ID NO: 24780 - protein, 214 aa, Homo sapiens
LDASLPFPSHKRSRTASPEPAGARRSSWRVVSSIEQKTEGAEKKQQMAREYREKIETELRDICNDVLSLLEKFLIPNASQAESKVFYLKMKGDYYRYLAEVAAGDDKKGIVDQSQQAYQEAFEISKKEMQPTHPIRLGLALNFSVFYYEILNSPEKACSLAKTAFDEAIAELDTLSEESYKDSTLIMQLLRDNLTLWTSDTQGDEAEAGEGGEN

SEQ ID NO: 24781 - protein, 229 aa, Homo sapiens
MDKNELVQKAKLAEQAERYDDMAACMKSVTEQGAELSNEERNLLSVAYKNVVGARRSSWRVVSSIEQKTEGAEKKQQMAREYREKIETELRDICNDVLSLLEKFLIPNASQAESKVFYLKMKGDYYRYLAEVAAGDDKKGIVDQSQQAYQEAFEISKKEMQPTHPIRLGLALNFSVFYYEILNSPEKACSLAKTAFDEAIAELDTLSEESYKDSTLIMQLLRDNLTVST

SEQ ID NO: 24782 - protein, 31 aa, Homo sapiens
LLQNAFLSLQYLFLLVTGFLKKKNSEMKLRI

SEQ ID NO: 24783 - protein, 32 aa, Homo sapiens
VRIWWMLDLAAAATAVSRGCRAWTVKSCTSSE

SEQ ID NO: 24784 - protein, 389 aa, Homo sapiens
LGAGRTQRTSGPPGCCRSWRWPEELSSLSARSFGGVCAMGDPERPEAAGLDQDERSSSDTNESEIKSNEEPLLRKSSRRFVIFPIQYPDIWKMYKQAQASFWTAEEVDLSKDLPHWNKLKADEKYFISHILAFFAASDGIVNENLVERFSQEVQVPEARCFYGFQILIENVHSEMYSLLIDTYIRDPKKREFLFNAIETMPYVKKKADWALRWIADRKSTFGERVVAFAAVEGVFFSGSFAAIFWLKKRGLMPGLTFSNELISRDEGLHCDFACLMFQYLVNKPSEERVREIIVDAVKIEQEFLTEALPVGLIGMNCILMKQYIEFVADRLLVELGFSKVFQAENPFDFMENISLEGKTNFFEKRVSEYQRFAVMAETTDNVFTLDADF

SEQ ID NO: 24785 - protein, 35 aa, Homo sapiens
MICMKIPGLHQRLTESERRQEDEECLRICINKLYK

SEQ ID NO: 24786 - protein, 31 aa, Homo sapiens
MLPKGLRKLCENRRLPSRAPDPSPPGSVFPI

SEQ ID NO: 24787 - protein, 9 aa, Homo sapiens
MTFGFVEYG

SEQ ID NO: 24788 - protein, 46 aa, Homo sapiens
LAASESCPGPEVARTLCGLEWAWDASALMIMIRDPEFSRAATLRNT

SEQ ID NO: 24789 - protein, 74 aa, Homo sapiens
LAASESCPGPEVARTLCGLEWAWGLVESVPSRTRVGEGITDVTSAHYFNPLDASALMIMIRDPEFSRAATLRNT

SEQ ID NO: 24790 - protein, 355 aa, Homo sapiens
LPRYLLLLLLPRLTPSWVGTLDVLVGLSDELAKLDAFVEGVVKKVAQYMADVLEDSKDKVQENLLANGVDLVTYITRFQWDMAKYPIKQSLKNISEIIAKGVTQIDNDLKSRASAYNNLKGNLQNLERKNAGSLLTRSLAEIVKKDDFVLDSEYLVTLLVVVPKLNHNDWIKQYETLAEMVVPRSSNVLSEDQDSYLCNVTLFRKAVDDFRHKARENKFIVRDFQYNEEEMKADKEEMNRLSTDKKKQFGPLVRWLKVNFSEAFIAWIHVKALRVFVESVLRYGLPVNFQAMLLQPNKKTLKKLREVLHELYKHLDSSAAAIIDAPMDIPGLNLSQQEYYPYVYYKIDCNLLEFK

SEQ ID NO: 24791 - protein, 390 aa, Homo sapiens
LRKYLVTNMTEFWLISAPGEKTCQQTWEKLHAATSKNNNLAVTSKFNIPDLKVGTLDVLVGLSDELAKLDAFVEGVVKKVAQYMADVLEDSKDKVQENLLANGVDLVTYITRFQWDMAKYPIKQSLKNISEIIAKGVTQIDNDLKSRASAYNNLKGNLQNLERKNAGSLLTRSLAEIVKKDDFVLDSEYLVTLLVVVPKLNHNDWIKQYETLAEMVVPRSSNVLSEDQDSYLCNVTLFRKAVDDFRHKARENKFIVRDFQYNEEEMKADKEEMNRLSTDKKKQFGPLVRWLKVNFSEAFIAWIHVKALRVFVESVLRYGLPVNFQAMLLQPNKKTLKKLREVLHELYKHLDSSAAAIIDAPMDIPGLNLSQQEYYPYVYYKIDCNLLEFK

SEQ ID NO: 24792 - protein, 42 aa, Homo sapiens
LPGKSSYSSVHVGLQSLMSPCLWPMHPNKDTPQGSARHCNFA

SEQ ID NO: 24793 - protein, 67 aa, Homo sapiens
LKKMEMFTFLLTCIFLPLLRGHSLFTCEPITVPRCMKMAYNMTFFPNLMGHYDQSIAAVEMEGTQTG

SEQ ID NO: 24794 - protein, 63 aa, Homo sapiens
LKKMEMFTFLLTCIFLPLLRGHSLFTCEPITVPRCMKMAYNMTFFPNLMGHYDQSIAAVEMEL

SEQ ID NO: 24795 - protein, 470 aa, Homo sapiens
LKKMEMFTFLLTCIFLPLLRGHSLFTCEPITVPRCMKMAYNMTFFPNLMGHYDQSIAAVEMEHFLPLANLECSPNIETFLCKAFVPTCIEQIHVVPPCRKLCEKVYSDCKKLIDTFGIRWPEELECDRLQYCDETVPVTFDPHTEFLGPQKKTEQVQRDIGFWCPRHLKTSGGQGYKFLGIDQCAPPCPNMYFKSDELEFAKSFIGTVSIFCLCATLFTFLTFLIDVRRFRYPERPIIYYSVCYSIVSLMYFIGFLLGDSTACNKADEKLELGDTVVLGSQNKACTVLFMLLYFFTMAGTVWWVILTITWFLAAGRKWSCEAIEQKAVWFHAVAWGTPGFLTVMLLAMNKVEGDNISGVCFVGLYDLDASRYFVLLPLCLCVFVGLSLLLAGIISLNHVRQVIQHDGRNQEKLKKFMIRIGVFSGLYLVPLVTLLGCYVYEQVNRITWEITWVSDHCRQYHIPCPYQSNQ

SEQ ID NO: 24796 - protein, 144 aa, Homo sapiens
MGCRFILGTLLFLGFVPGLFGTSHGALQFMAYELLKLKYNQHINRLPEAQLSTVEYISVAALSKIFAVAATYPYQVVRARLQDQHMFYSGVIDVITKTWRKEGVGGFYKGIAPNLIRVTPACCITFVVYENVSHFLLDLREKRK

SEQ ID NO: 24797 - protein, 361 aa, Homo sapiens
LGIRVLSLVPEVGLRSQGATVATVAATASRPTSAALGAVVSTGPEPMTGQGQSASGSSAWSTVFRHVRYENLIAGVSGGVLSNLALHPLDLVKIRFAVSDGLELRPKYNGILHCLTTIWKLDGLRGLYQGVTPNIWGAGLSWGLYFFFYNAIKSYKTEGRAERLEATEYLVSAAEAGAMTLCITNPLWVTKTRLMLQYDAVVNSPHRQYKGMFDTLVKIYKYEGVRGLYKGFVPGLFGTSHGALQFMAYELLKLKYNQHINRLPEAQLSTVEYISVAALSKIFAVAATYPYQVVRARLQDQHMFYSGVIDVITKTWRKEGVGGFYKGIAPNLIRVTPACCITFVVYENVSHFLLDLREKRK

SEQ ID NO: 24798 - protein, 169 aa, Homo sapiens
LGIRVLSLVPEVGLRSQGATVATVAATASRPTSAALGAVVSTGPEPMTGQGQSASGSSAWSTVFRHVRYENLIAGVSGGVLSNLALHPLDLVKIRFAVSDGLELRPKYNGILHCLTTIWKLDGLRGLYQGVTPNIWGAGLSWGLYFFLDLFLGCLEHRMVPFSLWHMNC

SEQ ID NO: 24799 - protein, 195 aa, Homo sapiens
LGIRVLSLVPEVGLRSQGATVATVAATASRPTSAALGAVVSTGPEPMTGQGQSASGSSAWSTVFRHVRYENLIAGVSGGVLSNLALHPLDLVKIRFAVSDGLELRPKYNGILHCLTTIWKLDGLRGLYQGVTPNIWGAGLSWGLYFFFYNAIKSYKTEGRAERLEATEYLVSAAEAGICSWAVWNIAWCPSVYGI

SEQ ID NO: 24800 - protein, 162 aa, Homo sapiens
LVPEVGLRSQGATVATVAATASRPTSAALGAVVSTGPEPMTGQGQSASGSSAWSTVFRHVRYENLIAGVSGGVLSNLALHPLDLVKIRFAVSDGLELRPKYNGILHCLTTIWKLDGLRGLYQGVTPNIWGAGLSWGLYFFLSHDPLHYKPIMGNKNSPYVTV

SEQ ID NO: 24801 - protein, 36 aa, Homo sapiens
LGPPLHRAFRRRDVVSVPRSCPLSTRVSGFAHAPWA

SEQ ID NO: 24802 - protein, 72 aa, Homo sapiens
MACRWSTKESPRWRSALLLLFLAGVYACGETPEQIRAPSGIITSPGWPSEYPAKINCSWFIRANPGEIITIR

SEQ ID NO: 24803 - protein, 17 aa, Homo sapiens
MSEAIMKATKKSGEAAR

SEQ ID NO: 24804 - protein, 138 aa, Homo sapiens
LPLGSGKMAKVSELYDVTWEEMRDKMRKWREENSRNSEQIVEVGEELINEYASKLGDDIWIIYEQVMIAALDYGRDDLALFCLQELRRQFPGSHRVKRLTGMRFEAMERYDDAIQLYDRILQEDPTNTVSWQIVLKKI

SEQ ID NO: 24805 - protein, 304 aa, Homo sapiens
LPLGSGKMAKVSELYDVTWEEMRDKMRKWREENSRNSEQIVEVGEELINEYASKLGDDIWIIYEQVMIAALDYGRDDLALFCLQELRRQFPGSHRVKRLTGMRFEAMERYDDAIQLYDRILQEDPTNTAARKRKIAIRKAQGKNVEAIRELNEYLEQFVGDQEAWHELAELYINEHDYAKAAFCLEELMMTNPHNHLYCQQYAEVKYTQGGLENLELSRKYFAQALKLNNRNMRALFGLYMSASHIASNPKASAKTKKDNMKYASWAASQINRAYQFAGRSKKETKYSLKAVEDMLETLQITQS

SEQ ID NO: 24806 - protein, 638 aa, Homo sapiens
LEPHQEPPPAARAGSAQSPRSVLAGASSWTAAAAARGAGGQRRDGAPPREQDDTGCPSSQSVSPVKTPSDAGNSPIGFCPGSDEGFTRKKCTIGMVGEGSIQSSRYKKESKSGLVKPGSEADFSSSSSTGSISAPEVHMSTAGSKRSSSSRNRGPHGRSNGASSHKPGSSPSSPREKDLLSMLCRNQLSPVNIHPSYAPSSPSSSNSGSYKGSDCSPIMRRSGRYMSCGENHGVRPPNPEQYLTPLQQKEVTVRHLKTKLKESERRLHERESEIVELKSQLARMREDWIEEECHRVEAQLALKEARKEIKQLKQVIETMRSSLADKDKGIQKYFVDINIQNKKLESLLQSMEMAHSGSLRDELCLDFPCDSPEKSLTLNPPLDTMADGLSLEEQVTGEGADRELLVGDSIANSTDLFDEIVTATTTESGDLELVHSTPGANVLELLPIVMGQEEGSVVVERAVQTDVVPYSPAISELIQSVLQKLQDPCPSSLASPDESEPDSMESFPESLSALVVDLTPRNPNSAILLSPVETPYANVDAEVHANRLMRELDFAACVEERLDGVIPLARGGVVRQYWSSSFLVDLLAVAAPVVPTVLWAFSTQRGGTDPVYNIGALLRGCCVVALHSLRRTAFRIKT

SEQ ID NO: 24807 - protein, 85 aa, Homo sapiens
VIRKLELYFCLLIFVNHSQQLIPYVEEDGSKNDDRAGPPRFASEERREIAEVNKKLKQKNQQLKQIMDQLRNLIWDINAMLAMRN

SEQ ID NO: 24808 - protein, 759 aa, Homo sapiens
LCLFTILLTQAGHMQAKKRYFILLSAGSCLALLFYFGGLQFRASRSHSRREEHSGRNGLHHPSPDHFWPRFPDALRPFVPWDQLENEDSSVHISPRQKRDANSSIYKGKKCRMESCFDFTLCKKNGFKVYVYPQQKGEKIAESYQNILAAIEGSRFYTSDPSQACLFVLSLDTLDRDQLSPQYVHNLRSKVQSLHLWNNGRNHLIFNLYSGTWPDYTEDVGFDIGQAMLAKASISTENFRPNFDVSIPLFSKDHPRTGGERGFLKFNTIPPLRKYMLVFKGKRYLTGIGSDTRNALYHVHNGEDVVLLTTCKHGKDWQKHKDSRCDRDNTEYEKYDYREMLHNATFCLVPRGRRLGSFRFLEALQAACVPVMLSNGWELPFSEVINWNQAAVIGDERLLLQIPSTIRSIHQDKILALRQQTQFLWEAYFSSVEKIVLTTLEIIQDRIFKHISRNSLIWNKHPGGLFVLPQYSSYLGDFPYYYANLGLKPPSKFTAVIHAVTPLVSQSQPVLKLLVAAAKSQYCAQIIVLWNCDKPLPAKHRWPATAVPVVVIEGESKVMSSRFLPYDNIITDAVLSLDEDTVLSTTEVDFAFTVWQSFPERIVGYPARSHFWDNSKERWGYTSKWTNDYSMVLTGAAIYHKYYHYLYSHYLPASLKNMVDQLANCEDILMNFLVSAVTKLPPIKVTQKKQYKETMMGQTSRASRWADPDHFAQRQSCMNTFASWFGYMPLIHSQMRLDPVLFKDQVSILRKKYRDIERL

SEQ ID NO: 24809 - protein, 63 aa, Homo sapiens [sequence omitted]

SEQ ID NO: 24810 - protein, 429 aa, Homo sapiens
VMSARAAETHRSARPAAASKPLRFPGTTMNNLLCCALVFLDISIKWTTQETFPPKYLHYDEETSHQLLCDKCPPGTYLKQHCTAKWKTVCAPCPDHYYTDSWHTSDECLYCSPVCKELQYVKQECNRTHNRVCECKEGRYLEIEFCLKHRSCPPGFGVVQAGTPERNTVCKRCPDGFFSNETSSKAPCRKHTNCSVFGLLLTQKGNATHDNICSGNSESTQKCGIDVTLCEEAFFRFAVPTKFTPNWLSVLVDNLPGTKVNAESVERIKRQHSSQEQTFQLLKLWKHQNKDQDIVKKIIQDIDLCENSVQRHIGHANLTFEQLRSLMESLPGKKVGAEDIEKTIKACKPSDQILKLLSLWRIKNGDQDTLKGLMHALKHSKTYHFPKTVTQSLKKTIRFLHSFTMYKLYQKLFLEMIGNQVQSVKISCL

SEQ ID NO: 24811 - protein, 152 aa, Homo sapiens
LRFPGTTMNNLLCCALVFLDISIKWTTQETFPPKYLHYDEETSHQLLCDKCPPGTYLKQHCTAKWKTVCAPCPDHYYTDSWHTSDECLYCSPVCKELQYVKQECNRTHNRVCECKEGRYLEIEFCLKHRSCPPGFGVVQAGCRRRPKPQICI

SEQ ID NO: 24812 - protein, 430 aa, Homo sapiens
LPWQPRGSFHFPTQPISPLLPALQPTGLCASQERAIKPVLGVIGKHRTRGKASSANLQRRKSRLVKARGESLSMQSVQSTSFCLRKQCLCLTFLLLHLLGQVAATQRCPPQCPGRCPATPPTCAPGVRAVLDGCSCCLVCARQRGESCSDLEPCDESSGLYCDRSADPSNQTGICTAVEGDNCVFDGVIYRSGEKFQPSCKFQCTCRDGQIGCVPRCQLDVLLPEPNCPAPRKVEVPGECCEKWICGPDEEDSLGGLTLAAYRPEATLGVEVSDSSVNCIEQTTEWTACSKSCGMGFSTRVTNRNRQCEMLKQTRLCMVRPCEQEPEQPTDKKGKKCLRTKKSLKAIHLQFKNCTSLHTYKPRFCGVCSDGRCCTPHNTKTIQAEFQCSPGQIVKKPVMVIGTCTCHTNCPKNNEAFLQELELKTTRGKM

SEQ ID NO: 24813 - protein, 121 aa, Homo sapiens
LVKARGESLSMQSVQSTSFCLRKQCLCLTFLLLHLLGQVAATQRCPPQCPGRCPATPPTCAPGVRAVLDGCSCCLVCARQRGESCSDLEPCDESSGLYCDRSADPSNQTGICTGNPAPSAV

SEQ ID NO: 24814 - protein, 15 aa, Homo sapiens
LPRTKMAREASVRAD

SEQ ID NO: 24815 - protein, 262 aa, Homo sapiens
VAMAVALSPPRNLRISNVGSNSARLTWDPTSRQINGYRIVYNNADGTEINEVEVDPITTFPLKGLTPLTEYTIAIFSIYDEGQSEPLTGVFTTEEVPAQQYLEIDEVTTDSFRVTWHPLSADEGLHKLMWIPVYGGKTEEVVLKEEQDSHVIEGLEPGTEYEVSLLAVLDDGSESEVVTAVGTTLDSFWTEPATTIVPTTSVTSVFQTGIRNLVVGDETTSSLRVKWDISDSDVQQFRVTYMTAQGDPEEEVIGTVCINSTD

SEQ ID NO: 24816 - protein, 764 aa, Homo sapiens
LTWYLWWMDPGALEMKNKIISFLYSTVGALNKIGTDGTQVAMVQFTDDPRTEFKLNAYKTKETLLDAIKHISYKGGNTKTGKAIKYVRDTLFTAESGTRRGIPKVIVVITDGRSQDDVNKISREMQLDGYSIFAIGVADADYSELVSIGSKPSARHVFFVDDFDAFKKIEDELITFVCETASATCPVVHKDGIDLAGFKMMEMFGLVEKDFSSVEGVSMEPGTFNVFPCYQLHKDALVSQPTRYLHPEGLPSDYTISFLFRILPDTPQEPFALWEILNKNSDPLVGVILDNGGKTLTYFNYDQSGDFQTVTFEGPEIRKIFYGSFHKLHIVVSETLVKVVIDCKQVGEKAMNASANITSDGVEVLGKMVRSRGPGGNSAPFQLQMFDIVCSTSWANTDKCCELPGLRDDESCPDLPHSCSCSETNEVALGPAGPPGGPGLRGPKGQQGEPGPKGPDGPRGEIGLPGPQGPPGPQGPSGLSIQGMPGMPGEKGEKGDTGLPGPQGIPGGVGSPGRDGSPGQRGLPGKDGSSGPPGPPGPIGIPGTPGVPGITGSMGPQGALGPPGVPGAKGERGERGDLQSQAMVRSVARQVCEQLIQSHMARYTAILNQIPSHSSSIRTVQGPPGEPGRPGSPGAPGEQGPPGTPGFPGNAGVPGTPGERGLTGIKGEKGNPGVGTQGPRGPPGPAGPSGESRPGSPGPPGSPGPRGPPGHLGVPGPQGPSGQPGYCDPSSCSAYGVRAPHPDQPEFTPVQDELEAMELWGPGV

SEQ ID NO: 24817 - protein, 636 aa, Homo sapiens
LGFCNWLLAFFPSPVSVSPSSFRLLHPGQDQARGNQPECSCQLPPSASANSRSGVPRAATSPRDALSSLPRAPRPPPGHPSPLFPPFPITWHFKNAGKMAVAAAAAAAGPAGAGGGRAQRSGLLEVLVRDRWHKVLVNLSEDALVLSSEEGAAAYNGIGTATNGSFCRGAGAGHPGAGGAQPPDSPAGVRTAFTDLPEQVPESISNQKRGVKVLKQELGGLGISIKGGKENKMPILISKIFKGLAADQTQALYVGDAILSVNGADLRDATHDEAVQALKRAGKEVLLEVKYMREATPYVKKGSPVSEIGWETPPPESPRLGGSTSDPPSSQSFSFHRDRKSIPLKMCYVTRSMALADPENRQLEIHSPDAKHTVILRSKDSATAQAWFSAIHSNVNDLLTRVIAEVREQLGKTGIAGSREIRHLGWLAEKVPGESKKQWKPALVVLTEKDLLIYDSMPRRKEAWFSPVHTYPLLATRLVHSGPGKGSPQAGVDLSFATRTGTRQGIETHLFRAETSRDLSHWTRSIVQGCHNSAELIAEISTACTYKNQECRLTIHYENGFSITTEPQEGAFPKTIIQSPYEKLKMSSDDGIRMLYLDFGGKDGEIQLDLHSCPKPIVFIIHSFLSAKITRLGLVA

SEQ ID NO: 24818 - protein, 40 aa, Homo sapiens
LCIRLKVFCPIYLTSHALCGLSWKKRILETQGKVLSTYTT

SEQ ID NO: 24819 - protein, 653 aa, Homo sapiens
LLGTTKEIFMFLTYMETVTKELVSWMRGHESSVFSISVHASGKYAITTSSDTAQLWDLDTFQRKRKLNIRQSVGIQKVFFLPLSNTILSCFKDNSIFAWECDTLFCKYQLPAPPESSSILYKVFAVTRDGRILAAGGKSNHLHLWCLEARQLFRIIQMPTKVRAIRHLEFLPDSFDAGSNQVLGVLSQDGIMRFINMQTCKLLFEIGSLDEGISSSAISPHGRYIASIMENGSLNIYSVQALTQEINKPPPPLVKVIEDLPKNKLSSSDLKMKVTSGRVQQPAKSRESKMQTRILKQDLTGDFESKKNELPDGLNKKRLQILLKGYGEYPTKYRMFIWRSLLQLPENHTAFSTLIDKGTHVAFLNLQKKYPIKSRKLLRVLQRTLSALAHWSVIFSDTPYLPLLAFPFVKLFQNNQLICFEVIATLIINWCQHWFEYFPNPPINILSMIENVLAFHDKELLQHFIDHDITSQLYAWPLLETVFSEVLTREEWLKLFDNIFSNHPSFLLMTVVAYNICSRTPLLSCNLKDDFEFFFHHRNNLDINVVIRQVYHLMETTPTDIHPDSMLNVFVALTKGQYPVFNQYPKFIVDYQTQERERIRNDELDYLRERQLKICKLKSTSKELKMKLGTRNRSCFVKLKKQEEKCSYKRRRK

SEQ ID NO: 24820 - protein, 970 aa, Homo sapiens
LLGTTKEIFMFLTYMETVTKELVSWMRGHESSVFSISVHASGKYAITTSSDTAQLWDLDTFQRKRKLNIRQSVGIQKVFFLPLSNTILSCFKDNSIFAWECDTLFCKYQLPAPPESSSILYKVFAVTRDGRILAAGGKSNHLHLWCLEARQLFRIIQMPTKVRAIRHLEFLPDSFDAGSNQVLGVLSQDGIMRFINMQTCKLLFEIGSLDEGISSSAISPHGRYIASIMENGSLNIYSVQALTQEINKPPPPLVKVIEDLPKNKLSSSDLKMKVTSGRVQQPAKSRESKMQTRILKQDLTGDFESKKNELPDGLNKKRLQILLKGYGEYPTKYRMFIWRSLLQLPENHTAFSTLIDKGTHVAFLNLQKKYPIKSRKLLRVLQRTLSALAHWSVIFSDTPYLPLLAFPFVKLFQNNQLICFEVIATLIINWCQHWFEYFPNPPINILSMIENVLAFHDKELLQHFIDHDITSQLYAWPLLETVFSEVLTREEWLKLFDNIFSNHPSFLLMTVVAYNICSRTPLLSCNLKDDFEFFFHHRNNLDINVVIRQVYHLMETTPTDIHPDSMLNVFVALTKGQYPVFNQYPKFIVDYQTQERERIRNDELDYLRERQTVEDMQAKVDQQRVEDEAWYQKQELLRKAEETRREMLLQEEEKMIQQRQRLAAVKRELKVKEMHLQDAARRRFLKLQQDQQEMELRRLDDEIGRKVYMRDREIAATARDLEMRQLELESQKRLYEKNLTENQEALAKEMRADADAYRRKVDLEEHMFHKLIEAGETQSQKTQKVIKENLAKAEQACLNTDWQIQSLHKQKCDDLQRNKCYQEVAKLLRENRRKEIEIINAMVEEEAKKWKEAEGKEFRLRSAKKASALSDASRKWFLKQEINAAVEHAENPCHKEEPRFQNEQDSSCLPRTSQLNDSSEMDPSTQISLNRRAVEWDTTGQNLIKKVRNLRQRLTARARHRCQTPHLLAA

SEQ ID NO: 24821 - protein, 952 aa, Homo sapiens
LLGTTKEIFMFLTYMETVTKELVSWMRGHESSVFSISVHASGKYAITTSSDTAQLWDLDTFQRKRKLNIRQSVGIQKVFFLPLSNTILSCFKDNSIFAWECDTLFCKYQLPAPPESSSILYKVFAVTRDGRILAAGGKSNHLHLWCLEARQLFRIIQMPTKVRAIRHLEFLPDSFDAGSNQVLGVLSQDGIMRFINMQTCKLLFEIGSLDEGISSSAISPHGRYIASIMENGSLNIYSVQALTQEINKPPPPLVKVIEDLPKNKLSSSDLKMKVTSGRVQQPAKSRESKMQTRILKQDLTGDFESKKNELPDGLNKKRLQILLKGYGEYPTKYSTLIDKGTHVAFLNLQKKYPIKSRKLLRVLQRTLSALAHWSVIFSDTPYLPLLAFPFVKLFQNNQLICFEVIATLIINWCQHWFEYFPNPPINILSMIENVLAFHDKELLQHFIDHDITSQLYAWPLLETVFSEVLTREEWLKLFDNIFSNHPSFLLMTVVAYNICSRTPLLSCNLKDDFEFFFHHRNNLDINVVIRQVYHLMETTPTDIHPDSMLNVFVALTKGQYPVFNQYPKFIVDYQTQERERIRNDELDYLRERQTVEDMQAKVDQQRVEDEAWYQKQELLRKAEETRREMLLQEEEKMIQQRQRLAAVKRELKVKEMHLQDAARRRFLKLQQDQQEMELRRLDDEIGRKVYMRDREIAATARDLEMRQLELESQKRLYEKNLTENQEALAKEMRADADAYRRKVDLEEHMFHKLIEAGETQSQKTQKVIKENLAKAEQACLNTDWQIQSLHKQKCDDLQRNKCYQEVAKLLRENRRKEIEIINAMVEEEAKKWKEAEGKEFRLRSAKKASALSDASRKWFLKQEINAAVEHAENPCHKEEPRFQNEQDSSCLPRTSQLNDSSEMDPSTQISLNRRAVEWDTTGQNLIKKVRNLRQRLTARARHRCQTPHLLAA

SEQ ID NO: 24822 - protein, 31 aa, Homo sapiens
MLRKLWQVIGVVLQKFQKFSSILSANNKLFT

SEQ ID NO: 24823 - protein, 560 aa, Homo sapiens
MKPIPPTRAIVMAMLPSVTVSMEEEISGVFSVIFQDGSSVKEVETYHRTRALRSLRKDAQNSSDSSFEKNVEITEQLANGRHFTRQLARQQADKKKEEHREDKVIPVTRSLRARNIVQSTEHLHEDNGDVEVRRSCRIRSRYSGVNQSMLFDKLITNTAEAVLQKMDDMKKMRRQRMRELEDLGVFNETEESNLNMYTRGKQKDIQRTDEETTDNQEGSVESSEEGEDQEHEDDGEDEDDEDDDDDDDDDDDDDDEDDEDEEDGEEENQKRYYLRQRKATVYYQAPLEKPRHQRKPNIFYSGPASPARPRYRLSSAGPRSPYCKRMNRRRHAIHSSDSTSSSSSEDEQHFERRRKRSRNRAINRCLPLNFRKDELKGIYKDRMKIGASLADVDPMQLDSSVRFDSVGGLSNHIAALKEMVVFPLLYPEVFEKFKIQPPRGCLFYGPPGTGKTLVARALANECSQGDKRVAFFMRKGADCLSKWVGESERQLRLLFDQAYQMRPSIIFFDEIDGLAPVRSSRQDQIHSSYGWIGQQRGNCGHWCYEQARFYRSCFTKAWSL

SEQ ID NO: 24824 - protein, 35 aa, Homo sapiens
LWIHIPFPMRSLLLTASCFCCFYMGEEKELGISIV

SEQ ID NO: 24825 - protein, 10 aa, Homo sapiens
LLTLSAFFLS

SEQ ID NO: 24826 - protein, 22 aa, Homo sapiens
LFNFIFCYLYFGGSREEMELFL

SEQ ID NO: 24827 - protein, 359 aa, Homo sapiens
LTETHTSPPRPPAPLLLSREAPARTDRPPSPGAVRARPSQRKFFPSEGREPPRAFWKGSGDGTGGESRAGPRSAWCPAPRLPGRRTSGRGRAEPSSFSPQPRQKPPCRTAAGVPAPQLAMSRLLPLLRSRTARSLRPGPAAAAAPRPPSWCCCGRGLLALAPPGGLPGGPRRLGTHPKKEPMEALNTAQGARDFIYSLHSTERSCLLKELHRFESIAIAQEKLEAPPPTPGQLRYVFIHNAIPFIGFGFLDNAIMIVAGTHIEMSIGIILGISTMAAAALGNLVSDLAGLGLAGYVEALASRLGLSIPDLTPKQVDMWQTRLSTHLGKAVGVTIGCILGMFPLIFFGGGEEDEKLETKS

SEQ ID NO: 24828 - protein, 14 aa, Homo sapiens
MSMPFCISALILLY

SEQ ID NO: 24829 - protein, 79 aa, Homo sapiens [sequence omitted]

SEQ ID NO: 24830 - protein, 82 aa, Homo sapiens
LLFFILTDIIHQARWLMPVIPALWEAKAGGSLELRSSGPAWETCCPQIGCSHTDIRKSDLIQDEALRRAIENHNKKRHRHSE

SEQ ID NO: 24831 - protein, 29 aa, Homo sapiens
MLLVSLFKDTFSEPFLNKSGGPIGRLNCP

SEQ ID NO: 24832 - protein, 60 aa, Homo sapiens
LHASDVSSGEDTGKDSKEQENTLASLIAFKVLSKLTVMAPSRQTAMPHVQDGRITISFNS

SEQ ID NO: 24833 - protein, 22 aa, Homo sapiens
VAPLVFPFYCQDTEIWRGKWLT

SEQ ID NO: 24834 - protein, 17 aa, Homo sapiens
LKIMMEHIFNQMFGIPY

SEQ ID NO: 24835 - protein, 14 aa, Homo sapiens
LVTQAVFKRKQEKL

SEQ ID NO: 24836 - protein, 482 aa, Homo sapiens
VRGAARGVQVAAVARVLAGAGGTGGDRRGLPQGRRSPLGPRARLTAPPAPAPPRPAPGARGPPALGTRRPPGIGAERSVPAPVPPPPPSGRPPGLAAAAASGPRVPAAGGAGGVGGCRAPPPVRLESTSRARRPASMEEKYLPELMAEKDSLDPSFTHALRLVNQEIEKFQKGEGKDEEKYIDVVINKNMKLGQKVLIPVKQFPKFNFVGKLLGPRGNSLKRLQEETLTKMSILGKGSMRDKAKEEELRKSGEAKYFHLNDDLHVLIEVFAPPAEAYARMGHALEEIKKFLIPDYNDEIRQAQLQELTYLNGGSENADVPVVRGKPTLRTRGVPAPAITRGRGGVTARPVGVVVPRGTPTPRGVLSTRGPVSRGRGLLTPRARGVPPTGYRPPPPPPTQETYGEYDYDDGYGTAYDEQSYDSYDNSYSTPAQSGADYYDYGHGLSEETYDSYGQEEWTNSRHKAPSARTAKGVYRDQPYGRY

SEQ ID NO: 24837 - protein, 39 aa, Homo sapiens [sequence omitted]

SEQ ID NO: 24838 - protein, 12 aa, Homo sapiens
MMDLLEEQQRLK

SEQ ID NO: 24839 - protein, 254 aa, Homo sapiens
LASFPVGLRHVCSHALRTWVGVMTLGAAAQLRLRMEDPGRLLTLPTAARLWLCTKDPPRQAFLPCGQRHSWGCAPQDPAGHSYPADCGTSVARSFYGVDSSTAAAAHYGPRRAFLPCRLWQGGGGAPTMQASVLPCDWQHRLRSQDSGGSPYSGGVLTLRTVAQLWLAQEPRWASLPCRQWQGCAWRTRVSRLILWTVLLLRLCTQDLVGMGCVCSSSADCDSVPAARRTRAGVFALSTTALLQQCTRTRPGAG

SEQ ID NO: 24840 - protein, 109 aa, Homo sapiens
LHILYYFYCMLTNHKKLYGDFLSWKLEETLAQFPLQPGKVATFTINIKVKLDFSCQENLLQDLSDDGISVSGFPLSSPFRQVVRPRVEGKPVNPPESNKAGDYSHVKLF

SEQ ID NO: 24841 - protein, 54 aa, Homo sapiens
MIFLFICAFYVEPQCIEKIQYETVHILFILQVGEKSNWSWNLIDFSPANCYSVL

SEQ ID NO: 24842 - protein, 29 aa, Homo sapiens
LSYFRKNYSPFCLTCLLLSCGYVKHWVGN

SEQ ID NO: 24843 - protein, 1110 aa, Homo sapiens
LCADSWLDLYRIGCMLLELAGQEALKPAGAIYMEKSGCSPFPVCWAKEYDRYLASSKIMAAAYLDPNLNHTPNSSTKTHLGTGMERSPGAMERVLKVFHYFESNSEPTTWASIIRHGDATDVRGIIQKIVDSHKVKHVACYGFRLSHLRSEEVHWLHVDMGVSSVREKYELAHPPEEWKYELRIRYLPKGFLNQFTEDKPTLNFFYQQVKSDYMLEIADQVDQEIALKLGCLEIRRSYWEMRGNALEKKSNYEVLEKDVGLKRFFPKSLLDSVKAKTLRKLIQQTFRQFANLNREESILKFFEILSPVYRFDKECFKCALGSSWIISVELAIGPEEGISYLTDKGCNPTHLADFTQVQTIQYSNSEDKDRKGMLQLKIAGAPEPLTVTAPSLTIAENMADLIDGYCRLVNGTSQSFIIRPQKEGERALPSIPKLANSEKQGMRTHAVSVSETDDYAEIIDEEDTYTMPSTRDYEIQRERIELGRCIGEGQFGDVHQGIYMSPENPALAVAIKTCKNCTSDSVREKFLQEALTMRQFDHPHIVKLIGVITENPVWIIMELCTLGELRSFLQVRKYSLDLASLILYAYQLSTALAYLESKRFVHRDIAARNVLVSSNDCVKLGDFGLSRYMEDSTYYKASKGKLPIKWMAPESINFRRFTSASDVWMFGVCMWEILMHGVKPFQGVKNNDVIGRIENGERLPMPPNCPPTLYSLMTKCWAYDPSRRPRFTELKAQLSTILEEEKAQQEERMRMESRRQATVSWDSGGSDEAPPKPSRPGYPSPRSSEGFYPSPQHMVQTNHYQVSGYPGSHGITAMAGSIYPGQASLLDQTDSWNHRPQEIAMWQPNVEDSTVLDLRGIGQVLPTHLMEERLIRQQQEMEEDQRWLEKEERFLKPDVRLSRGSIDREDGSLQGPIGNQHIYQPVGKPDPAAPPKKPPRPGAPGHLGSLASLSSPADSYNEGVKLQPQEISPPPTANLDRSNDKVYENVTGLVKAVIEMSSKIQPAPPEEYVPMVKEVGLALRTLLATVDETIPLLPASTHREIEMAQKLLNSDLGELINKMKLAQQYVMTSLQQEYKKQMLTAAHALAVDAKNLLDVIDQARLKMLGQTRPH

SEQ ID NO: 24844 - protein, 202 aa, Homo sapiens
VRYWRRAAGSHGGGRVAALVAALGAAGALRAAGRPPGQSPKSRAEVLSIFVPPFISKEDSQMAGANCGTLGKTRMRSLRKKREKPRPEQWKGLPGPPRAPEPEDVAVPGGVDLLTLPQLCFPGGVCVATEPKEDCVHFLVLTDVCGNRTYGVVAQYYRPLHDEYCFYNGKTHRECPGCFVPFAVCVVSRFPYYNSLKDCLSW

SEQ ID NO: 24845 - protein, 1272 aa, Homo sapiens
VRYWRRAAGSHGGGRVAALVAALGAAGALRAAGRPPGQSPKSRAEVLSIFVPPFISKEDSQMAGANCGTLGKTRMRSLRKKREKPRPEQWKGLPGPPRAPEPEDVAVPGGVDLLTLPQLCFPGGVCVATEPKEDCVHFLVLTDVCGNRTYGVVAQYYRPLHDEYCFYNGKTHRECPGCFVPFAVCVVSRFPYYNSLKDCLSCLLALLKPCKDFEVDSHIKDFAAKLSLIPSPPPGPLHLVFNMKSLQIVLPARADPESPILDLDLHLPLLCFRPEKVLQILTCILTEQRIVFFSSDWALLTLVTECFMAYLYPLQWQHPFVPILSDQMLDFVMAPTSFLMGCHLDHFEEVSKEADGLVLINIDHGSITYSKSTDDNVDIPDVPLLAAQTFIQRVQSLQLHHELHAAHLLSSTDLKEGRAHRRSWQQKLNCQIQQTTLQLLVSIFRDVKNHLNYEHRVFNSEEFLKTRAPGDHQFYKQVLDTYMFHSFLKARLNRRMDAFAQMDLDTQSEEDRINGMLLSPRRPTVEKRASRKSSHLHVTHRRMVVSMPNLQDIAMPELAPRNSSLRLTDTAGCRGSSAVLNVTPKSPYTFKIPEIHFPLESKCVQAYHAHFVSMLSEAMCFLAPDNSLLLARYLYLRGLVYLMQGQLLNALLDFQNLYKTDIRIFPTDLVKRTVESMSAPEWEGAEQAPELMRLISEILDKPHEASKLDDHVKKFKLPKKHMQLGDFMKRVQESGIVKDASIIHRLFEALTVGQEKQIDPETFKDFYNCWKETEAEAQEVSLPWLVMEHLDKNECVCKLSSSVKTNLGVGKIAMTQKRLFLLTEGRPGYLEISTFRNIEEVRRTTTTFLLRRIPTLKIRVASKKEVFEANLKTECDLWHLMVKEMWAGKKLADDHKDPHYVQQALTNVLLMDAVVGTLQSPGAIYAASKLSYFDKMSNEMPMTLPETTLETLKHKINPSAGEAFPQAVDVLLYTPGHLDPAEKVEDAHPKLWCALSEGKVTVFNASSWTIHQHSFKVGTAKVNCMVMADQNQVWVGSEDSVIYIINVHSMSCNKQLTAHCSSVTDLIVQDGQEAPSNVYSCSMDGMVLVWNVSTLQVTSRFQLPRGGLTSIRLHGGRLWCCTGNSIMVMKMNGSLHQELKIEENFKDTSTSFLAFQLLPEEEQLWAACAGRSEVYIWSLKDLAQPPQRVPLEDCSEINCMIRVKKQVWVGSRGLGQGTPKGKIYVIDAERKTVEKELVAHMDTVRTLCSAEDRYVLSGSGREEGKVAIWKGE

SEQ ID NO: 24846 - protein, 502 aa, Homo sapiens
MVLHRQGWFLLAWAVESLGSPPQPRAPEQLFCWQLSSARTLKETRAFPIISVTFWDVKNHLNYEHRVFNSEEFLKTRAPGDHQFYKQVLDTYMFHSFLKARLNRRMDAFAQMDLDTQSEEDRINGMLLSPRRPTVEKRASRKSSHLHVTHRRMVVSMPNLQDIAMPELAPRNSSLRLTDTAGCRGSSAVLNVTPKSPYTFKIPEIHFPLESKCVQAYHAHFVSMLSEAMCFLAPDNSLLLARYLYLRGLVYLMQGQLLNALLDFQNLYKTDIRIFPTDLVKRTVESMSAPEWEGAEQAPELMRLISEILDKPHEASKLDDHVKKFKLPKKHMQLGDFMKRVQESGIVKDASIIHRLFEALTVGQEKQIDPETFKDFYNCWKETEAEAQEVSLPWLVMEHLDKNECVCKLSSSVKTNLGVGKIAMTQKRLFLLTEGRPGYLEISTFRNIEVRTAQADGARPHLCLGDRWLEWALSSLPAMPSTSCSPSADRMPSCPSVCSSVK

SEQ ID NO: 24847 - protein, 91 aa, Homo sapiens
VSARAEGMGPAPWAPIHKLGHGAPASQDKAPGLAHPEGLWGCLPGSWDGPLSEALQCLQMERRARPPVGSAFWRVHTTDQVFPQGLALCSY

SEQ ID NO: 24848 - protein, 39 aa, Homo sapiens
LALTIALACRWPLLPSLGPALPPEPPAPLQDSPYPDGVT

SEQ ID NO: 24849 - protein, 213 aa, Homo sapiens
LDKHRDLVLLIFWGCVGTSQVVSPAFSAVPSALPGPSGGAMARMNRPAPVEVSYKHMRFLITHNPTNATLSTFIEDLKKYGATTVVRVCEVTYDKTPLEKDGITVVDWPFDDGAPPPGKVVEDWLSLVKAKFCEAPGSCVAVHCVAGLGRAPVLVALALIESGMKYEDAIQFIRQKRRGAINSKQLTYLEKYRPKQRLRFKDPHTHKTRCCVM

SEQ ID NO: 24850 - protein, 188 aa, Homo sapiens
LDKHRDLVLLIFWGCVGTSQVVSPAFSAVPSALPGPSGGAMARMNRPAPVEVSYKHMRFLITHNPTNATLSTFIEDLKKYGATTVVRVCEVTYDKTPLEKDGITVVDWPFDDGAPPPGKVVEDWLSLVKAKFCEAPGSCVAVHCVAGLGRKRRGAINSKQLTYLEKYRPKQRLRFKDPHTHKTRCCVM

SEQ ID NO: 24851 - protein, 127 aa, Homo sapiens
LDKHRDLVLLIFWGCVGTSQVVSPAFSAVPSALPGPSGGAMARMNRPAPVEVSYKHMRFLITHNPTNATLSTFIESGMKYEDAIQFIRQKRRGAINSKQLTYLEKYRPKQRLRFKDPHTHKTRCCVM

SEQ ID NO: 24852 - protein, 50 aa, Homo sapiens
LPVPRATAAGVGPCLPPSRETPPAARPSSLPEAFMSPKAGATAPTPAQQP

SEQ ID NO: 24853 - protein, 125 aa, Homo sapiens
VTTKAVLLALLMAGLALQPGTALLCYSCKAQVSNEDCLQVENCTQLGEQCWTARIRAVGLLTVISKGCSLNCVDDSQDYYVGKKNITCCDTDLCNASGAHALQPAAAILALLPALGLLLWGPGQL

SEQ ID NO: 24854 - protein, 88 aa, Homo sapiens
LGTMALLALLLVVALPRVWTDANLTARQRDPEDSQRTDEGDNRVWCHVCERENTFECQNPRRCKWTEPYCVIAAVSEYLRSCWGPKGR

SEQ ID NO: 24855 - protein, 86 aa, Homo sapiens [sequence omitted]

SEQ ID NO: 24856 - protein, 135 aa, Homo sapiens
LPAAMTPLLTLILVVLMGLPLAQALDCHVCAYNGDNCFNPMRCPAMVAYCMTTRTSAAEAIWCHQCTGFGGCSHGSRCLRDSTHCVTTATRVLSNTEDLPLVTKMCHIGCPDIPSLGLGPYVSIACCQTSLCNHD

SEQ ID NO: 24857 - protein, 86 aa, Homo sapiens
LPAAMTPLLTLILVVLMGLPLAQALDCHVCAYNGDNCFNPMRCPAMVAYCMTTRTYYTPTRMKLQPKPYGVTSARASEGAPMDPDA

SEQ ID NO: 24858 - protein, 120 aa, Homo sapiens
LPAAMTPLLTLILVVLMGLPLAQALDCHVCAYNGDNCFNPMRCPAMVAYCMTTRTYYTPTRMKVSKSCVPRCFETVYDGYSKHASTTSCCQYDLCNGTGLATPATLALAPILLATLWGLL

SEQ ID NO: 24859 - protein, 67 aa, Homo sapiens [sequence omitted]

SEQ ID NO: 24860 - protein, 118 aa, Homo sapiens
MGKLRPRRGLRPPPSFPSEVAPEPRPGPASFHPALLCARRVLTWRGRTGDQVGVTVTDTWTVLVVFGVGSPRKTSTQETPKTAGAKCGRWTSPRHRASHQFCSGHQPSVLQHHSGTCR

SEQ ID NO: 24861 - protein, 144 aa, Homo sapiens
LRPPGGRTAILSRMKIFLPVLLAALLGVERASSLMCFSCLNQKSNLYCLKPTICSDQDNYCVTVSASAGIGNLVTFGHSLSKTCSPACPIPEGVNVGVASMGISCCQSFLCNFSAADGGLRASVTLLGAGLLLSLLPALLRFGP

SEQ ID NO: 24862 - protein, 37 aa, Homo sapiens
MWQNLNGDISSLWVSSLLAFNQLFCLTAAGLGTAQPP

SEQ ID NO: 24863 - protein, 81 aa, Homo sapiens
MFTMGFLKTVLLGTSACVSPPTMPAFFSLPAERRLQAWPQSEAPLSVSSCFQNRPPEPASFQNLRPEPASLQNLRTEPTSF

SEQ ID NO: 24864 - protein, 211 aa, Homo sapiens
LRPPTQTRDSIRASAVGLLGTLVRRGRGGLRLGLRGPLRKLVLQSLVPLLLRLHDPSRDAAESSEWTLARCDHAFCWGLLEELVTVAHYDSPEALSHLCCRLVQRYPGHVPNFLSQTQGYLRSPQDPLRRAAAVLIDLGRLQSDPKPAVAAAAHVSAQQVAMLARARGCPRGPRLLRIAPRPARPPPVFADSPFQRRSVAGRWGCSGPRRA

SEQ ID NO: 24865 - protein, 233 aa, Homo sapiens
LRPPTQTRDSIRASAVGLLGTLVRRGRGGLRLGLRGPLRKLVLQSLVPLLLRLHDPSRDAAESSEWTLARCDHAFCWGLLEELVTVAHYDSPEALSHLCCRLVQRYPGHVPNFLSQTQGYLRSPQDPLRRAAAVLIGFLVHHASPGCVNQDLLDSLFQDLGRLQSDPKPAVAAAAHVSAQQVAMLARARGCPRGPRLLRIAPRPARPPPVFADSPFQRRSVAGRWGCSGPRRA

SEQ ID NO: 24866 - protein, 748 aa, Homo sapiens
VVPPGAASRSVLGTTSQEEQRQVLQARAAMAGGVWGRSRAREAPVGALTLTALTEGIRARQGQPQGPPSAGPQPKSWEVKPEAEPQTQALTAPSEAEPGRGATVPEAGSEPCSLNSALEPAPEGPHQVPQSSWEEGVLADLALYTAACLEEAGFAGTQATVLTLSSALEARGERLEDQVHALVRGLLAQVPSLAEGRPWRAALRVLSALALEHARDVVCALLPRSLPADRVAAELWRSLSRNQRVNGQVLVQLLWALKGASGPEPQALAATRALGEMLAVSGCVGATRGFYPHLLLALVTQLHKLARSPCSPDMPKIWVLSHRGPPHSHASCAVEALKALLTGDGGRMVVTCMEQAGGWRRLVGAHTHLEGVLLLASAMVAHADHHLRGLFADLLPRLRSADDPQRLTAMAFFTGLLQSRPTARLLREEVILERLLTWQGDPEPTVRWLGLLGLGHLALNRRKVRHVSTLLPALLGALGEGDARLVGAALGALRRLLLRPRAPVRLLSAELGPRLPPLLDDTRDSIRASAVGLLGTLVRRGRGGLRLGLRGPLRKLVLQSLVPLLLRLHDPSRDAAESSEWTLARCDHAFCWGLLEELVTVAHYDSPEALSHLCCRLVQRYPGHVPNFLSQTQGYLRSPQDPLRRAAAVLIGFLVHHASPGCVNQDLLDSLFQDLGRLQSDPKPAVAAAAHVSAQQVAMLARARGCPRGPRLLRIAPRPARPPPVFADSPFQRRSVAGRWGCSGPRRA

SEQ ID NO: 24867 - protein, 201 aa, Homo sapiens
LAAGLRDCVRFLRAFRLRDADVQFLASVLPPDTDPAFFEHLRALDCSEVTVRALPEGSLAFPGVPLLQVSGPLLVVQLLETPLLCLVSYASLVATNAARLRLIAGPEKRLLEMGLRRAQGPDGGLTASTYSYLGGECLVRGKARAGKEEPHLGPRSPNPTAFLPRLRQQQQRASGPAARCAGGRDPGPLLRHFLFRQRGAP

SEQ ID NO: 24868 - protein, 204 aa, Homo sapiens
VGWGCPWPLPSNRAPLAPPVVQELQQAISKLEARLNVLEKSSPGHRATAPQTQHVSPMRQVEPPAKKPATPAEDDEDDDIDLFGSDNEEEDKEAAQLREERLRQYAEKKAKKPALVAKSSILLDVKPWDDETDMAQLEACVRSIQLDGLVWGASKLVPVGYGIRKLQIQCVVEDDKVGTDLLEEEITKFEEHVQSVDIAAFNKI

SEQ ID NO: 24869 - protein, 719 aa, Homo sapiens
LFSLHNKTSPHGLDFEVLECHLMEAPLGSILSPCPGRAATGRAGTGRVGTGLRPPAVLQLCPLLAFYRCVRKMRSGKASCTLETVWEDKHKYEEAERRFYEHEATQAAASAQQLPAEGPAMNGPGQDDPEDADEAEAPDGGSRRDPRKSQDSRKPLQKKRKRSPKSGLGPADLALLGLSAERVWLDKSLFDQAESSYRQKLADVAAQAAWPPALAPWGLCTHGNQVACHHVTWGIWVNKSSFDQAERAFVEWSQALLLAPDGSRRQGTPNTGQQVAVPDLAHQPSPPVNGQPPLGSLQALVREVWLEKPRYDAAERGFYEALFDGHPPGKVRLQERAGLAEGARRGRRDRRGRNILGNKRAGLRRADGEAPSALPYCYFLQKDAEAPWLSKPAYDSAECRHHAAEALRVAWCLEAASLSHRPGPRSGLSVSSLRPNRKMATNFLAHEKIWFDKFKYDDAERRFYEQMNGPVAGASRQENGASVILRDIARARENIQKSLAGSSGPGASSGTSGDHGELVVRIASLEVENQSLRGVVQELQQAISKLEARLNVLEKSSPGHRATAPQTQHVSPMRQVEPPAKKPATPAEDDEDDDIDLFGSDNEEEDKEAAQLREERLRQYAEKKAKKPALVAKSSILLDVKPWDDETDMAQLEACVRSIQLDGLVWGASKLVPVGYGIRKLQIQCVVEDDKVGTDLLEEEITKFEEHVQSVDIAAFNKI

SEQ ID NO: 24870 - protein, 317 aa, Homo sapiens
VLHFPCAARAALPFISLPASADSSSLVAASLAGVRKMATNFLAHEKIWFDKFKYDDAERRFYEQMNGPVAGASRQENGASVILRDIARARENIQKSLAGSSGPGASSGTSGDHGELVVRIASLEVENQSLRGVVQELQQAISKLEARLNVLEKSSPGHRATAPQTQHVSPMRQVEPPAKKPATPAEDDEDDDIDLFGSDNEEEDKEAAQLREERLRQYAEKKAKKPALVAKSSILLDVKPWDDETDMAQLEACVRSIQLDGLVWGASKLVPVGYGIRKLQIQCVVEDDKVGTDLLEEEITKFEEHVQSVDIAAFNKI

SEQ ID NO: 24871 - protein, 316 aa, Homo sapiens
VLHFPCAARAALPFISLPASADSSSLVAASLAGVKMATNFLAHEKIWFDKFKYDDAERRFYEQMNGPVAGASRQENGASVILRDIARARENIQKSLAGSSGPGASSGTSGDHGELVVRIASLEVENQSLRGVVQELQQAISKLEARLNVLEKSSPGHRATAPQTQHVSPMRQVEPPAKKPATPAEDDEDDDIDLFGSDNEEEDKEAAQLREERLRQYAEKKAKKPALVAKSSILLDVKPWDDETDMAQLEACVRSIQLDGLVWGASKLVPVGYGIRKLQIQCVVEDDKVGTDLLEEEITKFEEHVQSVDIAAFNKI

SEQ ID NO: 24872 - protein, 85 aa, Homo sapiens
LGTEPSPPPALQSSGPGASSGTSGDHGELVVRIASLEVENQSLRGGEAPGQWVGAVPGPCHLTVLPLPPQWYRSCSRPSPSWRPG

SEQ ID NO: 24873 - protein, 147 aa, Homo sapiens
LVAASLAGVRKMATNFLAHEKIWFDKFKYDDAERRFYEQMNGPVAGASRQENGASVILRDIARARENIQKSLAGSSGPGASSGTSGDHGELVVRIASLEVENQSLRGGEAPGQWVGAVPGPCHLTVLPLPPQWYRSCSRPSPSWRPG

SEQ ID NO: 24874 - protein, 51 aa, Homo sapiens
LAYVWRPPGRAAPWWPQLSRMSSPSSGPCPPDLECSGKLLLSLDKLQERRG

SEQ ID NO: 24875 - protein, 48 aa, Homo sapiens
VLHFPCAARAALPFISLPASADSSSLVAASLAGVKLLLSLDKLQERRG

SEQ ID NO: 24876 - protein, 170 aa, Homo sapiens
LFDITGATDMGEPQGSMRILVTGGSGLVGKAIQKVVADGAGLPGEDWVFVSSKDADLTDTAQTRALFEKVQPTHVIHLAAMVGGLFRNIKYNLDFWRKNVHMNDNVLHSAFEVGARKVVSCLSTCIFPDKTTYPIDETMIHNGPPHNSNFGYSYAKRMIDVQNRSSRPSC

SEQ ID NO: 24877 - protein, 391 aa, Homo sapiens
LTRSALLGTVLPQRGGLAVPMDMAQEPVTFRDVAIYFSREEWACLEPSQRALYRDVMLDNFSSVAALGFCSPRPDLVSRLEQWEEPWVEDRERPEFQAVQRGPRPGARKSADPKRPCDHPAWAHKKTHVRRERAREGSSFRKGFRLDTDDGQLPRAAPERTDAKPTAFPCQVLTQRCGRRPGRRERRKQRAVELSFICGTCGKALSCHSRLLAHQTVHTGTKAFECPECGQTFRWASNLQRHQKNHTREKPFCCEACGQAFSLKDRLAQHRKVHTEHRPYSCGDCGKAFKQKSNLLRHQLVHTGERPFYCADCGKAFRTKENLSHHQRVHSGEKPYTCAECGKSFRWPKGFSIHRRLHLTKRFYECGHCGKGFRHLGFFTRHQRTHRHGEV

SEQ ID NO: 24878 - protein, 1582 aa, Homo sapiens
LLGAGPFFRLLNLRKLGLSDNEIQRLPPEVANFMQLVELDVSRNDIPEIPESIKFCKALEIADFSGNPLSRLPDGFTQLRSLAHLALNDVSLQALPGDVGNLANLVTLELRENLLKSLPASLSFLVKLEQLDLGGNDLEVLPDTLGALPNLRELWLDRNQLSALPPELGNLRRLVCLDVSENRLEELPAELGGLVLLTDLLLSQNLLRRLPDGIGQLKQLSILKVDQNRLCEVTEAIGDCENLSELILTENLLMALPRSLGKLTKLTNLNVDRNHLEALPPEIGGCVALSVLSLRDNRLAVLPPELAHTTELHVLDVAGNRLQSLPFALTHLNLKALWLAENQAQPMLRFQTEDDARTGEKVLTCYLLPQQPPPSLEDAGQQGSLSETWSDAPPSRVSVIQFLEAPIGDEDAEEAAAEKRGLQRRATPHPSELKVMKRSIEGRRSEACPCQPDSGSPLPAEEEKRLSAESGLSEDSRPSASTVSEAEPEGPSAEAQGGSQQEATTAGGEEDAEEDYQEPTVHFAEDALLPGDDREIEEGQPEAPWTLPGGRQRLIRKDTPHYKKHFKISKLPQPEAVVALLQGMQPDGEGPVAPGGWHNGPHAPWAPRAQKEEEEEEEGSPQEEEEEEEEENRAEEEEASTEEEDKEGAVVSAPSVKGVSFDQANNLLIEPARIEEEELTLTILRQTGGLGISIAGGKGSTPYKGDDEGIFISRVSEEGPAARAGVRVGDKLLEVNGVALQGAEHHEAVEALRGAGTAVQMRVWRERMVEPENAVTITPLRPEDDYSPRERRGGGLRLPLLPPESPGPLRQRHVACLARSERGLGFSIAGGKGSTPYRAGDAGIFVSRIAEGGAAHRAGTLQVGDRVLSINGVDVTEARHDHAVSLLTAASPTIALLLEREAGGPLPPSPLPHSSPPTAAVATTSITTATPGVPGLPSLAPSLLAAALEGPYPVEEIRLPRAGGPLGLSIVGGSDHSSHPFGVQEPGVFISKVLPRGLAARSGLRVGDRILAVNGQDVRDATHQEAVSALLRPCLELSLLVRRDPAPPGLRELCIQKAPGERLGISIRGGARGHAGNPRDPTDEGIFISKVSPTGAAGRDGRLRVGLRLLEVNQQSLLGLTHGEAVQLLRSVGDTLTVLVCDGFEASTDAALEVSPGVIANPFAAGIGHRNSLESISSIDRELSPEGPGKEKELPGQTLHWGPEATEAAGRGLQPLKLDYRALAAVPSAGSVQRVPSGAAGGKMAESPCSPSGQQPPSPPSPDELPANVKQAYRAFAAVPTSHPPEDAPAQPPTPGPAASPEQLSFRERQKYFELEVRVPQAEGPPKRVSLVGADDLRKMQEEEARKLQQKRAQMLREAAEAGAEARLALDGETLGEEEQEDEQPPWASPSPTSRQSPASPPPLGGGAPVRTAKAERRHQERLRVQSPEPPAPERALSPAELRALEAEKRALWRAARMKSLEQDALRAQMVLSRSQEGRGTRGPLERLAEAPSPAPTPSPTPVEDLGPQTSTSPGRLSPDFAEELRSLEPSPSPGPQEEDGEVALVLLGRPSPGAVGPEDVALCSSRRPVRPGRRGLGPVPS

SEQ ID NO: 24879 - protein, 689 aa, Homo sapiens
LPPGGEPLDDARDSVFSKKGREEKRSSGRKGDGRRRVLRTPASATRRDTPDSSPAAHAPRRPRCAGHAPRPAKSTPLPSPLPGAFTVPPRPGSAFLPPSSREFRAPAPRSRETAEGARVGGARGGRDGRKMATATIALQVNGQQGGGSEPAAAAAVVAAGDKWKPPQGTDSIKMENGQSTAAKLGLPPLTPEQQEALQKAKKYAMEQSIKSVLVKQTIAHQQQQLTNLQMAAVTMGFGDPLSPLQSMAAQRQRALAIMCRVYVGSIYYELGEDTIRQAFAPFGPIKSIDMSWDSVTMKHKGFAFVEYEVPEAAQLALEQMNSVMLGGRNIKVGRPSNIGQAQPIIDQLAEEARAFNRIYVASVHQDLSDDDIKSVFEAFGKIKSCTLARDPTTGKHKGYGFIEYEKAQSSQDAVSSMNLFDLGGQYLRVGKAVTPPMPLLTPATPGGLPPAAAVAAAAATAKITAQEAVAGAAVLGTLGTPGLVSPALTLAQPLGTLPQAVMAAQAPGVITGVTPARPPIPVTIPSVGVVNPILASPPTLGLLEPKKEKEEEELFPESERPEMLSEQEHMSISGSSARHMVMQKLLRKQESTVMVLRNMVDPKDIDDDLEGEVTEECGKFGAVNRVIIYQEKQGEEEDAEIIVKIFVEFSIASETHKAIQALNGRWFAGRKVVAEVYDQERFDNSDLSA

SEQ ID NO: 24880 - protein, 48 aa, Homo sapiens
LSLPASCVPLSLLITSVLGTLLSSLLSLKAVSGSLGGPGWWASDLCAC

SEQ ID NO: 24881 - protein, 4554 aa, Homo sapiens
VAGMSGAGGAFASPREVLLERPCWLDGGCEPARRGYLYQQLCCVDERDRVQKKTFTKWVNKHLIKAQRHISDLYEDLRDGHNLISLLEVLSGDSLPREKGRMRFHKLQNVQIALDYLRHRQVKLVNIRNDDIADGNPKLTLGLIWTIILHFQISDIQVSGQSEDMTAKEKLLLWSQRMVEGYQGLRCDNFTSSWRDGRLFNAIIHRHKPLLIDMNKVYRQTNLENLDQAFSVAERDLGVTRLLDPEDVDVPQPDEKSIITYVSSLYDAMPRVPDVQDGVRANELQLRWQEYRELVLLLLQWMRHHTAAFEERRFPSSFEEIEILWSQFLKFKEMELPAKEADKNRSKGIYQSLEGAVQAGQLKVPPGYHPLDVEKEWGKLHVAILEREKQLRSEFERLECLQRIVTKLQMEAGLCEEQLNQADALLQSDVRLLAAGKVPQRAGEVERDLDKADSMIRLLFNDVQTLKDGRHPQGEQMYRRVYRLHERLVAIRTEYNLRLKAGVAAPATQVAQVTLQSVQRRPELEDSTLRYLQDLLAWVEENQHRVDGAEWGVDLPSVEAQLGSHRGLHQSIEEFRAKIERARSDEGQLSPATRGAYRDCLGRLDLQYAKLLNSSKARLRSLESLHSFVAAATKELMWLNEKEEEEVGFDWSDRNTNMTAKKESYSALMRELELKEKKIKELQNAGDRLLREDHPARPTVESFQAALQTQWSWMLQLCCCIEAHLKENAAYFQFFSDVREAEGQLQKLQEALRRKYSCDRSATVTRLEDLLQDAQDEKEQLNEYKGHLSGLAKRAKAVVQLKPRHPAHPMRGRLPLLAVCDYKQVEVTVHKGDECQLVGPAQPSHWKVLSSSGSEAAVPSVCFLVPPPNQEAQEAVTRLEAQHQALVTLWHQLHVDMKSLLAWQSLRRDVQLIRSWSLATFRTLKPEEQRQALHSLELHYQAFLRDSQDAGGFGPEDRLMAEREYGSCSHHYQQLLQSLEQGAQEESRCQRCISELKDIRLQLEACETRTVHRLRLPLDKEPARECAQRIAEQQKAQAEVEGLGKGVARLSAEAEKVLALPEPSPAAPTLRSELELTLGKLEQVRSLSAIYLEKLKTISLVIRGTQGAEEVLRAHEEQLKEAQAVPATLPELEATKASLKKLRAQAEAQQPTFDALRDELRGAQEVGERLQQRHGERDVEVERWRERVAQLLERWQAVLAQTDVRQRELEQLGRQLRYYRESADPLGAWLQDARRRQEQIQAMPLADSQAVREQLRQEQALLEEIERHGEKVEECQRFAKQYINAIKDYELQLVTYKAQLEPVASPAKKPKVQSGSESVIQEYVDLRTHYSELTTLTSQYIKFISETLRRMEEEERLAEQQRAEERERLAEVEAALEKQRQLAEAHAQAKAQAEREAKELQQRMQEEVVRREEAAVDAQQQKRSIQEELQQLRQSSEAEIQAKARQAEAAERSRLRIEEEIRVVRLQLEATERQRGGAEGELQALRARAEEAEAQKRQAQEEAERLRRQVQDESQRKRQAEVELASRVKAEAEAAREKQRALQALEELRLQAEEAERRLRQAEVERARQVQVALETAQRSAEAELQSKRASFAEKTAQLERSLQEEHVAVAQLREEAERRAQQQAEAERAREEAERELERWQLKANEALRLRLQAEEVAQQKSLAQAEAEKQKEEAEREARRRGKAEEQAVRQRELAEQELEKQRQLAEGTAQQRLAAEQELIRLRAETEQGEQQRQLLEEELARLQREAAAATQKRQELEAELAKVRAEMEVLLASKARAEEESRSTSEKSKQRLEAEAGRFRELAEEAARLRALAEEAKRQRQLAEEDAARQRAEAERVLAEKLAAIGEATRLKTEAEIALKEKEAENERLRRLAEDEAFQRRRLEEQAAQHKADIEERLAQLRKASDSELERQKGLVEDTLRQRRQVEEEILALKASFEKAAAGKAELELELGRIRSNAEDTLRSKEQAELEAARQRQLAAEEERRRREAEERVQKSLAAEEEAARQRKAALEEVERLKAKVEEARRLRERAEQESARQLQLAQEAAQKRLQAEEKAHAFAVQQKEQELQQTLQQEQSVLDQLRGEAEAARRAAEEAEEARVQAEREAAQSRRQVEEAERLKQSAEEQAQARAQAQAAAEKLRKEAEQEAARRAQAEQAALRQKQAADAEMEKHKKFAEQTLRQKAQVEQELTTLRLQLEETDHQKNLLDEELQRLKAEATEAARQRSQVEEELFSVRVQMEELSKLKARIEAENRALILRDKDNTQRFLQEEAEKMKQVAEEAARLSVAAQEAARLRQLAEEDLAQQRALAEKMLKEKMQAVQEATRLKAEAELLQQQKELAQEQARRLQEDKEQMAQQLAEETQGFQRTLEAERQRQLEMSAEAERLKLRVAEMSRAQARAEEDAQRFRKQAEEIGEKLHRTELATQEKVTLVQTLEIQRQQSDHDAERLREAIAELEREKEKLQQEAKLLQLKSEEMQTVQQEQLLQETQALQQSFLSEKDSLLQRERFIEQEKAKLEQLFQDEVAKAQQLREEQQRQQQQMEQERQRLVASMEEARRRQHEAEEGVRRKQEELQQLEQQRRQQEELLAEENQRLREQLQLLEEQHRAALAHSEEVTASQVAATKTLPNGRDALDGPAAEAEPEHSFDGLRRKVSAQRLQEAGILSAEELQRLAQGHTTVDELARREDVRHYLQGRSSIAGLLLKATNEKLSVYAALQRQLLSPGTALILLEAQAASGFLLDPVRNRRLTVNEAVKEGVVGPELHHKLLSAERAVTGYKDPYTGQQISLFQAMQKGLIVREHGIRLLEAQIATGGVIDPVHSHRVPVDVAYRRGYFDEEMNRVLADPSDDTKGFFDPNTHENLTYLQLLERCVEDPETGLCLLPLTDKAAKGGELVYTDSEARDVFEKATVSAPFGKFQGKTVTIWEIINSEYFTAEQRRDLLRQFRTGRITVEKIIKIIITVVEEQEQKGRLCFEGLRSLVPAAELLESRVIDRELYQQLQRGERSVRDVAEVDTVRRALRGANVIAGVWLEEAGQKLSIYNALKKDLLPSDMAVALLEAQAGTGHIIDPATSARLTVDEAVRAGLVGPEFHEKLLSAEKAVTGYRDPYTGQSVSLFQALKKGLIPREQGLRLLDAQLSTGGIVDPSKSHRVPLDVACARGCLDEETSRALSAPRADAKAYSDPSTGEPATYGELQQRCRPDQLTGLSLLPLSEKAARARQEELYSELQARETFEKTPVEVPVGGFKGRTVTVWELISSEYFTAEQRQELLRQFRTGKVTVEKVIKILITIVEEVETLRQERLSFSGLRAPVPASELLASGVLSRAQFEQLKDGKTTVKDLSELGSVRTLLQGSGCLAGIYLEDTKEKVSIYEAMRRGLLRATTAALLLEAQAATGFLVDPVRNQRLYVHEAVKAGVVGPELHEQLLSAEKAVTGYRDPYSGSTISLFQAMQKGLVLRQHGIRLLEAQIATGGIIDPVHSHRVPVDVAYQRGYFSEEMNRVLADPSDDTKGFFDPNTHENLTYRQLLERCVEDPETGLRLLPLKGAEKAEVVETTQVYTEEETRRAFEETQIDIPGGGSHGGSTMSLWEVMQSDLIPEEQRAQLMADFQAGRVTKERMIIIIIEIIEKTEIIRQQGLASYDYVRRRLTAEDLFEARIISLETYNLLREGTRSLREALEAESAWCYLYGTGSVAGVYLPGSRQTLSIYQALKKGLLSAEVARLLLEAQAATGFLLDPVKGERLTVDEAVRKGLVGPELHDRLLSAERAVTGYRDPYTEQTISLFQAMKKELIPTEEALRLLDAQLATGGIVDPRLGFHLPLEVAYQRGYLNKDTHDQLSEPSEVRSYVDPSTDERLSYTQLLRRCRRDDGTGQLLLPLSDARKLTFRGLRKQITMEELVRSQVMDEATALQLREGLTSIEEVTKNLQKFLEGTSCIAGVFVDATKERLSVYQAMKKGIIRPGTAFELLEAQAATGYVIDPIKGLKLTVEEAVRMGIVGPEFKDKLLSAERAVTGYKDPYSGKLISLFQAMKKGLILKDHGIRLLEAQIATGGIIDPEESHRLPVEVAYKRGLFDEEMNEILTDPSDDTKGFFDPNTEENLTYLQLMERCITDPQTGLCLLPLKEKKRERKTSSKSSVRKRRVVIVDPETGKEMSVYEAYRKGLIDHQTYLELSEQECEWEEITISSSDGVVKSMIIDRRSGRQYDIDDAIAKNLIDRSALDQYRAGTLSITEFADMLSGNAGGFRSRSSSVGSSSSYPISPAVSRTQLASWSDPTEETGPVAGILDTETLEKVSITEAMHRNLVDNITGQRLLEAQACTGGIIDPSTGERFPVTDAVNKGLVDKIMVDRINLAQKAFCGFEDPRTKTKMSAAQALKKGWLYYEAGQRFLEVQYLTGGLIEPDTPGRVPLDEALQRGTVDARTAQKLRDVGAYSKYLTCPKTKLKISYKDALDRSMVEEGTGLRLLEAAAQSTKGYYSPYSVSGSGSTAGSRTGSRTGSRAGSRRGSFDATGSGFSMTFSSSSYSSSGYGRRYASGSSASLGGPESAVA

SEQ ID NO: 24882 - protein, 4729 aa, Homo sapiens
LPARLPCRCPLSHPVARELLAAPRAFSWYPACCLCPRTDCPAPAAMVAGMLMPRDQLRAIYEVLFREGVMVAKKDRRPRSLHPHVPGVTNLQVMRAMASLRARGLVRETFAWCHFYWYLTNEGIAHLRQYLHLPPEIVPASLQRVRRPVAMVMPARRTPHVQAVQGPLGSPPKRGPLPTEEQRVYRRKELEEVSPETPVVPATTQRTLARPGPEPAPATDERDRVQKKTFTKWVNKHLIKAQRHISDLYEDLRDGHNLISLLEVLSGDSLPREKGRMRFHKLQNVQIALDYLRHRQVKLVNIRNDDIADGNPKLTLGLIWTIILHFQISDIQVSGQSEDMTAKEKLLLWSQRMVEGYQGLRCDNFTSSWRDGRLFNAIIHRHKPLLIDMNKVYRQTNLENLDQAFSVAERDLGVTRLLDPEDVDVPQPDEKSIITYVSSLYDAMPRVPDVQDGVRANELQLRWQEYRELVLLLLQWMRHHTAAFEERRFPSSFEEIEILWSQFLKFKEMELPAKEADKNRSKGIYQSLEGAVQAGQLKVPPGYHPLDVEKEWGKLHVAILEREKQLRSEFERLECLQRIVTKLQMEAGLCEEQLNQADALLQSDVRLLAAGKVPQRAGEVERDLDKADSMIRLLFNDVQTLKDGRHPQGEQMYRRVYRLHERLVAIRTEYNLRLKAGVAAPATQVAQVTLQSVQRRPELEDSTLRYLQDLLAWVEENQHRVDGAEWGVDLPSVEAQLGSHRGLHQSIEEFRAKIERARSDEGQLSPATRGAYRDCLGRLDLQYAKLLNSSKARLRSLESLHSFVAAATKELMWLNEKEEEEVGFDWSDRNTNMTAKKESYSALMRELELKEKKIKELQNAGDRLLREDHPARPTVESFQAALQTQWSWMLQLCCCIEAHLKENAAYFQFFSDVREAEGQLQKLQEALRRKYSCDRSATVTRLEDLLQDAQDEKEQLNEYKGHLSGLAKRAKAVVQLKPRHPAHPMRGRLPLLAVCDYKQVEVTVHKGDECQLVGPAQPSHWKVLSSSGSEAAVPSVCFLVPPPNQEAQEAVTRLEAQHQALVTLWHQLHVDMKSLLAWQSLRRDVQLIRSWSLATFRTLKPEEQRQALHSLELHYQAFLRDSQDAGGFGPEDRLMAEREYGSCSHHYQQLLQSLEQGAQEESRCQRCISELKDIRLQLEACETRTVHRLRLPLDKEPARECAQRIAEQQKAQAEVEGLGKGVARLSAEAEKVLALPEPSPAAPTLRSELELTLGKLEQVRSLSAIYLEKLKTISLVIRGTQGAEEVLRAHEEQLKEAQAVPATLPELEATKASLKKLRAQAEAQQPTFDALRDELRGAQEVGERLQQRHGERDVEVERWRERVAQLLERWQAVLAQTDVRQRELEQLGRQLRYYRESADPLGAWLQDARRRQEQIQAMPLADSQAVREQLRQEQALLEEIERHGEKVEECQRFAKQYINAIKDYELQLVTYKAQLEPVASPAKKPKVQSGSESVIQEYVDLRTHYSELTTLTSQYIKFISETLRRMEEEERLAEQQRAEERERLAEVEAALEKQRQLAEAHAQAKAQAEREAKELQQRMQEEVVRREEAAVDAQQQKRSIQEELQQLRQSSEAEIQAKARQAEAAERSRLRIEEEIRVVRLQLEATERQRGGAEGELQALRARAEEAEAQKRQAQEEAERLRRQVQDESQRKRQAEVELASRVKAEAEAAREKQRALQALEELRLQAEEAERRLRQAEVERARQVQVALETAQRSAEAELQSKRASFAEKTAQLERSLQEEHVAVAQLREEAERRAQQQAEAERAREEAERELERWQLKANEALRLRLQAEEVAQQKSLAQAEAEKQKEEAEREARRRGKAEEQAVRQRELAEQELEKQRQLAEGTAQQRLAAEQELIRLRAETEQGEQQRQLLEEELARLQREAAAATQKRQELEAELAKVRAEMEVLLASKARAEEESRSTSEKSKQRLEAEAGRFRELAEEAARLRALAEEAKRQRQLAEEDAARQRAEAERVLAEKLAAIGEATRLKTEAEIALKEKEAENERLRRLAEDEAFQRRRLEEQAAQHKADIEERLAQLRKASDSELERQKGLVEDTLRQRRQVEEEILALKASFEKAAAGKAELELELGRIRSNAEDTLRSKEQAELEAARQRQLAAEEERRRREAEERVQKSLAAEEEAARQRKAALEEVERLKAKVEEARRLRERAEQESARQLQLAQEAAQKRLQAEEKAHAFAVQQKEQELQQTLQQEQSVLDQLRGEAEAARRAAEEAEEARVQAEREAAQSRRQVEEAERLKQSAEEQAQARAQAQAAAEKLRKEAEQEAARRAQAEQAALRQKQAADAEMEKHKKFAEQTLRQKAQVEQELTTLRLQLEETDHQKNLLDEELQRLKAEATEAARQRSQVEEELFSVRVQMEELSKLKARIEAENRALILRDKDNTQRFLQEEAEKMKQVAEEAARLSVAAQEAARLRQLAEEDLAQQRALAEKMLKEKMQAVQEATRLKAEAELLQQQKELAQEQARRLQEDKEQMAQQLAEETQGFQRTLEAERQRQLEMSAEAERLKLRVAEMSRAQARAEEDAQRFRKQAEEIGEKLHRTELATQEKVTLVQTLEIQRQQSDHDAERLREAIAELEREKEKLQQEAKLLQLKSEEMQTVQQEQLLQETQALQQSFLSEKDSLLQRERFIEQEKAKLEQLFQDEVAKAQQLREEQQRQQQQMEQERQRLVASMEEARRRQHEAEEGVRRKQEELQQLEQQRRQQEELLAEENQRLREQLQLLEEQHRAALAHSEEVTASQVAATKTLPNGRDALDGPAAEAEPEHSFDGLRRKVSAQRLQEAGILSAEELQRLAQGHTTVDELARREDVRHYLQGRSSIAGLLLKATNEKLSVYAALQRQLLSPGTALILLEAQAASGFLLDPVRNRRLTVNEAVKEGVVGPELHHKLLSAERAVTGYKDPYTGQQISLFQAMQKGLIVREHGIRLLEAQIATGGVIDPVHSHRVPVDVAYRRGYFDEEMNRVLADPSDDTKGFFDPNTHENLTYLQLLERCVEDPETGLCLLPLTDKAAKGGELVYTDSEARDVFEKATVSAPFGKFQGKTVTIWEIINSEYFTAEQRRDLLRQFRTGRITVEKIIKIIITVVEEQEQKGRLCFEGLRSLVPAAELLESRVIDRELYQQLQRGERSVRDVAEVDTVRRALRGANVIAGVWLEEAGQKLSIYNALKKDLLPSDMAVALLEAQAGTGHIIDPATSARLTVDEAVRAGLVGPEFHEKLLSAEKAVTGYRDPYTGQSVSLFQALKKGLIPREQGLRLLDAQLSTGGIVDPSKSHRVPLDVACARGCLDEETSRALSAPRADAKAYSDPSTGEPATYGELQQRCRPDQLTGLSLLPLSEKAARARQEELYSELQARETFEKTPVEVPVGGFKGRTVTVWELISSEYFTAEQRQELLRQFRTGKVTVEKVIKILITIVEEVETLRQERLSFSGLRAPVPASELLASGVLSRAQFEQLKDGKTTVKDLSELGSVRTLLQGSGCLAGIYLEDTKEKVSIYEAMRRGLLRATTAALLLEAQAATGFLVDPVRNQRLYVHEAVKAGVVGPELHEQLLSAEKAVTGYRDPYSGSTISLFQAMQKGLVLRQHGIRLLEAQIATGGIIDPVHSHRVPVDVAYQRGYFSEEMNRVLADPSDDTKGFFDPNTHENLTYRQLLERCVEDPETGLRLLPLKGAEKAEVVETTQVYTEEETRRAFEETQIDIPGGGSHGGSTMSLWEVMQSDLIPEEQRAQLMADFQAGRVTKERMIIIIIEIIEKTEIIRQQGLASYDYVRRRLTAEDLFEARIISLETYNLLREGTRSLREALEAESAWCYLYGTGSVAGVYLPGSRQTLSIYQALKKGLLSAEVARLLLEAQAATGFLLDPVKGERLTVDEAVRKGLVGPELHDRLLSAERAVTGYRDPYTEQTISLFQAMKKELIPTEEALRLLDAQLATGGIVDPRLGFHLPLEVAYQRGYLNKDTHDQLSEPSEVRSYVDPSTDERLSYTQLLRRCRRDDGTGQLLLPLSDARKLTFRGLRKQITMEELVRSQVMDEATALQLREGLTSIEEVTKNLQKFLEGTSCIAGVFVDATKERLSVYQAMKKGIIRPGTAFELLEAQAATGYVIDPIKGLKLTVEEAVRMGIVGPEFKDKLLSAERAVTGYKDPYSGKLISLFQAMKKGLILKDHGIRLLEAQIATGGIIDPEESHRLPVEVAYKRGLFDEEMNEILTDPSDDTKGFFDPNTEENLTYLQLMERCITDPQTGLCLLPLKEKKRERKTSSKSSVRKRRVVIVDPETGKEMSVYEAYRKGLIDHQTYLELSEQECEWEEITISSSDGVVKSMIIDRRSGRQYDIDDAIAKNLIDRSALDQYRAGTLSITEFADMLSGNAGGFRSRSSSVGSSSSYPISPAVSRTQLASWSDPTEETGPVAGILDTETLEKVSITEAMHRNLVDNITGQRLLEAQACTGGIIDPSTGERFPVTDAVNKGLVDKIMVDRINLAQKAFCGFEDPRTKTKMSAAQALKKGWLYYEAGQRFLEVQYLTGGLIEPDTPGRVPLDEALQRGTVDARTAQKLRDVGAYSKYLTCPKTKLKISYKDALDRSMVEEGTGLRLLEAAAQSTKGYYSPYSVSGSGSTAGSRTGSRTGSRAGSRRGSFDATGSGFSMTFSSSSYSSSGYGRRYASGSSASLGGPESAVA

SEQ ID NO: 24883 - protein, 4567 aa, Homo sapiens
LAGKPCPGPPGSSPGCGAGLGSAVRGWTLPGGGTAALSPGADMDPSRAIQNEISSLKDERDRVQKKTFTKWVNKHLIKAQRHISDLYEDLRDGHNLISLLEVLSGDSLPREKGRMRFHKLQNVQIALDYLRHRQVKLVNIRNDDIADGNPKLTLGLIWTIILHFQISDIQVSGQSEDMTAKEKLLLWSQRMVEGYQGLRCDNFTSSWRDGRLFNAIIHRHKPLLIDMNKVYRQTNLENLDQAFSVAERDLGVTRLLDPEDVDVPQPDEKSIITYVSSLYDAMPRVPDVQDGVRANELQLRWQEYRELVLLLLQWMRHHTAAFEERRFPSSFEEIEILWSQFLKFKEMELPAKEADKNRSKGIYQSLEGAVQAGQLKVPPGYHPLDVEKEWGKLHVAILEREKQLRSEFERLECLQRIVTKLQMEAGLCEEQLNQADALLQSDVRLLAAGKVPQRAGEVERDLDKADSMIRLLFNDVQTLKDGRHPQGEQMYRRVYRLHERLVAIRTEYNLRLKAGVAAPATQVAQVTLQSVQRRPELEDSTLRYLQDLLAWVEENQHRVDGAEWGVDLPSVEAQLGSHRGLHQSIEEFRAKIERARSDEGQLSPATRGAYRDCLGRLDLQYAKLLNSSKARLRSLESLHSFVAAATKELMWLNEKEEEEVGFDWSDRNTNMTAKKESYSALMRELELKEKKIKELQNAGDRLLREDHPARPTVESFQAALQTQWSWMLQLCCCIEAHLKENAAYFQFFSDVREAEGQLQKLQEALRRKYSCDRSATVTRLEDLLQDAQDEKEQLNEYKGHLSGLAKRAKAVVQLKPRHPAHPMRGRLPLLAVCDYKQVEVTVHKGDECQLVGPAQPSHWKVLSSSGSEAAVPSVCFLVPPPNQEAQEAVTRLEAQHQALVTLWHQLHVDMKSLLAWQSLRRDVQLIRSWSLATFRTLKPEEQRQALHSLELHYQAFLRDSQDAGGFGPEDRLMAEREYGSCSHHYQQLLQSLEQGAQEESRCQRCISELKDIRLQLEACETRTVHRLRLPLDKEPARECAQRIAEQQKAQAEVEGLGKGVARLSAEAEKVLALPEPSPAAPTLRSELELTLGKLEQVRSLSAIYLEKLKTISLVIRGTQGAEEVLRAHEEQLKEAQAVPATLPELEATKASLKKLRAQAEAQQPTFDALRDELRGAQEVGERLQQRHGERDVEVERWRERVAQLLERWQAVLAQTDVRQRELEQLGRQLRYYRESADPLGAWLQDARRRQEQIQAMPLADSQAVREQLRQEQALLEEIERHGEKVEECQRFAKQYINAIKDYELQLVTYKAQLEPVASPAKKPKVQSGSESVIQEYVDLRTHYSELTTLTSQYIKFISETLRRMEEEERLAEQQRAEERERLAEVEAALEKQRQLAEAHAQAKAQAEREAKELQQRMQEEVVRREEAAVDAQQQKRSIQEELQQLRQSSEAEIQAKARQAEAAERSRLRIEEEIRVVRLQLEATERQRGGAEGELQALRARAEEAEAQKRQAQEEAERLRRQVQDESQRKRQAEVELASRVKAEAEAAREKQRALQALEELRLQAEEAERRLRQAEVERARQVQVALETAQRSAEAELQSKRASFAEKTAQLERSLQEEHVAVAQLREEAERRAQQQAEAERAREEAERELERWQLKANEALRLRLQAEEVAQQKSLAQAEAEKQKEEAEREARRRGKAEEQAVRQRELAEQELEKQRQLAEGTAQQRLAAEQELIRLRAETEQGEQQRQLLEEELARLQREAAAATQKRQELEAELAKVRAEMEVLLASKARAEEESRSTSEKSKQRLEAEAGRFRELAEEAARLRALAEEAKRQRQLAEEDAARQRAEAERVLAEKLAAIGEATRLKTEAEIALKEKEAENERLRRLAEDEAFQRRRLEEQAAQHKADIEERLAQLRKASDSELERQKGLVEDTLRQRRQVEEEILALKASFEKAAAGKAELELELGRIRSNAEDTLRSKEQAELEAARQRQLAAEEERRRREAEERVQKSLAAEEEAARQRKAALEEVERLKAKVEEARRLRERAEQESARQLQLAQEAAQKRLQAEEKAHAFAVQQKEQELQQTLQQEQSVLDQLRGEAEAARRAAEEAEEARVQAEREAAQSRRQVEEAERLKQSAEEQAQARAQAQAAAEKLRKEAEQEAARRAQAEQAALRQKQAADAEMEKHKKFAEQTLRQKAQVEQELTTLRLQLEETDHQKNLLDEELQRLKAEATEAARQRSQVEEELFSVRVQMEELSKLKARIEAENRALILRDKDNTQRFLQEEAEKMKQVAEEAARLSVAAQEAARLRQLAEEDLAQQRALAEKMLKEKMQAVQEATRLKAEAELLQQQKELAQEQARRLQEDKEQMAQQLAEETQGFQRTLEAERQRQLEMSAEAERLKLRVAEMSRAQARAEEDAQRFRKQAEEIGEKLHRTELATQEKVTLVQTLEIQRQQSDHDAERLREAIAELEREKEKLQQEAKLLQLKSEEMQTVQQEQLLQETQALQQSFLSEKDSLLQRERFIEQEKAKLEQLFQDEVAKAQQLREEQQRQQQQMEQERQRLVASMEEARRRQHEAEEGVRRKQEELQQLEQQRRQQEELLAEENQRLREQLQLLEEQHRAALAHSEEVTASQVAATKTLPNGRDALDGPAAEAEPEHSFDGLRRKVSAQRLQEAGILSAEELQRLAQGHTTVDELARREDVRHYLQGRSSIAGLLLKATNEKLSVYAALQRQLLSPGTALILLEAQAASGFLLDPVRNRRLTVNEAVKEGVVGPELHHKLLSAERAVTGYKDPYTGQQISLFQAMQKGLIVREHGIRLLEAQIATGGVIDPVHSHRVPVDVAYRRGYFDEEMNRVLADPSDDTKGFFDPNTHENLTYLQLLERCVEDPETGLCLLPLTDKAAKGGELVYTDSEARDVFEKATVSAPFGKFQGKTVTIWEIINSEYFTAEQRRDLLRQFRTGRITVEKIIKIIITVVEEQEQKGRLCFEGLRSLVPAAELLESRVIDRELYQQLQRGERSVRDVAEVDTVRRALRGANVIAGVWLEEAGQKLSIYNALKKDLLPSDMAVALLEAQAGTGHIIDPATSARLTVDEAVRAGLVGPEFHEKLLSAEKAVTGYRDPYTGQSVSLFQALKKGLIPREQGLRLLDAQLSTGGIVDPSKSHRVPLDVACARGCLDEETSRALSAPRADAKAYSDPSTGEPATYGELQQRCRPDQLTGLSLLPLSEKAARARQEELYSELQARETFEKTPVEVPVGGFKGRTVTVWELISSEYFTAEQRQELLRQFRTGKVTVEKVIKILITIVEEVETLRQERLSFSGLRAPVPASELLASGVLSRAQFEQLKDGKTTVKDLSELGSVRTLLQGSGCLAGIYLEDTKEKVSIYEAMRRGLLRATTAALLLEAQAATGFLVDPVRNQRLYVHEAVKAGVVGPELHEQLLSAEKAVTGYRDPYSGSTISLFQAMQKGLVLRQHGIRLLEAQIATGGIIDPVHSHRVPVDVAYQRGYFSEEMNRVLADPSDDTKGFFDPNTHENLTYRQLLERCVEDPETGLRLLPLKGAEKAEVVETTQVYTEEETRRAFEETQIDIPGGGSHGGSTMSLWEVMQSDLIPEEQRAQLMADFQAGRVTKERMIIIIIEIIEKTEIIRQQGLASYDYVRRRLTAEDLFEARIISLETYNLLREGTRSLREALEAESAWCYLYGTGSVAGVYLPGSRQTLSIYQALKKGLLSAEVARLLLEAQAATGFLLDPVKGERLTVDEAVRKGLVGPELHDRLLSAERAVTGYRDPYTEQTISLFQAMKKELIPTEEALRLLDAQLATGGIVDPRLGFHLPLEVAYQRGYLNKDTHDQLSEPSEVRSYVDPSTDERLSYTQLLRRCRRDDGTGQLLLPLSDARKLTFRGLRKQITMEELVRSQVMDEATALQLREGLTSIEEVTKNLQKFLEGTSCIAGVFVDATKERLSVYQAMKKGIIRPGTAFELLEAQAATGYVIDPIKGLKLTVEEAVRMGIVGPEFKDKLLSAERAVTGYKDPYSGKLISLFQAMKKGLILKDHGIRLLEAQIATGGIIDPEESHRLPVEVAYKRGLFDEEMNEILTDPSDDTKGFFDPNTEENLTYLQLMERCITDPQTGLCLLPLKEKKRERKTSSKSSVRKRRVVIVDPETGKEMSVYEAYRKGLIDHQTYLELSEQECEWEEITISSSDGVVKSMIIDRRSGRQYDIDDAIAKNLIDRSALDQYRAGTLSITEFADMLSGNAGGFRSRSSSVGSSSSYPISPAVSRTQLASWSDPTEETGPVAGILDTETLEKVSITEAMHRNLVDNITGQRLLEAQACTGGIIDPSTGERFPVTDAVNKGLVDKIMVDRINLAQKAFCGFEDPRTKTKMSAAQALKKGWLYYEAGQRFLEVQYLTGGLIEPDTPGRVPLDEALQRGTVDARTAQKLRDVGAYSKYLTCPKTKLKISYKDALDRSMVEEGTGLRLLEAAAQSTKGYYSPYSVSGSGSTAGSRTGSRTGSRAGSRRGSFDATGSGFSMTFSSSSYSSSGYGRRYASGSSASLGGPESAVA

SEQ ID NO: 24884 - protein, 110 aa, Homo sapiens
MPAVGFLLLVLGLKALELWMQLHEAGMGLEEPGGAPGPSVPLPPSQGVGLASLVAPLLISQAMGLALYVLPVLGQHVATQHFPVAEAEAVVLTLLAIYAAGLALPHNTHR

SEQ ID NO: 24885 - protein, 210 aa, Homo sapiens
VSLDMGEAGAGAGASGGPEASPEAEVVKLLPFLAPGARADLQAAAVRHVLALTGCGPGRALLAGQAALLQALMELAPASAPARDAARALVNLAADPGLHETLLAADPGLPARLMGRALDPQWPWAEEAAAALANLSREPAPCAALMAALAAAEPADSGLERLVRALCTPGYNARAPLHYLAPLLSNLSQRPAARAFLLDPDRTSRVVAWT

SEQ ID NO: 24886 - protein, 394 aa, Homo sapiens
VSLDMGEAGAGAGASGGPEASPEAEVVKLLPFLAPGARADLQAAAVRHVLALTGCGPGRALLAGQAALLQALMELAPASAPARDAARALVNLAADPGLHETLLAADPGLPARLMGRALDPQWPWAEEAAAALANLSREPAPCAALMAALAAAEPADSGLERLVRALCTPGYNARAPLHYLAPLLSNLSQRPAARAFLLDPDRCVVQRLLPLTQYPDSSVRRGGVVGTLRNCCFEHRHHEWLLGPEVDILPFLLLPLAGPEDFSEEEMERLPVDLQYLPPDKQREPDADIRKMLVEAIMLLTATAPGRQQVRDQGAYLILRELHSWEPEPDVRTACEKLIQVLIGDEPERGMENLLEVQVPEDVEQQLQQLDCREQEQLERELAPEPWVERATPT

SEQ ID NO: 24887 - protein, 42 aa, Homo sapiens
LFPETWPQRADPAIRRSWGLSRTVPPCLTYAPGPCPQPLSAP

SEQ ID NO: 24888 - protein, 153 aa, Homo sapiens [sequence omitted]

SEQ ID NO: 24889 - protein, 192 aa, Homo sapiens
MRCPLQPVQAYTGVQPGGYSQGEPFSHRRALGCGAWGTGSGTALSRARNELSDHLDAMDSNLDNLQTMLSSHGFSVDTSALLDLFSPSVTVPDMSLPDLDSSLASVRRRAGGEGERDQRECSQYRKQLVHYTAQPLFLLDPGSVDTGSNDLPVLFELGEGSYFSEGDGFAEDPTISLLTGSEPPKAKDPTVS

SEQ ID NO: 24890 - protein, 560 aa, Homo sapiens
LSVYKPRPFRSLGLPRAPSVVMAAPASRQVRRRARAAPRPRSAEDWWWDRLAPRGSGYHLLQSDSMLLVLSEPGPARPRAQRRASRRTPRQPPRGPSAAAKPKAGLRSEAAAAPAPAPAPTPTPEEGPDAGWGDRIPLEILVQIFGLLVAADGPMPFLGRAARVCRRWQEAASQPALWHTVTLSSPLVGRPAKGGVKAEKKLLASLEWLMPNRFSQLQRLTLIHWKSQVHPVLKLVGECCPRLTFLKLSGCHGVTADALVMLAKACCQLHSLDLQHSMVESTAVVSFLEEAGSRMRKLWLTYSSQTTAILGALLGSCCPQLQVLEVSTGINRNSIPLQLPVEALQKGCPQLQVLRLLNLMWLPKPPGRGVAPGPGFPSLEELCLASSTCNFVSNEVLGRLLHGSPNLRLLDLRGCARITPAGLQDLPCRELEQLHLGLYGTSDRLTLAKEGSPFLTQKWCHTLRELDLSGQGFSEKDLEQALAAFLSTPGGSHPALCSLNLRGTRVTPSTVSSVISGCPGLLYLNLESCRCLPRGLKRAYRGLEEVQWCLEQLLTSPSPS

SEQ ID NO: 24891 - protein, 88 aa, Homo sapiens
LESQEPGFEPGCLLRCERGASPTEGPAPSARCPPRAARVCRRWQEAASQPALWHTVTLSSPLVGRPAKGGVKAEKKLLASLEWLMPNR

SEQ ID NO: 24892 - protein, 350 aa, Homo sapiens
LAKTYPAGPPAGREAGSRPESLRPQGRRPKERVEPSSPGRGGAGVNATTTPSRTPGKGAYQEEPRTPQGFTVPATARAKSDPRGVAGTALLGGAPPSRYRQVGDSGAVRSLRLPVPRPVRSRSSAGFPPRRDTAVRPRDATSVRSAQDPAAATTRLTRGGSGPAPGMAHDRKSRPGSWSAGGRALRGTGGLSVYKPRPFRSLGLPRAPSVVMAAPASRQVRRRARAAPRPRSAEDWWWDRLAPRGSGYHLLQSDSMLLVLSEPGPARPRAQRRASRRTPRQPPRGPSAAAKPKAGLRSEAAAAPAPAPAPTPTPEEGPDAGWGDRIPLEILVQIFGLLVAADGPMPFLGR

SEQ ID NO: 24893 - protein, 649 aa, Homo sapiens
LSMASLVSLELGLLLAVLVVTATASPPAGLLSLLTSGQGALDQEALGGLLNTLADRVHCANGPCGKCLSVEDALGLGEPEGSGLPPGPVLEARYVARLSAAAVLYLSNPEGTCEDARAGLWASHADHLLALLESPKALTPGLSWLLQRMQARAAGQTPKMACVDIPQLLEEAVGAGAPGSAGGVLAALLDHVRSGSCFHALPSPQYFVDFVFQQHSSEVPMTLAELSALMQRLGVGREAHSDHSHRHRGASSRDPVPLISSSNSSSVWDTVCLSARDVMAAYGLSEQAGVTPEAWAQLSPALLQQQLSGACTSQSRPPVQDQLSQSERYLYGSLATLLICLCAVFGLLLLTCTGCRGVTHYILQTFLSLAVGAVTGDAVLHLTPKVLGLHTHSEEGLSPQPTWRLLAMLAGLYAFFLFENLFNLLLPRDPEDLEDGPCGHSSHSHGGHSHGVSLQLAPSELRQPKPPHEGSRADLVAEESPELLNPEPRRLSPELRLLPYMITLGDAVHNFADGLAVGAAFASSWKTGLATSLAVFCHELPHELGDFAALLHAGLSVRQALLLNLASALTAFAGLYVALAVGVSEESEAWILAVATGLFLYVALCDMLPAMLKVRDPRPWLLFLLHNVGLLGGWTVLLLLSLYEDDITF

SEQ ID NO: 24894 - protein, 44 aa, Homo sapiens
LCCTPRLQTLSGMSASDELDDSQVRQMLFDLESAYNAFNRFLHA

SEQ ID NO: 24895 - protein, 13 aa, Homo sapiens
MGTWNLGLLECRA

SEQ ID NO: 24896 - protein, 136 aa, Homo sapiens
LCPTLAAPAVWVPLLVLWSLGGRGTVVALETPSCLPPEQRVKRSRQCLACIFPCGQEPSREAWRQREEAEGAMVHRELWEGGSPPAAPQAPSGRTLVTWARAGPELGSLMGRGVRAGMCSGGGEPQVRSQRTQESS

SEQ ID NO: 24897 - protein, 309 aa, Homo sapiens
LTRGRTLSSPRHLFAVRQFLGSGVSPDLANEDGLTALHQCCIDDFREMVQQLLEAGANINACDSECWTPLHAAATCGHLHLVELLIASGANLLAVNTDGNMPYDLCDDEQTLDCLETAMADRGRCGGAAVGGLPVALPLSLPPRRHHPGQHRGRPGRARTAHAGRHPEPAAGRGRPPCPPGPRGHAGEGWGVRGTRGWGPRYLEVGDGAEFRPGACLQLHVAAANGFSEAAALLLEHRASLSAKDQDGWEPLHAAAYWGQVSAGGSRWEGASSAAVCSSGLPSTGAPGGAARGARGRPERKVPDGRDAP

SEQ ID NO: 24898 - protein, 161 aa, Homo sapiens
LTNSAPSPGGPRAFFRLRRRRQIMATRSSAVSASSAMAAAMAVCVATPRARKAMLPASGRGSLPAGRAAGGGGCAGCCGCCRDALTRSRKGTRAAPPALEASHSYLPACASVMLLRKSMPLPVSDAECPPRPSNPPSSWAWARGRPSRGWGTFLQVTNGCG

SEQ ID NO: 24899 - protein, 209 aa, Homo sapiens
LMGSPTLPTGPAHQGVGVLRSGAPLSEARRTSYRRRLPSVWSWARRPWEPSALSTRTLHPPDPQFLVTFFSRLRPNRSGRYEAAFPFLSPCGRERNFLRCEDRPVVFTHLLTADHGPPRLSYCGGGEALAVPFEPARLLPLAANGRLYHPAPERAGGVGLVRSALAFELSACFEYGPGAPALPSHVRWQGRRLALTMDLAPLLLAARSP

SEQ ID NO: 24900 - protein, 293 aa, Homo sapiens
VVGAAASGAGSRKAGLAGVPGPPGRANRESPPGPVAMGRVIRGQRKGAGSVFRAHVKHRKGAARLRAVDFAERHGYIKGIVKDIIHDPGRGAPLAKVVFRDPYRFKKRTELFIAAEGIHTGQFVYCGKKAQLNIGNVLPVGTMPEGTIVCCLEEKPGDRGKLARASGNYATVISHNPETKKTRVKLPSGSKKVISSANRAVVGVVAGGGRIDKPILKAGRAYHKYKAKRNCWPRVRGVAMNPVEHPFGGGNHQHIGKPSTIRRDAPAGRKVGLIAARRTGRLRGTKTVQEKEN

SEQ ID NO: 24901 - protein, 80 aa, Homo sapiens
MGRVIRGQRKGAGSVFRAHVKHRKGAARLRAVDFAERHGYIKGIVKVVFRDPYRFKKRTELFIAAEGIHTGQFVYCGKKG

SEQ ID NO: 24902 - protein, 116 aa, Homo sapiens
LLQPGTGEGKGTRQPVVWPQEPLSATISWGLPEMSRSGQKGEREGQLCSVPKEQGTGGATDAYAAELPTGRPGSSCRTIGHSQALAPGSVWRSIPGAVKPTNRVQGALAGCHVSCL

SEQ ID NO: 24903 - protein, 106 aa, Homo sapiens
MPATGFHHLRLLAGASLSLCPVLETGMCSTHLHTHSTDSGNNTSFGDPGFLVSPDFSGATMFLSSRRQHPRWKQVMACPAQLQSECRSHGERGIQPKAQATHSPPG

SEQ ID NO: 24904 - protein, 706 aa, Homo sapiens
VDAHPPLSLMGFLGCWCVSFQEVVTFGDVAVHFSREEWQCLDPGQRALYREVMLENHSSVAGLAGFLVFKPELISRLEQGEEPWVLDLQGAEGTEAPRTSKTDSTIRTENEQACEDMDILKSESYGTVVRISPQDFPQNPGFGDVSDSEVWLDSHLGSPGLKVTGFTFQNNCLNEETVVPKTFTKDAPQGCKELGSSGLDCQPLESQGESAEGMSQRCEECGKGIRATSDIALHWEINTQKISRCQECQKKLSDCLQGKHTNNCHGEKPYECAECGKVFRLCSQLNQHQRIHTGEKPFKCTECGKAFRLSSKLIQHQRIHTGEKPYRCEECGKAFGQSSSLIHHQRIHTGERPYGCRECGKAFSQQSQLVRHQRTHTGERPYPCKECGKAFSQSSTLAQHQRMHTGEKAQILKASDSPSLVAHQRIHAVEKPFKCDECGKAFRWISRLSQHQLIHTGEKPYKCNKCTKAFGCSSRLIRHQRTHTGEKPFKCDECGKGFVQGSHLIQHQRIHTGEKPYVCNDCGKAFSQSSSLIYHQRIHKGEKPYECLQCGKAFSMSTQLTIHQRVHTGERPYKCNECGKAFSQNSTLFQHQIIHAGVKPYECSECGKAFSRSSYLIEHQRIHTRAQWFYEYGNALEGSTFVSRKKVNTIKKLHQCEDCEKIFRWRSHLIIHQRIHTGEKPYKCNDCGKAFNRSSRLTQHQKIHMG

SEQ ID NO: 24905 - protein, 154 aa, Homo sapiens
VWRRRAGGWALHCWRLSVTLVLPPFLQALGHLAGEAAAAPGPGTPCASRGARLPGPVSSARNPSTVCLCPEQPTCSNADSRAHPLGDEGGTASKKQKNKKKTRNRASVANGGEKASEKLAPEEVPLSAEAQKSRLLEQSEPCAAKERPCPGRGS

SEQ ID NO: 24906 - protein, 267 aa, Homo sapiens
VWRRRAGGWALHCWRLSVTLVLPPFLQALGHLAGEAAAAPGPGTPCASRGARLPGPVSSARNPSTVCLCPEQPTCSNADSRAHPLGDEGGTASKKQKNKKKTRNRASVANGGEKASEKLAPEEVPLSAEAQARAGFGREGWNPRAQQLAQELAWCVEQLELGLKRQKPTPKQKEQAIGAIRTLRSKRTPLPRKRQLMHSLFGDYRAQMEAEWREALRALRAAAYSAQVQPVDGATRKKSQRVCRPRSIWRAKATLDMPDEEFRFNFF

SEQ ID NO: 24907 - protein, 254 aa, Homo sapiens
VWRRRAGGWALHCWRLSVTLVLPPFLQALGHLAGEAAAAPGPGTPCASRGARLPGPVSSARNPSTVCLCPEQPTCSNADSRAHPLGDEGGTASKKQKNKKKTRNRASVANGGEKASEKLAPEEVPLSAEAQAQQLAQELAWCVEQLELGLKRQKPTPKQKEQAIGAIRTLRSKRTPLPRKRQLMHSLFGDYRAQMEAEWREALRALRAAAYSAQVQPVDGATRKKSQRVCRPRSIWRAKATLDMPDEEFRFNFF

SEQ ID NO: 24908 - protein, 113 aa, Homo sapiens
LLIHSSALLFVILECISGAVASMFWVDAELGSDIYLDGIITIVDSKYGLKHLTEEKPDGLINEATRQVALADAILINKTDLVPEEDVKKLRTTIRSINGLGQILETQRSRLSS

SEQ ID NO: 24909 - protein, 297 aa, Homo sapiens
VDFEGLLMTHLNSLDVQLAQELGDFTDDDLDVVFTPKECRTLQPSLPEEGVELDPHVRDCVQTYIREWLIVNRKNQGSPEICGFKKTGSRKDFHKTLPKQTFESETLECSEPAAQAGPRHLNVLCDVSGKGPVTACDFDLRSLQPDKRLENLLQQVSAEDFEKQNEEARRTNRQAELFALYPSVDEVGATVSILENLSEDSESHVDNCVVHYYYIAAHGVRAHLYDFWGLVFHSGKPVCHSRAIIDYHTDGILIIITTGIFIALYKICSLRASHLIPKCFKGLHVVITPSKSNHPII

SEQ ID NO: 24910 - protein, 17 aa, Homo sapiens
MPRTQDHIWSARYMDFH

SEQ ID NO: 24911 - protein, 276 aa, Homo sapiens
MLSACNLLKNTINDPKALTSKDMRFCLNTLQHEWFRVSSQKSAIPAMVGDYIAAFEAISPDVLRYVINLADGNGNTALHYSVSHSNFEIVKLLLDADVCNVDHQNKAGYTPIMLAALAAVEAEKDMRIVEELFGCGDVNAKASQAGQTALMLAVSHGRIDMVKGLLACGADVNIQDDEGSTALMCASEHGHVEIVKLLLAQPGCNGHLEDNDGSTALSIALEAGHKDIAVLLYAHVNFAKAQSPVSVVHLAFVNRLKSTRLVDPLPPGIDGRQILC

SEQ ID NO: 24912 - protein, 308 aa, Homo sapiens
LYVELGLALLRNTSPVGNWGFASVIYFIIVLLMKRLAARCFAGLLILSPLTVISDSRPADSGKAIEDGNLEEMEEEVRLKKRKRRRNVDKDPAKEDVEKAKKRRGRPPAEKLSPNPPKLTKQMNAIIDTVINYKDSSGRQLSEVFIQLPSRKELPEYYELIRKPVDFKKIKERIRNHKYRSLGDLEKDVMLLCHNAQTFNLEGSQIYEDSIVLQSVFKSARQKIAKEEESEDESNEEEEEEDEEESESEAKSVKVKIKLNKKDDKGRDKGKGKKRPNRGKAKPVVSDFDSDEEQDEREQSEGSGTDDE

SEQ ID NO: 24913 - protein, 279 aa, Homo sapiens
LGLMKRLAARCFAGLLILSPLTVISDSRPADSGKAIEDGNLEEMEEEVRLKKRKRRRNVDKDPAKEDVEKAKKRRGRPPAEKLSPNPPKLTKQMNAIIDTVINYKDSSGRQLSEVFIQLPSRKELPEYYELIRKPVDFKKIKERIRNHKYRSLGDLEKDVMLLCHNAQTFNLEGSQIYEDSIVLQSVFKSARQKIAKEEESEDESNEEEEEEDEEESESEAKSVKVKIKLNKKDDKGRDKGKGKKRPNRGKAKPVVSDFDSDEEQDEREQSEGSGTDDE

SEQ ID NO: 24914 - protein, 282 aa, Homo sapiens
LRGIMLMKRLAARCFAGLLILSPLTVISDSRPADSGKAIEDGNLEEMEEEVRLKKRKRRRNVDKDPAKEDVEKAKKRRGRPPAEKLSPNPPKLTKQMNAIIDTVINYKDSSGRQLSEVFIQLPSRKELPEYYELIRKPVDFKKIKERIRNHKYRSLGDLEKDVMLLCHNAQTFNLEGSQIYEDSIVLQSVFKSARQKIAKEEESEDESNEEEEEEDEEESESEAKSVKVKIKLNKKDDKGRDKGKGKKRPNRGKAKPVVSDFDSDEEQDEREQSEGSGTDDE

SEQ ID NO: 24915 - protein, 58 aa, Homo sapiens
LKTPNREKDLNYERHSDLPHLILTLAAPDAKPGTTREIHVQSIVWSQLLETPWVSLFS

SEQ ID NO: 24916 - protein, 597 aa, Homo sapiens
LPRKTTGLAGRRARCAIPGGGGNGGGDGGDCSGRLSPLPCAPASRRAAEQPAVPGSPSPRAHGRAQRTIAATAMGKPARKGCEWKRFLKNNWVLLSTVAAVVLGITTGVLVREHSNLSTLEKFYFAFPGEILMRMLKLIILPLIISSMITGVAALDSNVSGKIGLRAVVYYFCTTLIAVILGIVLVVSIKPGVTQKVGEIARTGSTPEVSTVDAMLDLIRNMFPENLVQACFQQYKTKREEVKPPSDPEMNMTEESFTAVMTTAISKNKTKEYKIVGMYSDGINVLGLIVFCLVFGLVIGKMGEKGQILVDFFNALSDATMKIVQIIMCYMPLGILFLIAGKIIEVEDWEIFRKLGLYMATVLTGLAIHSIVILPLIYFIVVRKNPFRFAMGMAQALLTALMISSSSATLPVTFRCAEENNQVDKRITRFVLPVGATINMDGTALYEAVAAVFIAQLNDLDLGIGQIITISITATSASIGAAGVPQAGLVTMVIVLSAVGLPAEDVTLIIAVDWLLDRFRTMVNVLGDAFGTGIVEKLSKKELEQMDVSSEVNIVNPFALESTILDNEDSDTKKSYVNGGFAVDKSDTISFTQTSQF

SEQ ID NO: 24917 - protein, 23 aa, Homo sapiens
VGGSAIVFLFQAPFSCSSSALQT

SEQ ID NO: 24918 - protein, 239 aa, Homo sapiens
LVPARCGPQSAAMGASARLLRAVIMGAPGSGKGTVSSRITTHFELKHLSSGDLLRDNMLRGTEIGVLAKAFIDQGKLIPDDVMTRLALHELKNLTQYSWLLDGFPRTLPQAEALDRAYQIDTVINLNVPFEVIKQRLTARWIHPASGRVYNIEFNPPKTVGIDDLTGEPLIQREDDKPETVIKRLKAYEDQTKPVLEYYQKKGVLETFSGTETNKIWPYVYAFLQTKVPQRSQKASVTP

SEQ ID NO: 24919 - protein, 199 aa, Homo sapiens
LVPARCGPQSAAMGASARLLRAVIMGAPGSGKGTVSSRITTHFELKHLSSGDLLRDNMLRGTGFPRTLPQAEALDRAYQIDTVINLNVPFEVIKQRLTARWIHPASGRVYNIEFNPPKTVGIDDLTGEPLIQREDDKPETVIKRLKAYEDQTKPVLEYYQKKGVLETFSGTETNKIWPYVYAFLQTKVPQRSQKASVTP

SEQ ID NO: 24920 - protein, 70 aa, Homo sapiens
MATQAHSLSYAGCNFLRQRLVLSTLSGRPVKIRKIRARDDNPGLRDFEASFIRLLDKITNGSRIEINQTG

SEQ ID NO: 24921 - protein, 39 aa, Homo sapiens [sequence omitted]

SEQ ID NO: 24922 - protein, 178 aa, Homo sapiens
MRIFAVFIFMTYWHLLNAFTVTVPKDLYVVEYGSNMTIECKFPVEKQLDLAALIVYWEMEDKNIIQFVHGEEDLKVQHSSYRQRARLLKDQLSLGNAALQITDVKLQDAGVYRCMISYGGADYKRITVKVNAPYNKINQRILVVDPVTSEHELTCQAEGYPKAEVIWTSSDHQVLSGD

SEQ ID NO: 24923 - protein, 33 aa, Homo sapiens
MSQLERILGWSYCMLIVLFFLLAVHFGGYYKEI

SEQ ID NO: 24924 - protein, 17 aa, Homo sapiens
MKLAPSLIWTHLWSLWL

SEQ ID NO: 24925 - protein, 1402 aa, Homo sapiens
LSVTDATGGAGGSARTMYFLSGWPKRLLCPLGSPAEAPFHVQSDPQRAFFAVLAAARLSIWYSRPSVLIVTYKEPAKSSTQFGSYKQAEWRPDSTMIAVSTANGYILFFHITSTRGDKYLYEPVYPKGSPQMKGTPHFKEEQCAPALNLEMRKILDLQAPIMSLQSVLEDLLVATSDGLLHLIHWEGMTNGRKAINLCTVPFSVDLQSSRVGSFLGFTDVHIRDMEYCATLDGFAVVFNDGKVGFITPVSSRFTAEQLHGVWPQDVVDGTCVAVNNKYRLMAFGCVSGSVQVYTIDNSTGAMLLSHKLELTAKQYPDIWNKTGAVKLMRWSPDNSVVIVTWEYGGLSLWSVFGAQLICTLGGDFAYRSDGTKKDPLKINSMSWGAEGYHLWVISGFGSQNTEIESDLRSVVKQPSILLFQFIKSVLTVNPCMSNQEQVLLQGEDRLYLNCGEASQTQNPRSSSTHSEHKPSREKSPFADGGLESQGLSTLLGHRHWHVVQISSTYLESNWPIREQNMIVTGGLAWWNDFMVLACYNINDRQEELRVYLRTSNLDNAFAHVTKAQAETLLLSVFQDMVIVFRADCSICLYSIERKSDGPNTTAGIQVLQEVSMSRYIPHPFLVVSVTLTSVSTENGITLKMPQQARGAESIMLNLAGQLIMMQRDRSGPQIREKDSNPNNQRKLLPFCPPVVLAQSVENVWTTCRANKQKRHLLEALWLSCGGAGMKVWLPLFPRDHRKPHSFLSQRIMLPFHINIYPLAVLFEDALVLGAVNDTLLYDSLYTRNNAREQLEVLFPFCVVERTSQIYLHHILRQLLVRNLGEQALLLAQSCATLPYFPHVLELMLHEVLEEEATSREPIPDPLLPTVAKFITEFPLFLQTVVHCARKTEYALWNYLFAAVGNPKDLFEECLMAQDLDTAASYLIILQNMEVPAVSRQHATLLFNTALEQGKWDLCRHMIRFLKAIGSGESETPPSTPTAQEPSSSGGFEFFRNRSISLSQSAENVPASKFSLQKTLSMPSGPSGKRWSKDSDCAENMYIDMMLWRHARRLLEDVRLKDLGCFAAQLGFELISWLCKERTRAARVDNFVIALKRLHKDFLWPLPIIPASSISSPFKNGKYRTVGEQLLKSQSADPFLNLEMDAGISNIQRSQSWLSNIGPTHHEIDTASSHGPQMQDAFLSPLSNKGDECSIGSATDLTESSSMVDGDWTMVDENFSTLSLTQSELEHISMELASKGPHKSQVQLRYLLHIFMEAGCLDWCIVIGLILRESSIINQILVITQSSEVDGEMLQNIKTGLHAVDRWASTDCPGYKPFLNIIKPQLQKLSEITEEQVQPDAFQPITMGKTPEQTSPRAEESRGSSSHGSIPQGEVGSSNMVSRKEEDTAQAEEEEPFQDGTYDCSVS

SEQ ID NO: 24926 - protein, 1439 aa, Homo sapiens
LSVTDATGGAGGSARTMYFLSGWPKRLLCPLGSPAEAPFHVQSDPQRAFFAVLAAARLSIWYSRPSVLIVTYKEPAKSSTQFGSYKQAEWRPDSTMIAVSTANGYILFFHITSTRGDKYLYEPVYPKGSPQMKGTPHFKEEQCAPALNLEMRKILDLQAPIMSLQSVLEDLLVATSDGLLHLIHWEGMTNGRKAINLCTVPFSVDLQSSRVGSFLGFTDVHIRDMEYCATLDGFAVVFNDGKVGFITPVSSRFTAEQLHGVWPQDVVDGTCVAVNNKYRLMAFGCVSGSVQVYTIDNSTGAMLLSHKLELTAKQYPDIWNKTGAVKLMRWSPDNSVVIVTWEYGGLSLWSVFGAQLICTLGGDFAYRSDGTKKDPLKINSMSWGAEGYHLWVISGFGSQNTEIESDLRSVVKQPSILLFQFIKSVLTVNPCMSNQEQVLLQGEDRLYLNCGEASQTQNPRSSSTHSEHKPSREKSPFADGGLESQGLSTLLGHRHWHVVQISSTYLESNWPIRFSAIDKLGQNIAVVGKFGFAHYSLLTKKWKLFGNITQEQNMIVTGGLAWWNDFMVLACYNINDRQEELRVYLRTSNLDNAFAHVTKAQAETLLLSVFQDMVIVFRADCSICLYSIERKSDGPNTTAGIQVLQEVSMSRYIPHPFLVVSVTLTSVSTENGITLKMPQQARGAESIMLNLAGQLIMMQRDRSGPQIREKDSNPNNQRKLLPFCPPVVLAQSVENVWTTCRANKQKRHLLEALWLSCGGAGMKVWLPLFPRDHRKPHSFLSQRIMLPFHINIYPLAVLFEDALVLGAVNDTLLYDSLYTRNNAREQLEVLFPFCVVERTSQIYLHHILRQLLVRNLGEQALLLAQSCATLPYFPHVLELMLHEVLEEEATSREPIPDPLLPTVAKFITEFPLFLQTVVHCARKTEYALWNYLFAAVGNPKDLFEECLMAQDLDTAASYLIILQNMEVPAVSRQHATLLFNTALEQGKWDLCRHMIRFLKAIGSGESETPPSTPTAQEPSSSGGFEFFRNRSISLSQSAENVPASKFSLQKTLSMPSGPSGKRWSKDSDCAENMYIDMMLWRHARRLLEDVRLKDLGCFAAQLGFELISWLCKERTRAARVDNFVIALKRLHKDFLWPLPIIPASSISSPFKNGKYRTVGEQLLKSQSADPFLNLEMDAGISNIQRSQSWLSNIGPTHHEIDTASSHGPQMQDAFLSPLSNKGDECSIGSATDLTESSSMVDGDWTMVDENFSTLSLTQSELEHISMELASKGPHKSQVQLRYLLHIFMEAGCLDWCIVIGLILRESSIINQILVITQSSEVDGEMLQNIKTGLHAVDRWASTDCPGYKPFLNIIKPQLQKLSEITEEQVQPDAFQPITMGKTPEQTSPRAEESRGSSSHGSIPQGEVGSSNMVSRKEEDTAQAEEEEPFQDGTYDCSVS

SEQ ID NO: 24927 - protein, 267 aa, Homo sapiens
MINFIYLAKSTKKTMLTLTLVCAITFLLVCSGTFFPYSSNPANPKPKRVFLQHMTRTFHDLEGNAVKRDSGIWINGFDYTGISHITPHIPEINDSIRAHCEENAPLCGFPWYLPVHFLIRKNWYLPAPEVSPRNPPHFRLISKEQTPWDSIKLTFEATGPSHMSFYVRAHKGSTLSQWSLGNGTPVTSKGGDYFVFYSHGLQASAWQFWIEVQVSEEHPEGMVTVAIAAHYLSGEDKRSPQLDALKEKFPDWTFPSAWVCTYDLFVF

SEQ ID NO: 24928 - protein, 494 aa, Homo sapiens
VTLLVLLLGSELPGLGACLSPVKLVVQIGVARDYLEHITSIGPRTTGSPENEILTVHYLLEQIKLIEVQSNSLHKISVDVQRPTGSFSIDFLGGFTSYYDNITNVVVKLEPRDGAQHAVLANCHFDSVANSPGASDDAVSCSVMLEVLRVLSTSSEALHHAVIFLFNGAEENVLQASHGFITQHPWASLIRAFINLEAAGVGGKELVFQTGPENPWLVQAYVSAAKHPFASVVAQEVFQSGIIPSDTDFRIYRDFGNIPGIDLAFIENGYIYHTKYDTADRILTDSIQRAGDNILAVLKHLATSDMLAAASKYRHGNMVFFDVLGLFVIAYPSRIGSIINYMVVMGVVLYLGKKFLQPKHKTGNYKKDFLCGLGITLISWFTSLVTVLIIAVFISLIGQSLSWYNHFYVSVCLYGTATVAKIILIHTLAKRFYYMNASAQYLGEVFFDISLFVHCCFLVTLTYQGLCSAFISAVWVAFPLLTKLCVHKDFKQHD

SEQ ID NO: 24929 - protein, 158 aa, Homo sapiens
LSEVRAALGLALYLIALRTLVQLSLQQLVLRGAAGHRGEFDALQARDYLEHITSIGPRTTGSPENEILTVHYLLEQIKLIEVQSNSLHKISVDVQRPTGSFSIDFLGGFTSYYDNITNVVVKLEPRDGAQHAVLANCHFDSVANSPGQSWFHYSAPLG

SEQ ID NO: 24930 - protein, 66 aa, Homo sapiens
LTVILGVLLLIGCWYCRRRNGYRALMDKSLHVGTQCALTRRCPQEGFDHRDSKVSLQEKNCEPVVG

SEQ ID NO: 24931 - protein, 127 aa, Homo sapiens
VIGASVDSHFCQLAWIHTPKKQGGLGPRNIPLASDPKCTIAQDYGILKAEEGISFRGLFIVDDMGILRQITVNDLPVDCSVDETLRLVQAFQFTDKHREVCPAGWKPGSDTIKTDVQKSKEYLSKQE

SEQ ID NO: 24932 - protein, 634 aa, Homo sapiens
VAFIFKQIKFPNTQLLFLSFLSLCQTEPTVTTSDAAVDLSSFKNVQHLELPKDQGGLGIAISEEDTLSGVIIKSLTEHGVAATDGRLKVGDQILAVDDEIVVGYPIEKFISLLKTAKMTVKLTIHAENPDSQAVPSAAGAASGEKKNSSQSLMVPQSGSPEPESIRNTSRSSTPAIFASDPATCPIIPGCETTIEISKGRTGLGLSIVGGSDTLLGAIIIHEVYEEGAACKDGRLWAGDQILEVNGIDLRKATHDEAINVLRQTPQRVRLTLYRDEAPYKEEEVCDTLTIELQKKPGKGLGLSIVGKRNDTGVFVSDIVKGGIADADGRLMQGDQILMVNGEDVRNATQEAVAALLKCSLGTVTLEVGRIKAGPFHSERRPSQSSQVSEGSLSSFTFPLSGSSTSESLESSSKKNALASEIQGLRTVEMKKGPTDSLGISIAGGVGSPLGDVPIFIAMMHPTGVAAQTQKLRVGDRIVTICGTSTEGMTHTQAVNLLKNASGSIEMQVVAGGDVSVVTGHQQEPASSSLSFTGLTSSSIFQDDLGPPQCKSITLERGPDGLGFSIVGGYGSPHGDLPIYVKTVFAKGAASEDGRLKRGDQIIAVNGQSLEGVTHEEAVAILKRTKGTVTLMVLS

SEQ ID NO: 24933 - protein, 1005 aa, Homo sapiens
MLQNVSKESFERTINIAKGNSSLGMTVSANKDGLGMIVRSIIHGGAISRDGRIAIGDCILSINEESTISVTNAQARAMLRRHSLIGPDIKITYVPAEHLEEFKISLGQQSGRVMALDIFSSYTGRDIPELPEREEGEGEESELQNTAYSNWNQPRRVELWREPSKSLGISIVGGRGMGSRLSNGEVMRGIFIKHVLEDSPAGKNGTLKPGDRIVEAPSQSESEPEKAPLCSVPPPPPSAFAEMGSDHTQSSASKISQDVDKEDEFGYSWKNIRERYGTLTGELHMIELEKGHSGLGLSLAGNKDRSRMSVFIVGIDPNGAAGKDGRLQIADELLEINGQILYGRSHQNASSIIKCAPSKVKIIFIRNKDAVNQMAVCPGNAVEPLPSNSENLQNKETEPTVTTSDAAVDLSSFKNVQHLELPKDQGGLGIAISEEDTLSGVIIKSLTEHGVAATDGRLKVGDQILAVDDEIVVGYPIEKFISLLKTAKMTVKLTIHAENPDSQAVPSAAGAASGEKKNSSQSLMVPQSGSPEPESIRNTSRSSTPAIFASDPATCPIIPGCETTIEISKGRTGLGLSIVGGSDTLLGAIIIHEVYEEGAACKDGRLWAGDQILEVNGIDLRKATHDEAINVLRQTPQRVRLTLYRDEAPYKEEEVCDTLTIELQKKPGKGLGLSIVGKRNDTGVFVSDIVKGGIADADGRLMQGDQILMVNGEDVRNATQEAVAALLKCSLGTVTLEVGRIKAGPFHSERRPSQSSQVSEGSLSSFTFPLSGSSTSESLESSSKKNALASEIQGLRTVEMKKGPTDSLGISIAGGVGSPLGDVPIFIAMMHPTGVAAQTQKLRVGDRIVTICGTSTEGMTHTQAVNLLKNASGSIEMQVVAGGDVSVVTGHQQEPASSSLSFTGLTSSSIFQDDLGPPQCKSITLERGPDGLGFSIVGGYGSPHGDLPIYVKTVFAKGAASEDGRLKRGDQIIAVNGQSLEGVTHEEAVAILKRTKGTVTLMVLS

SEQ ID NO: 24934 - protein, 447 aa, Homo sapiens
LCFCATEKRNELWHRSCLLNSSTPIKKKKSHCVLCKMDEFHPFIEALLPHVRAIAYTWFNLQARKRKYFKKHEKRMSKDEERAVKDELLSEKPEIKQKWASRLLAKLRKDIRQEYREDFVLTVTGKKHPCCVLSNPDQKGKIRRIDCLRQADKVWRLDLVMVILFKGIPLESTDGERLMKSPHCTNPALCVQPHHITVSVKELDLFLAYYVQEQDSGQSGSPSHNDPAKNPPGYLEDSFVKSGVFNVSELVRVSRTPITQGTGVNFPIGEIPSQPYYHDMNSGVNLQRSLSSPPSSKRPKTISIDENMEPSPTGDFYPSPSSPAAGSRTWHERDQDMSSPTTMKKPEKPLFSSASPQDSSPRLSTFPQHHHPGIPGVAHSVISTRTPPPPSPLPFPTQAILPPAPSSYFSHPTIRYPPHLNPQDTLKNYVPSYDPSSPQTSQSWYLG

SEQ ID NO: 24935 - protein, 263 aa, Homo sapiens
VATLKDQLLHNLLKEEQTAQNKITVVGVGAVGMACAINILMKDLADELDLVDVIEDKLKGEMMDLQHGSLFLRTPKIVSGKDYNGTANSKLVIIMAGTCQQEEESRLNLVQRNVNIFKFIILNVVKYSPNCKLLIVSNPVDILTYVAWKISGFPKNHVIGSGCNLDSAQFRYLMGERLGVHPLSCHGWVLGEHGDSSAPVWSGKNVAGVSLKTPHPDLETDKHKEQWKEVHKLVVESAYEVIKLKGYTSWAIGLSVADLAEVQ

SEQ ID NO: 24936 - protein, 578 aa, Homo sapiens
VREEDYKLVATGQARDLGEGSSSTKVDLKSGLEECAVALNLFLSNKFTDALELLRPWAKESMYHALGYSTIVVLQAVLTFEQQDIQNGISAMKDALQTCQKYRKKYTVVESFSSLLSRGSLEQLSEEEMHAEICYAECLLQKAALTFVQDENMINFIKGGLKIRTSYQIYKECLSILHEIQKNKLQQEFFYEFEGGVKLGSGAFNLMLSLLPARIIRLLEFIGFSGNRELGLLQLREGASGRSMRSALCCLTILAFHTYISLILGTGEVNVAEAERLLAPFLQQFPNGSLVLFYHARIELLKGNLEEAQEVFQKCISVQEEWKQFHHLCYWELMWINVFQQNWMQAYYYSDLLCKESKWSKATYVFLKAAILSMLPEEDVVATNENVVTLFRQVDSLKQRIAGKSIPTEKFAVRKARRYSASLPAPVKLILPALEMMYVWNGFSIVSKRKDLSENLLVTVEKAEAALQSQNFNSFSVDDECLVKLLKGCCLKNLQRPLQAELCYNHVVESEKLLKYDHYLVPFTLFELASLYKSQGEIDKAIKFLETARNNYKDYSLESRLHFRIQAALHLWRKPSSD

SEQ ID NO: 24937 - protein, 610 aa, Homo sapiens
LRRLCGSWWRRWLAWTRVEATGQQPQRRRPRPRQARRDAPRHPPPPAGPVAGPASAARIPAPPHLLAASRASDPRSRPRNMTRDFKPGDLIFAKMKGYPHWPARVDEVPDGAVKPPTNKLPIFFFGTHETAFLGPKDIFPYSENKEKYGKPNKRKGFNEGLWEIDNNPKVKFSSQQAATKQSNASSDVEVEEKETSVSKEDTDHEEKASNEDVTKAVDITTPKAARRGRKRKAEKQVETEEAGVVTTATASVNLKVSPKRGRPAATEVKIPKPRGRPKMVKQPCPSESDIITEEDKSKKKGQEEKQPKKQPKKDEEGQKEEDKPRKEPDKKEGKKEVESKRKNLAKTGVTSTSDSEEEGDDQEGEKKRKGGRNFQTAHRRNMLKGQHEKEAADRKRKQEEQMETEQQNKDEGKKPEVKKVEKKRETSMDSRLQRIHAEIKNSLKIDNLDVNRCIEALDELASLQVTMQQAQKHTEMITTLKKIRRFKVSQVIMEKSTMLYNKFKNMFLVGEGDSVITQVLNKSLAEQRQHEEANKTKDQGKKGPNKKLEKEQTGSKTLNGGSDAQDGNQPQHNGESNEDSKDNHEASTKKKPSSEERETEISLKDSTLDN

SEQ ID NO: 24938 - protein, 611 aa, Homo sapiens
LRRLCGSWWRRWLAWTRVEATGQQPQRRRPRPRQQARRDAPRHPPPPAGPVAGPASAARIPAPPHLLAASRASDPRSRPRNMTRDFKPGDLIFAKMKGYPHWPARVDEVPDGAVKPPTNKLPIFFFGTHETAFLGPKDIFPYSENKEKYGKPNKRKGFNEGLWEIDNNPKVKFSSQQAATKQSNASSDVEVEEKETSVSKEDTDHEEKASNEDVTKAVDITTPKAARRGRKRKAEKQVETEEAGVVTTATASVNLKVSPKRGRPAATEVKIPKPRGRPKMVKQPCPSESDIITEEDKSKKKGQEEKQPKKQPKKDEEGQKEEDKPRKEPDKKEGKKEVESKRKNLAKTGVTSTSDSEEEGDDQEGEKKRKGGRNFQTAHRRNMLKGQHEKEAADRKRKQEEQMETEQQNKDEGKKPEVKKVEKKRETSMDSRLQRIHAEIKNSLKIDNLDVNRCIEALDELASLQVTMQQAQKHTEMITTLKKIRRFKVSQVIMEKSTMLYNKFKNMFLVGEGDSVITQVLNKSLAEQRQHEEANKTKDQGKKGPNKKLEKEQTGSKTLNGGSDAQDGNQPQHNGESNEDSKDNHEASTKKKPSSEERETEISLKDSTLDN

SEQ ID NO: 24939 - protein, 413 aa, Homo sapiens
LRRLCGSWWRRWLAWTRVEATGQQPQRRRPRPRQARRDAPRHPPPPAGPVAGPASAARIPAPPHLLAASRASDPRSRPRNMTRDFKPGDLIFAKMKGYPHWPARVDEVPDGAVKPPTNKLPIFFFGTHETAFLGPKDIFPYSENKEKYGKPNKRKGFNEGLWEIDNNPKVKFSSQQAATKQSNASSDVEVEEKETSVSKEDTDHEEKASNEDVTKAVDITTPKAARRGRKRKAEKQVETEEAGVVTTATASVNLKVSPKRGRPAATEVKIPKPRGRPKMVKQPCPSESDIITEEDKSKKKGQEEKQPKKQPKKDEEGQKEEDKPRKEPDKKEGKKEVESKRKNLAKTGVTSTSDSEEEGDDQEGEKKRKGGRNFQTAHRRNMLKGQHEKEAADRKRKQEEQMETEHQTTCNLQ

SEQ ID NO: 24940 - protein, 409 aa, Homo sapiens
LRRLCGSWWRRWLAWTRVEATGQQPQRRRPRPRQARRDAPRHPPPPAGPVAGPASAARIPAPPHLLAASRASDPRSRPRNMTRDFKPGDLIFAKMKGYPHWPARVDEVPDGAVKPPTNKLPIFFFGTHETAFLGPKDIFPYSENKEKYGKPNKRKGFNEGLWEIDNNPKVKFSSQQAATKQSNASSDVEVEEKETSVSKEDTDHEEKASNEDVTKAVDITTPKAARRGRKRKAEKQVETEEAGVVTTATASVNLKVSPKRGRPAATEVKIPKPRGRPKMVKQPCPSESDIITEEDKSKKKGQEEKQPKKQPKKDEEGQKEEDKPRKEPDKKEGKKEVESKRKNLAKTGVTSTSDSEEEGDDQEGEKKRKGGRNFQTAHRRNMLKGQHEKEAADRKRKQEEQMETEHFAL

SEQ ID NO: 24941 - protein, 42 aa, Homo sapiens
MSQQAERLQRGRDGGAALGKTPRLRPSLNEAASSHMKSVGLF

SEQ ID NO: 24942 - protein, 1268 aa, Homo sapiens
LEAGGMQPLTAPMASCLGLLILSSCLLADCRFIPEAWSACTVTCGVGTQVRIVRCQVLLSFSQSVADLPIDECEGPKPASQRACYAGPCSGEIPEFNPDETDGLFGGLQDFDELYDWEYEGFTKCSESCGGGVQEAVVSCLNKQTREPAEENLCVTSRRPPQLLKSCNLDPCPARWEIGKWSPCSLTCGVGLQTRDVFCSHLLSREMNETVILADELCRQPKPSTVQACNRFNCPPAWYPAQWQPCSRTCGGGVQKREVLCKQRMADGSFLELPETFCSASKPACQQACKKDDCPSEWLLSDWTECSTSCGEGTQTRSAICRKMLKTGLSTVVNSTLCPPLPFSSSIRPCMLATCARPGRPSTKHSPHIAAARKVYIQTRRQRKLHFVVGGFAYLLPKTAVVLRCPARRVRKPLITWEKDGQHLISSTHVTVAPFGYLKIHRLKPSDAGVYTCSAGPAREHFVIKLIGGNRKLVARPLSPRSEEEVLAGRKGGPKEALQTHKHQNGIFSNGSKAEKRGLAANPGSRYDDLVSRLLEQGGWPGELLASWEAQDSAERNTTSEEDPGAEQVLLHLPFTMVTEQRRLDDILGNLSQQPEELRDLYSKHLVAQLAQEIFRSHLEHQDTLLKPSERRTSPVTLSPHKHVSGFSSSLRTSSTGDAGGGSRRPHRKPTILRKISAAQQLSASEVVTHLGQTVALASGTLSVLLHCEAIGHPRPTISWARNGEEVQFSDRILLQPDDSLQILAPVEADVGFYTCNATNALGYDSVSIAVTLAGKPLVKTSRMTVINTEKPAVTVDIGSTIKTVQGVNVTINCQVAGVPEAEVTWFRNKSKLGSPHHLHEGSLLLTNVSSSDQGLYSCRAANLHGELTESTQLLILDPPQVPTQLEDIRALLAATGPNLPSVLTSPLGTQLVLDPGNSALLGCPIKGHPVPNITWFHGGQPIVTATGLTHHILAAGQILQVANLSGGSQGEFSCLAQNEAGVLMQKASLVIQDYWWSVDRLATCSASCGNRGVQQPRLRCLLNSTEVNPAHCAGKVRPAVQPIACNRRDCPSRWMVTSWSACTRSCGGGVQTRRVTCQKLKASGISTPVSNDMCTQVAKRPVDTQACNQQLCVEWAFSSWGQCNGPCIGPHLAVQHRQVFCQTRDGITLPSEQCSALPRPVSTQNCWSEACSVHWRVSLWTLCTATCGNYGFQSRRVECVHARTNKAVPEHLCSWGPRPANWQRCNITPCENMECRDTTRYCEKVKQLKLCQLSQFKSRCCGTCGKA

SEQ ID NO: 24943 - protein, 259 aa, Homo sapiens
LMSGVFCFFFFFLGVPEAEVTWFRNKSKLGSPHHLHEGSLLLTNVSSSDQGLYSCRAANLHGELTESTQLLILDPPQVPTQLEDIRALLAATGPNLPSVLTSPLGTQLVLDPGNSALLGCPIKGHPVPNITWFHGGQPIVTATGLTHHILAAGQILQVANLSGGSQGEFSCLAQNEAGVLMQKASLVIQDYWWSVDRLATCSASCGNRGVQQPRLRCLLNSTEVNPAHCAGKVRPAVQPIACNRRDCPSRAMGLASGLT

SEQ ID NO: 24944 - protein, 276 aa, Homo sapiens
LMSGVFCFFFFFLGVPEAEVTWFRNKSKLGSPHHLHEGSLLLTNVSSSDQGLYSCRAANLHGELTESTQLLILDPPQVPTQLEDIRALLAATGPNLPSVLTSPLGTQLVLDPGNSALLGCPIKGHPVPNITWFHGGQPIVTATGLTHHILAAGQILQVANLSGGSQGEFSCLAQNEAGVLMQKASLVIQVQWALHRASPSCATQTSLLPDTGWHHLTIRAVQCSSEACEHPELLVRGLQCTLESQPVDPVHSYLWQLRLPVPACGVCACPHQQGSA

SEQ ID NO: 24945 - protein, 464 aa, Homo sapiens
LMSGVFCFFFFFLGVPEAEVTWFRNKSKLGSPHHLHEGSLLLTNVSSSDQGLYSCRAANLHGELTESTQLLILDPPQVPTQLEDIRALLAATGPNLPSVLTSPLGTQLVLDPGNSALLGCPIKGHPVPNITWFHGGQPIVTATGLTHHILAAGQILQVANLSGGSQGEFSCLAQNEAGVLMQKASLVIQDYWWSVDRLATCSASCGNRGVQQPRLRCLLNSTEVNPAHCAGKVRPAVQPIACNRRDCPSRWMVTSWSACTRSCGGGVQTRRVTCQKLKASGISTPVSNDMCTQVAKRPVDTQACNQQLCVEWAFSSWGQCNGPCIGPHLAVQHRQVFCQTRDGITLPSEQCSALPRPVSTQNCWSEACSVHWRVSLWTLCTATCGNYGFQSRRVECVHARTNKAVPEHLCSWGPRPANWQRCNITPCENMECRDTTRYCEKVKQLKLCQLSQFKSRCCGTCGKA

SEQ ID NO: 24946 - protein, 63 aa, Homo sapiens
LHLTQAAFISLCFTSLFCLLSRPRPPFPVECRDTTRYCEKVKQLKLCQLSQFKSRCCGTCGKA

SEQ ID NO: 24947 - protein, 491 aa, Homo sapiens
VLRRLGEGRRGGVYSPGARGPHALTGSWQPESSSGRACSSPFAAVRRFLSPGRKMASVAVDPQPSVVTRVVNLPLVSSTYDLMSSAYLSTKDQYPYLKSVCEMAENGVKTITSVAMTSALPIIQKLEPQIAVANTYACKGLDRIEERLPILNQPSTQIVANAKGAVTGAKDAVTTTVTGAKDSVASTITGVMDKTKGAVTGSVEKTKSVVSGSINTVLGSRMMQLVSSGVENALTKSELLVEQYLPLTEEELEKEAKKVEGFDLVQKPSYYVRLGSLSTKLHSRAYQQALSRVKEAKQKSQQTISQLHSTVHLIEFARKNVYSANQKIQDAQDKLYLSWVEWKRSIGYDDTDESHCAEHIESRTLAIARNLTQQLQTTCHTLLSNIQGVPQNIQDQAKHMGVMAGDIYSVFRNAASFKEVSDSLLTSSKGQLQKMKESLDDVMDYLVNNTPLNWLVGPFYPQLTESQNAQDQGAEMDKSSQETQRSEHKTH

SEQ ID NO: 24948 - protein, 50 aa, Homo sapiens
MVDTFYAIGLVMRLCQSVSLLELLHIYVGIESNHLLPRFLQEIFPSVLFN

SEQ ID NO: 24949 - protein, 70 aa, Homo sapiens
LPRGYDLSKQEITFSSASSEEKCAFGHVSKTGPTSDSQRSQLQSLWNTMVLQAVLKSTLSLFNAKGIPIG

SEQ ID NO: 24950 - protein, 196 aa, Homo sapiens
VGVGVKVGGGRAQGRRVRACGAEMGRGRCVGPSLQLRGQEWRCSPLVPKGGAAAAELGPGGGENMVRRFLVTLRIRRACGPPRVRVFVVHIPRLTGEWAAPGAPAAVALVLMLLRSQRLGQQPLPRRPGHDDGQRPSGGAAAAPRRGAQLRRPRHSHPTRARRCPGGLPGHAGGAAPGRGAAGRARCLGPSARGPG

SEQ ID NO: 24951 - protein, 882 aa, Homo sapiens
LGRTHSASWRAEADDEFRSACQACCVTRPARRAPSQPPFRTGSRALPVSGRPLPAGSSPAAARRSPSRPCGLVSHSAWAPGARQTLAMTSGATRYRLSCSLRGHELDVRGLVCCAYPPGAFVSVSRDRTTRLWAPDSPNRSFTEMHCMSGHSNFVSCVCIIPSSDIYPHGLIATGGNDHNICIFSLDSPMPLYILKGHKNTVCSLSSGKFGTLLSGSWDTTAKVWLNDKCMMTLQGHTAAVWAVKILPEQGLMLTGSADKTVKLWKAGRCERTFSGHEDCVRGLAILSETEFLSCANDASIRRWQITGECLEVYYGHTNYIYSISVFPNCRDFVTTAEDRSLRIWKHGECAQTIRLPAQSIWCCCVLDNGDIVVGASDGIIRVFTESEDRTASAEEIKAFEKELSHATIDSKTGDLGDINAEQLPGREHLNEPGTREGQTRLIRDGEKVEAYQWSVSEGRWIKIGDVVGSSGANQQTSGKVLYEGKEFDYVFSIDVNEGGPSYKLPYNTSDDPWLTAYNFLQKNDLNPMFLDQVAKFIIDNTKGQMLGLGNPSFSDPFTGGGRYVPGSSGSSNTLPTADPFTGAGRYVPGSASMGTTMAGVDPFTGNSAYRSAASKTMNIYFPKKEAVTFDQANPTQILGKLKELNGTAPEEKKLTEDDLILLEKILSLICNSSSEKPTVQQLQILWKAINCPEDIVFPALDILRLSIKHPSVNENFCNEKEGAQFSSHLINLLNPKGKPANQLLALRTFCNCFVGQAGQKLMMSQRESLMSHAIELKSGSNKNIHIALATLALNYSVCFHKDHNIEGKAQCLSLISTILEVVQDLEATFRLLVALGTLISDDSNAVQLAKSLGVDSQIKKYSSVSEPAKVSECCRFILNLL

SEQ ID NO: 24952 - protein, 18 aa, Homo sapiens
MRVRIFPLICLVSWPTSL

SEQ ID NO: 24953 - protein, 256 aa, Homo sapiens
MVEADCPGKPFTGGLNTETNEKALEAVFGKYGRIVEVLLVKDHETNKSGGFAFVTFESPADAKDAARDMNGKSLDGKAIEVEQANKPSFESGRRGPPPPPRSRGPPRGLRGGRGGSGGTRGPPSRGGHMDDGGYSMNFNMSSSRGPHPVKRGPPPRSGSPPSKRSAPSGPVRSSSEMGGRAPVSRGRDSYGGPPRRELLPSCRNDYLSPRDDGYSTKDSYSSRDYPSSHDTRAYAPPPRDYTYRDYGHSSSRVDYP

SEQ ID NO: 24954 - protein, 119 aa, Homo sapiens
LFHLLHQLRVPGLCLGAQLRRPAASSVASVYAGKGSASWISVSRSTSFLGGMGSGDLAAGMARGLAGMGGIQNKKETMQDLNDGLASYLDRVRSLETNKRKLESKIQEHLEKKGPQVRD

SEQ ID NO: 24955 - protein, 115 aa, Homo sapiens [sequence omitted]

SEQ ID NO: 24956 - protein, 14 aa, Homo sapiens
MAAGAWQPPPGRLL

SEQ ID NO: 24957 - protein, 1833 aa, Homo sapiens
LLFYFRFMRPGCDLLLRAAATVTAAIMSDSDSEEDSSGGGPFTLAGILFGNISGAGQLEGESVLDDECKKHLAGLGALGLGSLITELTANEELTGTGGALVNDEGWIRSTEDAVDYSDINEVAEDESQRHQQTMGSLQPLYHSDYDEDDYDADCEDIDCKLMPPPPPPPGPMKKDKDQDAITCVSESGEDIILPSIIAPSFLASEKVDFSSYSDSESEMGPQEATQAESEDGKLTLPLAGIMQHDATKLLPSVTELFPEFRPGKVLRFLHLFGPGKNVPSVWRSARRKRKKHRELIQEEQIQEVECSVESEVSQKSLWNYDYAPPPPPEQCLADDEITMMVPVESKFSQSTGDVDKVTDTKPRVAEWRYGPARLWYDMLGVSEDGSGFDYGFKLRKTQHEPVIKSRMMEEFRKLEESNGTDLLADENFLMVTQLHWEDSIIWDGEDIKHKGTKPQGASLAGWLPSIKTRNVMAYNVQQGFAPTLDDDKPWYSIFPIDNEDLVYGRWEDNIIWDAQAMPRLLEPPVLALDPNDENLILEIPDEKEEATSNSPSKESKKESSLKKSRILLGKTGVIREEPQQNMSQPEVKDPWNLSNDEYYFPKQQGLRGTFGGNIIQHSIPAMELWQPFFPTHMGPIKIRQFHRPPLKKYSFGALSQPGPHSVQPLLKHIKKKAKMREQERQASGGGELFFMRTPQDLTGKDGDLILAEYSEENGPLMMQVGMATKIKNYYKRKPGKDPGAPDCKYGETVYCHTSPFLGSLHPGQLLQALENNLFRAPVYLHKMPETDFLIIRTRQGYYIRELVDIFVVGQQCPLFEVPGPNSRRANMHIRDFLQVFIYRLFWKSKDRPRRIRMEDIKKAFPSHSESSIRKRLKLCADFKRTGMDSNWWVLKSDFRLPTEEEIRAKVSPEQCCAYYSMIAAKQRLKDAGYGEKSFFAPEEENEEDFQMKIDDEVHAAPWNTTRAFIAAMKGKCLLEVTGVADPTGCGEGFSYVKIPNKPTQQKDDKEPQAVKKTVTGTDADLRRLSLKNAKQLLRKFGVPEEEIKKLSRWEVIDVVRTMSTEQAHSGEGPMSKFARGSRFSVAEHQERYKEECQRIFDLQNKVLSSTEVLSTDTDSISAEDSDFEEMGKNIENMLQNKKTSSQLSREWEEQERKELRRMLLVAGSAASGNNHRDDVTASMTSLKSSATGHCLKIYRTFRDEEGKEYVRCETVRKPAVIDAYVRIRTTKDEKFIQKFALFDEKHREEMRKERRRIQEQLRRLKRNQEKEKLKGPPEKKPKKMKERPDLKLKCGACGAIGHMRTNKFCPLYYQTNVPPSKPVAMTEEQEEELEKTVIHNDNEELIKVEGTKIVFGKQLIENVHEVRRKSLVLKFPKQQLPPKKKRRVGTTVHCDYLNIPHKSIHRRRTDPMVTLSSILESIINDMRDLPNTHPFHTPVNAKVVKDYYKIITRPMDLQTLRENVRKCLYPSREEFREHLELIVKNSATYNGPKHSLTQISQSMLDLCDEKLKEKEDKLARLEKAINPLLDDDDQVAFSFILDNIVTQKMMAVPDSWPFHHPVNKKFVPDYYKMIVNPVDLETIRKNISKHKYQSRESFLDDVNLILANSVKYNGPESQYTKTAQEIVNICYQTITEYDEHLTQLEKDICTAKEAALEEAELESLDPMTPGPYTSQPPDMYDTNTSLSTSRDASVFQDESNLSVLDISTATPEKQMCQGQGRLGEEDSDVDVEGYDDEEEDGKPKPPAPEGGDGDLADEEEGTVQQPEASVLYEDLLISEGEDDEEDAGSDEEGDNPFSAIQLSESGSDSDVGYGGIRPKQPFMLQHASGEHKDGHGK

SEQ ID NO: 24958 - protein, 302 aa, Homo sapiens
MSNVNLSVSDFWRVMMRVCWLVRQDSRHQRIRLPHLEAVVIGRGPETKITDKKCSRQQEFEEEAKNPGLETHRKRKRSGNSDSIERDAAQEAEAGTGLEPGSNSGQCSVPLKKGKDAPIKKESLGHWSQGLKISMQDPKMQVYKDEQVVVIKDKYPKARYHWLVLPWTSISSLKAVAREHLELLKHMHTVGEKVIVDFAGSSKLRFRLGYHAIPSMSHVHLHVISQDFDSPCLKNKKHWNSFNTEYFLESQAVIEMVQEAGRVTVRDGMPELLKLPLRCHECQQLLPSIPQLKEHLRKHWTQ

SEQ ID NO: 24959 - protein, 306 aa, Homo sapiens
MSNVNLSVSDFWRVMMRVCWLVRQDSRHQRIRLPHLEAVVIGRGPETKITDKKCSRQQVQLKAECNKGYVKVKQVGVNPTSIDSVVIGKDQEVKLQPGQVLHMVNELYPYIVEFEEEAKNPGLETHRKRKRSGNSDSIERDAAQEAEAGTGLEPGSNSGQCSVPLKKGKDAPIKKESLGHWSQGLKISMQDPKMQVYKDEQVVVIKDKYPKARYHWLVLPWTSISSLKAVAREHLELLKHMHTVGEKVIVDFAGSSKLRFRLGYHAIPSMSHVHLHVISQDFDSPCLKNKKHWNSFNTEYFLESQE

SEQ ID NO: 24960 - protein, 53 aa, Homo sapiens
MRQPAPLWLSLNQLLSLLIQTVPDLLLDLQLFDFTVVQKQYAFHRNCISNFEF

SEQ ID NO: 24961 - protein, 12 aa, Homo sapiens
LVTVLTWLYSSI

SEQ ID NO: 24962 - protein, 837 aa, Homo sapiens
LRHGMAEAPPVSGTFKFNTDAAEFIPQEKKNSGLNCGTQRRLDSNRIGRRNYSSPPPCHLSRQVPYDEISAVHQHSYHPSGSKPKSQQTSFQSSPCNKSPKSHGLQNQPWQKLRNEKHHIRVKKAQSLAEQTSDTAGLESSTRSESGTDLREHSPSESEKEVVGADPRGAKPKKATQFVYSYGRGPKVKGKLKCEWSNRTTPKPEDAGPESTKPVGVFHPDSSEASSRKGVLDGYGARRNEQRRYPQKRPPWEVEGARPRPGRNPPKQEGHRHTNAGHRNNMGPIPKDDLNERPAKSTCDSENLAVINKSSRRVDQEKCTVRRQDPQVVSPFSRGKQNHVLKNVETHTGSLIEQLTTEKYECMVCCELVRVTAPVWSCQSCYHVFHLNCIKKWARSPASQADGQSGWRCPACQNVSAHVPNTYTCFCGKVKNPEWSRNEIPHSCGEVCRKKQPGQDCPHSCNLLCHPGPCPPCPAFMTKTCECGRTRHTVRCGQAVSVHCSNPCENILNCGQHQCAELCHGGQCQPCQIILNQVCYCGSTSRDVLCGTDVGKSDGFGDFSCLKICGKDLKCGNHTCSQVCHPQPCQQCPRLPQLVRCCPCGQTPLSQLLELGSSSRKTCMDPVPSCGKVCGKPLPCGSLDFIHTCEKLCHEGDCGPCSRTSVISCRCSFRTKELPCTSLKSEDATFMCDKRCNKKRLCGRHKCNEICCVDKEHKCPLICGRKLRCGLHRCEEPCHRGNCQTCWQASFDELTCHCGASVIYPPVPCGTRPPECTQTCARVHECDHPVYHSCHSEEKCPPCTFLTQKWCMGKHEQSHYWASTQKKRSHYMKKIPAHACL

SEQ ID NO: 24963 - protein, 1028 aa, Homo sapiens
LRHGMAEAPPVSGTFKFNTDAAEFIPQEKKNSGLNCGTQRRLDSNRIGRRNYSSPPPCHLSRQVPYDEISAVHQHSYHPSGSKPKSQQTSFQSSPCNKSPKSHGLQNQPWQKLRNEKHHIRVKKAQSLAEQTSDTAGLESSTRSESGTDLREHSPSESEKEVVGADPRGAKPKKATQFVYSYGRGPKVKGKLKCEWSNRTTPKPEDAGPESTKPVGVFHPDSSEASSRKGVLDGYGARRNEQRRYPQKRPPWEVEGARPRPGRNPPKQEGHRHTNAGHRNNMGPIPKDDLNERPAKSTCDSENLAVINKSSRRVDQEKCTVRRQDPQVVSPFSRGKQNHVLKNVETHTGSLIEQLTTEKYECMVCCELVRVTAPVWSCQSCYHVFHLNCIKKWARSPASQADGQSGWRCPACQNVSAHVPNTYTCFCGKVKNPEWSRNEIPHSCGEVCRKKQPGQDCPHSCNLLCHPGPCPPCPAFMTKTCECGRTRHTVRCGQAVSVHCSNPCENILNCGQHQCAELCHGGQCQPCQIILNQVCYCGSTSRDVLCGTDVGKSDGFGDFSCLKICGKDLKCGNHTCSQVCHPQPCQQCPRLPQLVRCCPCGQTPLSQLLELGSSSRKTCMDPVPSCGKVCGKPLPCGSLDFIHTCEKLCHEGDCGPCSRTSVISCRCSFRTKELPCTSLKSEDATFMCDKRCNKKRLCGRHKCNEICCVDKEHKCPLICGRKLRCGLHRCEEPCHRGNCQTCWQASFDELTCHCGASVIYPPVPCGTRPPECTQTCARVHECDHPVYHSCHSEEKCPPCTFLTQKWCMGKHEFRSNIPCHLVDISCGLPCSATLPCGMHKCQRLCHKGECLVDEPCKQPCTTPRADCGHPCMAPCHTSSPCPVTACKAKVELQCECGRRKEMVICSEASSTYQRIAAISMASKITDMQLGGSVEISKLITKKEVHQARLECDEECSALERKKRLAEAFHISEDSDPFNIRSSGSKFSDSLKEDARKDLKFVSDVEKEMETLVEAVNKVEVETSHWTFL

SEQ ID NO: 24964 - protein, 1124 aa, Homo sapiens
LRHGMAEAPPVSGTFKFNTDAAEFIPQEKKNSGLNCGTQRRLDSNRIGRRNYSSPPPCHLSRQVPYDEISAVHQHSYHPSGSKPKSQQTSFQSSPCNKSPKSHGLQNQPWQKLRNEKHHIRVKKAQSLAEQTSDTAGLESSTRSESGTDLREHSPSESEKEVVGADPRGAKPKKATQFVYSYGRGPKVKGKLKCEWSNRTTPKPEDAGPESTKPVGVFHPDSSEASSRKGVLDGYGARRNEQRRYPQKRPPWEVEGARPRPGRNPPKQEGHRHTNAGHRNNMGPIPKDDLNERPAKSTCDSENLAVINKSSRRVDQEKCTVRRQDPQVVSPFSRGKQNHVLKNVETHTGSLIEQLTTEKYECMVCCELVRVTAPVWSCQSCYHVFHLNCIKKWARSPASQADGQSGWRCPACQNVSAHVPNTYTCFCGKVKNPEWSRNEIPHSCGEVCRKKQPGQDCPHSCNLLCHPGPCPPCPAFMTKTCECGRTRHTVRCGQAVSVHCSNPCENILNCGQHQCAELCHGGQCQPCQIILNQVCYCGSTSRDVLCGTDVGKSDGFGDFSCLKICGKDLKCGNHTCSQVCHPQPCQQCPRLPQLVRCCPCGQTPLSQLLELGSSSRKTCMDPVPSCGKVCGKPLPCGSLDFIHTCEKLCHEGDCGPCSRTSVISCRCSFRTKELPCTSLKSEDATFMCDKRCNKKRLCGRHKCNEICCVDKEHKCPLICGRKLRCGLHRCEEPCHRGNCQTCWQASFDELTCHCGASVIYPPVPCGTRPPECTQTCARVHECDHPVYHSCHSEEKCPPCTFLTQKWCMGKHEFRSNIPCHLVDISCGLPCSATLPCGMHKCQRLCHKGECLVDEPCKQPCTTPRADCGHPCMAPCHTSSPCPVTACKAKVELQCECGRRKEMVICSEASSTYQRIAAISMASKITDMQLGGSVEISKLITKKEVHQARLECDEECSALERKKRLAEAFHISEDSDPFNIRSSGSKFSDSLKEDARKDLKFVSDVEKEMETLVEAVNKGKNSKKSHSFPPMNRDHRRIIHDLAQVYGLESVSYDSEPKRNVVVTAIRGKSVCPPTTLTGVLEREMQARPPPPIPHHRHQSDKNPGSSNLQKITKEPIIDYFDVQD

SEQ ID NO: 24965 - protein, 14 aa, Homo sapiens
LVVALSSVLLMSSS

SEQ ID NO: 24966 - protein, 339 aa, Homo sapiens [sequence omitted]

SEQ ID NO: 24967 - protein, 418 aa, Homo sapiens
LPSLSSFFFSHRLPDRTAIIKEIVSRNKRRYQEDGFDLDLTYIYLNIIAMGFPAERLEGVYRNNIDDVVRFLDSKHKNHYKIHNLCAERHYDTAKSNYRVAQYPFEDHNPPQLELIKPFCEDLDQWLSEDDNHVAAIHCKAGKGRTGIMIYAYLLHRGKFLKAQEALDFYGEVRTRDKKGVTIPSQRRYVYYYSYLVKNHVDYRPVALLFHKMMFETIPMFSGGTCNPQFVVCQLKVKMYSSNSGPTRWEDKFMYFEFPQPLPVCGDIKVEFFHKQNKMLKKDKMFHFWVNTFFIPGPEETSEKVENGSLCDQEIDSICSIERADNDKEYLVLTLTKNDLDKANKDKANRYFSPNFKVKLYFTKTVEEPSNPEASSSTSVTPDVSDNEPDHYRYSDTTDSDPENEPFDEDQHTQITKV

SEQ ID NO: 24968 - protein, 42 aa, Homo sapiens
LSTWLLFILKAGLFPPREWGKRGSWDECVWEQRVKNHYAKFG

SEQ ID NO: 24969 - protein, 852 aa, Homo sapiens
MDSKGLGRILWKSGQQKTGLKIIDLVALLQKPVPHSQASEANSFETSQQQGFGQALVFTNSQHNNQMAPGTGSSTAVNSCSPQSLSSVLGSGFGELAPPKMANITSSQILDQLKAPSLGQFTTTPSTQQNSTSHPTTTTSWDLKPPTSQSSVLSHLDFKSQPEPSPVLSQLSQRQQHQSQAVTVPPPGLESFPSQAKLRESTPGDSPSTVNKLLQLPSTTIENISVSVHQPQPKHIKLAKRRIPPASKIPASAVEMPGSADVTGLNVQFGALEFGSEPSLSEFGSAPSSENSNQIPISLYSKSLSEPLNTSLSMTSAVQNSTYTTSVITSCSLTSSSLNSASPVAMSSSYDQSSVHNRIPYQSPVSSSESAPGTIMNGHGGGRSQQTLDTPKTTGPPSALPSVSSLPSTTSCTALLPSTSQHTGDLTSSPLSQLSSSLSSHQSSLSAHAALSSSTSHTHASVESASSHQSSATFSTAATSVSSSASSGASLSSSMNTANSLCLGGTPASASSSSSRAAPLVTSGKAPPNLPQGVPPLLHNQYLVGPGGLLPAYPIYGYDELQMLQSRLPVDYYGIPFAAPTALASRDGSLANNPYPGDVTKFGRGDSASPAPATTPAQPQQSQSQTHHTAQQPFVNPALPPGYSYTGLPYYTGMPSAFQYGPTMFVPPASAKQHGVNLSTPTPPFQQASGYGQHGYSTGYDDLTQGTAAGDYSKGGYAGSSQAPNKSAGSGPGKGVSVSSSTTGLPDMTGSVYNKTQTFDKQGFHAGTPPPFSLPSVLGSTGPLASGAAPGYAPPPFLHILPAHQQPHSQLLHHHLPQDAQSGSGQRSQPSSLQPKSQASKPAYGNSPYWTN

SEQ ID NO: 24970 - protein, 680 aa, Homo sapiens [sequence omitted]

SEQ ID NO: 24971 - protein, 65 aa, Homo sapiens
MWALPSSFLCYTLALQDQCVEITEESKALLEEYNKTTMLLSKQFVQWDELLCQLEAATQVKPAEE

SEQ ID NO: 24972 - protein, 169 aa, Homo sapiens
LFPGRGGSVVAMAGLTDLQRLQARVEELERWVYGPGGARGSRKVADGLVKVQVALGNISSKRERVKILYKKIEDLIKYLDPEYIDRIAIPDASKLQFILAAVPEHAARLQRLAQIHIQQQDQCVEITEESKALLEEYNKTTMLLSKQFVQWDELLCQLEAATQVKPAEE

SEQ ID NO: 24973 - protein, 115 aa, Homo sapiens
LLSVMVSLPNLASIMKKLLTKYDNLFETSFPYSMGWHGAPTGSEAGANWNHWQLHAHYYPPLLRSATVRKFMVGYEMLAQAQRDLTPEQAAERLRALPEVHYHLGQKDRETATIA

SEQ ID NO: 24974 - protein, 426 aa, Homo sapiens
VGVEMSSSCSGLSRVLVAVATALVSASSPCPQAWGPPGVQYGQPGRSVKLCCPGVTAGDPVSWFRDGEPKLLQGPDSGLGHELVLAQADSTDEGTYICQTLDGALGGTVTLQLGYPPARPVVSCQAADYENFSCTWSPSQISGLPTRYLTSYRKKTVLGADSQRRSPSTGPWPCPQDPLGAARCVVHGAEFWSQYRINVTEVNPLGASTRLLDVSLQSILRPDPPQGLRVESVPGYPRRLRASWTYPASWPCQPHFLLKFRLQYRPAQHPAWSTVEPAGLEEVITDAVAGLPHAVRVSARDFLDAGTWSTWSPEAWGTPSTGTIPKEIPAWGQLHTQPEVEPQVDSPAPPRPSLQPHPRLLDHRDSVEQVAVLASLGILSFLGLVAGALALGLWLRLRRGGKDGSPKPGFLASVIPVDRRPGAPNL

SEQ ID NO: 24975 - protein, 18 aa, Homo sapiens
LVLLLILGVTIKTLGMAV

SEQ ID NO: 24976 - protein, 427 aa, Homo sapiens
LPWAARGPRCVESAAPEPRPAPGRSRAMGVLMSKRQTVEQVQKVSLAVSAFKDGLRDRPSIRRTGELPGSRRGTVEGSVQEVQEEKEAEAGTSVVQEESSAGRAAWERLRDGRGVEPEEFDRTSRFTPPAFIRPTRKLDDDKPPEICLEPREPVVNDEMCDVCEVWTAESLFPCRVCTRVFHDGCLRRMGYIQGDSAAEVTEMAHTETGWSCHYCDNINLLLTEEEMYSLTETFQRCKVIPDCSLTLEDFLRYRHQAAKRGDRDRALSEEQEEQAARQFAALDPEHRGHIEWPDFLSHESLLLLQQLRPQNSLLRLLTVKERERARAAFLARGSGSTVSEAECRRAQHSWFCKRFPEAPSCSVSISHVGPIADSSPASSSSKSQDKTLLPTEQESRFVDWPTFLQENVLYILAARPNSAAIHLKPPG

SEQ ID NO: 24977 - protein, 94 aa, Homo sapiens
LRPSFESSLPLPLPLPLPPRGSGASVVRPTPRCRWEEARGKPLAGLSPLLAHRLEEPSPGPVGRLPPLVAVTRGPPQPPAGRGARHGFWSRFKR

SEQ ID NO: 24978 - protein, 114 aa, Homo sapiens
LRPSFESSLPLPLPLPLPPRGSGASVVRPTPRCRWEEARGKPLAGLSPLLAHRLEEPSPGPVGRLPPLVAVTRGPPQPPAGRGARHGFWSRVSVRAPFACCGGAHRDQPRRFKR

SEQ ID NO: 24979 - protein, 76 aa, Homo sapiens
VIPQVSLVPTLALLLGLPIPFGNIGEVMAELFSGGEDSQPHSSALAQASALHLNAQQVGKRAGFPGDRARVGMKEA

SEQ ID NO: 24980 - protein, 1221 aa, Homo sapiens
MVLIFFFNFLNPYFGCSSKIPDDGDPSLPQWLPEGPAGGLYGIDSMPDLRRKKPLPLVSDLSLVQSRKAGITSAMATRTSLKDEELKSHVYKKTLQALIYPISCTTPHNFEVWTATTPTYCYECEGLLWGIARQGMRCSECGVKCHEKCQDLLNADCLQRAAEKSCKHGAEDRTQNIIMAMKDRMKIRERNKPEIFEVIRDVFTVNKAAHVQQMKTVKQSVLDGTSKWSAKITITVVCAQGLQAKDKTGSSDPYVTVQVSKTKKRTKTIFGNLNPVWEEKFHFECHNSSDRIKVRVWDEDDDIKSRVKQRLKRESDDFLGQTIIEVRTLSGEMDVWYNLEKRTDKSAVSGAIRLQISVEIKGEEKVAPYHVQYTCLHENLFHYLTDIQGSGGVRIPEARGDDAWKVYFDETAQEIVDEFAMRYGIESIYQAMTHFACLSSKYMCPGVPAVMSTLLANINAYYAHTTASTNVSASDRFAASNFGKERFVKLLDQLHNSLRIDLSTYRNNFPAGSPERLQDLKSTVDLLTSITFFRMKVQELQSPPRASQVVKDCVKACLNSTYEYIFNNCHDLYSRQYQLKQELPPEEQGPSIRNLDFWPKLITLIVSIIEEDKNSYTPVLNQFPQELNVGKVSAEVMWHLFAQDMKYALEEHEKDHLCKSADYMNLHFKVKWLHNEYVRDLPVLQGQVPEYPAWFEQFVLQWLDENEDVSLEFLRGALERDKKDGFQQTSEHALFSCSVVDVFTQLNQSFEIIRKLECPDPSILAHYMRRFAKTIGKVLMQYADILSKDFPAYCTKEKLPCILMNNVQQLRVQLEKMFEAMGGKELDLEAADSLKELQVKLNTVLDELSMVFGNSFQVRIDECVRQMADILGQVRGTGNASPDARASAAQDADSVLRPLMDFLDGNLTLFATVCEKTVLKRVLKELWRVVMNTMERMIVLPPLTDQTGTQLIFTAAKELSHLSKLKDHMVREETRNLTPKQCAVLDLALDTIKQYFHAGGNGLKKTFLEKSPDLQSLRYALSLYTQTTDTLIKTFVRSQTTQGSGVDDPVGEVSIQVDLFTHPGTGEHKVTVKVVAANDLKWQTAGMFRPFVEVTMVGPHQSDKKRKFTTKSKSNNWAPKYNETFHFLLGNEEGPESYELQICVKDYCFAREDRVLGLAVMPLRDVTAKGSCACWCPLGRKIHMDETGLTILRILSQRSNDEVAREFVKLKSESRSTEEGS

SEQ ID NO: 24981 - protein, 127 aa, Homo sapiens
VGAELLRTMAEAITYADLRFVKAPLKKSISSRLGQDPGADDDGEITYENVQVPAVLGVPSSLASSVLGDKAAVKSEQPTASWRAVTSPAVGRILPCRTTCLRYLLLGLLLTCLLLGVTAICLGVRCE

SEQ ID NO: 24982 - protein, 128 aa, Homo sapiens
VGAELLRTMAEAITYADLRFVKAPLKKSISSRLGQDPGADDDGEITYENVQVPAVLGVPSSLASSVLGDKAAVKSEQPTASWRAVTSPAVGRILPCECACAGQPRGQVLAPVPAADGAGPRGVQLLPG

SEQ ID NO: 24983 - protein, 294 aa, Homo sapiens
LPAGPPPTAAMDAIKKKMQMLKLDKENAIDRAEQAEADKKQAEDRCKQLEEEQQALQKKLKGTEDEVEKYSESVKEAQEKLEQAEKKATDAEADVASLNRRIQLVEEELDRAQERLATALQKLEEAEKAADESERGMKVIENRAMKDEEKMELQEMQLKEAKHIAEDSDRKYEEVARKLVILEGELERSEERAEVAESRARQLEEELRTMDQALKSLMASEEEYSTKEDKYEEEIKLLEEKLKEAETRAEFAERSVAKLEKTIDDLEETLASAKEENVEIHQTLDQTLLELNNL

SEQ ID NO: 24984 - protein, 294 aa, Homo sapiens
LPAGPPPTAAMDAIKKKMQMLKLDKENAIDRAEQAEADKKQAEDRCKQLEEEQQALQKKLKGTEDEVEKYSESVKEAQEKLEQAEKKATDAEADVASLNRRIQLVEEELDRAQERLATALQKLEEAEKAADESERGMKVIENRAMKDEEKMELQEMQLKEAKHIAEDSDRKYEEVARKLVILEGELERSEERAEVAESKCGDLEEELKIVTNNLKSLEAQADKYSTKEDKYEEEIKLLEEKLKEAETRAEFAERSVAKLEKTIDDLEETLASAKEENVEIHQTLDQTLLELNNL

SEQ ID NO: 24985 - protein, 332 aa, Homo sapiens
LPAGPPPTAAMDAIKKKMQMLKLDKENAIDRAEQAEADKKQAEDRCKQLEEEQQALQKKLKGTEDEVEKYSESVKEAQEKLEQAEKKATDAEADVASLNRRIQLVEEELDRAQERLATALQKLEEAEKAADESERGMKVIENRAMKDEEKMELQEMQLKEAKHIAEDSDRKYEEVARKLVILEGELERSEERAEVAESKCGDLEEELKIVTNNLKSLEAQADKYSTKEDKYEEEIKLLEEKLKEAETRAEFAERSVAKLEKTIDDLEESTSIATTEHWFTPDTLALTDTPSPCTEPTHKTPWPTLKPLCTGTPWLSLSDSPLHVGTCGPIKP

SEQ ID NO: 24986 - protein, 294 aa, Homo sapiens
LPAGPPPTAAMDAIKKKMQMLKLDKENAIDRAEQAEADKKQAEDRCKQLEEEQQALQKKLKGTEDEVEKYSESVKEAQEKLEQAEKKATDAEADVASLNRRIQLVEEELDRAQERLATALQKLEEAEKAADESERGMKVIENRAMKDEEKMELQEMQLKEAKHIAEDSDRKYEEVARKLVILEGELERSEERAEVAESKCGDLEEELKIVTNNLKSLEAQADKYSTKEDKYEEEIKLLEEKLKEAETRAEFAERSVAKLEKTIDDLEDEVYAQKMKYKAISEELDNALNDITSL

SEQ ID NO: 24987 - protein, 118 aa, Homo sapiens
MAPSLSSPSLRLSTAGCSFSAAGDQEGPGASEPCLLSLSQLCSSLLSSTRPLLCHLHCLASLCPHTLPPPPHTPCSKCGDLEEELKIVTNNLKSLEAQADKVEGSRGAVRMGSHRGGR

SEQ ID NO: 24988 - protein, 313 aa, Homo sapiens
LPAGPPPTAAMDAIKKKMQMLKLDKENAIDRAEQAEADKKQAEDRCKQLEEEQQALQKKLKGTEDEVEKYSESVKEAQEKLEQAEKKATDAEADVASLNRRIQLVEEELDRAQERLATALQKLEEAEKAADESERGMKVIENRAMKDEEKMELQEMQLKEAKHIAEDSDRKYEEVARKLVILEGELERSEERAEVAESRARQLEEELRTMDQALKSLMASEEEVVTPLNLSGQWRLLSAHLPSVSAPQAALSQLLGIRKGLGLLSPACCHSHNFALLFSPPPVPCCAISTVWLRCALTPCPPRHTPPAVNVGT

SEQ ID NO: 24989 - protein, 189 aa, Homo sapiens
MPRSSVTLPLALRLPRRSPAPPPNGETSQKRAEKKFQHKVGPLGKRGASAGSGGEEGRRAEGSGARRSQGRGAEGLGTRPGGSGGGERAVTSLAAAAWKICGARGGRGGELGPEPPGARRKGLAPGAGAGRGGEGMRGQAGPGGSKPGHTPHRDRGSGLASCFSFPKLPMRLRYYHHVDNANLEGLRVN

SEQ ID NO: 24990 - protein, 61 aa, Homo sapiens
VPAPPQSINAPRVLLTLLYLDLNLPGPQPTPPCQQLPASPHSLISSLHRFLILSSPTPSYP

SEQ ID NO: 24991 - protein, 995 aa, Homo sapiens
MALPSLLLLVAALAGGVRPPGARNLTLAVVLPEHNLSYAWAWPRVGPAVALAVEALGRALPVDLRFVSSELEGACSEYLAPLSAVDLKLYHDPDLLLGPGCVYPAASVARFASHWRLPLLTAGAVASGFSAKNDHYRTLVRTGPSAPKLGEFVVTLHGHFNWTARAALLYLDARTDDRPHYFTIEGVFEALQGSNLSVQHQVYAREPGGPEQATHFIRANGRIVYICGPLEMLHEILLQAQRENLTNGDYVFFYLDVFGESLRAGPTRATGRPWQDNRTREQAQALREAFQTVLVITYREPPNPEYQEFQNRLLIRAREDFGVELGPSLMNLIAGCFYDGILLYAEVLNETIQEGGTREDGLRIVEKMQGRRYHGVTGLVVMDKNNDRETDFVLWAMGDLDSGDFQPAAHYSGAEKQIWWTGRPIPWVKGAPPSDNPPCAFDLDDPSCDKTPLSTLAIVALGTGITFIMFGVSSFLIFRKLMLEKELASMLWRIRWEELQFGNSERYHKGAGSRLTLSLRGSSYGSLMTAHGKYQIFANTGHFKGNVVAIKHVNKKRIELTRQVLFELKHMRDVQFNHLTRFIGACIDPPNICIVTEYCPRGSLQDILENDSINLDWMFRYSLINDLVKGMAFLHNSIISSHGSLKSSNCVVDSRFVLKITDYGLASFRSTAEPDDSHALYAKKLWTAPELLSGNPLPTTGMQKADVYSFGIILQEIALRSGPFYLEGLDLSPKEIVQKVRNGQRPYFRPSIDRTQLNEELVLLMERCWAQDPAERPDFGQIKGFIRRFNKEGGTSILDNLLLRMEQYANNLEKLVEERTQAYLEEKRKAEALLYQILPHSVAEQLKRGETVQAEAFDSVTIYFSDIVGFTALSAESTPMQVVTLLNDLYTCFDAIIDNFDVYKVETIGDAYMVVSGLPGRNGQRHAPEIARMALALLDAVSSFRIRHRPHDQLRLRIGVHTGKADSHSSPSLHLSQTLPTCFFSKGQSVLGLLA

SEQ ID NO: 24992 - protein, 176 aa, Homo sapiens
VLTRVRGSRGSGKMAAAVVLAAGLRAARRAVAATGVRGGQVRGAAGVTDGNEVAKAQQATPGGAAPTIFSRILDKSLPADILYEDQQCLVFRDVAPQAPVHFLVIPKKPIPRISQAEEEDQQLLGHLLLVAKQTAKAEGLGDGYRLVINDGKLGAQSVYHLHIHVLGGRQLQWPPG

SEQ ID NO: 24993 - protein, 182 aa, Homo sapiens
LQRQWGESCSEARSNGVAGLARPPLPRFPAPGVPTHGRPRSRVLTRVRGAAGVTDGNEVAKAQQATPGGAAPTIFSRILDKSLPADILYEDQQCLVFRDVAPQAPVHFLVIPKKPIPRISQAEEEDQQLLGHLLLVAKQTAKAEGLGDGYRLVINDGKLGAQSVYHLHIHVLGGRQLQWPPG

SEQ ID NO: 24994 - protein, 148 aa, Homo sapiens
VLTRVRGSRGSGKMAAAVVLAAGLRAARRAVAATGVRGGQVRGAAGVTDGNEVAKAQQATPGGAAPTIFSRILDKSLPADILYEDQQCLVFRDVAPQAPVHFLVIPKKPIPRISQAEEEDQQLLGHLLLVAKQTAKAEGLGDGYRLGE

SEQ ID NO: 24995 - protein, 94 aa, Homo sapiens
VAKAQQATPGGAAPTIFSRILDKSLPADILYEDQQCLVFRDVAPQAPVHFLVIPKKPIPRISQAEEEDQQVGRTGPGFGWEEPLDPARGLAPYE

SEQ ID NO: 24996 - protein, 639 aa, Homo sapiens
LPPALLLLLLFSVLGPGAGGLFLTDYSTCSPRKLSPFRSFASTELFHFHVPEDTFLAVWNLIIFKEQGGTFGDHCPDQSVTVYFRSGAPPVINPLHTHFPGDTAVPGVFSLTLSWTLPNRTSGIFNVSSPLPGDWFLAAHLPQAHGHISVKGLQDECQYLLQPQLIVRRLLDVAVLVPGRPSEQTLSPHNRSALYKVFVPSFTYRVSAQLVCVGGRGVSACPLSLRLRPKAPPLHNSSSVACGGASGCQLELALPPWGHWVYVRVETSSRGPGRTIRFQLCVRLQECPQPGLLRALVPGAAMNMPQSLGNQPLPPEPPSLGTPAEGPGTTSPPEHCWPVRPTLRNELDTFSVHFYIFFGPSVALPPERPAVFAMRLLPVLDSGGVLSLELQLNASSVRQENVTVFGCLTHEVPLSLGDAAVTCSKESLAGFLLSVSATTRVARLRIPFPQTGTWFLALRSLCGVGPRFVRCRNATAEVRMRTFLSPCVDDCGPYGQCKLLRTHNYLYAACECKAGWRGWGCTDSADALTYGFQLLSTLLLCLSNLMFLPPVVLAIRSRYVLEAAVYTFTMFFSTVCGGVCILSLGACAWWWVTVCISTTFSEGLGMSVPSLCLLQTETAVLPKLSCIDNGHFCKTHWSK

SEQ ID NO: 24997 - protein, 201 aa, Homo sapiens
LSGVCWTSLCWFLAGPQSKPSPHTIAQPCTKCPQPGLLRALVPGAAMNMPQSLGNQPLPPEPPSLGTPAEGPGTTSPPEHCWPVRPTLRNELDTFSVHFYIFFGPSVALPPERPAVFAMRLLPVLDSGGVLSLELQLNASSVRQENVTVFGCLTHEVPLSLGDAAVTCSKGEVRNGGGEEAAVWGWWWRAEVKVGRDGMEE

SEQ ID NO: 24998 - protein, 72 aa, Homo sapiens
VVIVFYGTLFFMYGKPKSKDSMGADKEDLSDKLIPLFYGVVTPMLNPIIYSLRNKDVKAAVRRLLRPKGFTQ

SEQ ID NO: 24999 - protein, 77 aa, Homo sapiens
LEPPGPDMATVRASLRGALLLLLAVAGVAEVAGGLAPGSAGALCCNHSKDNQMCRDVCEQHSWILPSQLFADFLLKK

SEQ ID NO: 25000 - protein, 232 aa, Homo sapiens
LEPPGPDMATVRASLRGALLLLLAVAGVAEVAGGLAPGSAGALCCNHSKDNQMCRDVCEQIFSSKSESRLKHLLQRAPDYCPETMVEIWNCMNSSLPGVFKKSDGWVGLGCCELAIALECRQACKQASSKNDISKVCRKEYENALFSCISRNEMGSVCCSYAGHHTNCREYCQAIFRTDSSPGPSQIKAVENYCASISPQLIHCVNNYTQSYPMRNPTDMFEFFANEQLLLL

SEQ ID NO: 25001 - protein, 192 aa, Homo sapiens
VAAGRGVGGSVGFCLTVGVRAVQLPAMAELDPFGAPAGAPGGPALGNGVAGAGEEDPAAAFLAQQESEIAGIENDEAFAILDGGAPGPQPHGEPPGGPDANSRKQEAEWKEKAIKELEEWYARQDEQLQKTKANNRAAEEAFVNDIDESSPGTEWERVARLCDFNPKSSKQAKDVSRMRSVLISLKQAPLVH

SEQ ID NO: 25002 - protein, 256 aa, Homo sapiens
VAAGRGVGGSVGFCLTVGVRAVQLPAMAELDPFGAPAGAPGGPALGNGVAGAGEEDPAAAFLAQQESEIAGIENDEAFAILDGGAPGPQPHGEPPGGPDAVDGVMNGEYYQESNGPTDSYAAISQVDRLQSEPESIRKWREEQMERLEALDANSRKQEAEWKEKAIKELEEWYARQDEQLQKTKANNSTNINHPCYSLEQAAEEAFVNDIDESSPGTEWERVARLCDFNPKSSKQAKDVSRMRSVLISLKQAPLVH

SEQ ID NO: 25003 - protein, 274 aa, Homo sapiens
VAAGRGVGGSVGFCLTVGVRAVQLPAMAELDPFGAPAGAPGGPALGNGVAGAGEEDPAAAFLAQQESEIAGIENDEAFAILDGGAPGPQPHGEPPGGPDAVDGVMNGEYYQESNGPTDSYAAISQVDRLQSEPESIRKWREEQMERLEALDANSRKQEAEWKEKAIKELEEWYARQDEQLQKTKANNRVADEAFYKQPFADVIGYVTNINHPCYSLEQAAEEAFVNDIDESSPGTEWERVARLCDFNPKSSKQAKDVSRMRSVLISLKQAPLVH

SEQ ID NO: 25004 - protein, 244 aa, Homo sapiens
VAAGRGVGGSVGFCLTVGVRAVQLPAMAELDPFGAPAGAPGGPALGNGVAGAGEEDPAAAFLAQQESEIAGIENDEAFAILDGGAPGPQPHGEPPGGPDAVDGVMNGEYYQESNGPTDSYAAISQVDRLQSEPESIRKWREEQMERLEALDANSRKQEAEWKEKAIKELEEWYARQDEQLQKTKANNRAAEEAFVNDIDESSPGTEWERVARLCDFNPKSSKQAKDVSRMRSVLISLKQAPLVH

SEQ ID NO: 25005 - protein, 222 aa, Homo sapiens
VAAGRGVGGSVGFCLTVGVRAVQLPAMAELDPFGAPAGAPGGPALGNGVAGAGEEDPAAAFLAQQESEIAGIENDEAFAILDGGAPGPQPHGEPPGGPDANSRKQEAEWKEKAIKELEEWYARQDEQLQKTKANNRVADEAFYKQPFADVIGYVTNINHPCYSLEQAAEEAFVNDIDESSPGTEWERVARLCDFNPKSSKQAKDVSRMRSVLISLKQAPLVH

SEQ ID NO: 25006 - protein, 262 aa, Homo sapiens
VAAGRGVGGSVGFCLTVGVRAVQLPAMAELDPFGAPAGAPGGPALGNGVAGAGEEDPAAAFLAQQESEIAGIENDEAFAILDGGAPGPQPHGEPPGGPDAVDGVMNGEYYQESNGPTDSYAAISQVDRLQSEPESIRKWREEQMERLEALDANSRKQEAEWKEKAIKELEEWYARQDEQLQKTKANNRVADEAFYKQPFADVIGYVAAEEAFVNDIDESSPGTEWERVARLCDFNPKSSKQAKDVSRMRSVLISLKQAPLVH

SEQ ID NO: 25007 - protein, 286 aa, Homo sapiens
VAAGRGVGGSVGFCLTVGVRAVQLPAMAELDPFGAPAGAPGGPALGNGVAGAGEEDPAAAFLAQQESEIAGIENDEAFAILDGGAPGPQPHGEPPGGPDAVDGVMNGEYYQESNGPTDSYAAISQVDRLQSEPESIRKWREEQMERLEALDANSRKQEAEWKEKAIKELEEWYARQDEQLQKTKANNRVSLLPRLECNGVISAHCNLCLPGSSNSPASASRGAGITDMCHRARLIFVFLVEMGFHHVGQAGLKILTSNDLPASARARITGRWKGVKDVAMYVPSLP

SEQ ID NO: 25008 - protein, 769 aa, Homo sapiens
LLIISNHTRVQSSCFGMETYGYLQRESCFQGPHELYFKNLSKRNKQIMEKNGNNRKLRVCVATCNRADYSKLAPIMFGIKTEPEFFELDVVVLGSHLIDDYGNTYRMIEQDDFDINTRLHTIVRGEDEAAMVESVGLALVKLPDVLNRLKPDIMIVHGDRFDALALATSAALMNIRILHIEGGEVSGTIDDSIRHAITKLAHYHVCCTRSAEQHLISMCEDHDRILLAGCPSYDKLLSAKNKDYMSIIRMWLGDDVKSKDYIVALQHPVTTDIKHSIKMFELTLDALISFNKRTLVLFPNIDAGSKEMVRVMRKKGIEHHPNFRAVKHVPFDQFIQLVAHAGCMIGNSSCGVREVGAFGTPVINLGTRQIGRETGENVLHVRDADTQDKILQALHLQFGKQYPCSKIYGDGNAVPRILKFLKSIDLQEPLQKKFCFPPVKENISQDIDHILETLSALAVDLGGTNLRVAIVSMKGEIVKKYTQFNPKTYEERINLILQMCVEAAAEAVKLNCRILGVGISTGGRVNPREGIVLHSTKLIQEWNSVDLRTPLSDTLHLPVWVDNDGNCAALAERKFGQGKGLENFVTLITGTGIGGGIIHQHELIHGSSFCAAELGHLVVSLDGPDCSCGSHGCIEAYASGMALQREAKKLHDEDLLLVEGMSVPKDEAVGALHLIQAAKLGNAKAQSILRTAGTALGLGVVNILHTMNPSLVILSGVLASHYIHIVKDVIRQQALSSVQDVDVVVSDLVDPALLGAASMVLDYTTRRIY

SEQ ID NO: 25009 - protein, 103 aa, Homo sapiens
LMDSSILPDECGCDTAYIKTVMIALILKFIGTTNLFLKSYLKTNISLFLNKRYYFVYESKSSPSVIMLLSFLIMWFCILIIVDFLRFTSICECKLLTMSLCNV

SEQ ID NO: 25010 - protein, 9 aa, Homo sapiens
LDFWMLVYF

SEQ ID NO: 25011 - protein, 54 aa, Homo sapiens
LSSPLPVPLRVLVPVWCFLFAATAVSISGHRNQSETIASAIKTIVHHGGTHGYL

SEQ ID NO: 25012 - protein, 20 aa, Homo sapiens
MLERQISWLKKRSTQASQHV

SEQ ID NO: 25013 - protein, 167 aa, Homo sapiens
LGSRVFKSALVAAAVLTPVLGGQTGEMAAEVLPSARWQYCGAPDGSQRAVLVQFSNGKLQSPGNMRFTLYENKDSTNPRKRNQRILAAETDRLSYVGNNFGTGALKCNTLCRHFVGILNKTSGQMEVYDAELFNMQPLFSGLSPRKQNYFLERAKDLFSNPVSATTW

SEQ ID NO: 25014 - protein, 445 aa, Homo sapiens
LGSRVFKSALVAAAVLTPVLGGQTGEMAAEVLPSARWQYCGAPDGSQRAVLVQFSNGKLQSPGNMRFTLYENKDSTNPRKRNQRILAAETDRLSYVGNNFGTGALKCNTLCRHFVGILNKTSGQMEVYDAELFNMQPLFSDVSVESELALESQTKTYREKMDSCIEAFGTTKQKRALNTRRMNRVGNESLNRAVAKAAETIIDTKGVTALVSDAIHNDLQDDSLYLPPCYDDAAKPEDVYKFEDLLSPAEYEALQSPSEAFRNVTSEEILKMIEENSHCTFVIEALKSLPSDVESRDRQARCIWFLDTLIKFRAHRVVKRKSALGPGVPHIINTKLLKHFTCLTYNNGRLRNLISDSMKAKITAYVIILALHIHDFQIDLTVLQRDLKLSEKRMMEIAKAMRLKISKRRVSVAAGSEEDHKLGTLSLPLPPAQTSDRLAKRRKIT

SEQ ID NO: 25015 - protein, 972 aa, Homo sapiens
MDIKFCLLRTSLALVTMEAGGLPLELWRMILAYLHLPDLGRCSLVCRAWYELILSLDSTRWRQLCLGCTECRHPNWPNQPDVEPESWREAFKQHYLASKTWTKNALDLESSICFSLFRRRRERRTLSVGPGREFDSLGSALAMASLYDRIVLFPGVYEEQGEIILKVPVEIVGQGKLGEVALLASIDQHCSTTRLCNLVFTPAWFSPIMYKTTSGHVQFDNCNFENGHIQVHGPGTCQVKFCTFKNTHIFLHNVPLCVLENCEFVGSENNSVTVEGHPSADKNWAYKYLLGLIKSSPTFLPTEDSDFLMSLDLESRDQAWSPKTCDIVIEGSQSPTSPASSSPKPGSKAGSQEAEVGSDGERVAQTPDSSDGGLSPSGEDEDEDQLMYRLSYQVQGPRPVLGGSFLGPPLPGASIQLPSCLVLNSLQQELQKDKEAMALANSVQGCLIRKCLFRDGKGGVFVCSHGRAKMEGNIFRNLTYAVRCIHNSKIIMLRNDIYRCRASGIFLRLEGGGLIAGNNIYHNAEAGVDIRKKSNPLILCNQIHHGLRSGIVVLGNGKGIIRNNQIFSNKEAGIYILYHGNPVVSGNHIFKGRAAGIAVNENGKGLITENVIRENQWGGVDIRRGGIPVLRSNLICFGYSDGVVVGDEGKGLIEGNTIYANKGCGVWMMSSSLPHVTSNHVSYNGLYGVAVFSQKDGSSELPRGHRAQENFSEDGDAILWETELEKEDDPLRRPITIALVESNSINHNGASGLYVQSSEALHVITNVIHANGDRGITVAQSSQPTRVANNSISCNRQSGVKVEAQCKVELRGNGIYDNRGHGIITKGDSTIVIENDIIGNRGSGLQLLPRSDTKVIKNRIHSFRAYGIAVRGRAKALVQENIIFQGKTSKTIFQQISNNRECIMQNNKFLVFKKKSDTWRLVNPPARPHLENSLRRPSAAHNGQKVTAMATRITARVEGGYHSNRSVFCTIL

SEQ ID NO: 25016 - protein, 100 aa, Homo sapiens
LANFVFLVEMGFLHVGQAGLKLLTSGDLPTSASQSAGIIGVSHRAGCLKSIYLTFPTRKFFVQMSICDFKVEIEGKIGFISVPISLQSILHIVNNFFFFF

SEQ ID NO: 25017 - protein, 531 aa, Homo sapiens
VILNRSPSLLQSVSMLRFLAPRLLSLQGRTARYSSAAALPSPILNPDIPYNQLFINNEWQDAVSKKTFPTVNPTTGEVIGHVAEGDRADVDRAVKAAREAFRLGSPWRRMDASERGRLLNRLADLVERDRVYLASLETLDNGKPFQESYALDLDEVIKVYRYFAGWADKWHGKTIPMDGQHFCFTRHEPVGVCGQIIPWNFPLVMQGWKLAPALATGNTVVMKVAEQTPLSALYLASLIKEAGFPPGVVNIITGYGPTAGAAIAQHVDVDKVAFTGSTEVGHLIQKAAGDSNLKRVTLELGGKSPSIVLADADMEHAVEQCHEALFFNMGQCCCAGSRTFVEESIYNEFLERTVEKAKQRKVGNPFELDTQQGPQVDKEQFERVLGYIQLGQKEGAKLLCGGERFGERGFFIKPTVFGGVQDDMRIAKEEIFGPVQPLFKFKKIEEVVERANNTRYGLAAAVFTRDLDKAMYFTQALQAGTVWVNTYNIVTCHTPFGGFKESGNGRELGEDGLKAYTEVKTVTIKVPQKNS

SEQ ID NO: 25018 - protein, 116 aa, Homo sapiens
VLLIHSSALLFAILECISGKCAVASMFWVDAELGSDIYLDGIITIVDSKYGLKHLTEEKPDGLINEATRQVALADIVLINKTDLVPEEDVKKLRTTIRSINGLGQILETQRSRLSS

SEQ ID NO: 25019 - protein, 114 aa, Homo sapiens
LLLIHSSALLFAILECISGAVASMFWVDAELGSDIYLDGIITIVDSKYGLKHLTEEKPDGLINEATRQVALADIILINKTDLVPEEDVKKLRTTIRSINGLGQILETQRSRLSS

SEQ ID NO: 25020 - protein, 99 aa, Homo sapiens
LWQVLMIITCVFICSLLHSGCSWSQGLRIIFSDASRLIFRLSSSSGVRATLRLYAESYERDPSGHDQEPQAVLSPLIAIALKISQIHERTGRRGPTVIT

SEQ ID NO: 25021 - protein, 105 aa, Homo sapiens
LECQKAECLFDEFEEIWNFGPPRSGVLTVKLGGDLGTYVINKQTPNKQIWLSSPSSGPKRYDWTGKNWVYSHDGVSLHELLAAELTKALKTKLDLSSLAYSGKDA

SEQ ID NO: 25022 - protein, 296 aa, Homo sapiens
LRVGSAPRPRPLGRRAVPRRAALVVRGQGRASRTSAATAKFVRAAWAAVARTMSAAAYMDFVAAQCLVSISNRAAVPEHGVAPDAERLRLPEREVTKEHGDPGDTWKDYCTLVTIAKSLLDLNKYRPIQTPSVCSDSLESPDEDMGSDSDVTTESGSSPSHSPEERQDPGSAPSPLSLLHPGVAAKGKHASEKRHKCPYSGCGKVYGKSSHLKAHYRVHTGERPFPCTWPDCLKKFSRSDELTRHYRTHTGEKQFRCPLCEKRFMRSDHLTKHARRHTEFHPSMIKRSKKALANAL

SEQ ID NO: 25023 - protein, 264 aa, Homo sapiens
LVSVLCRLLFLYLKAKSHRHGHSYCSSQGCERVKIQAATDSKDISNCMAKAYPQYYRKPSVVKRMPAMLTGLCQGCGTRQVVFTSDPHKSYLPVQFQSPDKAETQRGDPSVISVNGTDFTFRSAGVLLLVVDPCSVPFRLTEKTVFPLADVSRIEEYLKTGIPPRSIVLLSTRGEIKQLNISHLLVPLGLAKPAHLYDKGSTIFLGFSGNFKPSWTKLFTSPAGQGLGVLEQFIPLQLDEYGCPRATTVRRRDLELLKQASKAH

SEQ ID NO: 25024 - protein, 37 aa, Homo sapiens
VTMFTNQGTVIHFNHPKVQASLAANTSPLQAMLGQSS

SEQ ID NO: 25025 - protein, 419 aa, Homo sapiens
VVVPPEIVFLEEASQQEKLAKEWCFKPCEIRELSHHEFFMPGLVDTHIHASQYSFAGSSIDLPLLEWLTKYTFPAEHRFQNIDFAEEVYTRVVRRTLKNGTTTACYFATIHTDSSLLLADITDKFGQRAFVGKVCMDLNDTFPEYKETTEESIKETERFVSEMLQKNYSRVKPIVTPRFSLSCSETLMGELGNIAKTRDLHIQSHISENRDEVEAVKNLYPSYKNYTSVYDKNNLLTNKTVMAHGCYLSAEELNVFHERGASIAHCPNSNLSLSSGFLNVLEVLKHEVKIGLGTDVAGGYSYSMLDAIRRAVMVSNILLINKVNEKSLTLKEVFRLATLGGSQALGLDGEIGNFEVGKEFDAILINPKASDSPIDLFYGDFFGDISEAVIQKFLYLGDDRNIEEVYVGGKQVVPFSSSV

SEQ ID NO: 25026 - protein, 527 aa, Homo sapiens
LGAACRVPATARVSGGRTRPEPVSARQPPAAAESPAASPPRAPSSTSRPALRSAADMCAAQMPPLAHIFRGTFVHSTWTCPMEVLRDHLLGVSDSGKIVFLEEASQQEKLAKEWCFKPCEIRELSHHEFFMPGLVDTHIHASQYSFAGSSIDLPLLEWLTKYTFPAEHRFQNIDFAEEVYTRVVRRTLKNGTTTACYFATIHTDSSLLLADITDKFGQRAFVGKVCMDLNDTFPEYKETTEESIKETERFVSEMLQKNYSRVKPIVTPRFSLSCSETLMGELGNIAKTRDLHIQSHISENRDEVEAVKNLYPSYKNYTSVYDKNNLLTNKTVMAHGCYLSAEELNVFHERGASIAHCPNSNLSLSSGFLNVLEVLKHEVKIGLGTDVAGGYSYSMLDAIRRAVMVSNILLINKVNEKSLTLKEVFRLATLGGSQALGLDGEIGNFEVGKEFDAILINPKASDSPIDLFYGDFFGDISEAVIQKFLYLGDDRNIEEVYVGGKQVVPFSSSVKETIHLPASSPHPPPFP

SEQ ID NO: 25027 - protein, 49 aa, Homo sapiens
LRSAADMCAAQMPPLAHIFRGTFVHSTWTCPMEVLRDHLLGVSDSGKCF

SEQ ID NO: 25028 - protein, 460 aa, Homo sapiens
LRSAADMCAAQMPPLAHIFRGTFVHSTWTCPMEVLRDHLLGVSDSGKIVFLEEASQQEKLAKEWCFKPCEIRELSHHEFFMPGLVDTHIHASQYSFAGSSIDLPLLEWLTKYTFPAEHRFQNIDFAEEVYTRVVRRTLKNGTTTACYFATIHTDSSLLLADITDKFGQRAFVGKVCMDLNDTFPEYKETTEESIKETERFVSEMLQKNYSRVKPIVTPRFSLSCSETLMGELGNIAKTRDLHIQSHISENRDEVEAVKNLYPSYKNYTSVYDKNNLLTNKTVMAHGCYLSAEELNVFHERGASIAHCPNSNLSLSSGFLNVLEVLKHEVKIGLGTDVAGGYSYSMLDAIRRAVMVSNILLINKVNEKSLTLKEVFRLATLGGSQALGLDGEIGNFEVGKEFDAILINPKASDSPIDLFYGDFFGDISEAVIQKFLYLGDDRNIEEVYVGGKQVVPFSSSV

SEQ ID NO: 25029 - protein, 388 aa, Homo sapiens
VWLPLKSYKIRSPSLHCQCEIFREEFLFSSLQEGRDKDTFSKMAMVSEFLKQAWFIENEEQEYVQTVKSSKGGPGSAVSPYPTFNPSSDVAALHKAIMVKGVDEATIIDILTKRNNAQRQQIKAAYLQETGKPLDETLKKALTGHLEEVVLALLKTPAQFDADELRAAMKGLGTDEDTLIEILASRTNKEIRDINRVYREELKRDLAKDITSDTSGDFRNALLSLAKGDRSEDFGVNEDLADSDARALYEAGERRKGTDVNVFNTILTTRSYPQLRRVFQKYTKYSKHDMNKVLDLELKGDIEKCLTAIVKCATSKPAFFAEKLHQAMKGVGTRHKALIRIMVSRSEIDMNDIKAFYQKMYGISLCQAILDETKGDYEKILVALCGGN

SEQ ID NO: 25030 - protein, 104 aa, Homo sapiens
LQEGRDKDTFSKMAMVSEFLKQAWFIENEEQEYVQTVKSSKGGPGSAVSPYPTFNPSSDVAALHKAIMVKGVDEATIIDILTKRNNAQRQQIKAAYLQETGKVS

SEQ ID NO: 25031 - protein, 34 aa, Homo sapiens
VLSGIFGLSGVRAGSSFMTTRSGRAATPCEHKLK

SEQ ID NO: 25032 - protein, 100 aa, Homo sapiens
LSDFPIILTIHILLYQLCVSVNIKFPTCFDSTRVYQPPDSPGYFDGHVWPMYLKYRQEMQDITWEVVYLDGTKSEEDLFLQVYEDLIQELAKQKCLQVTA

SEQ ID NO: 25033 - protein, 255 aa, Homo sapiens
LRFGPPPPPTPLTPGTYFGCLRCPPAETQLLRRPAVFVGSAASGIRSGLWSASSGHWCAPAAGRAHAPVPRLVRGLGAASTAAPQDAQTGPQPIPRADCIMRHLPYFCRGQVVRGFGRGSKQLGIPTANFPEQVVDNLPADISTGIYYGWASVGSGDVHKMVVSIGWNPYYKNTKKSMETHIMHTFKEDFYGEILNVAIVGYLRPEKNFDSLESLISAIQGDIEEAKKRLELPEHLKIKEDNFFQVSKSKIMNGH

SEQ ID NO: 25034 - protein, 3089 aa, Homo sapiens
MEEFLQRAKSKLNRSKRLEKVHVVIGPKSCDLDSLISTFTYAYFLDKVSPPGVLCLPVLNIPRTEFNYFTETRFILEELNISESFHIFRDEINLHQLNDEGKLSITLVGSSVLASEDKTLESAVVKVINPVEQSDANVEFRESSSSLVLKEILQEAPELITEQLAHRLRGSILFKWMTMESEKISEKQEEILSILEEKFPNLPPREDIINVLQETQFSAQGLSIEQTMLKDLKELSDGEIKVAISTVSMNLENCLFHSNITSDLKAFTDKFGFDVLILFSSYLSEEQQPRRQIAVYSENMELCSQICCELEECQNPCLELEPFDCGCDEILVYQQEDPSVTCDQVVLVVKEVINRRCPEMVSNSRTSSTEAVAGSAPLSQGSSGIMELYGSDIEPQPSSVNFIENPPDLNDSNQAQVDANVDLVSPDSGLATIRSSRSSKESSVFLSDDSPVGEGAGPHHTLLPGLDSYSPIPEGAVAEEHAWSGEHGEHFDLFNFDPAPMASGQSQQSSHSADYSPADDFFPNSDLSEGQLPAGPEGLDGMGTNMSNYSSSSLLSGAGKDSLVEHDEEFVQRQDSPRDNSERNLSLTDFVGDESPSPERLKNTGKRIPPTPMNSLVESSPSTEEPASLYTEDMTQKATDTGHMGPPQTHARCSSWWGGLEIDSKNIADAWSSSEQESVFQSPESWKEHKPSSIDRRASDSVFQPKSLEFTKSGPWESEFGQPELGSNDIQDKNEESLPFQNLPMEKSPLPNTSPQGTNHLIEDFASLWHSGRSPTAMPEPWGNPTDDGEPAAVAPFPAWSAFGKEDHDEALKNTWNLHPTSSKTPSVRDPNEWAMAKSGFAFSSSELLDNSPSEINNEAAPEIWGKKNNDSRDHIFAPGNPSSDLDHTWTNSKPPKEDQNGLVDPKTRGKVYEKVDSWNLFEENMKKGGSDVLVPWEDSFLSYKCSDYSASNLGEDSVPSPLDTNYSTSDSYTSPTFAGDEKETEHKPFAKEEGFESKDGNSTAEETDIPPQSLQQSSRNRISSGPGNLDMWASPHTDNSSEINTTHNLDENELKTEHTDGKNISMEDDVGESSQSSYDDPSMMQLYNETNRQLTLLHSSTNSRQTAPDSLDLWNRVILEDTQSTATISDMDNDLDWDDCSGGAAIPSDGQTEGYMAEGSEPETRFTVRQLEPWGLEYQEANQVDWELPASDEHTKDSAPSEHHTLNEKSGQLIANSIWDSVMRDKDMSSFMLPGSSHITDSEQRELPPEIPSHSANVKDTHSPDAPAASGTSESEALISHLDKQDTERETLQSDAASLATRLENPGYFPHPDPWKGHGDGQSESEKEAQGATDRGHLDEEEVIASGVENASGISEKGQSDQELSSLVASEHQEICIKSGKISSLAVTFSPQTEEPEEVLEYEEGSYNLDSRDVQTGMSADNLQPKDTHEKHLMSQRNSGETTETSDGMNFTKYVSVPEKDLEKTEECNFLEPENVGGGPPHRVPRSLDFGDVPIDSDVHVSSTCSEITKNLDVKGSENSLPGAGSSGNFDRDTISSEYTHSSASSPELNDSSVALSSWGQQPSSGYQEENQGNWSEQNHQESELITTDGQVEIVTKVKDLEKNRINEFEKSFDRKTPTFLEIWNDSVDGDSFSSLSSPETGKYSEHSGTHQESNLIASYQEKNEHDISATVQPEDARVISTSSGSDDDSVGGEESIEEEIQVANCHVAEDESRAWDSLNESNKFLVTADPKSENIYDYLDSSEPAENENKSNPFCDNQQSSPDPWTFSPLTETEMQITAVEKEKRSSPETGTTGDVAWQISPKASFPKNEDNSQLEMLGFSADSTEWWKASPQEGRLIESPFERELSDSSGVLEINSSVHQNASPWGVPVQGDIEPVETHYTNPFSDNHQSPFLEGNGKNSHEQLWNIQPRQPDPDADKFSQLVKLDQIKEKDSREQTFVSAAGDELTPETPTQEQCQDTMLPVCDHPDTAFTHAEENSCVTSNVSTNEGQETNQWEQEKSYLGEMTNSSIATENFPAVSSPTQLIMKPGSEWDGSTPSEDSRGTFVPDILHGNFQEGGQLASAAPDLWIDAKKPFSLKADGENPDILTHCEHDSNSQASDSPDICHDSEAKQETEKHLSACMGPEVESSELCLTEPEIDEEPIYEPGREFVPSNAELDSENATVLPPIGYQADIKGSSQPASHKGSPEPSEINGDNSTGLQVSEKGASPDMAPILEPVDRRIPRIENVATSIFVTHQEPTPEGDGSWISDSFSPESQPGARALFDGDPHLSTENPALVPDALLASDTCLDISEAAFDHSFSDASGLNTSTGTIDDMSKLTLSEGHPETPVDGDLGKQDICSSEASWGDFEYDVMGQNIDEDLLREPEHFLYGGDPPLEEDSLKQSLAPYTPPFDLSYLTEPAQSAETIEEAGSPEDESLGCRAAEIVLSALPDRRSEGNQAETKNRLPGSQLAVLHIREDPESVYLPVGAGSNILSPSNVDWEVETDNSDLPAGGDIGPPNGASKEISELEEEKTIPTKEPEQIKSEYKEERCTEKNEDRHALHMDYILVNREENSHSKPETCEERESIAELELYVGSKETGLQGTQLASFPDTCQPASLNERKGLSAEKMSSKSDTRSSFESPAQDQSWMFLGHSEVGDPSLDARDSGPGWSGKTVEPFSELGLGEGPQLQILEEMKPLESLALEEASGPVSQSQKSKSRGRAGPDAVTLQAVTHDNEWEMLSPQPVQKNMIPDTEMEEETEFLELGTRISRPNGLLSEDVGMDIPFEEGVLSPSAADMRPEPPNSLDLNDTHPRRIKLTAPNINLSLDQSEGSILSDDNLDSPDEIDINVDELDTPDEADSFEYTGHEDPTANKDSGQESESIPEYTAEEEREDNRLWRTVVIGEQEQRIDMKVIEPYRRVISHGGYYGDGLNAIIVFAACFLPDSSRADYHYVMENLFLYVISTLELMVAEDYMIVYLNGATPRRRMPGLGWMKKCYQMIDRRLRKNLKSFIIVHPSWFIRTILAVTRPFISSKFSSKIKYVNSLSELSGLIPMDCIHIPESIIKLDEELREASEAAKTSCLYNDPEMSSMEKDIDLKLKEKP

SEQ ID NO: 25035 - protein, 124 aa, Homo sapiens
LPLSPGRGCRSGRVATQRSWVGAGGVSAAGIPRGRPRAMIDSVKLRRDSAADFFSHYEYLCALQNSVPLPAVRACLREGVLDFNADRLRGVDWAPLLSTLKINKDLPLVSIKSFFQPWLGDTGL

SEQ ID NO: 25036 - protein, 170 aa, Homo sapiens
LPLSPGRGCRSGRVATQRSWVGAGGVSAAGIPRGRPRAMIDSVKLRRDSAADFFSHYEYLCALQNSVPLPAVRACLREGVLDFNADRLRGVDWAPLLSTLKINKDLPLVSIKSFFQPWLGDTDATSGTGSQRKEEELSRNSRSSSEKKTKTGEYTKKHSDKQHPGKDLHS

SEQ ID NO: 25037 - protein, 744 aa, Homo sapiens
LPLSPGRGCRSGRVATQRSWVGAGGVSAAGIPRGRPRAMIDSVKLRRDSAADFFSHYEYLCALQNSVPLPAVRACLREGVLDFNADRLRGVDWAPLLSTLKINKDLPLVSIKSFFQPWLGDTGSDMNKFCRSRVPAIRYKDVTFQLCKALKGCLSISSVLKNLELNGLILRERDLTILAKGLNKSASLVHLSLANCPIGDGGLEIICQGIKSSITLKTVNFTGCNLTWQGADHMAKILKYQTMRRHEETWAESLRYRRPDLDCMAGLRRITLNCNTLIGDLGACAFADSLSEDLWLRALDLQQCGLTNEGAKALLEALETNTTLVVLDIRKNPLIDHSMMKAVIKKVLQNGRSAKSEYQWITSPSVKEPSKTAKQKRRTIILGSGHKGKATIRIVGLATKKPVSSGRKHSLGKEYYAPAPLPPGVSGFLPWRTAERAKRHRGFPLIKTRDICNQLQQPGFPVTVTVESPSSSEVEEVDDSSESVHEVPEKTSIEQEALQEKLEECLKQLKEERVIRLKVDKRVSELEHENAQLRNINFSLSEALHAQSLTNMILDDEGVLGSIENSFQKFHAFLDLLKDAGLGQLATMAGIDQSDFQLLGHPQMTSTVSNPPKEEKKALEDEKPEPKQNALGQMQNIQFQKITGDARIPLPLDSFPVPVSTPEGLGTSSNNLGVPATEQRQESFEGFIARMCSPSPDATSGTGSQRKEEELSRNSRSSSEKKTKTGEYTKKHSDKQHPGKDLHS

SEQ ID NO: 25038 - protein, 760 aa, Homo sapiens
LPLSPGRGCRSGRVATQRSWVGAGGVSAAGIPRGRPRAMIDSVKLRRDSAADFFSHYEYLCALQNSVPLPAVRACLREGVLDFNADRLRGVDWAPLLSTLKINKDLPLVSIKSFFQPWLGDTGSDMNKFCRSRVPAIRYKDVTFQLCKALKGCLSISSVLKNLELNGLILRERDLTILAKGLNKSASLVHLSLANCPIGDGGLEIICQGIKSSITLKTVNFTGCNLTWQGADHMAKILKYQTMRRHEETWAESLRYRRPDLDCMAGLRRITLNCNTLIGDLGACAFADSLSEDLWLRALDLQQCGLTNEGAKALLEALETNTTLVVLDIRKNPLIDHSMMKAVIKKVLQNGRSAKSEYQWITSPSVKEPSKTAKQKRRTIILGSGHKGKATIRIVGLATKKPVSSGRKHSLGKEYYAPAPLPPGVSGFLPWRTAERAKRHRGFPLIKTRDICNQLQQPGFPVTVTVESPSSSEVEEVDDSSESVHEVPEKTSIEQEALQEKLEECLKQLKEERVIRLKVDKRVSELEHENAQLRNINFSLSEALHAQSLTNMILDDEGVLGSIENSFQKFHAFLDLLKDAGLGQLATMAGIDQSDFQLLGHPQMTSTVSNPPKEEKKALEDEKPEPKQNALGQMQNIQVSICMQSAYNEGTLMKFQKITGDARIPLPLDSFPVPVSTPEGLGTSSNNLGVPATEQRQESFEGFIARMCSPSPDATSGTGSQRKEEELSRNSRSSSEKKTKTGEYTKKHSDKQHPGKDLHS

SEQ ID NO: 25039 - protein, 743 aa, Homo sapiens
LPLSPGRGCRSGRVATQRSWVGAGGVSAAGIPRGRPRAMIDSVKLRRDSAADFFSHYEYLCALQNSVPLPAVRACLREGVLDFNADRLRGVDWAPLLSTLKINKDLPLVSIKSFFQPWLGDTGSDMNKFCRSRVPAIRYKDVTFQLCKALKGCLSISSVLKNLELNGLILRERDLTILAKGLNKSASLVHLSLANCPIGDGGLEIICQGIKSSITLKTVNFTGCNLTWQGADHMAKILKYQTMRRHEETWAESLRYRRPDLDCMAGLRRITLNCNTLIGDLGACAFADSLSEDLWLRALDLQQCGLTNEGAKALLEALETNTTLVVLDIRKNPLIDHSMMKAVIKKVLQNGRSAKSEYQWITSPSVKEPSKTAKQKRRTIILGSGHKGKATIRIGLATKKPVSSGRKHSLGKEYYAPAPLPPGVSGFLPWRTAERAKRHRGFPLIKTRDICNQLQQPGFPVTVTVESPSSSEVEEVDDSSESVHEVPEKTSIEQEALQEKLEECLKQLKEERVIRLKVDKRVSELEHENAQLRNINFSLSEALHAQSLTNMILDDEGVLGSIENSFQKFHAFLDLLKDAGLGQLATMAGIDQSDFQLLGHPQMTSTVSNPPKEEKKALEDEKPEPKQNALGQMQNIQFQKITGDARIPLPLDSFPVPVSTPEGLGTSSNNLGVPATEQRQESFEGFIARMCSPSPDATSGTGSQRKEEELSRNSRSSSEKKTKTGEYTKKHSDKQHPGKDLHS

SEQ ID NO: 25040 - protein, 727 aa, Homo sapiens
LPLSPGRGCRSGRVATQRSWVGAGGVSAAGIPRGRPRAMIDSVKLRRDSAADFFSHYEYLCALQNSVPLPAVRACLREGVLDFNADRLRGVDWAPLLSTLKINKDLPLVSIKSFFQPWLGDTGSDMNKFCRSRVPAIRYKDVTFQLCKALKGCLSISSVLKNLELNGLILRERDLTILAKGLNKSASLVHLSLANCPIGDGGLEIICQGIKSSITLKTVNFTGCNLTWQGADHMAKILKYQTMRRHEETWAESLRYRRPDLDCMAGLRRITLNCNTLIGDLGACAFADSLSEDLWLRALDLQQCGLTNEGAKALLEALETNTTLVVLDIRKNPLIDHSMMKAVIKKVLQNGRSAKSEYQWITSPSVKEPSKTAKQKRRTIILGSGHKGKATIRIGLATKKPVSSGRKHSLGKEYYAPAPLPPGVSGFLPWRTAERAKRHRGFPLIKTRDICNQLQQPGFPVTVTVESPSSSEVEEVDDSSESVHEVPEKTSIEQEALQEKLEECLKQLKEERVIRLKVDKRVSELEHENAQLRNINFSLSEALHAQSLTNMILDDEGVLGSIENSFQKFHAFLDLLKDAGLGQLATMAGIDQSDFQLLGHPQMTSTVSNPPKEEKKALEDEKPEPKQNALGQMQNIQFQKITGDARIPLPLDSFPVPVSTPEGLGTSSNNLGVPATEQRQESFEGFIARMCSPSPDATSGTGSQRKEEELSRNSRSSSEKKTKTESH

SEQ ID NO: 25041 - protein, 333 aa, Homo sapiens
LTHRPGRRTMDAPRQVVNFGPGPAKLPHSVLLEIQKELLDYKGVGISVLEMSHRSSDFAKIINNTENLVRELLAVPDNYKVIFLQGGGCGQFSAVPLNLIGLKAGRCADYVVTGAWSAKAAEEAKKFGTINIVHPKLGSYTKIPDPSTWNLNPDASYVYYCANETVHGVEFDFIPDVKGAVLVCDMSSNFLSKPVDVSKFGVIFAGAQKNVGSAGVTVVIVRDDLLGFALRECPSVLEYKVQAGNSSLYNTPPCFSIYVMGLVLEWIKNNGGAAAMEKLSSIKSQTIYEIIDNSQGFYVSVGGIRASLYNAVTIEDVQKLAAFMKKFLEMHQL

SEQ ID NO: 25042 - protein, 31 aa, Homo sapiens
VFGLLAAFFPLSHTLVYYFEVVFAEFERREN

SEQ ID NO: 25043 - protein, 811 aa, Homo sapiens
LLGAGPNRRRREPLGHPRRSSPRPTFPQVAEPAGRAKLAGPPGGSRWPRPSREGPAPRGAPEPSRPPPPGGMEADGDGEELARLRSVFAACDANRSGRLEREEFRALCTELRVRPADAEAVFQRLDADRDGAITFQEFARGFLGSLRGGRRRDWGPLDPAPAVSEAGPETHDSEEDEGDEDAAAALATSCGPASPGRAWQDFQARLGDEAKFIPREEQVSTLYQNINLVEPRLIQPYEHVIKNFIREIRLQSTEMENLAIAVKRAQDKAAMQLSELEEEMDQRIQAAEHKTRKDEKRKAEEALSDLRRQYETEVGDLQVTIKKLRKLEEQSKRVSQKEDVAALKKQIYDLSMENQKVKKDLLEAQTNIAFLQSELDALKSDYADQSLNTERDLEIIRAYTEDRNSLERQIEILQTANRKLHDSNDGLRSALENSYSKFNRSLHINNISPGNTISRSSPKFIGHSPQPLGYDRSSRSSYVDEDCDSLALCDPLQRTNCEVDSLPESCFDSGLSTLRDPNEYDSEVEYKHQRGFQRSHGVQESFGGDASDTDVPDIRDEETFGLEDVASVLDWKPQGSVSEGSIVSSSRKPISALSPQTDLVDDNAKSFSSQKAYKIVLAGDAAVGKSSFLMRLCKNEFRENISATLGVDFQMKTLIVDGERTVLQLWDTAGQERFRSIAKSYFRKADGVLLLYDVTCEKSFLNIREWVDMIEDAAHETVPIMLVGNKADIRDTAATEGQKCVPGHFGEKLAMTYGALFCETSAKDGSNIVEAVLHLAREVKKRTDKDDSRSITNLTGTNSKKSPQMKNCCNG

SEQ ID NO: 25044 - protein, 22 aa, Homo sapiens
LGCQLLVRPRTLQFCSARIYNN

SEQ ID NO: 25045 - protein, 160 aa, Homo sapiens [sequence omitted]

SEQ ID NO: 25046 - protein, 415 aa, Homo sapiens
LFISRKPPQPERKGTFCHQRGISQRRAWIYEDTHARSGQDLDKLFHRLRVRRSPRLVSFPLLSRRPPLPAMVAALLGGGGEARGGTVPGAWLCLMALLQLLGSAPRGSGLAHGRRLICWQALLQCQGEPECSYAYNQYAEACAPVLAQHGGGDAPGAAAAAFPASAASFSSRWRCPSHCISALIQLNHTRRGPALEDCDCAQDENCKSTKRAIEPCLPRTSGGGAGGPGAGGVMGCTEARRRCDRDSRCNLALSRYLTYCGKVFNGLRCTDECRTVIEDMLAMPKAALLNDCVCDGLERPICESVKENMARLCFGAELGNGPGSSGSDGGLDDYYDEDYDDEQRTGGAGGEQPLDDDDGVPHPPRPGSGAAASGGRGDLPYGPGRRSSGGGGRLAPRGAWTPLASILLLLLGPLF

SEQ ID NO: 25047 - protein, 27 aa, Homo sapiens
LIRKYGLNMCRQCFRQYAKDIGFIKLD

SEQ ID NO: 25048 - protein, 38 aa, Homo sapiens
MNPTLILAAFCLGIASATLTFDHSLEAQWTKWKAAMVA

SEQ ID NO: 25049 - protein, 373 aa, Homo sapiens
LLLGNSVRAQISVGWRRSGVWKFRGTGAQAHDCSGMDQYCILGRIGEGAHGIVFKAKHVEPRVGWQCLPSILQTGEIVALKKVALRRLEDGFPNQALREIKALQEMEDNQYVVQLKAVFPHGGGFVLAFEFMLSDLAEVVRHAQRPLAQAQVKSYLQMLLKGVAFCHANNIVHRDLKPANLLISASGQLKIADFGLARVFSPDGSRLYTHQVATRSVGCIMGELLNGSPLFPGKNDIEQLCYVLRILGTPNPQVWPELTELPDYNKISFKEQVPMPLEEVLPDVSPQALDLLGQFLLYPPHQRIAASKALLHQYFFTAPLPAHPSELPIPQRLGGPAPKAHPGPPHIHDFHVDRPLEESLLNPELIRPFILEG

SEQ ID NO: 25050 - protein, 360 aa, Homo sapiens
LLLGNSVRAQISVGWRRSGVWKFRGTGAQAHDCSGMDQYCILGRIGEGAHGIVFKAKHVETGEIVALKKVALRRLEDGFPNQALREIKALQEMEDNQYVVQLKAVFPHGGGFVLAFEFMLSDLAEVVRHAQRPLAQAQVKSYLQMLLKGVAFCHANNIVHRDLKPANLLISASGQLKIADFGLARVFSPDGSRLYTHQVATRSVGCIMGELLNGSPLFPGKNDIEQLCYVLRILGTPNPQVWPELTELPDYNKISFKEQVPMPLEEVLPDVSPQALDLLGQFLLYPPHQRIAASKALLHQYFFTAPLPAHPSELPIPQRLGGPAPKAHPGPPHIHDFHVDRPLEESLLNPELIRPFILEG

SEQ ID NO: 25051 - protein, 381 aa, Homo sapiens
LLLGNSVRAQISVGWRRSGVWKFRGTGAQAHDCSGMDQYCILGRIGEGAHGIVFKAKHVETGEIVALKKVALRRLEDGFPNQALREIKALQEMEDNQYVVQLKAVFPHGGGFVLAFEFMLSDLAEVVRHAQRPLAQAQVKSYLQMLLKGVAFCHANNIVHRDLKPANLLISASGQLKIADFGLARVFSPDGSRLYTHQVATRWYRAPELLYGARQYDQGVDLWSVGCIMGELLNGSPLFPGKNDIEQLCYVLRILGTPNPQVWPELTELPDYNKISFKEQVPMPLEEVLPDVSPQALDLLGQFLLYPPHQRIAASKALLHQYFFTAPLPAHPSELPIPQRLGGPAPKAHPGPPHIHDFHVDRPLEESLLNPELIRPFILEG

SEQ ID NO: 25052 - protein, 202 aa, Homo sapiens
LLLGNSVRAQISVGWRRSGVWKFRGTGAQAHDCSGMDQYCILGRIGEGAHGIVFKAKHVETGEIVALKKVALRRLEDGFPNQALREIKALQEMEDNQYVVQLKAVFPHGGGFVLAFEFMLSDLAEVVRHAQRPLAQAQVKSYLQMLLKGVAFCHANNIVHRDLKPANLLISASGQLKIADFGLARVFSPDGSRLYTHQVATR

SEQ ID NO: 25053 - protein, 27 aa, Homo sapiens
MPVAPAPSADGGALFQRPRWSLACTPC

SEQ ID NO: 25054 - protein, 26 aa, Homo sapiens
MVAPSFYLLAGALFQRPRWSLACTPC

SEQ ID NO: 25055 - protein, 388 aa, Homo sapiens
LELIVCECQVMATALPPRLQPVRGNETLREHYQYVGKLAGRLKEASEGSTLTTVLFLVICSFIVLENLMVLIAIWKNNKFHNRMYFFIGNLALCDLLAGIAYKVNILMSGKKTFSLSPTVWFLREGSMFVALGASTCSLLAIAIERHLTMIKMRPYDANKRHRVFLLIGMCWLIAFTLGALPILGWNCLHNLPDCSTILPLYSKKYIAFCISIFTAILVTIVILYARIYFLVKSSSRKVANHNNSERSMALLRTVVIVVSVFIACWSPLFILFLIDVACRVQACPILFKAQWFIVLAVLNSAMNPVIYTLASKEMRRAFFRLVCNCLVRGRGARASPIQPALDPSRSKSSSSNNSSHSPKVKEDLPHTAPSSCIMDKNAALQNGIFCN

SEQ ID NO: 25056 - protein, 104 aa, Homo sapiens
LGWTWFCLLRPLFALSFHFLQRASRMAHKQIYYSDKYFDEHYEYRHVMLPRELSKQVPKTHLMSEEEWRRLGVQQSLGWVHYMIHEPEPHILLFRRPLPKDQQK

SEQ ID NO: 25057 - protein, 911 aa, Homo sapiens
VTAAQPGAPRSRGGGTLASFPRSWERIDCFKGSCVFLNVILRSTYSALPLDGALAIACIIFRPIKFSVKGIKLSADVKPFVPRFAGLNVAWLESSEACVFPSSAATYYPFVQEPPVTEQKIYTEDMAFGASTFPPQYLSSEITLHPYAYSPYTLDSTQNVYSVPGSQYLYNQPSCYRGFQTVKHRNENTCPLPQEMKALFKKKTYDEKKTYDQQKFDSERADGTISSEIKSARGSHHLSIYAENSLKSDGYHKRTDRKSRIIAKNVSTSKPEFEFTTLDFPELQGAENNMSEIQKQPKWGPVHSVSTDISLLREVVKPAAVLSKGEIVVKNNPNESVTANAATNSPSCTRELSWTPMGYVVRQTLSTELSAAPKNVTSMINLKTIASSADPKNVSIPSSEALSSDPSYNKEKHIIHPTQKSKASQGSDLEQNEASRKNKKKKEKSTSKYEVLTVQEPPRIEDAEEFPNLAVASERRDRIETPKFQSKQQPQDNFKNNVKKSQLPVQLDLGGMLTALEKKQHSQHAKQSSKPVVVSVGAVPVLSKECASGERGRRMSQMKTPHNPLDSSAPLMKKGKQREIPKAKKPTSLKKIILKERQERKQRLQENAVSPAFTSDDTQDGESGGDDQFPEQAELSGPEGMDELISTPSVEDKSEEPPGTELQRDTEASHLAPNHTTFPKIHSRRFRDYCSQMLSKEVDACVTDLLKELVRFQDRMYQKDPVKAKTKRRLVLGLREVLKHLKLKKLKCVIISPNCEKIQSKGGLDDTLHTIIDYACEQNIPFVFALNRKALGRSLNKAVPVSVVGIFSYDGAQDQFHKMVELTVAARQAYKTMLENVQQELVGEPRPQAPPSLPTQGPSCPAEDGPPALKEKEEPHYIEIWKKHLEAYSGCTLELEESLEASTSQMMNLNL

SEQ ID NO: 25058 - protein, 203 aa, Homo sapiens
LSLCEKGDAVIMQETGKIFKKEKEMKKRIAFPTSILVNNCVCHFSPLKRDQDYILKEGDLVKIDLGVHVNGFITNVARTFLTDVAQGTQVTGRKADVIKAAHRCAEAAPCLVTPGNQNTQVTEAWNKVAHLFNCMPIEGMLSHQLKQHVIDGEKTITQIPTDKQKKDHEKAEFEVHEVYAVDVLISSGKGKTKDAGERTTMYK

SEQ ID NO: 25059 - protein, 917 aa, Homo sapiens
LDLVFQGEVEVLDPNDPLGPLDGQDGPIPTLKGYFLNFLEPVNNITIVQGQTAILHCKVAGNPPPNVRWLKNDAPVVQEPRRIIIRKTEYGSRLRIQDLDTTDTGYYQCVATNGMKTITATGVLFVRLGPTHSPNHNFQDDYHEDGFCQPYRGIACARFIGNRTIYVDSLQMQGEIENRITAAFTMIGTSTHLSDQCSQFAIPSFCHFVFPLCDARSRTPKPRELCRDECEVLESDLCRQEYTIARSNPLILMRLQLPKCEALPMPESPDAANCMRIGIPAERLGRYHQCYNGSGMDYRGTASTTKSGHQCQPWALQHPHSHHLSSTDFPELGGGHAYCRNPGGQMEGPWCFTQNKNVRMELCDVPSCSPRDSSKMGILYILVPSIAIPLVIACLFFLVCMCRNKQKASASTPQRRQLMASPSQDMEMPLINQHKQAKLKEISLSAVRFMEELGEDRFGKVYKGHLFGPAPGEQTQAVAIKTLKDKAEGPLREEFRHEAMLRARLQHPNVVCLLGVVTKDQPLSMIFSYCSHGDLHEFLVMRSPHSDVGSTDDDRTVKSALEPPDFVHLVAQIAAGMEYLSSHHVVHKDLATRNVLVYDKLNVKISDLGLFREVYAADYYKLLGNSLLPIRWMAPEAIMYGKFSIDSDIWSYGVVLWEVFSYGLQPYCGYSNQDVVEMIRNRQVLPCPDDCPAWVYALMIECWNEFPSRRPRFKDIHSRLRAWGNLSNYNSSAQTSGASNTTQTSSLSTSPVSNVSNARYVGPKQKAPPFPQPQFIPMKGQIRPMVPPPQLYVPVNGYQPVPAYGAYLPNFYPVQIPMQMAPQQVPPQMVPKPSSHHSGSGSTSTGYVTTAPSNTSMADRAALLSEGADDTQNAPEDGAQSTVQEAEEEEEGSVPETELLGDCDTLQVDEAQVQLEA

SEQ ID NO: 25060 - protein, 89 aa, Homo sapiens
MPRGSTGFLLVLMSCGVNSRRLLRTEAETGDQDGIVWLQEATQSQEAASKRPTWPAWGCAWLSSMWSFELYMFHWDAYRKVDRRCGKSF

SEQ ID NO: 25061 - protein, 216 aa, Homo sapiens
LNWKLHSPEDLPFLVLLVHMSILTFVQMAVNKARCSGSFLKSTTFGSQGGVLLLENPKGDNRLDLLKLKSVVTSIFGVKNTELAVFHDETEIQNQTDLLSLSGKTLCVTAGSAPSLINSSSTLLCQYINLQLLNAKPQECLMGTVGTLLLENPLGQNGLTHQGLLYEAAKVFGLRSRKLKLFLNETQTQEITEDIPVKTLNMKTVYVSVLPTTADF

SEQ ID NO: 25062 - protein, 1266 aa, Homo sapiens [sequence omitted]

SEQ ID NO: 25063 - protein, 58 aa, Homo sapiens
LPRIHAMWWTLVGSLFWKESVSSWGREGRELSACRVLNEMRDTMMGPSTSGKVFLSPL

SEQ ID NO: 25064 - protein, 303 aa, Homo sapiens
LIFAKMKTLQSTLLLLLLVPLIKPAPPTQQDSRIIYDYGTDNFEESIFSQDYEDKYLDGKNIKEKETVIIPNEKSLQLQKDEAITPLPPKKENDEMPTCLLCVCLSGSVYCEEVDIDAVPPLPKESAYLYARFNKIKKLTAKDFADIPNLRRLDFTGNLIEDIEDGTFSKLSLLEELSLAENQLLKLPVLPPKLTLFNAKYNKIKSRGIKANAFKKLNNLTFLYLDHNALESVPLNLPESLRVIHLQFNNIASITDDTFCKANDTSYIRDRIEEIRLEGNPIVLGKHPNSFICLKRLPIGSYF

SEQ ID NO: 25065 - protein, 429 aa, Homo sapiens
LNRKKKKKMGFLSPIYVIFFFFGVKVHCQYETYQWDEDYDQEPDDDYQTGFPFRQNVDYGVPFHQYTLGCVSECFCPTNFPSSMYCDNRKLKTIPNIPMHIQQLYLQFNEIEAVTANSFINATHLKEINLSHNKIKSQKIDYGVFAKLPNLLQLHLEHNNLEEFPFPLPKSLERLLLGYNEISKLQTNAMDGLVNLTMLDLCYNYLHDSLLKDKIFAKMEKLMQLNLCSNRLESMPPGLPSSLMYLSLENNSISSIPEKYFDKLPKLHTLRMSHNKLQDIPYNIFNLPNIVELSVGHNKLKQAFYIPRNLEHLYLQNNEIEKMNLTVMCPSIDPLHYHHLTYIRVDQNKLKEPISSYIFFCFPHIHTIYYGEQRSTNGQTIQLKTQVFRRFPDDDDESEDHDDPDNAHESPEQEGAEGHFDLHYYENQE

SEQ ID NO: 25066 - protein, 651 aa, Homo sapiens
LAGGKKSNMKIAVLFCFFLLIIFQTDFGKNEEIPRKQRRKIYHRRLRKSSTSHKHRSNRQLGIQQTTVFTPVARLPIVNFDYSMEEKFESFSSFPGVESSYNVLPGKKGHCLVKGITMYNKAVWSPEPCTTCLCSDGRVLCDETMCHPQRCPQTVIPEGECCPVCSATEQREPTNLLHKQLPPPQVGMDRIVRKEALQSEEDEEVKEEDTEQKRETPESRNQGQLYSEGDSRGGDRKQRPGEERRLAHQQQRQGREEEEDEEEEGEEGEEDEEDEEDPVRGDMFRMPSRSPLPAPPRGTLRLPSGCSLSYRTISCINAMLTQIPPLTAPQITSLELTGNSIASIPDEAFNGLPNLERLDLSKNNITSSGIGPKAFKLLKKLMRLNMDGNNLIQIPSQLPSTLEELKVNENNLQAIDEESLSDLNQLVTLELEGNNLSEANVNPLAFKPLKSLAYLRLGKNKFRIIPQGLPGSIEELYLENNQIEEITEICFNHTRKINVIVLRYNKIEENRIAPLAWINQENLESIDLSYNKLYHVPSYLPKSLLHLVLLGNQIERIPGYVFGHMEPGLEYLYLSFNKLADDGMDRVSFYGAYHSLRELFLDHNDLKSIPPGIQEMKALHFLRLNNNKIRCVSDAVLETVTNRSDVAFPLW

SEQ ID NO: 25067 - protein, 707 aa, Homo sapiens
LAGGKKSNMKIAVLFCFFLLIIFQTDFGKNEEIPRKQRRKIYHRRLRKSSTSHKHRSNRQLGIQQTTVFTPVARLPIVNFDYSMEEKFESFSSFPGVESSYNVLPGKKGHCLVKGITMYNKAVWSPEPCTTCLCSDGRVLCDETMCHPQRCPQTVIPEGECCPVCSATVSYSLLSGIALNDRNEFSGDSSEQREPTNLLHKQLPPPQVGMDRIVRKEALQSEEDEEVKEEDTEQKRETPESRNQGQLYSEGDSRGGDRKQRPGEERRLAHQQQRQGREEEEDEEEEGEEGEEDEEDEEDPVRGDMFRMPSRSPLPAPPRGTLRLPSGCSLSYRTISCINAMLTQIPPLTAPQITSLELTGNSIASIPDEAFNGLPNLERLDLSKNNITSSGIGPKAFKLLKKLMRLNMDGNNLIQIPSQLPSTLEELKVNENNLQAIDEESLSDLNQLVTLELEGNNLSEANVNPLAFKPLKSLAYLRLGKNKFRIIPQGLPGSIEELYLENNQIEEITEICFNHTRKINVIVLRYNKIEENRIAPLAWINQENLESIDLSYNKLYHVPSYLPKSLLHLVLLGNQIERIPGYVFGHMEPGLEYLYLSFNKLADDGMDRVSFYGAYHSLRELFLDHNDLKSIPPGIQEMKALHFLRLNNNKIRNILPEEICNAEEDDDSNLEHLHLENNYIKIREIPSYTFSCIRSYSSIVLKPQNIK

SEQ ID NO: 25068 - protein, 172 aa, Homo sapiens
LAGGKKSNMKIAVLFCFFLLIIFQTDFGKNEEIPRKQRRKIYHRRLRKSSTSHKHRSNRQLGIQQTTVFTPVARLPIVNFDYSMEEKFESFSSFPGVESSYNVLPGKKGHCLVKGITMYNKAVWSPEPCTTCLCSDGRVLCDETMCHPQRCPQTVIPEGECCPVCSATGTEI

SEQ ID NO: 25069 - protein, 12 aa, Homo sapiens
MGIPNAVIWMVL

SEQ ID NO: 25070 - protein, 39 aa, Homo sapiens
MLAGRAWLLGKSRKERENAVPRQVLIPAASGSRLWFLHL

SEQ ID NO: 25071 - protein, 549 aa, Homo sapiens
LAPPPDPQAAAGRRAHEGAGTAAASAASPSSRSAPGWRGHGRGMSVEPPPELEEKAASEPEAGAMPEKRAGAQAAGSTWLQGFGRPSVYHAAIVIFLEFFAWGLLTTPMLTVLHETFSQHTFLMNGLIQGVKGLLSFLSAPLIGALSDVWGRKPFLLGTVFFTCFPIPLMRISPWWYFAMISVSGVFSVTFSVIFAYVADVTQEHERSTAYGWVSATFAASLVSSPAIGAYLSASYGDSLVVLVATVVALLDICFILVAVPESLPEKMRPVSWGAQISWKQADPFASLKKVGKDSTVLLICITVFLSYLPEAGQYSSFFLYLRQVIGFGSVKIAAFIAMVGILSIVAQTAFLSILMRSLGNKNTVLLGLGFQMLQLAWYGFGSQAWMMWAAGTVAAMSSITFPAISALVSRNAESDQQGVAQGIITGIRGLCNGLGPALYGFIFYMFHVELTELGPKLNSNNVPLQGAVIPGPPFLFGACIVLMSFLVALFIPEYSKASGVQKHSNSSSGSLTNTPERGSDEDIEPLLQDSSIWELSSFEEPGNQCTEL

SEQ ID NO: 25072 - protein, 379 aa, Homo sapiens
LPPAPAAPHLRPVPTALSCRPHLQPRTCRLHLQPRALPGSSMADQAPFDTDVNTLTRFVMEEGRKARGTGELTQLLNSLCTAVKAISSAVRKAGIAHLYGIAGSTNVTGDQVKKLDVLSNDLVMNMLKSSFATCVLVSEEDKHAIIVEPEKRGKYVVCFDPLDGSSNIDCLVSVGTIFGIYRKKSTDEPSEKDALQPGRNLVAAGYALYGSATMLVLAMDCGVNCFMLDPAIGEFILVDKDVKIKKKGKIYSLNEGYARDFDPAVTEYIQRKKFPPDNSAPYGARYVGSMVADVHRTLVYGGIFLYPANKKSPNGKLRLLYECNPMAYVMEKAGGMATTGKEAVLDVIPTDIHQRAPVILGSPDDVLEFLKVYEKHSAQ

SEQ ID NO: 25073 - protein, 38 aa, Homo sapiens
LAILTILGVLNGLVLLPVLLSFFGPYPEVSSDTGMSHV

SEQ ID NO: 25074 - protein, 570 aa, Homo sapiens
VVFNFAMVLLIFPAILSMDLYRREDRRLDIFCCFTSPCVSRVIQVEPQAYTDTHDNTRYSPPPPYSSHSFAHETQITMQSTVQLRTEYDPHTHVYYTTAEPRSEISVQPVTVTQDTLSCQSPESTSSTRDLLSQFSDSSLHCLEPPCTKWTLSSFAEKHYAPFLLKPKAKVVVIFLFLGLLGVSLYGTTRVRDGLDLTDIVPRETREYDFIAAQFKYFSFYNMYIVTQKADYPNIQHLLYDLHRSFSNVKYVMLEENKQLPKMWLHYFRDWLQGLQDAFDSDWETGKIMPNNYKNGSDDGVLAYKLLVQTGSRDKPIDISQLTKQRLVDADGIINPSAFYIYLTAWVSNDPVAYAASQANIRPHRPEWVHDKADYMPETRLRIPAAEPIEYAQFPFYLNGLRDTSDFVEAIEKVRTICSNYTSLGLSSYPNGYPFLFWEQYIGLRHWLLLFISVVLACTFLVCAVFLLNPWTAGIIVMVLALMTVELFGMMGLIGIKLSAVPVVILIASVGIGVEFTVHVALAFLTAIGDKNRRAVLALEHMFAPVLDGAVSTLLGVLMLAGSEFDFIVR

SEQ ID NO: 25075 - protein, 77 aa, Homo sapiens
VEAWQRASPRSRLLASLWSLVLPWWCSTPGTSGTSPSLESSPGQPRGPSETSAFSWILHFIVSHKYFKYKANNICCK

SEQ ID NO: 25076 - protein, 117 aa, Homo sapiens
LALPPLRTSPSRSAWVPLVATFAGIPLLHPVASGCRRAMLGGRPEVALAAIGLPASHLAVLRRLPGVTCSRARPLPLAGWIRRRHSPARKPQAKTYGIQEKDVLPLLQIMENFVKQA

SEQ ID NO: 25077 - protein, 299 aa, Homo sapiens
LDDYRRDGRGPPQRPKLNLNPRSTPKEDDSSASTSQSTRAASIFGGAKPVDTAAREREVEERLQKEQEKLQHQLDEPKLERRPPERHPSWRSEETQERERSRTGSESSQTGTSTTSGRSKSAQDARRRENEKSLENETLNKEEDCHSPTSKPPKPDQPLKVMPAPPPKENAWVKRSSNPPARSQSSDTEQQSPTSGEGKVAPAQPSEEGPARKDENKVDGMNVPKGQTGNSSRGPGDGGNKDHWKESDRKDGKKDQDSRSAPEPKKPEENPASKFSSASKYAALSVDGEDENEGEDYAE

SEQ ID NO: 25078 - protein, 105 aa, Homo sapiens
LAKIPRSFLQEANVTLIVIGQSSYHHIEPFCKLTGYSHEIYVDPEREIYKRLGMKRGEEIASSGNNIHFIHRDRNRLDHKPINSVLQLVGVQHVNFTNRPSVIHV

SEQ ID NO: 25079 - protein, 1665 aa, Homo sapiens
LANSLYSVGLPHHSHGTEPMWHGNHVQPGATHRPNQGLEMLQGLGIGMKAFHNFNYFLFFYNVLLGLGACLSRLLISCLLGMWLIARIDRTIMQSGYEGADMGFSAWIGMLYMDHYHINPVLVSFCHILITNHREKKLQQSTKYWCLNQSAESLRICAMRGGENRPPARVQSSSEELELRHQSLDAFPGRRLPGRGIQPAAKMSSVGKVTQVPNGKAYQQIFQAEVQLVHSLAATRKRAAERSVTLKSGRIPMMKKVETPEGEVMSPRQQKWMHSLPNDWIMENPVLHREKERAKREKARESENTIAAREVRGLMDTIVPEKISTSTFQRQAEHKRKSYESALASFQEEIAQVGKEMEPLIVDTGGLFLKKLTESDEEMNRLFLKVENDTNLEDYTIQALLELWDKVAGRLLLRKQEIKELDEALHSLEFSRTDKLKSVLKKYAEVIEKTSYLMRPEVYRLINEEAMVMNYALLGNRKALAQLFVNLMESTLQQELDSRHRWQGLVDTWKALKKEALLQSFSEFMASESIHTPPAVTKELEVMLKTQNVLQQRRLKHLCTICDLLPPSYSKTQLTEWHSSLNSLNKELDTYHVDCMMRIRLLYEKTWQECLMHVQNCKKQLLDWKAFTEEEAETLVNQFFFQMVGALQGKVEEDLELLDKSFETLADQTEWQSSHLFKYFQEVVQLWEAHQSELLVQELELEKRMEQHRQKHSLESQVQEAHLDRLLDQLRQQSDKETLAFHLEKVKDYLKNMKSRYECFHTLLTKEVMEYPAIMLKELNSYSSALSQYFFVREIFEQNLAGEVIFKFRQPEAHEKPSQKRVKKLRKKQGSKEDMTRSEESISSGTSTARSVEEVEEENDQEMESFITEEVLGQQKKSPLHAKMDESKEGSIQGLEEMQVEREGSLNPSLNEENVKGQGEKKEESEEEDEKEEEEEEEKLEEEKEEKEAQEEQESLSVGEEEDKEEGLEEIYYEDMESFTISSGNTYFVFVPLEEEHCRKSHSTFSAMFINDTSSAKFIEQVTIPSRLILEIKKQLFSEGGNFSPKEINSLCSRLEKEAARIELVESVIMLNMEKLENEYLDQANDVINKFESKFHNLSVDLIFIEKIQRLLTNLQVKIKCQVAKSNSQTNGLNFSLQQLQNKIKTCQESRGEKTTVTTEELLSFVQTWKEKLSQRIQYLNCSLDRVSMTELVFTNTILKDQEEDSDILTSSEALEEEAKLDVVTPESFTQLSRVGKPLIEDPAVDVIRKLLQLPNTKWPTHHCDKDPSQTGFKRHRCQPENSGKKAVPSASATSAGSLQTTHPPLSHSFTPHPKPNKMERKYRVLGDKPPPAAEDFKGIILTLLWESSENLLTVAEEFYRKEKRPVTRPDCMCDTFDQCAENISKKILEYQSQANKYHNSCLIELRIQIRRFEELLPQVCWLVMENFKEHHWKKFFTSVKEIRGQFEEQQKRLEKRKDKNAQKLHLNLGHPVHFQEMESLHLSEEERQEELDSMIRMNKEKLEECTRRNGQVFITNLATFTEKFLLQLDEVVTIDDVQVARMEPPKQKLSMLIRRKLAGLSLKEESEKPLIERGSRKWPGIKPTEVTIQNKILLQPTSSISTTKTTLGHLAAVEARDAVYLKYLASFEEELKRIQDDCTSQIKEAQRWKDSWKQSLHTIQGLYV

SEQ ID NO: 25080 - protein, 1859 aa, Homo sapiens
LANSLYSVGLPHHSHGTEPMWHGNHVQPGATHRPNQGLEMLQGLGIGMKAFHNFNYFLFFYNVLLGLGACLSRLLISCLLGMWLIARIDRTIMQSGYEGADMGFSAWIGMLYMDHYHINPVLVSFCHILITNHREKKLQQSTKYWCLNQSAESLRICAMRGGENRPPARVQSSSEELELRHQSLDAFPGRRLPGRGIQPAAKMSSVGKVTQVPNGKAYQQIFQAEVQLVHSLAATRKRAAERSVTLKSGRIPMMKKVETPEGEVMSPRQQKWMHSLPNDWIMENPVLHREKERAKREKARESENTIAAREVRGLMDTIVPEKISTSTFQRQAEHKRKSYESALASFQEEIAQVGKEMEPLIVDTGGLFLKKLTESDEEMNRLFLKVENDTNLEDYTIQALLELWDKVAGRLLLRKQEIKELDEALHSLEFSRTDKLKSVLKKYAEVIEKTSYLMRPEVYRLINEEAMVMNYALLGNRKALAQLFVNLMESTLQQELDSRHRWQGLVDTWKALKKEALLQSFSEFMASESIHTPPAVTKELEVMLKTQNVLQQRRLKHLCTICDLLPPSYSKTQLTEWHSSLNSLNKELDTYHVDCMMRIRLLYEKTWQECLMHVQNCKKQLLDWKAFTEEEAETLVNQFFFQMVGALQGKVEEDLELLDKSFETLADQTEWQSSHLFKYFQEVVQLWEAHQSELLVQELELEKRMEQHRQKHSLESQVQEAHLDRLLDQLRQQSDKETLAFHLEKVKDYLKNMKSRYECFHTLLTKEVMEYPAIMLKELNSYSSALSQYFFVREIFEQNLAGEVIFKFRQPEAHEKPSQKRVKKLRKKQGSKEDMTRSEESISSGTSTARSVEEVEEENDQEMESFITEEVLGQQKKSPLHAKMDESKEGSIQGLEEMQVEREGSLNPSLNEENVKGQGEKKEESEEEDEKEEEEEEEKLEEEKEEKEAQEEQESLSVGEEEDKEEGLEEIYYEDMESFTISSGNTYFVFVPLEEEHCRKSHSTFSAMFINDTSSAKFIEQVTIPSRLILEIKKQLRAGFFEHLEKWFDQCSLNTRVTVATKINELDSELELHLHLHQPRAQQIEKDIHNVRAAELLLHQEQLDSHCAGVTETLKKKRLMFCQFQEEQNVRSKNFRLKIYDMEHIFLNATRSQKLVTLSNTLHQELLSYVDVTQVSLRSFRQYLEESLGKLRYSNIEFIKHCRLFSEGGNFSPKEINSLCSRLEKEAARIELVESVIMLNMEKLENEYLDQANDVINKFESKFHNLSVDLIFIEKIQRLLTNLQVKIKCQVAKSNSQTNGLNFSLQQLQNKIKTCQESRGEKTTVTTEELLSFVQTWKEKLSQRIQYLNCSLDRVSMTELVFTNTILKDQEEDSDILTSSEALEEEAKLDVVTPESFTQLSRVGKPLIEDPAVDVIRKLLQLPNTKWPTHHCDKDPSQTGRGAWACGSRGSSEAGAGGAVCSPPVLCSCPGPSSPKGFKRHRCQPENSGKKAVPSASATSAGSFTPHPKPNKMERKYRVLGDKPPPAAEDFKGIILTLLWESSENLLTVAEEFYRKEKRPVTRPDCMCDTFDQCAENISKKILEYQSQANKYHNSCLIELRIQIRRFEELLPQVCWLVMENFKEHHWKKFFTSVKEIRGQFEEQQKRLEKRKDKNAQKLHLNLGHPVHFQEMESLHLSEEERQEELDSMIRMNKEKLEECTRRNGQVFITNLATFTEKFLLQLDEVVTIDDVQVARMEPPKQKLSMLIRRKLAGLSLKEESEKPLIERGSRKWPGIKPTEVTIQNKILLQPTSSISTTKTTLGHLAAVEARDAVYLKYLASFEEELKRIQDDCTSQIKEAQRWKDSWKQSLHTIQGLYV

SEQ ID NO: 25081 - protein, 123 aa, Homo sapiens
LRLVSRPTSLALPARPRRWLAAASSRAEPSVRELVLDNCKSNDGKIEGLTAEFVNLEFLSLINVGLISVSNLPKLPKLKKLELSENRIFGGLDMLAEKLPNLTHLNLSGNKLKDISTLEPLGH

SEQ ID NO: 25082 - protein, 10 aa, Homo sapiens
LLGFCVRFLL

SEQ ID NO: 25083 - protein, 128 aa, Homo sapiens
MPLELELCPGRWVGGQHPCFIIAEIGQNHQGDLDVAKRMIRMAKECGADCAKFQKSELEFKFNRKALERPYTSKHSWGKTYGEHKRHLEFSHDQYRELQRYAEEVGIFFTASGMDEQLPWERERFVPM

SEQ ID NO: 25084 - protein, 943 aa, Homo sapiens
LPAESPRFVPGGPADPSSLRSLRLAAMEGAGENAPESSSSAPGSEESARDPQVPPPEEESGDCARSLEAVPKKLCGYLSKFGGKGPIRGWKSRWFFYDERKCQLYYSRTAQDANPLDSIDLSSAVFDCKADAEEGIFEIKTPSRVITLKAATKQAMLYWLQQLQMKRWEFHNSPPAPPATPDAALAGNGPVLHLELGQEEAELEEFLCPVKTPPGLVGVAAALQPFPALQNISLKHLGTEIQNTMHNIRGNKQAQGTGHEPPGEDSPQSGEPQREEQPLASDASTPGREPEDSPKPAPKPSLTISFAQKAKRQNNTFPFFSEGITRNRTAQEKVAALEQQVLMLTKELKSQKELVKILHKALEAAQQEKRASSAYLAAAEDKDRLELVRHKVRQIAELGRRVEALEQERESLAHTASLREQQVQELQQHVQLLMDKNHAKQQVICKLSEKVTQDFTHPPDQSPLRPDAANRDFLSQQGKIEHLKDDMEAYRTQNCFLNSEIHQVTKIWRKVAEKEKALLTKCAYLQARNCQVESKYLAGLRRLQEALGDEASECSELLRQLVQEALQWEAGEASSDSIELSPISKYDEYGFLTVPDYEVEDLKLLAKIQALESRSHHLLGLEAVDRPLRERWAALGDLVPSAELKQLLRAGVPREHRPRVWRWLVHLRVQHLHTPGCYQELLSRGQAREHPAARQIELDLNRTFPNNKHFTCPTSSFPDKLRRVLLAFSWQNPTIGYCQGLNRLAAIALLVLEEEESAFWCLVAIVETIMPADYYCNTLTASQVDQRVLQDLLSEKLPRLMAHLGQHHVDLSLVTFNWFLVVFADSLISNILLRVWDAFLYEGTKYNEKEILRLQNGLEIYQYLRFFTKTISNSRKLMNIAFNDMNPFRMKQLRQLRMVHRERLEAELRELEQLKAEYLERRASRRRAVSEGCASEDEVEGEA

SEQ ID NO: 25085 - protein, 976 aa, Homo sapiens
LWLPGGGFAVGPAPAQVSPFGKLPAESPRFVPGGPADPSSLRSLRLAAMEGAGENAPESSSSAPGSEESARDPQVPPPEEESGDCARSLEAVPKKLCGYLSKFGGKGPIRGWKSRWFFYDERKCQLYYSRTAQDANPLDSIDLSSAVFDCKADAEEGIFEIKTPSRVITLKAATKQAMLYWLQQLQMKRWEFHNSPPAPPATPDAALAGNGPVLHLELGQEEAELEEFLCPVKTPPGLVGVAAALQPFPALQNISLKHLGTEIQNTMHNIRGNKQAQGTGHEPPGEDSPQSGEPQREEQPLASDASTPGREPEDSPKPAPKPSLTISFAQKAKRQNNTFPFFSEGITRNRTAQEKVAALEQQVLMLTKELKSQKELVKILHKALEAAQQEKRASSAYLAAAEDKDRLELVRHKVRQIAELGRRVEALEQERESLAHTASLREQQVQELQQHVQLLMDKNHAKQQVICKLSEKVTQDFTHPPDQSPLRPDAANRDFLSQQGKIEHLKDDMEAYRTQNCFLNSEIHQVTKIWRKVAEKEKALLTKCAYLQARNCQVESKYLAGLRRLQEALGDEASECSELLRQLVQEALQWEAGEASSDSIELSPISKYDEYGFLTVPDYEVEDLKLLAKIQALESRSHHLLGLEAVDRPLRERWAALGDLVPSAELKQLLRAGVPREHRPRVWRWLVHLRVQHLHTPGCYQELLSRGQAREHPAARQIELDLNRTFPNNKHFTCPTSSFPDKLRRVLLAFSWQNPTIGYCQGLNRLAAIALLVLEEEESAFWCLVAIVETIMPADYYCNTLTASQVDQRVLQDLLSEKLPRLMAHLGQHHVDLSLVTFNWFLVVFADSLISNILLRVWDAFLYEGTKVVFRYALAIFKYNEKEILRLQNGLEIYQYLRFFTKTISNSRKLMNIAFNDMNPFRMKQLRQLRMVHRERLEAELRELEQLKAEYLERRASRRRAVSEGCASEDEVEGEA

SEQ ID NO: 25086 - protein, 218 aa, Homo sapiens
MAPRRNNGQCWCLLMLLSVSTPLPAVTQTRGATETASQGHLDLTQLIGVPLPSSVSFVTGYGGFPAYSFGPGANVGRPARTLIPSTFFRDFAISVVVKPSSTRGGVLFAITDAFQKVIYLGLRLSGVEDGHQRIILYYTEPGSHVSQEAAAFSVPVMTHRWNRFAMIVQGEEVTLLVNCEEHSRIPFQRSSQALAFESSAGIFMGNAGATGLERFTVS

SEQ ID NO: 25087 - protein, 1388 aa, Homo sapiens
MAPRRNNGQCWCLLMLLSVSTPLPAVTQTRGATETASQGHLDLTQLIGVPLPSSVSFVTGYGGFPAYSFGPGANVGRPARTLIPSTFFRDFAISVVVKPSSTRGGVLFAITDAFQKVIYLGLRLSGVEDGHQRIILYYTEPGSHVSQEAAAFSVPVMTHRWNRFAMIVQGEEVTLLVNCEEHSRIPFQRSSQALAFESSAGIFMGNAGATGLERFTGSLQQLTVHPDPRTPEELCDPEESSASGETSGLQEADGVAEILEAVTYTQASPKEAKVEPINTPPTPSSPFEDMELSGEPVPEGTLETTNMSIIQHSSPKQGKGAILNDTLEGVHSVDGDPITDSGSGAGAFLDIAEEKNLAATAAGLAEVPISTAGEAEASSVPTGGPTLSMSTENPEEGVTPGPDNEERLAATAAGEAEALASMPGEVEASGVAPGELDLSMSAQSLGEEATVGPSSEDSLTTAAAATEVSLSTFEDEEASGVPTDGLAPLTATMAPERAVTSGPGDEEDLAAATTEEPLITAGGEESGSPPPDGPPLPLPTVAPERWITPAQREHVGMKGQAGPKGEKGDAGEELPGPPEPSGPVGPTAGAEAEGSGLGWGSDVGSGSGDLVGSEQLLRGPPGPPGPPGLPGIPGKPGTDVFMGPPGSPGEDGPAGEPGPPGPEGQPGVDGATGLPGMKGEKGARGPNGSVGEKGDPGNRGLPGPPGKKGQAGPPGVMGPPGPPGPPGPPGPGCTMGLGFEDTEGSGSTQLLNEPKLSRPTAAIGLKGEKGDRGPKGERGMDGASIVGPPGPRGPPGHIKVLSNSLINITHGFMNFSDIPELVGPPGPDGLPGLPGFPGPRGPKGDTGLPGFPGLKGEQGEKGEPGAILTEDIPLERLMGKKGEPGMHGAPGPMGPKGPPGHKGEFGLPGRPGRPGLNGLKGTKGDPGVIMQGPPGLPGPPGPPGPPGAVINIKGAIFPIPVRPHCKMPVDTAHPGSPELITFHGVKGEKGSWGLPGSKGEKGDQGAQGPPGPPLDLAYLRHFLNNLKGENGDKGFKGEKGEKGDINGSFLMSGPPGLPGNPGPAGQKGETVVGPQGPPGAPGLPGPPGFGRPGDPGPPGPPGPPGPPAILGAAVALPGPPGPPGQPGLPGSRNLVTAFSNMDDMLQKAHLVIEGTFIYLRDSTEFFIRVRDGWKKLQLGELIPIPADSPPPPALSSNPHQLLPPPNPISSANYEKPALHLAALNMPFSGDIRADFQCFKQARAAGLLSTYRAFLSSHLQDLSTIVRKAERYSLPIVNLKGQVLFNNWDSIFSGHGGQFNMHIPIYSFDGRDIMTDPSWPQKVIWHGSSPHGVRLVDNYCEAWRTADTAVTGLASPLSTGKILDQKAYSCANRLIVLCIENSFMTDARK

SEQ ID NO: 25088 - protein, 79 aa, Homo sapiens
LGLPPARDPRPPRARPPAPLAAVSPTPARTLARTLARPRPSHAPGPADSVPSAAGPGLADAAGGAGMLTGCSPAQRRGC

SEQ ID NO: 25089 - protein, 137 aa, Homo sapiens
VQLTEAPMNHKANCKKMTQIMFETFNTPAIYVAIQALWSLYASGRTTSIMMDSVDGVTHTVPMYKGHALPHAILYLDLAGWDLTGYLMKILTQRGYSFTTRAEQEIVHDIKEKLCYVALDFEQEMATAASSSSLEKI

SEQ ID NO: 25090 - protein, 30 aa, Homo sapiens
LQPPPPPSRAVPGRALPGRPPARMPRGSGA

SEQ ID NO: 25091 - protein, 45 aa, Homo sapiens
LYKKKKKKKASAFYHSMEGESFERKHCLLPELDSELDRYYGNAYK

SEQ ID NO: 25092 - protein, 39 aa, Homo sapiens
MCGDTPMTGSPWSWTLRHSAVFLNPQSSRDRSSRVFGGR

SEQ ID NO: 25093 - protein, 13 aa, Homo sapiens
VAFSVQLLITGIW

SEQ ID NO: 25094 - protein, 8 aa, Homo sapiens
MMAATILW

SEQ ID NO: 25095 - protein, 1124 aa, Homo sapiens
LGDYSVCFFFPLSPACVPFSRMAEAELHKERLQAIAEKRKRQTEIEGKRQQLDEQILLLQHSKSKVLREKWLLQGIPAGTAEEEEARRRQSEEDEFRVKQLEDNIQRLEQEIQTLESEESQISAKEQIILEKLKETEKSFKDFQKGFSSTDGDAVNYISSQLPDLPILCSRTAEPSPGQDGTSRAAGVGWENVLLKEGESASNATETSGPDMTIKKPPQLSEDDIWLKSEGDNYSATLLEPAASSLSPDHKNMEIEVSVAECKSVPGITSTPHPMDHPSAFYSPPHNGLLTDHHESLDNDVAREIRYLDEVLEANCCDSAVDGTYNGTSSPEPGAVVLVGGLSPPVHEATQPEPTERTASRQAPPHIELSNSSPDPMAEAERTNGHSPSQPRDALGDSLQVPVSPSSTTSSRCSSRDGEFTLTTLKKEAKFELRAFHEDKKPSKLFEDDEHEKEQYCIRKVRPSEEMLELEKERRELIRSQAVKKNPGIAAKWWNPPQEKTIEEQLDEEHLESHKKYKERKERRAQQEQLLLQKQLQQQQQQPPSQLCTAPASSHERASMIDKAKEDIVTEQIDFSAARKQFQLMENSRQAVAKGQSTPRLFSIKPFYRPLGSVNSDKPLTNPRPPSVGGPPEDSGASAAKGQKSPGALETPSAAGSQGNTASQGKEGPYSEPSKRGPLSKLWAEDGEFTSARAVLTVVKDDDHGILDQFSRSVNVSLTQEELDSGLDELSVRSQDTTVLETLSNDFSMDNISDSGASNETTNALQENSLADFSLPQTPQTDNPSEGRGEGVSKSFSDHGFYSPSSTLGDSPLVDDPLEYQAGLLVQNAIQQAIAEQVDKAVSKTSRDGAEQQGPEATVEEAEAAAFGSEKPQSMFEPPQVSSPVQEKRDVLPKILPAEDRALRERGPPQPLPAVQPSGPINMEETRPEGSYFSKYSEAAELRSTASLLATQESDVMVGPFKLRSRKQRTLSMIEEEIRAAQEREEELKRQRQVLQSTQSPRTKNAPSLPSRTCYKTAPGKIEKVKPPPSPTTEGPSLQPDLAPEEAAGTQRPKNLMQTLMEDYETHKSKRRERMDDSSYTSKLLSCKVTSEVLEATRVNRRKSALALRWEAGIYANQEEEDNE

SEQ ID NO: 25096 - protein, 56 aa, Homo sapiens
LPLAFPRSLLDPRSLLDPRSGRQRPRGAGLEQNPRTAPPGAGAQRSLPSFLRMISG

SEQ ID NO: 25097 - protein, 87 aa, Homo sapiens
MLKNVLMRKCGVHDREKFLVLDYFCQSSVLAVLYLILSLCYFPYQDVASECEVKCMPTFQFFKKGQKVGEFSGANKEKLEATINELV

SEQ ID NO: 25098 - protein, 142 aa, Homo sapiens
VPVYKGREQAASLEALFGALDPFPSVLTAARQTPAAKMVKQIESKTAFQEALDAAGDKLVVVDFSATWCGPCKMIKPFFHSLSEKYSNVIFLEVDVDDCQDVASECEVKCMPTFQFFKKGQKVGEFSGANKEKLEATINELV

SEQ ID NO: 25099 - protein, 242 aa, Homo sapiens
LTSLQFLSPNTRVVESKNVALPKGTIVLASPGWTTHSISDGKDLEKLLTEWPDTIPLSLALGTVGMPGLTAYFGLLEICGVKGGETVMVNAAAGAVGSVVGQIAKLKGCKVVGAVGSDEKVAYLQKLGFDVVFNYKTVESLEETLKKASPDGYDCYFDNVGGEFSNTVIGQMKKFGRIAICGAISTYNRTGPLPPGPPPEIVIYQELRMEAFVVYRWQGDARQKALKDLLKWVLELPYFVID

SEQ ID NO: 25100 - protein, 155 aa, Homo sapiens
LGMGAPLLSPGWGAGAAGRRWWMLLAPLLPALLLVRPAGALVEGLYCGTRDCYEVLGVSRSAGKAEIARAYRQLARRYHPDRYRPQPGDEGPGRTPQSAEEAFLLVATAYETLKVSQAAAELQQYCMQNACKDALLVGVPAGSNPFREPRSCALL

SEQ ID NO: 25101 - protein, 603 aa, Homo sapiens
VAGACPVPAPVPTLLPPRTGRGSAEPKLACPRNRPAAAACFLCSRLARQSLLCARLHLGHGWRGSDELLSSGIINGPFTMNSSTPSTGVYANGNDSKKFKRDRPPCSPSRVLHLRKIPCDVTEAEIISLGLPFGKVTNLLMLKGKSQAFLEMASEEAAVTMVNYYTPITPHLRSQPVYIQYSNHRELKTDNLPNQARAQAALQAVSAVQSGSLALSGGPSNEGTVLPGQSPVLRIIIENLFYPVTLEVLHQIFSKFGTVLKIITFTKNNQFQALLQYADPVNAHYAKMALDGQNIYNACCTLRIDFSKLTSLNVKYNNDKSRDFTRLDLPTGDGQPSLEPPMAAAFGAPGIISSPYAGAAGFAPAIGFPQATGLSVPAVPGALGPLTITSSAVTGRMAIPGASGIPGNSVLLVTNLNPDLITPHGLFILFGVYGDVHRVKIMFNKKENALVQMADANQAQLAMNHLSGQRLYGKVLRATLSKHQAVQLPREGQEDQGLTKDFSNSPLHRFKKPGSKNFQNIFPPSATLHLSNIPPSVTVDDLKNLFIEAGCSVKAFKFFQKDRKMALIQLGSVEEAIQALIELHNHDLGENHHLRVSFSKSTI

SEQ ID NO: 25102 - protein, 23 aa, Homo sapiens
MNYLPVGDLMSFFLLASLTDLLP

SEQ ID NO: 25103 - protein, 151 aa, Homo sapiens
LSSSCLSGRAPFKSSDCKERRSRCPRVPGDCEVLTNCHWTYLKQNRKMAANSSGQGFQNKNRVAILAELDKEKRKLLMQNQSSTNHPGASIALSRPSLNKDFRDHAEQQHIAAQQKAALQHAHAHSSGYFITQDSAFGNLILPVLPRLDPE

SEQ ID NO: 25104 - protein, 124 aa, Homo sapiens
LSSSCLSGRAPFKSSDCKERRSRCPRVPGFQNKNRVAILAELDKEKRKLLMQNQSSTNHPGASIALSRPSLNKDFRDHAEQQHIAAQQKAALQHAHAHSSGYFITQDSAFGNLILPVLPRLDPE

SEQ ID NO: 25105 - protein, 91 aa, Homo sapiens
LSSSCLSGRAPFKSSDCKERRSRCPRVPGDCEVLTNCHWTYLKQNRKMAANSSGQGFQNKNRVAILAELDKEKRKLLMQNQSSTNHPGARY

SEQ ID NO: 25106 - protein, 214 aa, Homo sapiens
LMESEKIYMTANPYLCTECGKGYTCLASLTQHQKTHIGEKPYECKICGKLKARDRNLPKSQSLTLSSSLECDGMISAHCSLRLPGSSNSPASPSLVAGITEHQNIIFVYVAPGQMKLVLVQKSIPVITISHDNGLNVIDILETDYDNYIYFYNKNIKNGETFLMLELYVRTPDVSSQLKERFVKYCEEHGIDKENIFDLTKVDRCLQARDEGAA

SEQ ID NO: 25107 - protein, 167 aa, Homo sapiens
LLLGPAPVSPGPTTAGPPILCSPGACPWHWKLLPVPDPPLGEGWAGTCGSCRGLILCSQHGSRWGHFLWHAGFRVESCDCHPSSPLSFVSGPFPGPSLLGPLLAGERRRGSHFPPVPATPSVCGVPSSWPGMLHTWRSSNRPLTLGIGALSGVGTGKKAKTCMWDLS

SEQ ID NO: 25108 - protein, 31 aa, Homo sapiens
MLLFLKVCTQRGDLIVKFRVTLQTAQHLACF

SEQ ID NO: 25109 - protein, 13 aa, Homo sapiens
MSSLICILVLHFH

SEQ ID NO: 25110 - protein, 56 aa, Homo sapiens
LDFAFPEPWRWGEKWKNWPESLEVWVLVLAVPLTHCDLGILCCEDISQVLHVSQQI

SEQ ID NO: 25111 - protein, 1089 aa, Homo sapiens
LMPRTGFCCFTVSLFVWMDMSMCVSLSRCVCVYVSIHPPQCLNSLLVIEGKGLISKQPGTCDPYVKISLIPEDSRLRHQKTQTVPDCRDPAFHEHFFFPVQEEDDQKRLLVTVWNRASQSRQSGLIGCMSFGVKSLLTPDKEISGWYYLLGEHLGRTKHLKVARRRLRPLRDPLLRMPGGGDTENGKKLKITIPRGKDGFGFTICCDSPVRVQAVDSGGPAERAGLQQLDTVLQLNERPVEHWKCVELAHEIRSCPSEIILLVWRMVPQVKPGPDGGVLRRASCKSTHDLQSPPNKREKNCTHGVQARPEQRHSCHLVCDSSDGLLLGGWERYTEVAKRGGQHTLPALSRATAPTDPNYIILAPLNPGSQLLRPVYQEDTIPEESGSPSKGKSYTGLGKKSRLMKTVQTMKGHGNYQNCPVVRPHATHSSYGTYVTLAPKVLVFPVFVQPLDLCNPARTLLLSEELLLYEGRNKAAEVTLFAYSDLLLFTKEDEPGRCDVLRNPLYLQSVKLQEGSSEDLKFCVLYLAEKAECLFTLEAHSQEQKKRVCWCLSENIAKQQQLAASPPDSKMFETEADEKREMALEEGKGPGAEDSPPSKEPSPGQELPPGQDLPPNKDSPSGQEPAPSQEPLSSKDSATSEGSPPGPDAPPSKDVPPCQEPPPAQDLSPCQDLPAGQEPLPHQDPLLTKDLPAIQESPTRDLPPCQDLPPSQVSLPAKALTEDTMSSGDLLAATGDPPAAPRPAFVIPEVRLDSTYSQKAGAEQGCSGDEEDAEEAEEVEEGEEGEEDEDEDTSDDNYGERSEAKRSSMIETGQGAEGGLSLRVQNSLRRRTHSEGSLLQEPRGPCFASDTTLHCSDGEGAASTWGMPSPSTLKKELGRNGGSMHHLSLFFTGHRKMSGADTVGDDDEASRKRKSKNLAKDMKNKLGIFRRRNESPGAPPAGKADKMMKSFKPTSEEALKWGESLEKLLVHKYGLAVFQAFLRTEFSEENLEFWLACEDFKKVKSQSKMASKAKKIFAEYIAIQACKEVNLDSYTREHTKDNLQSVTRGCFDLAQKRIFGLMEKDSYPRFLRSDLYLDLINQKKMSPPL

SEQ ID NO: 25112 - protein, 103 aa, Homo sapiens
LGIPYHTVTSPQLDLKQRTKMVGLGSSEGSGPKGACGCQQKDHNGVRGLVGMQRLAAESPKRRGLRGFFLPRRRRRRTFHIWASSGGSRTCLGGSRRGWERSP

SEQ ID NO: 25113 - protein, 540 aa, Homo sapiens
MVSGILEPPLLNCSCFLFVSQMFETEADEKREMALEEGKGPGAEDSPPSKEPSPGQELPPGQDLPPNKDSPSGQEPAPSQEPLSSKDSATSEGSPPGPDAPPSKDVPPCQEPPPAQDLSPCQDLPAGQEPLPHQDPLLTKDLPAIQESPTRDLPPCQDLPPSQVSLPAKALTEDTMSSGDLLAATGDPPAAPRPAFVIPEVRLDSTYSQKAGAEQGCSGDEEDAEEAEEVEEGEEGEEDEDEDTSDDNYGERSEAKRSSMIETGQGAEGGLSLRVQNSLRRRTHSEGSLLQEPRGPCFASDTTLHCSDGEGAASTWGMPSPSTLKKELGRNGGSMHHLSLFFTGHRKMSGADTVGDDDEASRKRKSKNLAKDMKNKLGIFRRRNESPGAPPAGKADKMMKSFKPTSEEALKWGESLEKLLVHKYGLAVFQAFLRTEFSEENLEFWLACEDFKKVKSQSKMASKAKKIFAEYIAIQACKEVNLDSYTREHTKDNLQSVTRGCFDLAQKRIFGLMEKDSYPRFLRSDLYLDLINQKKMSPPL

SEQ ID NO: 25114 - protein, 207 aa, Homo sapiens
VPPGLSMALSWVLTVLSLLPLLEAQIPLCANLVPVPITNATLDRITGKWFYIASAFRNEEYNKSVQEIQATFFYFTPNKTEDTIFLREYQTRQNQCFYNSSYLNVQRENGTVSRYEGGREHVAHLLFLRDTKTLMFGSYLDDEKNWGLSFYADKPETTKEQLGEFYEALDCLCIPRSDVMYTDWKKDKCEPLEKQHEKERKQEEGES

SEQ ID NO: 25115 - protein, 946 aa, Homo sapiens
VVAGPGRGPPGLCGLSLGAALALPLGILVTLGWPSARGDLSPSSLTSMPTLGWLPENRDISEDQSSAEQTQALASQASQFLAKVESFERLIQAGRLMPQDQVKGFQRLKAAHAALEEEYLKACREQHPAQPLAGSKGTPGRFDPRRELEAEIYRLGSCLEELKEHIDQTQQEPEPPGSDSALDSTPALPCLHQPTHLPAPSGQAPMPAIKTSCPEPATTTAAASTGPCPLHVNVEVSSGNSEVEDRPQDPLARLRHKELQMEQVYHGLMERYLSVKSLPEAMRMEEEEEGEEEEEEEGGGDSLEVDGVAATPGKAEATRVLPRQCPVQAEKSHGAPLEEATEKMVSMKPPGFQASLARDGHMSGLGKAEAAPPGPGVPPHPPGTKSAASHQSSMTSLEGSGISERLPQKPLHRGGGPHLEETWMASPETDSGFVGSETSRVSPLTQTPEHRLSHISTAGTLAQPFAASVPRDGASYPKARGSLIPRRATEPSTPRSQAQRYLSSPSGPLRQRAPNFSLERTLAAEMAVPGSEFEGHKRISEQPLPNKTISPPPAPAPAAAPLPCGPTETIPSFLLTRAGRDQAICELQEEVSRLRLRLEDSLHQPLQGSPTRPASAFDRPARTRGRPADSPATWGSHYGSKSTERLPGEPRGEEQIVPPGRQRARSSSVPREVLRLSLSSESELPSLPLFSEKSKTTKDSPQAARDGKRGVGSAGWPDRVTFRGQYTGHEYHVLSPKAVPKGNGTVSCPHCRPIRTQDAGGAVTGDPLGPPPADTLQCPLCGQVGSPPEADGPGSATSGAEKATTRRKASSTPSPKQRSKQAGSSPRPPPGLWYLATAPPAPAPPAFAYISSVPIMPYPPAAVYYAPAGPTSAQPAAKWPPTASPPPARRHRHSIQLDLGDLEELNKALSRAVQAAESVRSTTRQMRSSLSADLRQAHSLRGSCLF

SEQ ID NO: 25116 - protein, 22 aa, Homo sapiens
LWSGILDALTNMKLSTALVTFL

SEQ ID NO: 25117 - protein, 18 aa, Homo sapiens
LSSQEGFRSPRWPMGSPR

SEQ ID NO: 25118 - protein, 100 aa, Homo sapiens
LVFPSVKKRVVCTAGLKWYPHPALIHCVKGCEPFMGDNYCDAINNRAFCNYDGGDCCTSTVKTKKVTPFPMSCDLQGDCACRDPQAQEHSRKDLRGYSHG

SEQ ID NO: 25119 - protein, 404 aa, Homo sapiens
LGSKKELKSMPFITYLSGLLTAQMLSDDQLISGVEIRCEEKGRCPSTCHLCRRPGKEQLSPTPVLLEINRVVPLYTLIQDNGTKEAFKSALMSSYWCSGKGDVIDDWCRCDLSAFDANGLPNCSPLLQPVLRLSPTVEPSSTVVSLEWVDVQPAIGTKVSDYILQHKKVDEYTDTDLYTGEFLSFADDLLSGLGTSCVAAGRSHGEVPEVSIYSVIFKCLEPDGLYKFTLYAVDTRGRHSELSTVTLRTACPLVDDNKAEEIADKIYNLYNGYTSGKEQQMAYNTLMEVSASMLFRVQHHYNSHYEKFGDFVWRSEDELGPRKAHLILRRLERVSSHCSSLLRSAYIQSRVETVPYLFCRSEEVRPAGMVWYSILKDTKITCEEKMVSMARNTYYLTLSKVSPF

SEQ ID NO: 25120 - protein, 203 aa, Homo sapiens
LGSKKELKSMPFITYLSGLLTAQMLSDDQLISGVEIRCEEKGRCPSTCHLCRRPGKEQLSPTPVLLEINRVVPLYTLIQDNGTKEAFKSALMSSYWCSGKGDVIDDWCRCDLSAFDANGLPNCSPLLQPVLRLSPTVEPSSTVVSLEWVDVQPAIGTKVSDYILQHKKVDEYTDTDLYTVYCWITFIDLRILNQPCIPGMKPT

SEQ ID NO: 25121 - protein, 11 aa, Homo sapiens
MNTVLFSSELC

SEQ ID NO: 25122 - protein, 7 aa, Homo sapiens
MATFRIS

SEQ ID NO: 25123 - protein, 47 aa, Homo sapiens
LDFIRAFLLLLVASVPGKIGSQNLTAQRPPVATSFLQMESSEPTVRK

SEQ ID NO: 25124 - protein, 1681 aa, Homo sapiens
LLPPTMGLLGILCFLIFLGKTWGQEQTYVISAPKIFRVGASENIVIQVYGYTEAFDATISIKSYPDKKFSYSSGHVHLSSENKFQNSAILTIQPKQLPGGQNPVSYVYLEVVSKHFSKSKRMPITYDNGFLFIHTDKPVYTPDQSVKVRVYSLNDDLKPAKRETVLTFIDPEGSEVDMVEEIDHIGIISFPDFKIPSNPRYGMWTIKAKYKEDFSTTGTAYFEVKEYVLPHFSVSIEPEYNFIGYKNFKNFEITIKARYFYNKVVTEADVYITFGIREDLKDDQKEMMQTAMQNTMLINGIAQVTFDSETAVKELSYYSLEDLNNKYLYIAVTVIESTGGFSEEAEIPGIKYVLSPYKLNLVATPLFLKPGIPYPIKVQVKDSLDQLVGGVPVTLNAQTIDVNQETSDLDPSKSVTRVDDGVASFVLNLPSGVTVLEFNVKTDAPDLPEENQAREGYRAIAYSSLSQSYLYIDWTDNHKALLVGEHLNIIVTPKSPYIDKITHYNYLILSKGKIIHFGTREKFSDASYQSINIPVTQNMVPSSRLLVYYIVTGEQTAELVSDSVWLNIEEKCGNQLQVHLSPDADAYSPGQTVSLNMATGMDSWVALAAVDSAVYGVQRGAKKPLERVFQFLEKSDLGCGAGGGLNNANVFHLAGLTFLTNANADDSQENDEPCKEILRPRRTLQKKIEEIAAKYKHSVVKKCCYDGACVNNDETCEQRAARISLGPRCIKAFTECCVVASQLRANISHKDMQLGRLHMKTLLPVSKPEIRSYFPESWLWEVHLVPRRKQLQFALPDSLTTWEIQGVGISNTGICVADTVKAKVFKDVFLEMNIPYSVVRGEQIQLKGTVYNYRTSGMQFCVKMSAVEGICTSESPVIDHQGTKSSKCVRQKVEGSSSHLVTFTVLPLEIGLHNINFSLETWFGKEILVKTLRVVPEGVKRESYSGVTLDPRGIYGTISRRKEFPYRIPLDLVPKTEIKRILSVKGLLVGEILSAVLSQEGINILTHLPKGSAEAELMSVVPVFYVFHYLETGNHWNIFHSDPLIEKQKLKKKLKEGMLSIMSYRNADYSYSVWKGGSASTWLTAFALRVLGQVNKYVEQNQNSICNSLLWLVENYQLDNGSFKENSQYQPIKLQGTLPVEARENSLYLTAFTVIGIRKAFDICPLVKIDTALIKADNFLLENTLPAQSTFTLAISAYALSLGDKTHPQFRSIVSALKREALVKGNPPIYRFWKDNLQHKDSSVPNTGTARMVETTAYALLTSLNLKDINYVNPVIKWLSEEQRYGGGFYSTQDTINAIEGLTEYSLLVKQLRLSMDIDVSYKHKGALHNYKMTDKNFLGRPVEVLLNDDLIVSTGFGSGLATVHVTTVVHKTSTSEEVCSFYLKIDTQDIEASHYRGYGNSDYKRIVACASYKPSREESSSGSSHAVMDISLPTGISANEEDLKALVEGVDQLFTDYQIKDGHVILQLNSIPSSDFLCVRFRIFELFEVGFLSPATFTVYEYHRPDKQCTMFYSTSNIKIQKVCEGAACKCVEADCGQMQEELDLTISAETRKQTACKPEIAYAYKVSITSITVENVFVKYKATLLDIYKTGEAVAEKDSEITFIKKVTCTNAELVKGRQYLIMGKEALQIKYNFSFRYIYPLDSLTWIEYWPRDTTCSSCQAFLANLDEFAEDIFLNGC

SEQ ID NO: 25125 - protein, 286 aa, Homo sapiens
LREHRSSHRCHCYCRYCCRRVCTSRPASVPAGASVDRPRPLSRCVRTPVPGPDAPLPPGKLPSHQQPPSATMATAPYNYSYIFKYIIIGDMGVGKSCLLHQFTEKKFMADCPHTIGVEFGTRIIEVSGQKIKLQIWDTAGQERFRAVTRSYYRGAAGALMVYDITRRSTYNHLSSWLTDARNLTNPNTVIILIGNKADLEAQRDVTYEEAKQFAEENGLLFLEASAKTGENVEDAFLEAAKKIYQNIQDGSLDLNAAESGVQHKPSAPQGGRLTSEPQPQREGCGC

SEQ ID NO: 25126 - protein, 27 aa, Homo sapiens
VLRPWSQRLPTEQHSSPCTALLGEGDE

SEQ ID NO: 25127 - protein, 742 aa, Homo sapiens
LIFMPLCTPNSMVVEHPEFLKAGKEPGLQIWRVEKFDLVPVPTNLYGDFFTGDAYVILKTVQLRNGNLQYDLHYWLGNECSQDESGAAAIFTVQLDDYLNGRAVQHREVQGFESATFLGYFKSGLKYKKGGVASGFKHVVPNEVVVQRLFQVKGRRVVRATEVPVSWESFNNGDCFILDLGNNIHQWCGSNSNRYERLKATQVSKGIRDNERSGRARVHVSEEGTEPEAMLQVLGPKPALPAGTEDTAKEDAANRKLAKLYKVSNGAGTMSVSLVADENPFAQGALKSEDCFILDHGKDGKIFVWKGKQANTEERKAALKTASDFITKMDYPKQTQVSVLPEGGETPLFKQFFKNWRDPDQTDGLGLSYLSSHIANVERVPFDAATLHTSTAMAAQHGMDDDGTGQKQIWRIEGSNKVPVDPATYGQFYGGDSYIILYNYRHGGRQGQIIYNWQGAQSTQDEVAASAILTAQLDEELGGTPVQSRVVQGKEPAHLMSLFGGKPMIIYKGGTSREGGQTAPASTRLFQVRANSAGATRAVEVLPKAGALNSNDAFVLKTPSAAYLWVGTGASEAEKTGAQELLRVLRAQPVQVAEGSEPDGFWEALGGKAAYRTSPRLKDKKMDAHPPRLFACSNKIGRFVIEEVPGELMQEDLATDDVMLLDTWDQVFVWVGKDSQEEEKTEALTSAKRYIETDPANRDRRTPITVVKQGFEPPSFVGWFLGWDDDYWSVDPLDRAMAELAA

SEQ ID NO: 25128 - protein, 107 aa, Homo sapiens
LCCWKAPGPQARISFTSILSPSSISASLGLLPWANAVSLAPQKGGVASGFKHVVPNEVVVQRLFQVKGRRVVRATEVPVSWESFNNGDCFILDLGNVSPAFLFPRSH

SEQ ID NO: 25129 - protein, 102 aa, Homo sapiens
LTSWVSVFQNIHQWCGSNSNRYERLKATQVSKGIRDNERSGRARVHVSEEGTEPEAMLQVPVGCAMGWPWGHAAHDFLLFSRQFEVNLRKKKNFRSTPPFYF

SEQ ID NO: 25130 - protein, 541 aa, Homo sapiens
LTSWVSVFQNIHQWCGSNSNRYERLKATQVSKGIRDNERSGRARVHVSEEGTEPEAMLQVLGPKPALPAGTEDTAKEDAANRKLAKLYKVSNGAGTMSVSLVADENPFAQGALKSEDCFILDHGKDGKIFVWKGKQANTEERKAALKTASDFITKMDYPKQTQVSVLPEGGETPLFKQFFKNWRDPDQTDGLGLSYLSSHIANVERVPFDAATLHTSTAMAAQHGMDDDGTGQKQIWRIEGSNKVPVDPATYGQFYGGDSYIILYNYRHGGRQGQIIYNWQGAQSTQDEVAASAILTAQLDEELGGTPVQSRVVQGKEPAHLMSLFGGKPMIIYKGGTSREGGQTAPASTRLFQVRANSAGATRAVEVLPKAGALNSNDAFVLKTPSAAYLWVGTGASEAEKTGAQELLRVLRAQPVQVAEGSEPDGFWEALGGKAAYRTSPRLKDKKMDAHPPRLFACSNKIGRFVIEEVPGELMQEDLATDDVMLLDTWDQVFVWVGKDSQEEEKTEALTSGEDPSAWGRGEGSVACGVLGVAPVQVWE

SEQ ID NO: 25131 - protein, 124 aa, Homo sapiens
MGRVTVDVLVILACLGAISGAWPLPHSHPSSPSLYLLQVLGPKPALPAGTEDTAKEDAANRKLAKLYKVSNGAGTMSVSLVADENPFAQGALKSEDCFILDHGKDGKIFVWKGTGDRERVPTGL

SEQ ID NO: 25132 - protein, 207 aa, Homo sapiens [sequence omitted]

SEQ ID NO: 25133 - protein, 196 aa, Homo sapiens
LCLWLLRAFPAAPGLATRTGECDCVSGSMAEKRHTRDSEAQRLPDSFKDSPSKGLGPCGWILVAFSFLFTVITFPISIWMCIKIIKEYERAIIFRLGRILQGGAKGPGLFFILPCTDSFIKVDMRTISFDIPPQEILTKDSVTISVDGVVYYRVQNATLAVANITNADSATRLLAQTTLRNVLGTKNLSQISSLRL

SEQ ID NO: 25134 - protein, 137 aa, Homo sapiens
LATRTGECDCVSGSMAEKRHTRDSEAQRLPDSFKDSPSKGLGPCGWILVAFSFLFTVITFPISIWMCIKVIAAEGEMNASRALKEASMVITESPAALQLRYLQTLTTIAAEKNSTIVFPLPIDMLQGIIGAKHSHLG

SEQ ID NO: 25135 - protein, 178 aa, Homo sapiens
VLEPRLGVFSNGCFQGLSSVMALGLKCFRMVHPTFRNYLAASIRPVSEVTLKTVHERQHGHRQYMAYSAVPVRHFATKKAKAKGKGQSQTRVNINAALVEDIINLEEVNEEMKSVIEALKDNFNKTLNIRTSPGSLDKIAVVTADGKLALNQISQISMKSPQLILVNMASFPEVRWPC

SEQ ID NO: 25136 - protein, 217 aa, Homo sapiens
MFSDLPPWRICRFLFGLLWTLYPPPHPTLEEPITFCEEAFVSHYRSGAMRQFLQNATQLQLFKQFIDGRLDLLNSGEGFSDVFEEEINMGEYAGSDKLYHQWLSTVRKGSGAILNTVKTKANPAMKTVYKFAKDHAKMGIKEVKNRLKQKDIAENGCAPTPEEQLPKTAPSPLVEAKDPKLREDRRPITVHFGQTPWYLFCCLHHIPLRKGPLAPFY

SEQ ID NO: 25137 - protein, 343 aa, Homo sapiens
LQTLIISLEPEKMGRRRPAPFRALVRLACRMAGQPGHMPHGGSSNNLCHTLGPVHPPDPQRHPNTLSFRCSLADFQIEKKIGRGQFSEVYKATCLLDRKTVALKKVQIFEMMDAKARQDCVKEIGLLKQLNHPNIIKYLDSFIEDNELNIVLELADAGDLSQMIKYFKKQKRLIPERTVWKYFVQLCSAVEHMHSRRVMHRDIKPANVFITATGVVKLGDLGLGRFFSSETTAAHSLVGTPYYMSPERIHENGYNFKSDIWSLGCLLYEMAALQSPFYGDKMNLFSLCQKIEQCDYPPLPGEHYSEKLRELVSMCICPDPHQRPDIGYVHQVAKQMHIWMSST

SEQ ID NO: 25138 - protein, 19 aa, Homo sapiens
MVSTGFSLVLSIFSIKLCA

SEQ ID NO: 25139 - protein, 22 aa, Homo sapiens
LSLHFLICTMRLIVPIIYLQDC

SEQ ID NO: 25140 - protein, 26 aa, Homo sapiens
VRSTHLHTALAVHLLTFSWFSELSWA

SEQ ID NO: 25141 - protein, 74 aa, Homo sapiens
LAAMAVFEDKFRPDMERRDLKMEAVLKIPVDDSASGRRWGQDHTCGGFISERNDLVSQIHDKCTALPWSLSQEC

SEQ ID NO: 25142 - protein, 122 aa, Homo sapiens
LNAVLEADFAKRGYKLPKVRKTGTTIAGVVYKDGIVLGADTRATEGMVVADKNCSKIHFISPNIYCCGAGTAADTDMTTQLISSNLELHSLSTGRLPRVVTANRMLKQMLFRFWLLGSNGCI

SEQ ID NO: 25143 - protein, 224 aa, Homo sapiens
VPGSAPPLTALPDPAGAGSGRAAAAARGGGGGGAGSSRAAASRPRAGAGASGAEPRSGRERSRLSGRRAPAMARNTLSSRFRRVDIDEFDENKFVDEQEEAAAAAAEPGPDPSEVDGLLRQGDMLRAFHAALRNSPVNTKNQAVKERAQGVVLKVLTNFKSSEIEQAVQSLDRNGVDLLMKYIYKGFEKPTENSSAVLLQWHEKALAVGGLGSIIRVLTARKTV

SEQ ID NO: 25144 - protein, 337 aa, Homo sapiens
VTQGKFRLRPPPLPPPLLQPPPPLLPRLVILKMAPLDLDKYVEIARLCKYLPENDLKRLCDYVCDLLLEESNVQPVSTPVTVCGDIHGQFYDLCELFRTGGQVPDTNYIFMGDFVDRGYYSLETFTYLLALKAKWPDRITLLRGNHESRQITQVYGFYDECQTKYGNANAWRYCTKVFDMLTVAALIDEQILCVHGGLSPDIKTLDQIRTIERNQEIPHKGAFCDLVWSDPEDVDTWAISPRGAGWLFGAKVTNEFVHINNLKLICRAHQLVHEGYKFMFDEKLVTVWSAPNYCYRCGNIASIMVFKDVNTREPKLFRAVPDSERVIPPRTTTPYFL

SEQ ID NO: 25145 - protein, 374 aa, Homo sapiens
VTQGKFRLRPPPLPPPLLQPPPPLLPRLVILKMAPLDLDKYVEIARLCKYLPENDLKVSPICGLAPSGCGAPAGRPFLSPGPPPVFHFLRFLKERLCDYVCDLLLEESNVQPVSTPVTVCGDIHGQFYDLCELFRTGGQVPDTNYIFMGDFVDRGYYSLETFTYLLALKAKWPDRITLLRGNHESRQITQVYGFYDECQTKYGNANAWRYCTKVFDMLTVAALIDEQILCVHGGLSPDIKTLDQIRTIERNQEIPHKGAFCDLVWSDPEDVDTWAISPRGAGWLFGAKVTNEFVHINNLKLICRAHQLVHEGYKFMFDEKLVTVWSAPNYCYRCGNIASIMVFKDVNTREPKLFRAVPDSERVIPPRTTTPYFL

SEQ ID NO: 25146 - protein, 315 aa, Homo sapiens
VTQGKFRLRPPPLPPPLLQPPPPLLPRLVILKMAPLDLDKYVEIARLCKYLPENDLKRLCDYVCDLLLEESNVQPVSTPVTVCGDIHGQGDFVDRGYYSLETFTYLLALKAKWPDRITLLRGNHESRQITQVYGFYDECQTKYGNANAWRYCTKVFDMLTVAALIDEQILCVHGGLSPDIKTLDQIRTIERNQEIPHKGAFCDLVWSDPEDVDTWAISPRGAGWLFGAKVTNEFVHINNLKLICRAHQLVHEGYKFMFDEKLVTVWSAPNYCYRCGNIASIMVFKDVNTREPKLFRAVPDSERVIPPRTTTPYFL

SEQ ID NO: 25147 - protein, 51 aa, Homo sapiens
LPPPLLQPPPPLLPRLVILKMAPLDLDKYVEIARLCKYLPENDLKFWAMMH

SEQ ID NO: 25148 - protein, 98 aa, Homo sapiens
VVVVPLVATMVVVDMVAVGMAIMDLVLMEAILEGGGSYNDSGNYNNQSSNFEPMMKGNFGGRSSGSYGGGSQYFPKPQNRGGYGSSSSSSSYSSGRRF

SEQ ID NO: 25149 - protein, 9 aa, Homo sapiens
MRANPGSGS

SEQ ID NO: 25150 - protein, 17 aa, Homo sapiens
MGSSSSFYSCCFLMAMA

SEQ ID NO: 25151 - protein, 486 aa, Homo sapiens
LEFVLIFLSLVAPNKICDEMEPGTNSFRVEFPDFSSTILQKLNQQRQQGQLCDVSIVVQGHIFRAHKAVLAASSPYFCDQVLLKNSRRIVLPDVMNPRVFENILLSSYTGRLVMPAPEIVSYLTAASFLQMWHVVDKCTEVLEGNPTVLCQKLNHGSDHQSPSSSSYNGLVESFELGSGGHTDFPKAQELRDGENEEESTKDELSSQLTEHEYLPSNSSTEHDRLSTEMASQDGEEGASDSAEFHYTRPMYSKPSIMAHKRWIHVKPERLEQACEGMDVHATYDEHQVTESINTVQTEHTVQPSGVEEDFHIGEKKVEAEFDEQADESNYDEQVDFYGSSMEEFSGERSDGNLIGHRQEAALAAGYSENIEMVTGIKEEASHLGFSATDKLYPCQCGKSFTHKSQRDRHMSMHLGLRPYGCGVCGKKFKMKHHLVGHMKIHTGIKPYECNICAKRFMWRDSFHRHVTSCTKSYEAAKAEQNTTEAN

SEQ ID NO: 25152 - protein, 286 aa, Homo sapiens
LASPGPSLCRSPLWRQSQWSPVRQGCLAATGLQLRNPSRGHGQAAPLTARVKHVRSRPGAKQEGRGPWRDCLQALEDGHDTSSIYLVKPENTNRLMQVWCDQRHDPGGWTVIQRRLDGSVNFFRNWETYKQGFGNIDGEYWLGLENIYWLTNQGNYKLLVTMEDWSGRKVFAEYASFRLEPESEYYKLRLGRYHGNAGDSFTWHNGKQFTTLDRDHDVYTGNCAHYQKGGWWYNACAHSNLNGVWYRGGHYRSRYQDGVYWAEFRGGSYSLKKVVMMIRPNPNTFH

SEQ ID NO: 25153 - protein, 82 aa, Homo sapiens
LPPVPAPAAALRTQEHLRALQTCGQPSMRKTKAAEEEARWLTPLIPVLWEAEAGGSLEPRNSRLHAPRHPHYQCLRGSPLIG

SEQ ID NO: 25154 - protein, 308 aa, Homo sapiens
LFQVSMAEMDERFQQILSWQQMDQNKAISQILQESAMQKAAFEALQVKKDLMHRQIRSQIKLIETELLQLTQLELKRKSLDTESLQEMISEQRWALSSLLQQLLKEKQQREEELREILTELEAKSETRQENYWLIQYQRLLNQKPLSLKLQEEGMERQLVALLEELSAEHYLPIFAHHRLSLDLLSQMSPGDLAKVGVSEAGLQHEILRRVQELLDAARIQPELKPPMGEVVTPTAPQEPPESVRPSAPPAELEVQASECVVCLEREAQMIFLNCGHVCCCQQCCQPLRTCPLCRQDIAQRLRIYHSS

SEQ ID NO: 25155 - protein, 177 aa, Homo sapiens
LSSAGNSGGVGRIGPRHLLAMGDVLSTHLDDARRQHIAEKTGKILTEFLQFYEDQYGVALFNSMRHEIEGTGLPQAQLLWRKVPLDERIVFSGNLFQHQEDSKKWRNRFSLVPHNYGLVLYENKAAYERQVPPRAVINSAGYKILTSVDQYLELIGNSLPGSSWWKTRTRRWCCRPS

SEQ ID NO: 25156 - protein, 575 aa, Homo sapiens
MEGAGGGSVKHEDAVLLLQDDRHHDRGHNESRIAGSHVVEDINKRREPLPSLEAVYLITPSEKSVHSLISDFKDPPTAKYRAAHVFFTDSCPDALFNELVKSRAAKVIKTLTEINIAFLPYESQVYSLDSADSFQSFYSPHKAQMKNPILERLAEQIATLCATLKEYPAVRYRGEYKDNALLAQLIQDKLDAYKADDPTMGEGPDKARSQLLILDRGFDPSSPVLHELTFQAMSYDLLPIENDVYKYETSGIGEARVKEVLLDEDDDLWIALRHKHIAEVSQEVTRSLKDFSSSKRMNTGEKTTMRDLSQMLKKMPQYQKELSKYSTHLHLAEDCMKHYQGTVDKLCRVEQDLAMGTDAEGEKIKDPMRAIVPILLDANVSTYDKIRIILLYIFLKNGITEENLNKLIQHAQIPPEDSEIITNMAHLGVPIVTDSTLRRRSKPERKERISEQTYQLSRWTPIIKDIMEDTIEDKLDTKHYPYISTRSSASFSTTAVSARYGHWHKNKAPGEYRSGPRLIIFILGGVSLNEMRCAYEVTQANGKWEVLIGSTHILTPQKLLDTLKKLNKTDEEISS

SEQ ID NO: 25157 - protein, 105 aa, Homo sapiens [sequence omitted]

SEQ ID NO: 25158 - protein, 38 aa, Homo sapiens
LLLPFLLGFPVFEPWEAGCSRLLTLCLSLTNTKASISL

SEQ ID NO: 25159 - protein, 66 aa, Homo sapiens
MSRARSHLRAALFLAAASARGITTQVAARRGLSAWPVPQEPSMEYQLSPPGAGSGADPHQWAAHQS

SEQ ID NO: 25160 - protein, 174 aa, Homo sapiens
MSRARSHLRAALFLAAASARGITTQVAARRGLSAWPVPQEPSMEYQDAVRMLNTLQTNAGYLEQVKRQRGDPQTQLEAMELYLARSGLQVEDLDRLNIIHVTGTKGKGSTCAFTECILRSYGLKTGFFRFGSGSASMGSPSVLSSSPSTSGASTTGWRRPRMAAVSPCPPTSAS

SEQ ID NO: 25161 - protein, 273 aa, Homo sapiens
MSRARSHLRAALFLAAASARGITTQVAARRGLSAWPVPQEPSMEYQDAVRMLNTLQTNAGYLEQVKRQRGDPQTQLEAMELYLARSGLQVEDLDRLNIIHVTGTKGKGSTCAFTECILRSYGLKTGFFSSPHLVQVRERIRINGQPISPELFTKYFWRLYHRLEETKDGSCVSMPPYFRFLTLMAFHVFLQEKVDLAVVEVGIGGAYDCTNIIRKPVVCGVSSLGIDHTSLLGDTVEKIAWQKGGIFKVTRQTGGRERHGRPGSLRFHPGFTV

SEQ ID NO: 25162 - protein, 67 aa, Homo sapiens
LLQWPGRSACLPQHPACLLAQAQLIVCAAWPGPGSCHVLGGRFPPPSAFWEGRGPLPGTLRDRGWLE

SEQ ID NO: 25163 - protein, 655 aa, Homo sapiens
LGFDPGHLAPELFFLIILQGLAETVHCDLQPVGPERGEVTYTTSQVSKGCVAQAPNAILEVHVLFLEFPTGPSQLELTLQASKQNGTWPREVLLVLSVNSSVFLHLQALGIPLHLAYNSSLVTFQEPPGVNTTELPSFPKTQILEWAAERGPITSAAELNDPQSILLRLGQAQGSLSFCMLEASQDMGRTLEWRPRTPALVRGCHLEGVAGHKEAHILRVLPGHSAGPRTVTVKVELSCAPGDLDAVLILQGPPYVSWLIDANHNMQIWTTGEYSFKIFPEKNIRGFKLPDTPQGLLGEARMLNASIVASFVELPLASIVSLHASSCGGRLQTSPAPIQTTPPKDTCSPELLMSLIQTKCADDAMTLVLKKELVAHLKCTITGLTFWDPSCEAEDRGDKFVLRSAYSSCGMQVSASMISNEAVVNILSSSSPQRKKVHCLNMDSLSFQLGLYLSPHFLQASNTIEPGQQSFVQVRVSPSVSEFLLQLDSCHLDLGPEGGTVELIQGRAAKGNCVSLLSPSPEGDPRFSFLLHFYTVPIPKTGTLSCTVALRPKTGSQDQEVHRTVFMRLNIISPDLSGCTSKGLVLPAVLGITFGAFLIGALLTAALWYIYSHTRSPSKREPVVAVAAPASSESSSTNHSIGSTQSTPCSTSSMA

SEQ ID NO: 25164 - protein, 238 aa, Homo sapiens
LPGEAGDGPAQGLRGEGQGAQETRQDGTMGCCSSSDPRREDDLRAREKLKKTKIIFVVGGPGSGKGTQCEKIVQKYGYTHLSTGDLLRSEVSSGSARGKKLSEIMEKGQLVPLETVLDMLRDAMVAKVNTSKGFLIDGYPREVQQGEEFERRIGQPTLLLYVDAGPETMTQRLLKRGETSGRVDDNEETIKKRLETYYKATEPVIAFYEKRGIVRKVNAEGSVDSVFSQVCTHLDALK

SEQ ID NO: 25165 - protein, 52 aa, Homo sapiens
LPLAARISFQPSRPGPGAMELRAADREPPANPSLHARLAFGREMRQWNLEGR

SEQ ID NO: 25166 - protein, 11 aa, Homo sapiens
LTFGGVLFLLG

SEQ ID NO: 25167 - protein, 47 aa, Homo sapiens
MLQASAAARAQPRTSAPASASWAMPCCLHAGEVPGRSEPLRAPAPRG

SEQ ID NO: 25168 - protein, 105 aa, Homo sapiens
LAPHFAILSLEISGSAGRPLRVGEIRDTWFPRPLRLSLSSRLQLTLYQYKTCPFCSKVRAFLDFHALPYQVVEVNPVRRAEIKFSSYRKVPILVAQEGESSGRQI

SEQ ID NO: 25169 - protein, 113 aa, Homo sapiens
MQTHRQWKKKCDYWIRTFVPGCQPGEFTLGNIKSYPGLTSYLVRVVSTNYNQHAMVFFKKVSQNREYFKITLYGRTKELTSELKENFIRFSKSLGLPENHIVFPVPIDQCIDG

SEQ ID NO: 25170 - protein, 134 aa, Homo sapiens
LSCTLSLALALLRGTIWNGLGSPDLNFSLFTIQFSSRCEAPDANQQLQQAMEERAQLEAHLGQVMESVRQLQMERDKYAENLKGESAMWRQRMQQMSEQVHTLREEKECSMSRVQELETSLAELRNQMGKLGLG

SEQ ID NO: 25171 - protein, 73 aa, Homo sapiens
MINTESPTSTPTEFPARQCQKHFSREPKPNQEEAREEAGREEGAFPAPRFLKCRSDTCVGVHVLYLSINVSVH

SEQ ID NO: 25172 - protein, 37 aa, Homo sapiens
MNSISRLGSCWDVAVLLLQLLPASQVCWGPGWVSSQE

SEQ ID NO: 25173 - protein, 1165 aa, Homo sapiens
LRLAVSFSFLKMDPSGVKVLETAEDIQERRQQVLDRYHRFKELSTLRRQKLEDSYRFQFFQRDAEELEKWIQEKLQIASDENYKDPTNLQTRLMELHRQWELLLEKMREKGIKLLQAQKLVQYLRECEDVMDWINDKEAIVTSEELGQDLEHVEVLQKKFEEFQTDMAAHEERVNEVNQFAAKLIQEQHPEEELIKTKQDEVNAAWQRLKGLALQRQGKLFGAAEVQRFNRDVDETISWIKEKEQLMASDDFGRDLASVQALLRKHEGLERDLAALEDKVKALCAEADRLQQSHPLSATQIQVKREELITNWEQIRTLAAERHARLNDSYRLQRFLADFRDLTSWVTEMKALINADELASDVAGAEALLDRHQEHKGEIDAHEDSFKSADESGQALLAAGHYASDEVREKLTVLSEERAALLELWELRRQQYEQCMDLQLFYRDTEQVDNWMSKQEAFLLNEDLGDSLDSVEALLKKHEDFEKSLSAQEEKITALDEFATKLIQNNHYAMEDVATRRDALLSRRNALHERAMRRRAQLADSFHLQQFFRDSDELKSWVNEKMKTATDEAYKDPSNLQGKVQKHQAFEAELSANQSRIDALEKAGQKLIDVNHYAKDEVAARMNEVISLWKKLLEATELKGIKLREANQQQQFNRNVEDIELWLYEVEGHLASDDYGKDLTNVQNLQKKHALLEADVAAHQDRIDGITIQARQFQDAGHFDAENIKKKQEALVARYEALKEPMVARKQKLADSLRLQQLFRDVEDEETWIREKEPIAASTNRGKDLIGVQNLLKKHQALQAEIAGHEPRIKAVTQKGNAMVEEGHFAAEDVKAKLHELNQKWEALKAKASQRRQDLEDSLQAQQYFADANEAESWMREKEPIVGSTDYGKDEDSAEALLKKHEALMSDLSAYGSSIQALREQAQSCRQQVAPTDDETGKELVLALYDYQEKSPREVTMKKGDILTLLNSTNKDWWKVEVNDRQGFVPAAYVKKLDPAQSASRENLLEEQGSIALRQEQIDNQTRITKEAGSVSLRMKQVEELYHSLLELGEKRKGMLEKSCKKFMLFREANELQQWINEKEAALTSEEVGADLEQVEVLQKKFDDFQKDLKANESRLKDINKVAEDLESEGLMAEEVQAVQQQEVYGMMPRVSFGCCVWILNMRRT

SEQ ID NO: 25174 - protein, 342 aa, Homo sapiens
LHANADRIRGVIDMGNSLIERGACAGSEDAVKARLAALADQWQFLVQKSAEKSQKLKEANKQQNFNTGIKDFDFWLSEVEALLASEDYGKDLASVNNLLKKHQLLEADISAHEDRLKDLNSQADSLMTSSAFDTSQVKDKRDTINGRFQKIKSMAASRRAKLNESHRLHQFFRDMDDEESWIKEKKLLVGSEDYGRDLTGVQNLRKKHKRLEAELAAHEPAIQGVLDTGKKLSDDNTIGKEEIQQRLAQFVEHWKELKQLAAARGQRLEESLEYQQFVANVEEEEAWINEKMTLVASEDYGDTLAAIQGLLKKHEAFETDFTVHKDRVNDVCTNGQDLIKKV

SEQ ID NO: 25175 - protein, 108 aa, Homo sapiens
VCALPHSPWSLVPDRAFKPGGAVLASLGDSKGSLWVGKVMKHEGQSWSPEALRTPVPVQPPGSVGLSPLLPQRVQQWSVGMKQMAVLGAQAGYSKSTAEKGWALTPPK

SEQ ID NO: 25176 - protein, 74 aa, Homo sapiens
MEPRTRRGPSPPASPTRKPPRLQDFRCLAVLGRGHFGKPVLREADPGGCGLHRAPFPALPPCLLPDLQPCLLCD

SEQ ID NO: 25177 - protein, 61 aa, Homo sapiens
LGFKVAAMGPLLWALLSVTGQSVSLPPPARPLLPPSETWPRKGAAARSDMVCLFKTGLALY

SEQ ID NO: 25178 - protein, 54 aa, Homo sapiens
MRRILAALSPALASALAPCCFGAEVAEPGSAPLKGQGLLQPTGCTWERGVKRPR

SEQ ID NO: 25179 - protein, 11 aa, Homo sapiens
LVFLLLPAFAL

SEQ ID NO: 25180 - protein, 16 aa, Homo sapiens
MAAVFAVVTLTLGFRL

SEQ ID NO: 25181 - protein, 213 aa, Homo sapiens
MEPAGSQGVWGLDDFQFLPFIWGSSQLIDHPYLEPRHFVDEKAVNENHKDYMFLECILFITEMKTGPFAEHSNQLWNISAVPSWSKVNQGLIRMYKAEVSGGWPVCPSLLPHLVLGWGQSKRCGTWGSCFLLPHCFALNLRPAPLTLGASESPIWGMGSQRSTSHPSPEKLQSSSVLMSLEAEARTCCMGSGGDGGLPSPLSSGQRLLKARAV

SEQ ID NO: 25182 - protein, 86 aa, Homo sapiens
LEGKELTGRRCAEPPHPRPSPQLLTEEPFTKGRFSGEWRGRNAASMKTGPFAEHSNQLWNISAVPSWSKVNQGLIRMYKAEAGPCD

SEQ ID NO: 25183 - protein, 106 aa, Homo sapiens
LEGKELTGRRCAEPPHPRPSPQLLTEEPFTKGRFSGEWRGRNAASMKTGPFAEHSNQLWNISAVPSWSKVNQGLIRMYKAECLEKFPVIQHFKFGSLLPIHPVTSG

SEQ ID NO: 25184 - protein, 80 aa, Homo sapiens
LERRSEAPGESVGTTPEAQMKTGPFAEHSNQLWNISAVPSWSKVNQGLIRMYKAECLEKFPVIQHFKFGSLLPIHPVTSG

SEQ ID NO: 25185 - protein, 413 aa, Homo sapiens
LLRRRLRGSMECALDAQSLISISLRKIHSSRTQRGGIKLHKNLLVSYVLRNARQLYLSERYAELYRRQQQQQQQQPPHHQHQHLAYAAPGMPASAADFGPLQLGGGGDAEAREPAARHQLHQLHQLHQLHLQQQLHQHQHPAPRGCAAAAAAGAPAGGAGALSELPGCAALQPPHGAPHRGQPLEPLQPGPAPLPLPLPPPAPAALCPRDPRAPAACSAPPGAAPPAAAASPPASPAPASSPGFYRGAYPTPSDFGLHCSSQTTVLDLDTHVVTTVENGYLHQDCCASAHCPCCGQGAPGPGLASAAGCKRKYYPGQEEEEDDEEDAGGLGAEPPGGAPFAPCKRARFEDFCPDSSPDASNISNLISIFGSGFSGLVSRQPDSSEQPPPLNGQLCAKQALASLGAWTRAIVAF

SEQ ID NO: 25186 - protein, 12 aa, Homo sapiens
LHVLVALITVMI

SEQ ID NO: 25187 - protein, 27 aa, Homo sapiens
LEMEGGCSPPIPHAGHRWKCQTVRVHA

SEQ ID NO: 25188 - protein, 42 aa, Homo sapiens
LTAQSSTVWLPFMLVALLCLIRILGEMESFPQGAAGGRIGSI

SEQ ID NO: 25189 - protein, 433 aa, Homo sapiens
LGWAPLPVLLCRLPPLPEPDAMSSKGSVVLAYSGGLDTSCILVWLKEQGYDVIAYLANIGQKEDFEEARKKALKLGAKKVFIEDVSREFVEEFIWPAIQSSALYEDRYLLGTSLARPCIARKQVEIAQREGAKYVSHGATGKGNDQVRFELSCYSLAPQIKVIAPWRMPEFYNRFKGRNDLMEYAKQHGIPIPVTPKNPWSMDENLMHISYEAGILENPKNQAPPGLYTKTQDPAKAPNTPDILEIEFKKGVPVKVTNVKDGTTHQTSLELFMYLNEVAGKHGVGRIDIVENRFIGMKSRGIYETPAGTILYHAHLDIEAFTMDREVRKIKQGLGLKFAELVYTGFWHSPECEFVRHCIAKSQERVEGKVQVSVLKGQVYILGRESPLSLYNEELVSMNVQGDYEPTDATGFININSLRLKEYHRLQSKVTAK

SEQ ID NO: 25190 - protein, 58 aa, Homo sapiens
MSGKNYSHCPKGLRSSVCRRPVVEHKVNFEPLRRHSASLEPVVELIFLDNLLQRETLW

SEQ ID NO: 25191 - protein, 41 aa, Homo sapiens
LLIIFVSLFLLFQMYKLWDSFWSNTYKVRHQNVPQSCDIST

SEQ ID NO: 25192 - protein, 489 aa, Homo sapiens
VPLTMAAAALLLGLALLAPRAAGAGMGACYDGAGRPQRCLPVFENAAFGRLAQASHTCGSPPEDFCPHVGAAGAGAHCQRCDAADPQRHHNASYLTDFHSQDESTWWQSPSMAFGVQYPTSVNITLRLGKAYEITYVRLKFHTSRPESFAIYKRSRADGPWEPYQFYSASCQKTYGRPEGQYLRPGEDERVAFCTSEFSDISPLSGGNVAFSTLEGRPSAYNFEESPGLQEWVTSTELLISLDRLNTFGDDIFKDPKVLQSYYYAVSDFSVGGRCKCNGHASECGPDVAGQLACRCQHNTTGTDCERCLPFFQDRPWARGTAEAAHECLPCNCSGRSEECTFDRELFRSTGHGGRCHHCRDHTAGPHCERCQENFYHWDPRMPCQPCDCQSAGSLHLQCDDTGTCACKPTVTGWKCDRCLPGFHSLSEGGCRPCTCNPAGSLDTCDPRSGRCPCKENVEGNLCDRCRPGTFNLQPHNPAAGAADPGLRE

SEQ ID NO: 25193 - protein, 1579 aa, Homo sapiens
VPLTMAAAALLLGLALLAPRAAGAGMGACYDGAGRPQRCLPVFENAAFGRLAQASHTCGSPPEDFCPHVGAAGAGAHCQRCDAADPQRHHNASYLTDFHSQDESTWWQSPSMAFGVQYPTSVNITLRLGKAYEITYVRLKFHTSRPESFAIYKRSRADGPWEPYQFYSASCQKTYGRPEGQYLRPGEDERVAFCTSEFSDISPLSGGNVAFSTLEGRPSAYNFEESPGLQEWVTSTELLISLDRLNTFGDDIFKDPKVLQSYYYAVSDFSVGGRCKCNGHASECGPDVAGQLACRCQHNTTGTDCERCLPFFQDRPWARGTAEAAHECLPCNCSGRSEECTFDRELFRSTGHGGRCHHCRDHTAGPHCERCQENFYHWDPRMPCQPCDCQSAGSLHLQCDDTGTCACKPTVTGWKCDRCLPGFHSLSEGGCRPCTCNPAGSLDTCDPRSGRCPCKENVEGNLCDRCRPGTFNLQPHNPAGCSSCFCYGHSKVCASTAQFQVHHILSDFHQGAEGWWARSVGGSEHPPQWSPNGVLLSPEDEEELTAPEKFLGDQRFSYGQPLILTFRVPPGDSPLPVQLRLEGTGLALSLRHSSLSGPQDAGHPREVELRFHLQETSEDVAPPLPPFHFQRLLANLTSLRLRVSPGPSPAGPVFLTEVRLTSARPGLSPPASWVEICSCPTGYTGQFCESCAPGYKREMPQGGPYASCVPCTCNQHGTCDPNTGICVCSHHTEGPSCERCLPGFYGNPFAGQADDCQPCPCPGQSACTTIPESREVVCTHCPPGQRGRRCEVCDDGFFGDPLGLFGHPQPCHQCQCSGNVDPNAVGNCDPLSGHCLRCLHNTTGDHCEHCQEGFYGSALAPRPADKCMPCSCHPQGSVSEQMPCDPVTGQCSCLPHVTARDCSRCYPGFFDLQPGRGCRSCKCHPLGSQEDQCHPKTGQCTCRPGVTGQACDRCQLGFFGFSIKGCRACRCSPLGAASAQCHENGTCVCRPGFEGYKCDRCHDNFFLTADGTHCQQCPSCYALVKEEAAKLKARLTLTEGWLQGSDCGSPWGPLDILLGEAPRGDVYQGHHLLPGAREAFLEQMMSLEGAVKAAREQLQRLNKGARCAQAGSQKTCTQLADLEAVLESSEEEILHAAAILASLEIPQEGPSQPTKWSHLATEARALARSHRDTATKIAATAWRALLASNTSYALLWNLLEGRVALETQRDLEDRYQEVQAAQKALRTAVAEVLPEAESVLATVQQVGADTAPYLALLASPGALPQKSRAEDLGLKAKALEKTVASWQHMATEAARTLQTAAQATLRQTEPLTKLHQEARAALTQASSSVQAATVTVMGARTLLADLEGMKLQFPRPKDQAALQRKADSVSDRLLADTRKKTKQAERMLGNAAPLSSSAKKKGREAEVLAKDSAKLAKALLRERKQAHRRASRLTSQTQATLQQASQQVLASEARRQELEEAERVGAGLSEMEQQIRESRISLEKDIETLSELLARLGSLDTHQAPAQALNETQWALERLRLQLGSPGSLQRKLSLLEQESQQQELQIQGFESDLAEIRADKQNLEAILHSLPENCASWQ

SEQ ID NO: 25194 - protein, 2131 aa, Homo sapiens [sequence omitted]

SEQ ID NO: 25195 - protein, 2117 aa, Homo sapiens
LRAAGAEGRKFAVERPGFRGQGRGRQRWLLRHTEGGAMGDEMDAMIPEREMKDFQFRALKKVRIFDSPEELPKERSSLLAVSNKYGLVFAGGASGLQIFPTKNLLIQNKPGDDPNKIVDKVQGLLVPMKFPIHHLALSCDNLTLSACMMSSEYGSIIAFFDVRTFSNEAKQQKRPFAYHKLLKDAGGMVIDMKWNPTVPSMVAVCLADGSIAVLQVTETVKVCATLPSTVAVTSVCWSPKGKQLAVGKQNGTVVQYLPTLQEKKVIPCPPFYESDHPVRVLDVLWIGTYVFAIVYAAADGTLETSPDVVMALLPKKEEKHPEIFVNFMEPCYGSCTERQHHYYLSYIEEWDLVLAASAASTEVSILARQSDQINWESWLLEDSSRAELPVTDKSDDSLPMGVVVDYTNQVEITISDEKTLPPAPVLMLLSTDGVLCPFYMINQNPGVKSLIKTPERLSLEGERQPKSPGSTPTTPTSSQAPQKLDASAAAAPASLPPSSPAAPIATFSLLPAGGAPTVFSFGSSSLKSSATVTGEPPSYSSGSDSSKAAPGPGPSTFSFVPPSKASLAPTPAASPVAPSAASFSFGSSGFKPTLESTPVPSVSAPNIAMKPSFPPSTSAVKVNLSENSSQSAPPMSPFSSASKPAASGPLSHPTPLSAPPSSVPLKSSVLPSPSAGRSAQGSSSPVPSMVQKSPRITPPAAKPGSPQAKSLQPAVAEKQGHQWKDSDPVMAGIGEEIAHFQKELEELKARTSKACFQVGTSEEMKMLRTESDDLHTFLLEIKETTESLHGDISSLKTTLLEGFAGVEEAREQNERNRDSGYLHLLYKRPLDPKSEAQLQEIRRLHQYVKFAVQDVNDVLDLEWDQHLEQKKKQRHLLVPERETLFNTLANNREIINQQRKRLNHLVDSLQQLRLYKQTSLWSLSSAVPSQSSIHSFDSDLESLCNALLKTTIESHTKSLPKVPAKLSPMKQAQLRNFLAKRKTPPVRSTAPASLSRSAFLSQRYYEDLDEVSSTSSVSQSLESEDARTSCKDDEAVVQAPRHAPVVRTPSIQPSLLPHAAPFAKSHLVHGSSPGVMGTSVATSASKIIPQGADSTMLATKTVKHGAPSPSHPISAPQAAAAAALRRQMASQAPAVNTLTESTLKNVPQVVNVQELKNNPATPSTAMGSSVPYSTAKTPHPVLTPVAANQAKQGSLINSLKPSGPTPASGQLSSGDKASGTAKIETAVTSTPSASGQFSKPFSFSPSGTGFNFGIITPTPSSNFTAAQGATPSTKESSQPDAFSSGGGSKPSYEAIPESSPPSGITSASNTTPGEPAASSSRPVAPSGTALSTTSSKLETPPSKLGELLFPSSLAGETLGSFSGLRVGQADDSTKPTNKASSTSLTSTQPTKTSGVPSGFNFTAPPVLGKHTEPPVTSSATTTSVAPPAATSTSSTAVFGSLPVTSAGSSGVISFGGTSLSAGKTSFSFGSQQTNSTVPPSAPPPTTAATPLPTSFPTLSFGSLLSSATTPSLPMSAGRSTEEATSSALPEKPGDSEVSASAASLLEEQQSAQLPQAPPQTSDSVKKEPVLAQPAVSNSGTAASSTSLVALSAEATPATTGVPDARTEAVPPASSFSVPGQTAVTAAAISSAGPVAVETSSTPIASSTTSIVAPGPSAEAAAFGTVTSGSSVFAQPPAASSSSAFNQLTNNTATAPSATPVFGQVAASTAPSLFGQQTGSTASTAAATPQVSSSGFSSPAFGTTAPGVFGQTTFGQASVFGQSASSAASVFSFSQPGFSSVPAFGQPASSTPTSTSGSVFGAASSTSSSSSFSFGQSSPNTGGGLFGQSNAPAFGQSPGFGQGGSVFGGTSAATTTAATSGFSFCQASGFGSSNTGSVFGQAASTGGIVFGQQSSSSSGSVFGSGNTGRGGGFFSGLGGKPSQDAANKNPFSSASGGFGSTATSNTSNLFGNSGAKTFGGFASSSFGEQKPTGTFSSGGGSVASQGFGFSSPNKTGGFGAAPVFGSPPTFGGSPGFGGVPAFGSAPAFTSPLGSTGGKVFGEGTAAASAGGFGFGSSSNTTSFGTLASQNAPTFGSLSQQTSGFGTQSSGFSGFGSGTGGFSFGSNNSSVQGFGGWRS

SEQ ID NO: 25196 - protein, 70 aa, Homo sapiens
LDVLWIGTYVFAIVYAAADGTLETSPDVVMALLPKKEEKHPEIFVNFMEPCYGSCTERQHHYYLSYIEEW

SEQ ID NO: 25197 - protein, 64 aa, Homo sapiens
LQEISEIHHSLLIMKSSLLLRGVHFCFHLPGTAKIETAVTSTPSASGQFSKPFSFSPSGGNTLH

SEQ ID NO: 25198 - protein, 929 aa, Homo sapiens
LQEISEIHHSLLIMKSSLLLRGVHFCFHLPGTAKIETAVTSTPSASGQFSKPFSFSPSGTGFNFGIITPTPSSNFTAAQGATPSTKESSQPDAFSSGGGSKPSYEAIPESSPPSGITSASNTTPGEPAASSSRPVAPSGTALSTTSSKLETPPSKLGELLFPSSLAGETLGSFSGLRVGQADDSTKPTNKASSTSLTSTQPTKTSGVPSGFNFTAPPVLGKHTEPPVTSSATTTSVAPPAATSTSSTAVFGSLPVTSAGSSGVISFGGTSLSAGKTSFSFGSQQTNSTVPPSAPPPTTAATPLPTSFPTLSFGSLLSSATTPSLPMSAGRSTEEATSSALPEKPGDSEVSASAASLLEEQQSAQLPQAPPQTSDSVKKEPVLAQPAVSNSGTAASSTSLVALSAEATPATTGVPDARTEAVPPASSFSVPGQTAVTAAAISSAGPVAVETSSTPIASSTTSIVAPGPSAEAAAFGTVTSGSSVFAQPPAASSSSAFNQLTNNTATAPSATPVFGQVAASTAPSLFGQQTGSTASTAAATPQVSSSGFSSPAFGTTAPGVFGQTTFGQASVFGQSASSAASVFSFSQPGFSSVPAFGQPASSTPTSTSGSVFGAASSTSSSSSFSFGQSSPNTGGGLFGQSNAPAFGQSPGFGQGGSVFGGTSAATTTAATSGFSFCQASGFGSSNTGSVFGQAASTGGIVFGQQSSSSSGSVFGSGNTGRGGGFFSGLGGKPSQDAANKNPFSSASGGFGSTATSNTSNLFGNSGAKTFGGFASSSFGEQKPTGTFSSGGGSVASQGFGFSSPNKTGGFGAAPVFGSPPTFGGSPGFGGVPAFGSAPAFTSPLGSTGGKVFGEGTAAASAGGFGFGSSSNTTSFGTLASQNAPTFGSLSQQTSGFGTQSSGFSGFGSGTGGFSFGSNNSSVQGFGGWRS

SEQ ID NO: 25199 - protein, 23 aa, Homo sapiens
MAYRVLGKLLQPGACHRLQTCQA

SEQ ID NO: 25200 - protein, 432 aa, Homo sapiens
LGRASADCAAMLHLLALFLHCLPLASGDYDICKSWVTTDEGPTWEFYACQPKVMRLKDYVKVKVEPSGITCGDPPERFCSHENPYLCSNECDASNPDLAHPPRLMFDKEEEGLATYWQSITWSRYPSPLEANITLSWNKTVELTDDVVMTFEYGRPTVMVLEKSLDNGRTWQPYQFYAEDCMEAFGMSARRARDMSSSSAHRVLCTEEYSRWAGSKKEKHVRFEVRDRFAIFAGPDLRNMDNLYTRLESAKGLKEFFTLTDLRMRLLRPALGGTYVQRENLYKYFYAISNIEVIGRCKCNLHANLCSMREGSLQCECEHNTTGPDCGKCKKNFRTRSWRAGSYLPLPHGSPNACATAGSFGTLQTPPPGRSPSALRGSRRGLANVKEPAGSRPQISEMLLGCTVTLHQGSVGPHIPPKLSLPDPGGPWLGSQ

SEQ ID NO: 25201 - protein, 540 aa, Homo sapiens
LGRASADCAAMLHLLALFLHCLPLASGDYDICKSWVTTDEGPTWEFYACQPKVMRLKDYVKVKVEPSGITCGDPPERFCSHENPYLCSNECDASNPDLAHPPRLMFDKEEEGLATYWQSITWSRYPSPLEANITLSWNKTVELTDDVVMTFEYGRPTVMVLEKSLDNGRTWQPYQFYAEDCMEAFGMSARRARDMSSSSAHRVLCTEEYSRWAGSKKEKHVRFEVRDRFAIFAGPDLRNMDNLYTRLESAKGLKEFFTLTDLRMRLLRPALGGTYVQRENLYKYFYAISNIEVIGRCKCNLHANLCSMREGSLQCECEHNTTGPDCGKCKKNFRTRSWRAGSYLPLPHGSPNACATAGSFGNCECYGHSNRCSYIDFLNVVTCVSCKHNTRGQHCQHCRLGYYRNGSAELDDENVCIECNCNQIGSVHDRCNETGFCECREGAAGPKCDDCLPTHYWRQGCYPNVCDDDQLLCQNGGTCLQNQRCACPRGYTGVRCEQPRCDPADDDGGLDCDRAPGAAPRPATLLGCLLLLGLAARLGR

SEQ ID NO: 25202 - protein, 20 aa, Homo sapiens
MFFWGQSLGIYECKSVFVHN

SEQ ID NO: 25203 - protein, 41 aa, Homo sapiens
MMYLYALSLLFCALEFSNSVRLGSVSRMEPLPSRLGHQKSL

SEQ ID NO: 25204 - protein, 488 aa, Homo sapiens
LGPARSLQGGAAARADDAVGAAALATRLLGSGEPRRLHGRHYRPAPYPPRDAPVRGGEPHLRVDAVPRIVILGPPASGKTTIAMWLCKHLNSSLLTLENLILNEFSYTATEARRLYLQRKTVPSALLVQLIQERLAEEDCIKQGWILDGIPETREQALRIQTLGITPRHVIVLSAPDTVLIERNLGKRIDPQTGEIYHTTFDWPPESEIQNRLMVPEDISELETAQKLLEYHRNIVRVIPSYPKILKVISADQPCVDVFYQALTYVQSNHRTNAPFTPRVLLLGPVGSGKSLQAALLAQKYRLVNVCCGQLLKEAVADRTTFGELIQPFFEKEMAVPDSLLMKVLSQRLDQQDCIQKGWVLHGVPRDLDQAHLLNRLGYNPNRVFFLNVPFDSIMERLTLRRIDPVTGERYHLMYKPPPTMEIQARLLQNPKDAEEQVKLKMDLFYRNSADLEQLYGSAITLNGDQDPYTVFEYIESGIINPLPKKIP

SEQ ID NO: 25205 - protein, 757 aa, Homo sapiens
LMLTMGRLQLVVLGLTCCWAVASAAKLGAVYTEGGFVEGVNKKLGLLGDSVDIFKGIPFAAPTKALENPQPHPGWQGTLKAKNFKKRCLQATITQDSTYGDEDCLYLNIWVPQGRKQVSRDLPVMIWIYGGAFLMGSGHGANFLNNYLYDGEEIATRGNVIVVTFNYRVGPLGFLSTGDANLPGNYGLRDQHMAIAWVKRNIAAFGGDPNNITLFGESAGGASVSLQTLSPYNKGLIRRAISQSGVALSPWVIQKNPLFWAKKVAEKVGCPVGDAARMAQCLKVTDPRALTLAYKVPLAGLEYPMLHYVGFVPVIDGDFIPADPINLYANAADIDYIAGTNNMDGHIFASIDMPAINKGNKKVTEEDFYKLVSEFTITKGLRGAKTTFDVYTESWAQDPSQENKKKTVVDFETDVLFLVPTEIALAQHRANAKSAKTYAYLFSHPSRMPVYPKWVGADHADDIQYVFGKPFATPTGYRPQDRTVSKAMIAYWTNFAKTGDPNMGDSAVPTHWEPYTTENSGYLEITKKMGSSSMKRSLRTNFLRYWTLTYLALPTVTDQEATPVPPTGDSEATPVPPTGDSETAPVPPTGDSGAPPVPPTGDSGAPPVPPTGDSGAPPVPPTGDSGAPPVPPTGDSGAPPVPPTGDSGAPPVPPTGDSGAPPVPPTGDSGAPPVPPTGDAGPPPVPPTGDSGAPPVPPTGDSGAPPVTPTGDSETAPVPPTGDSGAPPVPPTGDSEAAPVPPTDDSKEAQMPAVIRF

SEQ ID NO: 25206 - protein, 177 aa, Homo sapiens
VTCRGRQHRALEMKTLFLGVTLGLAAALSFTLEEEDITGTWYVKAMVVDKDFPEDRRPRKVSPVKVTALGGGKLEATFTFMREDRCIQKKILMRKTEEPGKYSACLSAVEMDQITPALWEALAIDTLRKLRIGTRRPRIRWGQEAHVPAGAAQEGPLHLLLQRPAPWGPAPHGKACG

SEQ ID NO: 25207 - protein, 112 aa, Homo sapiens
LESVTPMTLTILEGGNLEAKATMLISGQCQEVKVILEKTDEPGKYTANRGKHVAYIIRSHMKDHYIFYCEGRDPENNLEALEDFEKAAGARGLSTESILIPRQSETCSPGSD

SEQ ID NO: 25208 - protein, 178 aa, Homo sapiens
LNAGSGTFRPRERVRETGAWSAFPGLKASPRFAGSGRRNGGGGQSLPVPHCLCSQEPRDRRRWPLLPGHVSPQLTRTEDNPEVWHMGTWHWESGEHVQAWCILGQNAMAPPRSLGFCLLGSHSFLFPSAPGRHFTAQNLEGGSSTFPESTHVSWVKCIGPRERERKNKSWRESEVNAR

SEQ ID NO: 25209 - protein, 59 aa, Homo sapiens [sequence omitted]

SEQ ID NO: 25210 - protein, 99 aa, Homo sapiens
LGCGRVFLTLLLSCSPLPWLSSLPAPVSPWGFWWWKSSSLCEANDLPLCEAYGRLDLDTDSADGLSAPLLASPEPSAGPLQVAAPAHSHAGGPGPTEHA

SEQ ID NO: 25211 - protein, 36 aa, Homo sapiens
LGLASRQGCLLLFQILAGLSSGAMPGFQSRAPGQSV

SEQ ID NO: 25212 - protein, 25 aa, Homo sapiens
LGKLLVWVLLASKLAVGRASETTQG

SEQ ID NO: 25213 - protein, 257 aa, Homo sapiens
LAYVAAAGAAADAERGRPPGTSCGGRSGCGRRRARASERASEPSRASRRRHGPERPDGHGRGLRRPVPPCHKAVPAPRGAPLSDQHLPGGRHPYVVPVERAARLHRHHLELRLPAGLVLRLPQLAGTADWLRPGVEQELRAVRLLRALWNHSSADDCLQHFMGLEVFDEIVQNIVGTALMILVAIGFKTKLAALTLVVWLFAINVYFNAFWTIPVYKPMHDFLKYDFFQTMSVIGGLLLVVALGPGGVSMDEKKKEW

SEQ ID NO: 25214 - protein, 352 aa, Homo sapiens
LAYVAAAGAAADAERGRPPGTSCGGRSGCGRRRARASERASEPSRASRRRHGPERPDGHGRGLRRPASVPHTPRPRTCLAAAWCSPPQPPHPWVSVALQFLRVTKQYLPHVARLCLISTFLEDGIRMWFQWSEQRDYIDTTWNCGYLLASSFVFLNLLGQLTGCVLVLSRNFVQYACFGLFGIIALQTIAYSILWDLKFLMRNLALGGGLLLLLAESRSEGKSMFAGVPTMRESSPKQYMQLGGRVLLVLMFMTLLHFDASFFSIVQNIVGTALMILVAIGFKTKLAALTLVVWLFAINVYFNAFWTIPVYKPMHDFLKYDFFQTMSVIGGLLLVVALGPGGVSMDEKKKEW

SEQ ID NO: 25215 - protein, 310 aa, Homo sapiens
VRAEVCATRAGSLPESFPGRGPCGGCVSAWPGQALVLPGRRARGGRGLGWPPAQALDGSRMGKAKVPASKRAPSSPVAKPGPVKTLTRKKNKKKKRFWKSKAREVSKKPASGPGAVVRPPKAPEDFSQNWKALQEVPRWTGGRQYLAPRPVEQSTIRKEPRKGQMVILFQNEGTSSIRSGKLRRQPQPHPPREELEVVQKEVAEMLKGRILVGHALHNDLKVLFLDHPKKKIRDTQKYKPFKSQVKSGRPSLRLLSEKILGLQVQQAEHCSIQDAQAAMRLYVMVKKEWESMARDRRPLLTAPDHCSDDA

SEQ ID NO: 25216 - protein, 482 aa, Homo sapiens
VRAEVCATRAGSLPESFPGRGPCGGCVSAWPGQALVLPGRRARGGRGLGWPPAQALDGSRMGKAKVPASKRAPSSPVAKPGPVKTLTRKKNKKKKRFWKSKAREVSKKPASGPGAVVRPPKAPEDFSQNWKALQEWLLKQKSQAPEKPLVISQMGSKKKPKIIQQNKKETSPQVKGEEMPAGKDQEASRGSVPSGSKMDRRAPVPRTKASGTEHNKKGTKERTNGDIVPERGDIEHKKRKAKEAAPAPPTEEDIWFDDVDPADIEAAIGPEAAKIARKQLGQSEGSVSLSLVKEQAFGGLTRALALDCEMVGVGPKGEESMAARVSIVNQYGKCVYDKYVKPTEPVTDYRTAVSGIRPENLKQGEELEVVQKEVAEMLKGRILVGHALHNDLKVLFLDHPKKKIRDTQKYKPFKSQVKSGRPSLRLLSEKILGLQVQQAEHCSIQDAQAAMRLYVMVKKEWESMARDRRPLLTAPDHCSDDA

SEQ ID NO: 25217 - protein, 98 aa, Homo sapiens
LEKQGAGSKQEASKRPRCCGATSKGTRRLFSKLEGAARGSKMDRRAPVPRTKASGTEHNKKGTKERTNGDIVPERGDIEHKKRKAKEAAPAPPTERRA

SEQ ID NO: 25218 - protein, 104 aa, Homo sapiens
LPGRRARGGRGLGWPPAQALDGSRMGKAKVPASKRAPSSPVAKPGPVKTLTRKKNKKKKRFWKSKAREVSKKPASGPGAVVRPPKAPEDFSQNWKALQEGRHLV

SEQ ID NO: 25219 - protein, 41 aa, Homo sapiens
MLGAARRPWGPLPVPGLTPGGVSGNPRPFKRRWLLFHRWRP

SEQ ID NO: 25220 - protein, 119 aa, Homo sapiens
VNSSLTSPTGRGSMAAPSLHPSLGPGIGSPGQLHSPISTLSSPINGMGPPFSVISSPMGPHSMSVPTTPTLGFSTGSPQVSAGLGQGEGVGPGVGLWLQLQDDRLILRPLGGRCCGLPA

SEQ ID NO: 25221 - protein, 44 aa, Homo sapiens
MFVVLISVFVPSRSVMPCAASVDGVMYNELHESLQGCLQHVFSK

SEQ ID NO: 25222 - protein, 176 aa, Homo sapiens
VLNPGVGTRARRRRRSQRSRGQSRSASASTQPPAGQHPGPCMPGRWRWQRDMHPARKLLSLLFLILMGTELTQVLPTNPEESWQVYSSAQDSEGRCICTVVAPQQTMCSRDARTKQLRQLLEKVQNMSQSIEVLDRRTQRDLQYVEKMENQMKGLESKFKQVEESHKQHLARQFKG

SEQ ID NO: 25223 - protein, 508 aa, Homo sapiens
VLNPGVGTRARRRRRSQRSRGQSRSASASTQPPAGQHPGPCMPGRWRWQRDMHPARKLLSLLFLILMGTELTQVLPTNPEESWQVYSSAQDSEGRCICTVVAPQQTMCSRDARTKQLRQLLEKVQNMSQSIEVLDRRTQRDLQYVEKMENQMKGLESKFKQVEESHKQHLARQFKAIKAKMDELRPLIPVLEEYKADAKLVLQFKEEVQNLTSVLNELQEEIGAYDYDELQSRVSNLEERLRACMQKLACGKLTGISDPVTVKTSGSRFGSWMTDPLAPEGDNRVWYMDGYHNNRFVREYKSMVDFMNTDNFTSHRLPHPWSGTGQVVYNGSIYFNKFQSHIIIRFDLKTETILKTRSLDYAGYNNMYHYAWGGHSDIDLMVDESGLWAVYATNQNAGNIVVSRLDPVSLQTLQTWNTSYPKRSAGEAFIICGTLYVTNGYSGGTKVHYAYQTNASTYEYIDIPFQNKYSHISMLDYNPKDRALYAWNNGHQILYNVTLFHVIRSDEL

SEQ ID NO: 25224 - protein, 476 aa, Homo sapiens
LPQSGPSAGIGEGCPGVRMGEAPGREGRGPCPQLESPRRRRVLPTNPEESWQVYSSAQDSEGRCICTVVAPQQTMCSRDARTKQLRQLLEKVQNMSQSIEVLDRRTQRDLQYVEKMENQMKGLESKFKQVEESHKQHLARQFKAIKAKMDELRPLIPVLEEYKADAKLVLQFKEEVQNLTSVLNELQEEIGAYDYDELQSRVSNLEERLRACMQKLACGKLTGISDPVTVKTSGSRFGSWMTDPLAPEGDNRVWYMDGYHNNRFVREYKSMVDFMNTDNFTSHRLPHPWSGTGQVVYNGSIYFNKFQSHIIIRFDLKTETILKTRSLDYAGYNNMYHYAWGGHSDIDLMVDESGLWAVYATNQNAGNIVVSRLDPVSLQTLQTWNTSYPKRSAGEAFIICGTLYVTNGYSGGTKVHYAYQTNASTYEYIDIPFQNKYSHISMLDYNPKDRALYAWNNGHQILYNVTLFHVIRSDEL

SEQ ID NO: 25225 - protein, 172 aa, Homo sapiens
LGAGAGASSERALEAARGAMSVPLLKIGVVLSTMAMITNWMSQTLPSLVGLNTTKLSAAGGGTLDRSTGVLPTNPEESWQVYSSAQDSEGRCICTVVAPQQTMCSRDARTKQLRQLLEKVQNMSQSIEVLDRRTQRDLQYVEKMENQMKGLESKFKQVEESHKQHLARQFKG

SEQ ID NO: 25226 - protein, 504 aa, Homo sapiens
LGAGAGASSERALEAARGAMSVPLLKIGVVLSTMAMITNWMSQTLPSLVGLNTTKLSAAGGGTLDRSTGVLPTNPEESWQVYSSAQDSEGRCICTVVAPQQTMCSRDARTKQLRQLLEKVQNMSQSIEVLDRRTQRDLQYVEKMENQMKGLESKFKQVEESHKQHLARQFKAIKAKMDELRPLIPVLEEYKADAKLVLQFKEEVQNLTSVLNELQEEIGAYDYDELQSRVSNLEERLRACMQKLACGKLTGISDPVTVKTSGSRFGSWMTDPLAPEGDNRVWYMDGYHNNRFVREYKSMVDFMNTDNFTSHRLPHPWSGTGQVVYNGSIYFNKFQSHIIIRFDLKTETILKTRSLDYAGYNNMYHYAWGGHSDIDLMVDESGLWAVYATNQNAGNIVVSRLDPVSLQTLQTWNTSYPKRSAGEAFIICGTLYVTNGYSGGTKVHYAYQTNASTYEYIDIPFQNKYSHISMLDYNPKDRALYAWNNGHQILYNVTLFHVIRSDEL

SEQ ID NO: 25227 - protein, 39 aa, Homo sapiens
MGAGAPGRQALPAAGGAPQLPRPDRAGRPQMSPARAAPR

SEQ ID NO: 25228 - protein, 68 aa, Homo sapiens
VLAAGFIILQFEVTTIWGTSLRPAEGQDFQQSVGGAGPSWRWPQESYGHTQTHLVWPAQSWMPPLGNV

SEQ ID NO: 25229 - protein, 709 aa, Homo sapiens
VKVQRAGGTSNMAAAGAAVARSPGIGAGPALRARRSPPPRAARLPRLLVLLAAAAVGPGAGGAARLYRAGEDAVWVLDSGSVRGATANSSAAWLVQFYSSWCGHCIGYAPTWRALAGDVRDWASAIRVAALDCMEEKNQAVCHDYDIHFYPTFRYFKAFTKEFTTGENFKGPDRELRTVRQTMIDFLQNHTEGSRPPACPRLDPIQPSDVLSLLDNRGSHYVAIVFESNSSYLGREVILDLIPYESIVVTRALDGDKAFLEKLGVSSVPSCYLIYPNGSHGLINVVKPLRAFFSSYLKSLPDVRKKSLPLPEKPHKEENSEIVVWREFDKSKLYTVDLESGLHYLLRVELAAHKSLAGAELKTLKDFVTVLAKLFPGRPPVKKLLEMLQEWLASLPLDRIPYNAVLDLVNNKMRISGIFLTNHIKWVGCQGSRSELRGYPCSLWKLFHTLTVEASTHPDALVGTGFEDDPQAVLQTMRRYVHTFFGCKECGEHFEEMAKESMDSVKTPDQAILWLWKKHNMVNGRLAGHLSEDPRFPKLQWPTPDLCPACHEEIKGLASWDEGHVLTFLKQHYGRDNLLDTYSADQGDSSEGGTLARGEEEEKRLTPPEVSHGDRDTQSVRPPGALGPRPALPESLHHSLDGKLQSLDGPGAHKEVGGAAPFLGVDFSSLDMSLCVVLYVASSLFLMVMYFFFRVRSRRWKVKHHHPAV

SEQ ID NO: 25230 - protein, 218 aa, Homo sapiens
VWPGQAAPGLVWGSAGLALAAVTPLPPQSIPRAPSSDEECFFDLLTKFQSSRMDDQRCPLDDGQAGAAEATAAPTLEDRIAQPSMTASPQTEEFFDLIASSQSRRLDDQRASVGSLPGLRITHSNAGHLRGHGEPQEPGDDFFNMLIKYQSSRIDDQRCPPPDVLPRGPTMPDEDFFSLIQRVQAKRMDEQRVDLAGGPEQGAGGPPEPQQQCQPGAS

SEQ ID NO: 25231 - protein, 535 aa, Homo sapiens
VTTEAGRRRKMAAVVLAATRLLRGSGSWGCSRLRFGPPAYRRFSSGGAYPNIPLSSPLPGVPKPVFATVDGQEKFETKVTTLDNGLRVASQNKFGQFCTVGILINSGSRYEAKYLSGIAHFLEKLAFSSTARFDSKDEILLTLEKHGGICDCQTSRDTTMYAVSADSKGLDTVVALLADVVLQPRLTDEEVEMTRMAVQFELEDLNLRPDPEPLLTEMIHEAAYRENTVGLHRFCPTENVAKINREVLHSYLRNYYTPDRMVLAGVGVEHEHLVDCARKYLLGVQPAWGSAEAVDIDRSVAQYTGGIAKLERDMSNVSLGPTPIPELTHIMVGLESCSFLEEDFIPFAVLNMMMGGGGSFSAGGPGKGMFSRLYLNVLNRHHWMYNATSYHHSYEDTGLLCIHASADPRQVREMVEIITKEFILMGGTVDTVELERAKTQLTSMLMMNLESRPVIFEDVGRQVLATRSRKLPHELCTLIRNVKPEDVKRVASKMLRGKPAVAALGDLTDLPTYEHIQTALSSKDGRLPRTYRLFR

SEQ ID NO: 25232 - protein, 133 aa, Homo sapiens
LFLFVTLSVAQAGVQRRDPGSLQPLPPGFKGSSCRSLLRIWDYRRPPPHPAKFCIFSRGGVSPCWRGWSRTPGLGLPKCWDSRRGPLRPACPLCFFLRQEAPDVLRLLSFSHLLMRNILVGSSCCWKELQLNP

SEQ ID NO: 25233 - protein, 83 aa, Homo sapiens
MFSKMFHRRVPLDPFVLVTWRKASPCDGAALSVPRSARVNPGTSSGRLCPLFWGRLPRLLIQEASSRRERLFFLNENCYIANC

SEQ ID NO: 25234 - protein, 24 aa, Homo sapiens
LAGVRALLVLLGALSRPCLPGGHL

SEQ ID NO: 25235 - protein, 77 aa, Homo sapiens
VKMRQGLLVLALVLVLVLVLAAGSQVQEWYPRESHALNWNKGQEEAGGVRGKGEQSGPAPRAPRLQTIGRMFRASRV

SEQ ID NO: 25236 - protein, 123 aa, Homo sapiens
LPSTRQGVPRGGTGEAVKEEGRGSSLHPPLPPQGLGEYAACQSHAFMKGVFTFVTGTGMAFGLQMFIQRKFPYPLQWSLLVAVVAGSVVSYGVTRVESEKCNNLWLFLETGQLPKDRSTDQRS

SEQ ID NO: 25237 - protein, 419 aa, Homo sapiens
VAMRPHWRPTGRAHPRAPSHQWCLQALCPRGAPAPAHPSPPHSCPSMPPHHPLCPLYHPQRPCPHLRAPQPPPHGAASSLGCLGRHLPPRQPLHLQSQSRPQRAQQRSRVWRTLFLTTAWTAASWKTQPPPGTRRRWGPRLPSRTATVMGRPWAATRWWQGSRTMWTSKTSHVGVPRCLQAPSPVKTSLFRVRRKQKWQLPQKALPQLPSSAQSQRPSGPEKRSSTRPPAEMEPGKGEQASSSESDPEGPIAAQMLSFVMDDPDFESEGSDTQRRADDFPVRDDPSDVTDEDEGPAEPPPPPKLPLPAFRLKNDSDLFGLGLEEAGPKESSEEGKEGKTPSKEKKKKKKKGKEEEEKAAKKKSKHKKSKDKEEGKEERRRRQQRPPRSRERTAADELEAFLGGGAPGGRHPGGGDYEEL

SEQ ID NO: 25238 - protein, 291 aa, Homo sapiens
LRQRKRVRVAQGGGGAAGGGGRGPPGQNVTMDEGGTPLLPDSLVYQIFLSLGPADVLAAGLVCRQWQAVSRDEFLWREQFYRYYQVARDVPRHPAAMSWYEEFQRLYDTVPCVEVQTLREHTDQVLHLSFSHSGYQFASCSKDCTVKIWSNDLTISLLHSADMRPYNWSYTQFSQFNKDDSLLLASGVFLGPHNSSSGEIAVISLDSFALLSRVRNKPYDVFGCWLTETSLISGNLHRIGDITSCSVLWLNNAFQVRAGLGAGLPSWGLAPGAHLARAPAPRMWSQRTSTW

SEQ ID NO: 25239 - protein, 173 aa, Homo sapiens
LAPGPGHPLCCRRMATHHTLWMGLALLGVLGDLQAAPEAQVSVQPNFQQDKFLGRWFSAGLASNSSWLREKKAALSMCKSVVAPATDGGLNLTSTFLRKNQCETRTMLLQPAGSLGSYSYRSPREWGLHRPPGPSLGATLAGTTLGQPPAAEIHGVGGDGCPTSVRGKGQAWA

SEQ ID NO: 25240 - protein, 203 aa, Homo sapiens
LAPGPGHPLCCRRMATHHTLWMGLALLGVLGDLQAAPEAQVSVQPNFQQDKFLGRWFSAGLASNSSWLREKKAALSMCKSVVAPATDGGLNLTSTFLRKNQCETRTMLLQPAGSLGSYSYRSPHWGSTYSVSVVETDYDQYALLYSQGSKGPGEDFRMATLYSRTQTPRAELKEKFTAFCKAQGFTEDTIVFLPQTDKCMTEQ

SEQ ID NO: 25241 - protein, 212 aa, Homo sapiens
LRGGGQFLGRGVRGVAARGIGRGGGAGLETGGVDGRGAPAGRRRWVRRVLADAGGGRSPQFLGRWFSAGLASNSSWLREKKAALSMCKSVVAPATDGGLNLTSTFLRKNQCETRTMLLQPAGSLGSYSYRSPHWGSTYSVSVVETDYDQYALLYSQGSKGPGEDFRMATLYSRTQTPRAELKEKFTAFCKAQGFTEDTIVFLPQTDKCMTEQ

SEQ ID NO: 25242 - protein, 171 aa, Homo sapiens
VRGVAARGIGRGGGAGLETGGVDGRGAPAGRRRWVRRVLADAGGGRSPQFLGRWFSAGLASNSSWLREKKAALSMCKSVVAPATDGGLNLTSTFLRKNQCETRTMLLQPAGSLGSYSYRSPREWGLHRPPGPSLGATLAGTTLGQPPAAEIHGVGGDGCPTSVRGKGQAWA

SEQ ID NO: 25243 - protein, 57 aa, Homo sapiens
LSLGFPDWGSTYSVSVVETDYDQYALLYSQGSKGPGEDFRMATLYSTCPVDAAHTQA

SEQ ID NO: 25244 - protein, 232 aa, Homo sapiens
LTFSKFLLSASVSLPFWIPLSLSPLSPPTLPSPVGLPAFYTAAPLTSAGILPVMQSLCPDGQRDEFGFLQYANSTVTQLLERLDRVVEEGNLFDPARPSLGSELEALRQHLEALSAGPGTSGSHLDRSTVSSFSLDSVARNPQELWRFLTQNLSLPNSTAQALLAARVDPPEVYHLLFGPSSALDSQSGLHKGQEPWSRLGGNPLFRMEVRASMCGMGLECCLPLGVLLLRG

SEQ ID NO: 25245 - protein, 141 aa, Homo sapiens
MATPLPPPSPRHLRLLRLLLSGLVLGAALRGAAAGHPDVAACPGSLDCALKRRARCPPGAHACGPCLQPFQEDQQGLCVPRMRRPPGGGRPQPRLEDEIDFLAQELARKESGHSTPPLPKDRQRLPEPGETPASPAPRPCP

SEQ ID NO: 25246 - protein, 50 aa, Homo sapiens [sequence omitted]

SEQ ID NO: 25247 - protein, 909 aa, Homo sapiens
MSTMRLLTLALLFSCSVARAACDPKIVNIGAVLSTRKHEQMFREAVNQANKRHGSWKIQLNATSVTHKPNAIQMALSVCEDLISSQVYAILVSHPPTPNDHFTPTPVSYTAGFYRIPVLGLTTRMSIYSDKSIHLSFLRTVPPYSHQSSVWFEMMRVYSWNHIILLVSDDHEGRAAQKRLETLLEERESKAEKVLQFDPGTKNVTALLMEAKELEARVIILSASEDDAATVYRAAAMLNMTGSGYVWLVGEREISGNALRYAPDGILGLQLINGKNESAHISDAVGVVAQAVHELLEKENITDPPRGCVGNTNIWKTGPLFKRVLMSSKYADGVTGRVEFNEDGDRKFANYSIMNLQNRKLVQVGIYNGTHVIPNDRKIIWPGGETEKPRGYQMSTRLKIVTIHQEPFVYVKPTLSDGTCKEEFTVNGDPVKKVICTGPNDTSPGSPRHTVPQCCYGFCIDLLIKLARTMNFTYEVHLVADGKFGTQERVNNSNKKEWNGMMGELLSGQADMIVAPLTINNERAQYIEFSKPFKYQGLTILVKKEIPRSTLDSFMQPFQSTLWLLVGLSVHVVAVMLYLLDRFSPFGRFKVNSEEEEEDALTLSSAMWFSWGVLLNSGIGEGAPRSFSARILGMVWAGFAMIIVASYTANLAAFLVLDRPEERITGINDPRLRNPSDKFIYATVKQSSVDIYFRRQVELSTMYRHMEKHNYESAAEAIQAVRDNKLHAFIWDSAVLEFEASQKCDLVTTGELFFRSGFGIGMRKDSPWKQNVSLSILKSHENGFMEDLDKTWVRYQECDSRSNAPATLTFENMAGVFMLVAGGIVAGIFLIFIEIAYKRHKDARRKQMQLAFAAVNVWRKNLQVGQATLRGLVPRARPGHGPPPSPKAVALALALVGRTGARSHGQGQW

SEQ ID NO: 25248 - protein, 134 aa, Homo sapiens
LPPHSTPSHGSPSPVKHARDKWTTEAETVLCVWPGRLTLSPLTAFSDAAFSHCAQPLALRDLAVVYTLGPASFLVSLASCLALGSGLTACRARRRRLRTAALRPPRPPDPNPDPDPHGCASPADPGSPAAAAQA

SEQ ID NO: 25249 - protein, 738 aa, Homo sapiens
VAAAPRLAAAAAATPALSPAVRCRVRSMAALGRPGSGPRAAVPAWKREILERKRAKLAALGGGAGPGAAEPEQRVLAESLGPLRENPFMLLEAERRRGGGAAGARLLERYRRVPGVRALRADSVLIIETVPGFPPAPPAPGAAQIRAAEVLVYGAPPGRVSRLLERFDPPAAPRRRGSPERARPPPPPPPPAPPRPPPAAPSPPAAPGPRGGGASPGARRSDFLQKTGSNSFTVHPRGLHRGAGARLLSNGHSAPEPRAGPANRLAGSPPGSGQWKPKVESGDPSLHPPPSPGTPSATPASPPASATPSQRQCVSAATSTNDSFEIRPAPKPVMETIPLGDLQARALASLRANSRNSFMVIPKSKASGAPPPEGRQSVELPKGDLGPASPSQELGSQPVPGGDGAPALGKSPLEVEAQWAVEEGACPRTATALADRAIRWQRPSSPPPFLPAASEEAEPAEGLRVPGLAKNSREYVRPGLPVTFIDEVDSEEAPQAAKLPYLPHPARPLHPARPGCVAELQPRGSNTFTVVPKRKPGTLQDQHFSQANREPRPREAEEEEASCLLGPTLKKRYPTVHEIEVIGGYLALQKSCLTKAGSSRKKMKISFNDKSLQTTFEYPSESSLEQEEEVDQQEEEEEEEEEEEEEEEGSGSEEKPFALFLPRATFVSSVRPESSRLPEGSSGLSSYTPKHSVAFSKWQEQALEQAPREAEPPPVEAMLTPASQNDLSDFRSEPALYF

SEQ ID NO: 25250 - protein, 358 aa, Homo sapiens
LCSLTGQSGAGNNWAKGHYTEGAELVDSVLDVVRKEAESCDCLQGFQLTHSLGGGTGSGMGTLLISKIREEYPDRIMNTFSVVPSPKVSDTVVEPYNATLSVHQLVENTDETYCIDNEALYDICFRTLKLTTPTYGDLNHLVSATMSGVTTCLRFPGQLNADLRKLAVNMVPFPRLHFFMPGFAPLTSRGSQQYRALTVPELTQQMFDAKNMMAACDPRHGRYLTVAAVFRGRMSMKEVDEQMLNVQNKNSSYFVEWIPNNVKTAVCDIPPRGLKMSATFIGNSTAIQELFKRISEQFTAMFRRKAFLHWYTGEGMDEMEFTEAESNMNDLVSEYQQYQDATAEEEGEFEEEAEEEVA

SEQ ID NO: 25251 - protein, 48 aa, Homo sapiens
MRGPGPTPSPTPSPSPSRSPSETPSPSPSATPGAARLPRRRRRARGAL

SEQ ID NO: 25252 - protein, 212 aa, Homo sapiens
LALALVGVLILFMFRRLRQFRQAQPTPQYRFRKRDKVMFYGRKIMRKVTTLPNTLVENTALPRQRARKRTKVLSLAKRILRFKKEYPALQPKEPPPSLLEADLTEFDVKNSHLPSEVLYMLKNVRVLGHFEKPLFLELCKHIVFVQLQEGEHVFQPREPDPSICVVQDGRLEVCIQDTVPAALMAPQRCRPVAPLPWAGLSLRQAPRSQPQT

SEQ ID NO: 25253 - protein, 31 aa, Homo sapiens
LPPSPPRWAWLLLTCLDTPHLAAVLGSGTAT

SEQ ID NO: 25254 - protein, 136 aa, Homo sapiens
LSLVVLMLLFLHTGGDDGLLRGWDTRVPGKFLFTSKRHTMGVCSIQSSPHREHILATGSYDEHILLWDTRNMKQPLADTPVQGGVWRIKWHPFHHHLLLAACMHSGFKILNCQKAMAVEEVLLARVDVLSDCWMKD

SEQ ID NO: 25255 - protein, 57 aa, Homo sapiens
LVVEPGGAKKASCGPRTAAVRLPMSQAVCVVTAPLSVHLQQRQRRRLPPGRFSLFIC

SEQ ID NO: 25256 - protein, 22 aa, Homo sapiens
LGLVLCVLLLRLSSLVTSFCWT

SEQ ID NO: 25257 - protein, 1312 aa, Homo sapiens
MARGRGGATLRARAMAAADAEAVPARGEPQQDCCVKTELLGEETPMAADEGSAEKQAGEAHMAADGETNGSCENSDASSHANAAKHTQDSARVNPQDGTNTLTRIAENGVSERDSEAAKQNHVTADDFVQTSVIGSNGYILNKPALQAQPLRTTSTLASSLPGHAAKTLPGGAGKGRTPSAFPQTPAAPPATLGEGSADTEDRKLPAPGADVKVHRARKTMPKSVVGLHAASKDPREVREARDHKEPKEEINKNISDFGRQQLLPPFPSLHQSLPQNQCYMATTKSQTACLPFVLAAAVSRKKKRRMGTYSLVPKKKTKVLKQRTVIEMFKSITHSTVGSKGEKDLGASSLHVNGESLEMDSDEDDSEELEEDDGHGAEQAAAFPTEDSRTSKESMSEADRAQKMDGESEEEQESVDTGEEEEGGDESDLSSESSIKKKFLKRKGKTDSPWIKPARKRRRRSRKKPSGALGSESYKSSAGSAEQTAPGDSTGYMEVSLDSLDLRVKGILSSQAEGLANGPDVLETDGLQEVPLCSCRMETPKSREITTLANNQCMATESVDHELGRCTNSVVKYELMRPSNKAPLLVLCEDHRGRMVKHQCCPGCGYFCTAGNFMECQPESSISHRFHKDCASRVNNASYCPHCGEESSKAKEVTIAKADTTSTVTPVPGQEKGSALEGRADTTTGSAAGPPLSEDDKLQGAASHVPEGFDPTGPAGLGRPTPGLSQGPGKETLESALIALDSEKPKKLRFHPKQLYFSARQGELQKVLLMLVDGIDPNFKMEHQNKRSPLHAAAEAGHVDICHMLVQAGANIDTCSEDQRTPLMEAAENNHLEAVKYLIKAGALVDPKDAEGSTCLHLAAKKGHYEVVQYLLSNGQMDVNCQDDGGWTPMIWATEYKHVDLVKLLLSKGSDINIRDNEENICLHWAAFSGCVDIAEILLAAKCDLHAVNIHGDSPLHIAARENRYDCVVLFLSRDSDVTLKNKEGETPLQCASLNSQVWSALQMSKALQDSAPDRPSPVERIVSRDIARGYERIPIPCVNAVDSEPCPSNYKYVSQNCVTSPMNIDRNITHLQYCVCIDDCSSSNCMCGQLSMRCWYDKDGRLLPEFNMAEPPLIFECNHACSCWRNCRNRVVQNGLRARLQLYRTRDMGWGVRSLQDIPPGTFVCEYVGELISDSEADVREEDSYLFDLDNKDGEVYCIDARFYGNVSRFINHHCEPNLVPVRVFMAHQDLRFPRIAFFSTRLIEAGEQLGFDYGERFWDIKGKLFSCRCGSPKCRHSSAALAQRQASAAQEAQEDGLPDTSSAAAADPL

SEQ ID NO: 25258 - protein, 239 aa, Homo sapiens
LGQVQRHSVHMETRVFPSHMGGKFSFSSARDLVLLKTWEEVLQLSSFPQRGRDHARTPEFSNRRSTPRDSQFWEVISDEHAIDSAGTYHGDSHLQLERINVHHHEASGGRYVPRAVLVDLEPGTMDSVRSGPFGQVLRPDNFIFGELRARTGVRLLSQGSSKSRNAPRSSCGNCGARAPEHPPICRVESLNLPLLNGLREEVPGVSSRSVWGRKQLGQGTLHRRRGADGVSDGRCQKGG

SEQ ID NO: 25259 - protein, 195 aa, Homo sapiens
LRKLAVNMVPFPRLHFFMPGFAPLTSRGSQQYRALTVAELTQQMFDAKNMRAARDPRHGRYLTAAAIFQGRMPMREVDEQMFNIQDKNSSYFADWFPDNVKTAICDIPPRGLKMSASFIGNNAAIQELFTCVSEQFTAMFRRKAFLHWYTGEGMDEMEFTEAESNMNDLVSEYQQYQDATAKEEEDEEYAEEEVA

SEQ ID NO: 25260 - protein, 337 aa, Homo sapiens
LTSTMLLLVTSLLLCELPHPAFLLIPEKSDLRTVAPASSLNVRFDSRTMNLSWDCQENTTFSKCFLTDKKNRVVEPRLSNNECSCTFREICLHEGVTFEVHVNTSQRGFQQKLLYPNSGREGTAAQNFSCFIYNADLMNCTWARGPTAPRDVQYFLYIRNSKRRREIRCPYYIQDSGTHVGCHLDNLSGLTSRNYFLVNGTSREIGIQFFDSLLDTKKIERFNPPSNVTVRCNTTHCLVRWKQPRTYQKLSYLDFQYQLDVHRKNTQPGTENLLINVSGDLENRYNFPSSEPRAKHSVKIRAADVRILNWSSWSEAIEFGSLGYSGCSRQFHRSKTN

SEQ ID NO: 25261 - protein, 386 aa, Homo sapiens
LRSGAAFPMVLLWLTLLLIALPCLLQTKEDPNPPITNLRMKAKAQQLTWDLNRNVTDIECVKDADYSMPAVNNSYCQFGAISLCEVTNYTVRVANPPFSTWILFPENSGKPWAGAENLTCWIHDVDFLSCSWAVGPGAPADVQYDLYLNVANRRQQYECLHYKTDAQGTRIGCRFDDISRLSSGSQSSHILVRGRSAAFGIPCTDKFVVFSQIEILTPPNMTAKCNKTHSFMHWKMRSHFNRKFRYELQIQKRMQPVITEQVRDRTSFQLLNPGTYTVQIRARERVYEFLSAWSTPQRFECDQEEGANTRAWRTSLLIALGTLLALVCVFVICRRYLVMQRLFPRIPHMKDPIGDSFQNDKLVVWEAGKAGLEECLVTEVQVVQKT

SEQ ID NO: 25262 - protein, 308 aa, Homo sapiens
LRSGAAFPMVLLWLTLLLIALPCLLQTKEGGKPWAGAENLTCWIHDVDFLSCSWAVGPGAPADVQYDLYLNVANRRQQYECLHYKTDAQGTRIGCRFDDISRLSSGSQSSHILVRGRSAAFGIPCTDKFVVFSQIEILTPPNMTAKCNKTHSFMHWKMRSHFNRKFRYELQIQKRMQPVITEQVRDRTSFQLLNPGTYTVQIRARERVYEFLSAWSTPQRFECDQEEGANTRAWRTSLLIALGTLLALVCVFVICRRYLVMQRLFPRIPHMKDPIGDSFQNDKLVVWEAGKAGLEECLVTEVQVVQKT

SEQ ID NO: 25263 - protein, 67 aa, Homo sapiens
LSSRSAARPATMTEQAISFAKDFLAGGIAAAISKTAVAPIERVKLLLQGGMSQRFKRPREDHLSSGV

SEQ ID NO: 25264 - protein, 49 aa, Homo sapiens
LQAGKMRRFFFFVSMMIFAATWLWRAADTPSYSRGCFLEADSVCSLVEL

SEQ ID NO: 25265 - protein, 113 aa, Homo sapiens
MVPQRKTRDGFEEHFGLNYLGHFLLTNLLLDTLKESGSPGHSARVVTVSSATHYVAELNMDDLQSRWSLTLSPRLECSGVISAHCNLRLPGSSNSLASTPKQLGLQAPATTSS

SEQ ID NO: 25266 - protein, 83 aa, Homo sapiens
LEEKYFRRLSILLGFYVQRVLCLREDKLGWGERCLGGMTPLSSRQCSAETPRTRGVRGQRNYLPFTAADFSGLQAAQNVILTS

SEQ ID NO: 25267 - protein, 40 aa, Homo sapiens
MSPLSAARAALRVYAVGAAVILAQLLRRCRGGFLEPGPHA

SEQ ID NO: 25268 - protein, 24 aa, Homo sapiens
LKSMGIWCFFFIGLVAFPTKKPTN

SEQ ID NO: 25269 - protein, 173 aa, Homo sapiens
LHSGTVPARSGRTMARGAALALLLFGLLGVLVAAPDGGFDLSDALPDNENKKPTAIPKKPSAGDDFDLGDAVVDGENDDPRPPNPPKPMPNPNPNHPSSSGSFSDADLADGVSGGEGKGGSDGGGSHRKEGEEADAPGVIPGIVGAVVVAVAGAISSFIAYQKKKLCFKENDG

SEQ ID NO: 25270 - protein, 190 aa, Homo sapiens
LHSGTVPARSGRTMARGAALALLLFGLLGVLVAAPDGGFDLSDALPDNENKKPTAIPKKPSAGDDFDLGDAVVDGENDDPRPPNPPKPMPNPNPNHPSSSGSFSDADLADGVSGGEGKGGSDGGGSHRKEGEEADAPGVIPGIVGAVVVAVAGAISSFIAYQKKKLCFKENGQLAGSLGPCIGIRREADG

SEQ ID NO: 25271 - protein, 197 aa, Homo sapiens
LHSGTVPARSGRTMARGAALALLLFGLLGVLVAAPDGGFDLSDALPDNENKKPTAIPKKPSAGDDFDLGDAVVDGENDDPRPPNPPKPMPNPNPNHPSSSGSFSDADLADGVSGGEGKGGSDGGGSHRKEGEEADAPGVIPGIVGAVVVAVAGAISSFIAYQKKKLCFKENEQGEVDMESHRNANAEPAVQRTLLEK

SEQ ID NO: 25272 - protein, 62 aa, Homo sapiens
LKMFKNTLWMRAPGISARAVRQATRGAERNVCLPNCPSAAVENSENRKSGQGRKSHGHPPTP

SEQ ID NO: 25273 - protein, 35 aa, Homo sapiens
LCIFFFFSAEQGEVDMESHRNANAEPAVQRTLLEK

SEQ ID NO: 25274 - protein, 616 aa, Homo sapiens
LALAAPGRGVRRARSCALGQRSAMRSAARRGRAAPAARDSLPVLLFLCLLLKTCEPKTANAFKPNILLIMADDLGTGDLGCYGNNTLRTPNIDQLAEEGVRLTQHLAAAPLCTPSRAAFLTGRHSFRSGMDASNGYRALQWNAGSGGLPENETTFARILQQHGYATGLIGKWHQGVNCASRGDHCHHPLNHGFDYFYGMPFTLTNDCDPGRPPEVDAALRAQLWGYTQFLALGILTLAAGQTCGFFSVSARAVTGMAGVGCLFFISWYSSFGFVRRWNCILMRNHDVTEQPMVLEKTASLMLKEAVSYIERHKHGPFLLFLSLLHVHIPLVTTSAFLGKSQHGLYGDNVEEMDWLIGKVLNAIEDNGLKNSTFTYFTSDHGGHLEARDGHSQLGGWNGIYKGGKGMGGWEGGIRVPGIFHWPGVLPAGRVIGEPTSLMDVFPTVVQLVGGEVPQDRVIDGHSLVPLLQGAEARSAHEFLFHYCGQHLHAARWHQKDSGSVWKVHYTTPQFHPEGAGACYGRGVCPCSGEGVTHHRPPLLFDLSRDPSEARPLTPDSEPLYHAVIARVGAAVSEHRQTLSPVPQQFSMSNILWKPWLQPCCGHFPFCSCHEDGDGTP

SEQ ID NO: 25275 - protein, 382 aa, Homo sapiens
MRSAARRGRAAPAARDSLPVLLFLCLLLKTCEPKTANAFKPNILLIMADDLGTGDLGCYGNNTLRTPNIDQLAEEGVRLTQHLAAAPLCTPSRAAFLTGRHSFRSGMDASNGYRALQWNAGSGGLPENETTFARILQQHGYATGLIGKWHQGVNCASRGDHCHHPLNHGFDYFYGMPFTLTNDCDPGRPPEVDAALRAQLWGYTQFLALGILTLAAGQTCGFFSVSARAVTGMAGVGCLFFISWYSSFGFVRRWNCILMRNHDVTEQPMVLEKTASLMLKEAVSYIERHKHGPFLLFLSLLHVHIPLVTTSAFLGKSQHGLYGDNVEEMDWLIASDFMSSSEVTESEAIKLMFRTMQTRCLPSMAFKKPWRGPVRLQILKRA

SEQ ID NO: 25276 - protein, 181 aa, Homo sapiens
MRSAARRGRAAPAARDSLPVLLFLCLLLKTCEPKTANAFKPNILLIMADDLGTGDLGCYGNNTLRTPNIDQLAEEGVRLTQHLAAAPLCTPSRAAFLTGRHSFRSGMDASNGYRALQWNAGSGGLPENETTFARILQQHGYATGLIGVDMWEPHIIRWLGIFVIKKIPGQAWWRTPVVPAT

SEQ ID NO: 25277 - protein, 2853 aa, Homo sapiens
MLPAHRSRVRRLPKDRYPRIRHPDKMPKRAHWGALSVVLILLWGHPRVALACPHPCACYVPSEVHCTFRSLASVPAGIAKHVERINLGFNSIQALSETSFAGLTKLELLMIHGNEIPSIPDGALRDLSSLQVFKFSYNKLRVITGQTLQGLSNLMRLHIDHNKIEFIHPQAFNGLTSLRLLHLEGNLLHQLHPSTFSTFTFLDYFRLSTIRHLYLAENMVRTLPASMLRNMPLLENLYLQGNPWTCDCEMRWFLEWDAKSRGILKCKKDKAYEGGQLCAMCFSPKKLYKHEIHKLKDMTCLKPSIESPLRQNRSRSIEEEQEQEEDGGSQLILEKFQLPQWSISLNMTDEHGNMVNLVCDIKKPMDVYKIHLNQTDPPDIDINATVALDFECPMTRENYEKLWKLIAYYSEVPVKLHRELMLSKDPRVSYQYRQDADEEALYYTGVRAQILAEPEWVMQPSIDIQLNRRQSTAKKVLLSYYTQYSQTISTKDTRQARGRSWVMIEPSGAVQRDQTVLEGGPCQLSCNVKASESPSIFWVLPDGSILKAPMDDPDSKFSILSSGWLRIKSMEPSDSGLYQCIAQVRDEMDRMVYRVLVQSPSTQPAEKDTVTIGKNPGESVTLPCNALAIPEAHLSWILPNRRIINDLANTSHVYMLPNGTLSIPKVQVSDSGYYRCVAVNQQGADHFTVGITVTKKGSGLPSKRGRRPGAKALSRVREDIVEDEGGSGMGDEENTSRRLLHPKDQEVFLKTKDDAINGDKKAKKGRRKLKLWKHSEKEPETNVAEGRRVFESRRRINMANKQINPERWADILAKVRGKNLPKGTEVPPLIKTTSPPSLSLEVTPPFPAISPPSASPVQTVTSAEESSADVPLLGEEEHVLGTISSASMGLEHNHNGVILVEPEVTSTPLEEVVDDLSEKTEEITSTEGDLKGTAAPTLISEPYEPSPTLHTLDTVYEKPTHEETATEGWSAADVGSSPEPTSSEYEPPLDAVSLAESEPMQYFDPDLETKSQPDEDKMKEDTFAHLTPTPTIWVNDSSTSQLFEDSTIGEPGVPGQSHLQGLTDNIHLVKSSLSTQDTLLIKKGMKEMSQTLQGGNMLEGDPTHSRSSESEGQESKSITLPDSTLGIMSSMSPVKKPAETTVGTLLDKDTTTATTTPRQKVAPSSTMSTHPSRRRPNGRRRLRPNKFRHRHKQTPPTTFAPSETFSTQPTQAPDIKISSQVESSLVPTAWVDNTVNTPKQLEMEKNAEPTSKGTPRRKHGKRPNKHRYTPSTVSSRASGSKPSPSPENKHRNIVTPSSETILLPRTVSLKTEGPYDSLDYMTTTRKIYSSYPKVQETLPVTYKPTSDGKEIKDDVATNVDKHKSDILVTGESITNAIPTSRSLVSTMGEFKEESSPVGFPGTPTWNPSRTAQPGRLQTGIPVTTSGENLTDPPLLKELEDVDFTSEFLSSLTVSTPFHQEEAGSSTTLSSIKVEVASSQAETTTLDQDHLETTVAILLSETRPQNHTPTAARMKEPASSSPSTILMSLGQTTTTKPALPSPRISQASRDSKENVFLNYVGNPETEATPVNNEGTQHMSGPNELSTPSSDQDAFNLSTKLELEKQVFGSRSLPRGPDSQRQDGRVHASHQLTRVPAKPILPTATVRLPEMSTQSASRYFVTSQSPRHWTNKPEITTYPSGALPENKQFTTPRLSSTTIPLPLHMSKPSIPSKFTDRRTDQFNGYSKVFGNNNIPEARNPVGKPPSPRIPHYSNGRLPFFTNKTLSFPQLGVTRRPQIPTSPAPVMRERKVIPGSYNRIHSHSTFHLDFGPPAPPLLHTPQTTGSPSTNLQNIPMVSSTQSSISFITSSVQSSGSFHQSSSKFFAGGPPASKFWSLGEKPQILTKSPQTVSVTAETDTVFPCEATGKPKPFVTWTKVSTGALMTPNTRIQRFEVLKNGTLVIRKVQVQDRGQYMCTASNLHGLDRMVVLLSVTVQQPQILASHYQDVTVYLGDTIAMECLAKGTPAPQISWIFPDRRVWQTVSPVEGRITLHENRTLSIKEASFSDRGVYKCVASNAAGADSLAIRLHVAALPPVIHQEKLENISLPPGLSIHIHCTAKAAPLPSVRWVLGDGTQIRPSQFLHGNLFVFPNGTLYIRNLAPKDSGRYECVAANLVGSARRTVQLNVQRAAANARITGTSPRRTDVRYGGTLKLDCSASGDPWPRILWRLPSKRMIDALFSFDSRIKVFANGTLVVKSVTDKDAGDYLCVARNKVGDDYVVLKVDVVMKPAKIEHKEENDHKVFYGGDLKVDCVATGLPNPEISWSLPDGSLVNSFMQSDDSGGRTKRYVVFNNGTLYFNEVGMREEGDYTCFAENQVGKDEMRVRVKVVTAPATIRNKTYLAVQVPYGDVVTVACEAKGEPMPKVTWLSPTNKVIPTSSEKYQIYQDGTLLIQKAQRSDSGNYTCLVRNSAGEDRKTVWIHVNVQPPKINGNPNPITTVREIAAGGSRKLIDCKAEGIPTPRVLWAFPEGVVLPAPYYGNRITVHGNGSLDIRSLRKSDSVQLVCMARNEGGEARLILQLTVLEPMEKPIFHDPISEKITAMAGHTISLNCSAAGTPTPSLVWVLPNGTDLQSGQQLQRFYHKADGMLHISGLSSVDAGAYRCVARNAAGHTERLVSLKVGLKPEANKQYHNLVSIINGETLKLPCTPPGAGQGRFSWTLPNGMHLEGPQTLGRVSLLDNGTLTVREASVFDRGTYVCRMETEYGPSVTSIPVIVIAYPPRITSEPTPVIYTRPGNTVKLNCMAMGIPKADITWELPDKSHLKAGVQARLYGNRFLHPQGSLTIQHATQRDAGFYKCMAKNILGSDSKTTYIHVF

SEQ ID NO: 25278 - protein, 39 aa, Homo sapiens
LALPASIVMLVLPVHRLLAAETTNFLQTRRCWWLLHSSG

SEQ ID NO: 25279 - protein, 585 aa, Homo sapiens
LEMPLRKMKIPFLLLFFLWEAESHAASRPNIILVMADDLGIGDPGCYGNKTIRTPNIDRLASGGVKLTQHLAASPLCTPSRAAFMTGRYPVRSGMASWSRTGVFLFTASSGGLPTDEITFAKLLKDQGYSTALIGKWHLGMSCHSKTDFCHHPLHHGFNYFYGISLTNLRDCKPGEGSVFTTGFKRLVFLPLQIVGVTLLTLAALNCLGLLHVPLGVFFSLLFLAALILTLFLGFLHYFRPLNCFMMRNYEIIQQPMSYDNLTQRLTVEAAQFIQRNTETPFLLVLSYLHVHTALFSSKDFAGKSQHGVYGDAVEEMDWSVGQILNLLDELRLANDTLIYFTSDQGAHVEEVSSKGEIHGGSNGIYKGGKANNWEGGIRVPGILRWPRVIQAGQKIDEPTSNMDIFPTVAKLAGAPLPEDRIIDGRDLMPLLEGKSQRSDHEFLFHYCNAYLNAVRWHPQNSTSIWKAFFFTPNFNPVGSNGCFATHVCFCFGSYVTHHDPPLLFDISKDPRERNPLTPASEPRFYEILKVMQEAADRHTQTLPEVPDQFSWNNFLWKPWLQLCCPSTGLSCQCDREKQDKRLSR

SEQ ID NO: 25280 - protein, 260 aa, Homo sapiens
LHCATARMKHINLSFAACGFLGIYHLGAASALCRHGKKLVKDVKAFAGASAGSLVASVLLTAPEKIEECNQFTYKFAEEIRRQSFGAVTPGYDFMARLRSGMESILPPSAHELAQNRLHVSITNAKTRENHLVSTFSSREDLIKVLLASSFVPIYAGLKLVEYKGQKWVDGGLTNALPILPVGRTVTISPFSGRLDISPQDKGQLDLYVNIAKQDIMLSLANLVRLNQALFPPSKRKMESLYQCGFDDTVKFLLKENWFE

SEQ ID NO: 25281 - protein, 83 aa, Homo sapiens
LNPAQGFLLSLAFYGWTGCSLGFQSPRKEIQWESLTTSAAEGAHPSPLMPHENPASGKVSQVGGQTSDEALSMLSEGDKLGLL

SEQ ID NO: 25282 - protein, 75 aa, Homo sapiens
LRTWCLIMLPFAGSFCRTAKAGRGPRRAQRRASLRSPGRGGTVHAETSRCPVSGRQPRITAAPTESEGTEPTHIL

SEQ ID NO: 25283 - protein, 164 aa, Homo sapiens
LPTVPCQHVYALTWRDQLRMLSGPVLRRVEKKDVSSPDMLQSEVSFSVGGRHSSTDSNKASSGDISPYDNNSPVLSERSLLAMQEDAAPGGSEKLYRVPGQFMLVGHLSSSKSRESSPGPRLGKGNWSLASRRWPKQATLLLLHVAWCGALRTFSSSLPYLMFL

SEQ ID NO: 25284 - protein, 9 aa, Homo sapiens
MSVLYSLFF

SEQ ID NO: 25285 - protein, 67 aa, Homo sapiens
VVATAQTRLRSYSCASLRFSSATMSDKPDMAEIEKFDKSKLKKTETQEKNPLPSKETIEQEKQAGES

SEQ ID NO: 25286 - protein, 66 aa, Homo sapiens
VPLGGDIKKFLSVCPQSFSSATMSDKPDMAEIEKFDKSKLKKTETQEKNPLPSKETIEQEKQAGES

SEQ ID NO: 25287 - protein, 63 aa, Homo sapiens
VALPHARSWLAPCSFSSATMSDKPDMAEIEKFDKSKLKKTETQEKNPLPSKETIEQEKQAGES

SEQ ID NO: 25288 - protein, 41 aa, Homo sapiens
LLLLLFLLLFDAGTLMLQPRFHPAESPSYHAFPLREEERTV

SEQ ID NO: 25289 - protein, 36 aa, Homo sapiens
LVGPDGVPLRRYSRRFQTIDIEPDIEALLSQGPSCA

SEQ ID NO: 25290 - protein, 103 aa, Homo sapiens [sequence omitted]

SEQ ID NO: 25291 - protein, 681 aa, Homo sapiens
LITVFPEKCLRSSYLVILILRYQLELKDDYIIRTNRLIEDERKNKEKAVHLQEELIAINSKKEELNQSVNRVKELELELESVKAQSLAITKQNHMLNEKVKEMSDYSLLKEEKLELLAQNKLLKQQLEESRNENLRLLNRLAQPAPELAVFQKELRKAEKAIVVEHEEFESCRQALHKQLQDEIEHSAQLKAQILGYKASVKSLTTQVADLKLQLKQTQTALENEVYCNPKQSVIDRSVNGLINGNVVPCNGEISGDFLNNPFKQENVLARMVASRITNYPTAWVEGSSPDSDLEFVANTKARVKELQQEAERLEKAFRSYHRRVIKNSAKSPLAAKSPPSLHLLEAFKNITSSSPERHIFGEDRVVSEQPQVGTLEERNDVVEALTGSAASRLRGGTSSRRLSSTPLPKAKRSLESEMYLEGLGRSHIASPSPCPDRMPLPSPTESRHSLSIPPVSSPPEQKVGLYRRQTELQDKSEFSDVDKLAFKDNEEFESSFESAGNMPRQLEMGGLSPAGDMSHVDAAAAAVPLSYQHPSVDQKQIEEQKEEEKIREQQVKERRQREERRQSNLQEVLERERRELEKLYQERKMIEESLKIKIKKELEMENELEMSNQEIKDKSAHSENPLEKYMKIIQQEQDQESADKSSKKMVQEGSLVDTLQSSDKVESLTGFSHEELDDSW

SEQ ID NO: 25292 - protein, 56 aa, Homo sapiens
MLTLLFQIHFLMILSSNWAYLKDASKMQAYQDIKAKEEQELQDIQSRSKEQLNSYT

SEQ ID NO: 25293 - protein, 238 aa, Homo sapiens
VDFFFLTLPCVFHPERMLWLLFFLVTAIHAELCQPGAENAFKVRLSIRTALGDKAYAWDTNEEYLFKAMVAFSMRKVPNREATEISHVLLCNVTQRVSFWFVVTDPSKNHTLPAVEVQSAIRMNKNRINNAFFLNDQTLEFLKIPSTLAPPMDPSVPIWIIIFGVIFCIIIVAIALLILSGIWQRRRKNKEPSEVDDAEDKCENMITIENGIPSDPLDMKGGHINDAFMTEDERLTPL

SEQ ID NO: 25294 - protein, 195 aa, Homo sapiens
MTQPPASTSGIMGTLSSWNLKILQINQLHLVHWNAVKFENFEDAALEENGLAVIGVFLKISETSGSPVSTGRPKPLARKLRPAQKHWVLQSRPFLSSQVQENCKVTYFHRKHWVRIRPLRTTPPSWDYTRICIQREMVPARIRVLREMVPEAWRCFPNRLPLLSNIRPDFSKAPLAYVKRWLWTARHPHSLSAAW

SEQ ID NO: 25295 - protein, 192 aa, Homo sapiens
VWGRCYGIWVVWHFLPGAHLSRLLDPSRSSISLVQPCLESITFIIKKQPVEVDDDQISETSGSPVSTGRPKPLARKLRPAQKHWVLQSRPFLSSQVQENCKVTYFHRKHWVRIRPLRTTPPSWDYTRICIQREMVPARIRVLREMVPEAWRCFPNRLPLLSNIRPDFSKAPLAYVKRWLWTARHPHSLSAAW

SEQ ID NO: 25296 - protein, 199 aa, Homo sapiens
MPAGCPPHSTTASLPQHGDRGFPFAAAAAAGQAPPRPRPAAAMQFMLLFSRQGKLRLQKWYVPLSDKEKKKITRELVQTVLARKPKMCSFLEWRDLKIVYKRYASLYFCCAIEDQDNELITLEIIHRYVELLDKYFGSVCELDIIFNFEKAYFILDEFLLGGEVQETSKKNVLKAIEQADLLQEEAETPRSVLEEIGLT

SEQ ID NO: 25297 - protein, 632 aa, Homo sapiens
LHGRTRARVSACQEAGVPREAWSSPAHSKCLCKIISGCWHPATILPMKYILVTGGVISGIGKGIIASSIGTILKSCGLRVTAIKIDPYINIDAGTFSPYEHGEVFVLNDGGEVDLDLGNYERFLDINLYKDNNITTGKIYQHVINKERRGDYLGKTVQVVPHITDAVQEWVMNQAKVPVDGNKEEPQICVIELGGTIGDIEGMPFVEAFRQFQFKAKRENFCNIHVSLVPQLSATGEQKTKPTQNSVRALRGLGLSPDLIVCRSSTPIEMAVKEKISMFCHVNPEQVICIHDVSSTYRVPVLLEEQSIVKYFKERLHLPIGDSASNLLFKWRNMADRYERLQKICSIALVGKYTKLRDCYASVFKALEHSALAINHKLNLMYIDSIDLEKITETEDPVKFHEAWQKLCKADGILVPGGFGIRGTLGKLQAISWARTKKIPFLGVCLGMQLAVIEFARNCLNLKDADSTEFRPNAPVPLVIDMPEHNPGNLGGTMRLGIRRTVFKTENSILRKLYGDVPFIEERHRHRFEVNPNLIKQFEQNDLSFVGQDVDGDRMEIIELANHPYFVGVQFHPEFSSRPMKPSPPYLGLLLAATGNLNAYLQQGCKLSSSDRYSDASDDSFSEPRIAELEIS

SEQ ID NO: 25298 - protein, 34 aa, Homo sapiens
LEKETIIWRTKWENNNKALLQMAEEVRWFPATKV

SEQ ID NO: 25299 - protein, 90 aa, Homo sapiens
LLLLAYFVFLARCYYSVERIWILSGMHLLSFQNPSSHYPVNKNKWDPLRRTSSYSDHLTSPVLWLCSAPRIYHILEHCNATRLAQKRFKC

SEQ ID NO: 25300 - protein, 122 aa, Homo sapiens
MPQNPHIIATKTPSSDVLVFDYTKHPAKPDPSGECNPDLRLRGHQKEGYGLSWNSNLSGHLLSASDDHTVCLWDINAGPKEGKIVDAKAIFTGHSAVVEDVAWHLLHESLFGSVADDQKLMM

SEQ ID NO: 25301 - protein, 10 aa, Homo sapiens
MFLLIISRTQ

SEQ ID NO: 25302 - protein, 23 aa, Homo sapiens
LMMSLFIARLYMMLCKTWIRRLM

SEQ ID NO: 25303 - protein, 29 aa, Homo sapiens
MRDPCGQIISDMDIKSILTGLLKSLNSRK

SEQ ID NO: 25304 - protein, 788 aa, Homo sapiens
MACLTHRNETDARMEFYSLFHKGNKAGVQWHDLGSLQPLPPRFKRFSCLSLQSSWDYSLSKFDERCCFLYVHDNSDDFQIYFSTEEQCSRFFSLVKEMITNTAGSTVELEGETDGDTLEYEYDHDANGERVVLGKGTYGIVYAGRDLSNQVRIAIKEIPERDSRYSQPLHEEIALHKYLKHRNIVQYLGSVSENGYIKIFMEQVPGGSLSALLRSKWGPMKEPTIKFYTKQILEGLKYLHENQIVHRDIKGDNVLVNTYSGVVKISDFGTSKRLAGVNPCTETFTGTLQYMAPEIIDQGPRGYGAPADIWSLGCTIIEMATSKPPFHELGEPQAAMFKVGMFKIHPEIPEALSAEARAFILSCFEPDPHKRATTAELLREGFLRQVNKGKKNRIAFKPSEGPRGVVLALPTQGEPMATSSSEHGSVSPDSDAQPDALFERTRAPRHHLGHLLSVPDESSALEDRGLASSPEDRDQGLFLLRKDSERRAILYKILWEEQNQVASNLQECVAQSSEELHLSVGHIKQIIGILRDFIRSPEHRVMATTISKLKVDLDFDSSSISQIHLVLFGFQDAVNKILRNHLIRPHWMFAMDNIIRRAVQAAVTILIPELRAHFEPTCETEGVDKDMDEAEEGYPPATGPGQEAQPHQQHLSLQLGELRQETNRLLEHLVEKEREYQNLLRQTLEQKTQELYHLQLKLKSNCITENPAGPYGQRTDKELIDWLRLQGADAKTIEKIVEEGYTLSDILNEITKEDLRYLRLRGGLLCRLWSAVSQYRRAQEASETKDKA

SEQ ID NO: 25305 - protein, 769 aa, Homo sapiens
VGLGRRRSGAGRGAGGEGGGGEGGGPGGKMPLAQLADPWQKMAVESPSDSAENGQQIMDEPMGEEEINPQTEEVSIKEIAITHHVKEGHEKADPSQFELLKVLGQGSFGKVFLVKKISGSDARQLYAMKVLKKATLKVRDRVRTKMERDILVEVNHPFIVKLHYAFQTEGKLYLILDFLRGGDLFTRLSKEVMFTEEDVKFYLAELALALDHLHSLGIIYRDLKPENILLDEEGHIKLTDFGLSKESIDHEKKAYSFCGTVEYMAPEVVNRRGHTQSADWWSFGVLMFEMLTGTLPFQGKDRKETMTMILKAKLGMPQFLSPEAQSLLRMLFKRNPANRLGAGPDGVEEIKRHSFFSTIDWNKLYRREIHPPFKPATGRPEDTFYFDPEFTAKTPKDSPGIPPSANAHQLFRGFSFVAITSDDESQAMQTVGVHSIVQQLHRNSIQFTDGYEVKEDIGVGSYSVCKRCIHKATNMEFAVKIIDKSKRDPTEEIEILLRYGQHPNIITLKDVYDDGKYVYVVTELMKGGELLDKILRQKFFSEREASAVLFTITKTVEYLHAQGVVHRDLKPSNILYVDESGNPESIRICDFGFAKQLRAENGLLMTPCYTANFVAPEVLKRQGYDAACDIWSLGVLLYTMLTGYTPFANGPDDTPEEILARIGSGKFSLSGGYWNSVSDTAKDLVSKMLHVDPHQRLTAALVLRHPWIVHWDQLPQYQLNRQDAPHLVKGAMAATYSALNRNQSPVLEPVGRSTLAQRRGIKKITSTAL

SEQ ID NO: 25306 - protein, 103 aa, Homo sapiens
LGSCLQEAMTLNSEPYSVLTSGSHVFLCQVIKYLVLVFCLSPKLPLWVHRRLGSIVRMAIREYKRGFSRAWELILEPRRATPALRSFGVEMQPWEIWGVSRPV

SEQ ID NO: 25307 - protein, 310 aa, Homo sapiens
LVSRGRAPVRAGVVHAVVAARRRQKRRSRQGTCFCARVVMEALPLLAATTPDHGRHRRLLLLPLLLFLLPAGAVQGWETEERPRTREEECHFYAGGQVYPGEASRVSVADHSLHLSKAKISKPAPYWEGTAVIDGEFKELKLTDYRGKYLVFFFYPLDFTFVCPTEIIAFGDRLEEFRSINTEVVACSVDSQFTHLAWINTPRRQGGLGPIRIPLLSDLTHQISKDYGVYLEDSGHTLRGLFIIDDKGILRQITLNDLPVGRSVDETLRLVQAFQYTDKHGEVCPAGWKPGSETIIPDPAGKLKYFDKLN

SEQ ID NO: 25308 - protein, 94 aa, Homo sapiens
VVMEALPLLAATTPDHGRHRRLLLLPLLLFLLPAGAVQGWETEERPRTREEECHFYAGGQVYPGEASRVSVADHSLHLSKAKKVCKLHQTAKEI

SEQ ID NO: 25309 - protein, 188 aa, Homo sapiens
VVMEALPLLAATTPDHGRHRRLLLLPLLLFLLPAGAVQGWETEERPRTREEECHFYAGGQVYPGEASRVSVADHSLHLSKAKISKPAPYWEGTAVIDGEFKELKLTDYRGKYLVFFFYPLDFTFVCPTEIIAFGDRLEEFRSINTEVVACSVDSQFTHLAWSVSYTYIRRKKRMDLLLKHGQITLDMI

SEQ ID NO: 25310 - protein, 111 aa, Homo sapiens
MHNKIHSAKMSPLSIVTALVDKIDMCKKSLSPEQDIKFSGHVSWVGKTSMEVKMQMFQLHGDEFCPVLDATFVMVARDSENKGPAFVNPLIPESPEEEELFRQGECTLICL

SEQ ID NO: 25311 - protein, 29 aa, Homo sapiens
MRNHLLLLFKYRGLVRKGKKSKRRKWLNS

SEQ ID NO: 25312 - protein, 101 aa, Homo sapiens
MAGGEAGVTLGQPHLSRQDLTTLDVTKLTPLSHEVISRQATINIAGNESCPQPQTSEHLAAIEIMKLKHILILQNKIDLVKESQAKEQYEQILAFVQGKKP

SEQ ID NO: 25313 - protein, 225 aa, Homo sapiens
MGFRDLKSPAGLQVLNDYLADKSYIEGYVPSQADVAVFEAVSSPLPADLCHALRWYNHIKSYEKEKASLPGVKKALGKYGPADVEDTTGSGATDSKDDDDIDLFGSDDEEESEEAKRLREERLAQYESKKAKKPALVAKSSILLDVKPWDDETDMAKLEERVRSIQADGLVWGSSKLVPVGYGIKKLQIQCVVEDDKVGTDMLEEQITAFEDYVQSMDVAAFNKI

SEQ ID NO: 25314 - protein, 415 aa, Homo sapiens
LLSQATAIMPRGHKSKLRTCEKRQETNGQPQGLTGPQATAEKQEESHSSSSSSRACLGDCRRSSDASIPQESQGVSPTGSPDAVVSYSKSDVAANGQDEKSPSTSRDASVPQESQGASPTGSPDAGVSGSKYDVAANGQDEKSPSTSHDVSVPQESQGASPTGSPDAGVSGSKYDVAAEGEDEESVSASQKAIIFKRLSKDAVKKKACTLAQFLQKKFEKKESILKADMLKCVRREYKPYFPQILNRTSQHLVVAFGVELKEMDSSGESYTLVSKLGLPSEGILSGDNALPKSGLLMSLLVVIFMNGNCATEEEVWEFLGLLGIYDGILHSIYGDARKIITEDLVQDKYVVYRQVCNSDPPCYEFLWGPRAYAETTKMRVLRVLADSSNTSPGLYPHLYEDALIDEVERALRLRA

SEQ ID NO: 25315 - protein, 326 aa, Homo sapiens
LVGSQAIMPRGQKSKLRAREKRRKARDETRGLNVPQVTEAEEEEAPCCSSSVSGGAASSSPAAGIPQEPQRAPTTAAAAAAGVSSTKSKKGAKSHQGEKNASSSQASTSTKSPSEDPLTRKSGSLVQFLLYKYKIKKSVTKGEMLKIVGKRFREHFPEILKKASEGLSVVFGLELNKVNPNGHTYTFIDKVDLTDEESLLSSWDFPRRKLLMPLLGVIFLNGNSATEEEIWEFLNMLGVYDGEEHSVFGEPWKLITKDLVQEKYLEYKQVPSSDPPRFQFLWGPRAYAETSKMKVLEFLAKVNGTTPCAFPTHYEEALKDEEKAGV

SEQ ID NO: 25316 - protein, 554 aa, Homo sapiens
LPLPLPPPSPRKPAAIAGRPEAGFMAASKKAVLGPLVGAVDQGTSSTRFLVFNSKTAELLSHHQVEIKQEFPREGWVEQDPKEILHSVYECIEKTCEKLGQLNIDISNIKAIGVSNQRETTVVWDKITGEPLYNAVVWLDLRTQSTVESLSKRIPGNNNFVKSKTGLPLSTYFSAVKLRWLLDNVRKVQKAVEEKRALFGTIDSWLIWSLTGGVNGGVHCTDVTNASRTMLFNIHSLEWDKQLCEFFGIPMEILPNVRSSSEIYGLMKISHSVKAGALEGVPISGCLGDQSAALVGQMCFQIGQAKNTYGTGCFLLCNTGHKCVFSDHGLLTTVAYKLGRDKPVYYALEGSVAIAGAVIRWLRDNLGIIKTSEEIEKLAKEVGTSYGCYFVPAFSGLYAPYWEPSARGIICGLTQFTNKCHIAFAALEAVCFQTREILDAMNRDCGIPLSHLQVDGGMTSNKILMQLQADILYIPVVKPSMPETTALGAAMAAGAAEGVGVWSLEPEDLSAVTMERFEPQINAEESEIRYSTWKKAVMKSMGWVTTQSPESGIP

SEQ ID NO: 25317 - protein, 577 aa, Homo sapiens
LPLPLPPPSPRKPAAIAGRPEAGFMAASKKAVLGPLVGAVDQGTSSTRFLVFNSKTAELLSHHQVEIKQEFPREGWVEQDPKEILHSVYECIEKTCEKLGQLNIDISNIKAIGVSNQRETTVVWDKITGEPLYNAVVWLDLRTQSTVESLSKRIPGNNNFVKSKTGLPLSTYFSAVKLRWLLDNVRKVQKAVEEKRALFGTIDSWLIWSLTGGVNGGVHCTDVTNASRTMLFNIHSLEWDKQLCEFFGIPMEILPNVRSSSEIYGLMKAGALEGVPISGCLGDQSAALVGQMCFQIGQAKNTYGTGCFLLCNTGHKCVFSDHGLLTTVAYKLGRDKPVYYALEGSVAIAGAVIRWLRDNLGIIKTSEEIEKLAKEVGTSYGCYFVPAFSGLYAPYWEPSARGIICGLTQFTNKCHIAFAALEAVCFQTREILDAMNRDCGIPLSHLQVDGGMTSNKILMQLQADILYIPVVKPSMPETTALGAAMAAGAAEGVGVWSLEPEDLSAVTMERFEPQINAEESEIRYSTWKKAVMKSMGWVTTQSPESGDPSIFCSLPLGFFIVSSMVMLIGARYISGIP

SEQ ID NO: 25318 - protein, 583 aa, Homo sapiens
LPLPLPPPSPRKPAAIAGRPEAGFMAASKKAVLGPLVGAVDQGTSSTRFLVFNSKTAELLSHHQVEIKQEFPREGWVEQDPKEILHSVYECIEKTCEKLGQLNIDISNIKAIGVSNQRETTVVWDKITGEPLYNAVVWLDLRTQSTVESLSKRIPGNNNFVKSKTGLPLSTYFSAVKLRWLLDNVRKVQKAVEEKRALFGTIDSWLIWSLTGGVNGGVHCTDVTNASRTMLFNIHSLEWDKQLCEFFGIPMEILPNVRSSSEIYGLMKISHSVKAGALEGVPISGCLGDQSAALVGQMCFQIGQAKNTYGTGCFLLCNTGHKCVFSDHGLLTTVAYKLGRDKPVYYALEGSVAIAGAVIRWLRDNLGIIKTSEEIEKLAKEVGTSYGCYFVPAFSGLYAPYWEPSARGIICGLTQFTNKCHIAFAALEAVCFQTREILDAMNRDCGIPLSHLQVDGGMTSNKILMQLQADILYIPVVKPSMPETTALGAAMAAGAAEGVGVWSLEPEDLSAVTMERFEPQINAEESEIRYSTWKKAVMKSMGWVTTQSPESGDPSIFCSLPLGFFIVSSMVMLIGARYISGIP

SEQ ID NO: 25319 - protein, 19 aa, Homo sapiens
MLFCTILICYSSQLIGMME

SEQ ID NO: 25320 - protein, 992 aa, Homo sapiens
LAGRIHICFLATERAAMNTQKGSLTINVHRGSLAMSIQRGSLVPRDMDSSGRDMQLRVIPAEVKFLDTMAGRVYRLPITVHNICRWNQKIRFKEPVKPQFKLMLTSLDKELASGLQMTAMVEYHPDKDEDTFDRLLISIENKTTEIPLIGLIPSCQLEIESVVNFGTLVANSKVYSKEITITNHGKAPGIFKAEYHGQLPILIFPTSGIVDAKSSMVIKVDFCADQPRIVDEEAIVILQGQPEMLLSIKAHVVEQIIELLSMSSDRRLECIHFGPVFFGSSKIKHARVYNNSPEPINWVAIIQDDAVGEELGTDIQQRTDIALNNLTYIRKIKNIDTTIIISCLPNEGTLQPYQKTVITFCFTPKLMAVGKKDIGPSYRQDYALFLRFESVGSKDGFLRDDDYKTIKSERFQKVELALTGTGLPVLLQFDPGPVLNFKPCFMGERSEIQCIIKNQCELLPVTYHFKKTANFEIDPEKGKITGGGMVDVMCSFVPHQLGVFKVKQMIEIIGLVAEEDLQSLSVKSFHHVYLAFNSICKASTKKVVMKFDPGILPSIRNPTGKFVVKDLAKRKNYAPVAMLQSAMTRTHNHRSCEEPVKDMLLAFPNDRAATIRSKDHHKHFRPIFTKVPRFNYVNHDFAYTTFEKQQKKLHENYYAMYLKYLRSVRLQKKQAERERMYSYDDTDIGLEPGSGLKSPSLSEAEIEEELSSAANSIRANRLLTTRGIASQEEESVRRKVLKGLKSEPSTPQEKHDCSLMLTPKQIHQVIVGPSVLNFGNICVNSPNTHLLHVINMLPMHVLLQLDTDLEELQKTNQFSYVILPTSSTYISMVFDSPTIGKFWKSFTFTVNNVPSGHILVVAVVQPVTLELSSNELVLRPRGFFMKTCFRGTVRLYNRQNCCAQFQWQPVNTGRGIAFSICPAKGTVEAYSSLECEVTWQQGFSSPEEGEFILHVFQGNALKLKCVAHVIIFLEHGFCFEGYEFVGYTLVYIVTYI

SEQ ID NO: 25321 - protein, 3203 aa, Homo sapiens
LAGRIHICFLATERAAMNTQKGSLTINVHRGSLAMSIQRGSLVPRDMDSSGRDMQLRVIPAEVKFLDTMAGRVYRLPITVHNICRWNQKIRFKEPVKPQFKLMLTSLDKELASGLQMTAMVEYHPDKDEDTFDRLLISIENKTTEIPLIGLIPSCQLEIESVVNFGTLVANSKVYSKEITITNHGKAPGIFKAEYHGQLPILIFPTSGIVDAKSSMVIKVDFCADQPRIVDEEAIVILQGQPEMLLSIKAHVVEQIIELLSMSSDRRLECIHFGPVFFGSSKIKHARVYNNSPEPINWVAIIQDDAVGEELGTDIQQRTDIALNNLTYIRKIKNIDTTIIISCLPNEGTLQPYQKTVITFCFTPKLMAVGKKDIGPSYRQDYALFLRFESVGSKDGFLRDDDYKTIKSERFQKVELALTGTGLPVLLQFDPGPVLNFKPCFMGERSEIQCIIKNQCELLPVTYHFKKTANFEIDPEKGKITGGGMVDVMCSFVPHQLGVFKVKQMIEIIGLVAEEDLQSLSVKSFHHVYLAFNSICKASTKKVVMKFDPGILPSIRNPTGKFVVKDLAKRKNYAPVAMLQSAMTRTHNHRSCEEPVKDMLLAFPNDRAATIRSKDHHKHFRPIFTKVPRFNYVNHDFAYTTFEKQQKKLHENYYAMYLKYLRSVRLQKKQAERERMYSYDDTDIGLEPGSGLKSPSLSEAEIEEELSSAANSIRANRLLTTRGIASQEEESVRRKVLKGLKSEPSTPQEKHDCSLMLTPKQIHQVIVGPSVLNFGNICVNSPNTHLLHVINMLPMHVLLQLDTDLEELQKTNQFSYVILPTSSTYISMVFDSPTIGKFWKSFTFTVNNVPSGHILVVAVVQPVTLELSSNELVLRPRGFFMKTCFRGTVRLYNRQNCCAQFQWQPVNTGRGIAFSICPAKGTVEAYSSLECEVTWQQGFSSPEEGEFILHVFQGNALKLKCVAHLGRTKVLLLQPRILFSNCPQGLTTWRKAILQNVGQNHAYFKVCSQSLLPIINIIPSQGIVPFGGITVLNISCKPTVAEKFDTRAKVSIRHANVIDLRIGGSAEIADVEINPDVFNFSGAYIGGTQIIPFVIKNKGITRARVEFNLKDFPDFSMDLKDKSEEFKDPAVPYIYSLELEENTSLECSITFSPKEVTVVEFIIQVQINFFESSKLYTKYLSSSPSNPKTVPLIRPCYVQATALQSPLNLSSTKFVFEIPLHEMNPNNKVTKTQNLVLYNITKHHVTWTLDLSNTGKLFKDGTFKFSVLNGILRPNEKYNVSISFCPNRPGTYTADIPMLLNYIPVCYKILHLTGEVKSPELLFDPPFIFFTPVPLDITTVMDINILPQNYFRNSTLCVQIPTVRLLDGEEIHPLSVKFPKGRVIPGSHSGINNKLTCHLSFKSSKPVSFFTNLLFCDDRKNWFSLPVTATAENCILTIYPYMAIHLDKQNIILKNDKDEYLKKTRDGVLPPYQDAKPPSPASIKKTYTTSKFNDAEPAKGNLFIGVEVLPENLHLDESETSEEDHGSLEKEKYEQFLSLEEGTKAHYFFEKVVNAAQTWFSLFGWPEGPHSFSIPETIRRDVYKMQFYSSTSPPQKFSRQNDFSKYNKTIYDVLLHLSGKMPPGINSSQSLPVDNHEKRVIQLHLQHSSLLDFLNAQGGCISHVLPEFLLEPEDYKRWIEIMSSTNTMPVSSCTPKKKCSIVIEMSKFEAWSKRAWTDVFLQIYKVLVLSRVVPYCSNNMPPICVQNTPKVNPCFASSNIYSDSERILLSWMNINYENTRHVIWKNCHKDVIPSERWIVNFDKDLSDGLVFATQLGAYCPFLIESHFINMYTRPKSPEEYLHNCLIIVNTLYEIDFDVEIQATDICDPNPILMLMLCVYMYERLPTYLPKKVVSFECTLHDTVLNKILLKNSSSRNLVYNARIVGRDAADFSLSQKGNVVTISPRNEINVTLKFTSRFIRPAEASLLLISKPKNAVRGITMTFALKGKVLDFKAIDIIKCESPCYQFQEVTVNVKNPFHTAGDFSVILVESSTFVSSPTKLTESRQYPKHDDDMSSSGSDTDQGCSDSPNVLHTSIKSTFIREFFCSMHTVHLGVKGTSSLELRFLPFNMHVRYCVIILSNKKIGQLIYVAEGKGMTPLPSSCLPMNTSSSPVYYSTTREEGPNKKYPVLYLKCKPYQILYVDLKLPMTNEAKEKALAFAAQQQMSSIEYERRLITGTLESSSIRVAIALLGLTKIETLMLFRISKLRKPKTVSYTTEVSLPKYFYIPEKISIPWIPEPQVIKLSKAKASDGSVPLPLQFLPLQSGRYPCKILLKSRYDVRAYYVEGIVNEEQPEAKFEFETPAFEALTQNIPIKNQTNDKWTFQVTIEGEWFYGPVDLHVGPDEIVEYPLTFKPIFECVITGKLILQNEVDGREHIFDIKGVGKKPSALEHITVECQVGNVTQKHITLPHFTNTALTFKVTADLPIVWGNPQITVYPYKEILYLIHVRPWKRGILKGTITFSTTRRCTTRRKHDDYEEDTDQDQALSCLDSITEQSSILDDADTYGNFNNLRFWYNLEIHSTPGPPIEIMEMTCIALDSTCIEIPLSNPKDRGLHLEVQLTSAALNGDNEIILSPLQCTKYIVWYSPATTGYSDESIIFQPEMAEEFWYLLKLTIELPKPTTMPEIQCDLGKHVTQIIPLVNCTHETLKLQVTNSNPENFVLDINRKSQLIISPHSTTELPVLFYPSALGRADHQACINFYCTQFTEWKFYLSGVGLFPQPLDTERITTRIGLQSTIVIPFKNPTMEDVLIDIILTSVEHPRNLVMDHCWDSFIYESSAFRFSSPSEIQGIALPPKGNIDISLLFIPQIMKLHKTMVIIEMTKANGKYWPIDNFDELDIKFKSIVGIDSEEIQAIHWIYPIVGLPQAPPPKSPPVVIQCQSRKRAEEKVEIILNAGFFGFSLTPDLTEVLVIPKRNSHNFCEDPNEIPKIHEFEYEIQFESEAMKSKLESCVALYMIEKSYDIMAKRITFIFNLVFTPKKPLRSHITLKIECVTEGIWKFPIMLIATEPDTDAVIDIEGVGLFKESVFELRLKSQTRNPEPFTAHFLPGSDLEFFVKPQAGELLPFNTNGTLITVGFKPKMYCRKYKATLVIQTEEMYWKYEINGLTPTTVPPKNAKAKIDATHKTHDNMPVRPHNFVRENTKLIRTGVSSTIKGAPLVKNQ

SEQ ID NO: 25322 - protein, 207 aa, Homo sapiens
LAPARLGRNRSAQARRAARRTASSGAGPAGIIIQGRARNHKKTWGGKEFWSTYTKAQQGESNRGSDWFQFYLTFPLIFGLFIILLVIFLIWRCFLRNKTRRQTVTEGHIPFPQHLNIITPPPPPDEVFDSSGLSPGFLGYVVGRSDSVSTRLSNCDPPPTYEEATGQVNLQRSETEPHLDPPPEYEDIVNSNSASAIPMVPVVTTIK

SEQ ID NO: 25323 - protein, 39 aa, Homo sapiens
LGKRDPGEAPQEGLGMLTPFRERNPPPQPQSRTCYCISS

SEQ ID NO: 25324 - protein, 26 aa, Homo sapiens
LFLAHQKFSVIIHVSLCCWLLCPGRS

SEQ ID NO: 25325 - protein, 415 aa, Homo sapiens
LPRRAKRPLAMGSPAHRPALLLLLPPLLLLLLLRVPPSRSFPGSGDSPLEDDEVGYSHPRYKDTPWCSPIKVKYGDVYCRAPQGGYYKTALGTRCDIRCQKGYELHGSSLLICQSNKRWSDKVICKHMEPPRIKCPSVKERIAEPNKLTVRVSWETPEGRDTADGILTDVILKGLPPGSNFPEGDHKIQYTVYDRAENKGTCKFRVKVRVKRCGKLNAPENGYMKCSSDGDNYGATCEFSCIGGYELQGSPARVCQSNLAWSGTEPTCAAMNVNVGVRTAAALLDQFYEKRRLLIVSTPTARNLLYRLQLGMLQQAQCGLDLRHITVVELVGVFPTLIGRIGAKIMPPALALQLRLLLRIPLYSFSMVLVDKHGMDKERYVSLVMPVALFNLIDTFPLRKEEMVLQAEMSQTCNT

SEQ ID NO: 25326 - protein, 454 aa, Homo sapiens
LPRRAKRPLAMGSPAHRPALLLLLPPLLLLLLLRVPPSRSFPDTPWCSPIKVKYGDVYCRAPQGGYYKTALGTRCDIRCQKGYELHGSSLLICQSNKRWSDKVICKQKRCPTLAMPANGGFKCVDGAYFNSRCEYYCSPGYTLKGERTVTCMDNKAWSGRPASCVDMEPPRIKCPSVKERIAEPNKLTVRVSWETPEGRDTADGILTDVILKGLPPGSNFPEGDHKIQYTVYDRAENKGTCKFRVKVRVKRCGKLNAPENGYMKCSSDGDNYGATCEFSCIGGYELQGSPARVCQSNLAWSGTEPTCAAMNVNVGVRTAAALLDQFYEKRRLLIVSTPTARNLLYRLQLGMLQQAQCGLDLRHITVVELVGVFPTLIGRIGAKIMPPALALQLRLLLRIPLYSFSMVLVDKHGMDKERYVSLVMPVALFNLIDTFPLRKEEMVLQAEMSQTCNT

SEQ ID NO: 25327 - protein, 474 aa, Homo sapiens
LPRRAKRPLAMGSPAHRPALLLLLPPLLLLLLLRVPPSRSFPGSGDSPLEDDEVGYSHPRYKDTPWCSPIKVKYGDVYCRAPQGGYYKTALGTRCDIRCQKGYELHGSSLLICQSNKRWSDKVICKQKRCPTLAMPANGGFKCVDGAYFNSRCEYYCSPGYTLKGERTVTCMDNKAWSGRPASCVDMEPPRIKCPSVKERIAEPNKLTVRVSWETPEGRDTADGILTDVILKGLPPGSNFPEGDHKIQYTVYDRAENKGTCKFRVKVRVKRCGKLNAPENGYMKCSSDGDNYGATCEFSCIGGYELQGSPARVCQSNLAWSGTEPTCAAMNVNVGVRTAAALLDQFYEKRRLLIVSTPTARNLLYRLQLGMLQQAQCGLDLRHITVVELVGVFPTLIGRIGAKIMPPALALQLRLLLRIPLYSFSMVLVDKHGMDKERYVSLVMPVALFNLIDTFPLRKEEMVLQAEMSQTCNT

SEQ ID NO: 25328 - protein, 389 aa, Homo sapiens
LPRRAKRPLAMGSPAHRPALLLLLPPLLLLLLLRVPPSRSFPGSGDSPLEDDEVGYSHPRYKDTPWCSPIKVKYGDVYCRAPQGGYYKTALGTRCDIRCQKGYELHGSSLLICQSNKRWSDKVICKQKRCPTLAMPANGGFKCVDGAYFNSRCEYYCSPGYTLKGERTVTCMDNKAWSGRPASCVDMEPPRIKCPSVKERIAEPNKLTVRVSWETPEGRDTADGILTDVILKGLPPGSNFPEGDHKIQYTVYDRAENKGTCKFRVKVRVKRCGKLNAPENGYMKCSSDGDNYGATCEFSCIGGYELQGSPARVCQSNLAWSGTEPTCAAMNVNVGVRTAAALLDQFYEKRRLLIVSTPTARNLLYRLQLGMLQAVAANPTLLLQYGASG

SEQ ID NO: 25329 - protein, 147 aa, Homo sapiens
MPGHPLLRKSPRMELYLLPAPLPRRLIINPGSCFPAAATPDSGLRGSLCNQGTCILVIPRGERAQGPPSPHMPAPPSSRSGRRRLFDPRCARPSSSGLPRAWCWRGPAAPIPPPLLCPALPWPAPAPSLSPGIRREAELARRAPPPL

SEQ ID NO: 25330 - protein, 41 aa, Homo sapiens
MKHTDEPQEDEEGRGWWGSDSHLHLNRMHMKSSHGVAKETH

SEQ ID NO: 25331 - protein, 118 aa, Homo sapiens
MGKVIPELNGKLTGMAFCVPTAVSVVDLTCRLEKPAKYDDTKKVVKQASEGPLKGILGYTEHQVVSSDFNSNTHSSTFNAGAVIALNNHFFKLISWYDNEFGYSNRMVDLMAHMASKE

SEQ ID NO: 25332 - protein, 363 aa, Homo sapiens
LRLSPVSRRPVPCRPAVLRPPRHHGCVLGNEFSILKSPGSVVFRNGNWPIPGERIPDVAALSMGFSVKEDLSWPGLAVGNLFHRPRATVMVMVKGVNKLALPPGSVISYPLENAVPFSLDSVANSIHSLFSEETPVVLQLAPSEERVYMVGKANSVFEDLSVTLRQLRNRLFQENSVLSSLPLNSLSRNNEVDLLFLSELQVLHDISSLLSRHKHLAKDHSPDLYSLELAGLDEIGKRYGEDSEQFRDASKILVDALQKFADDMYSLYGGNAVVELVTVKSFDTSLIRKTRTILEAKQAKNPASPYNLAYKYNFEYSVVFNMVLWIMIALALAVIITSYNIWNMDPGYDSIIYRMTNQKIRMD

SEQ ID NO: 25333 - protein, 68 aa, Homo sapiens
MAVFVVLLALVAGVLGNEFSILKSPGSVVFRNGNWPIPGERIPDVAALSMGFSVKEVCIYFLNVWSCF

SEQ ID NO: 25334 - protein, 14 aa, Homo sapiens
VKIIFGLLYTMNNL

SEQ ID NO: 25335 - protein, 99 aa, Homo sapiens
LRRPQPRARPPQPFDTLCCRSPPGLGCTQGRSRPGTEPHRRLVPPASVCPGCEKTSVSCGYAMVSARWFILELDLFKTDKCWYFIFYKWTIISFLKTTT

SEQ ID NO: 25336 - protein, 170 aa, Homo sapiens
MFLFYIWFSFRIHNALKGIPDDRDGLFDTIQRSKNHYQKRAYQCIKCMVALFSNCPVAYQILQGNGDLKRKWTWAVEWLGDELERRPYTGNPQYTYNNWSPPVQSNETSNGYFLERSHSARMTLAKACELCPEEVKKATSVQQIEMEESKVILYFIGQCLCINDIIKRLC

SEQ ID NO: 25337 - protein, 139 aa, Homo sapiens
MSHVAVENALGLDQQFAGLDLNSSDNQSGGSTASKGRYIPPHLRNREATKGFYDKDSSGWSSSKDKDAYSSFGSRSDSRGKSSFFSDRGSGSRGRFDDRGRSDYDGIGSRGDRSGYGGFYNSDGYGGNYNSQGVDWWGN

SEQ ID NO: 25338 - protein, 563 aa, Homo sapiens
LVHGGSAQQAGGQAGGLAGRQDWDRGPENGAAGTREAWNGASAMSNKCDVVVVGGGISGMAAAKLLHDSGLNVVVLEARDRVGGRTYTLRNQKVKYVDLGGSYVGPTQNRILRLAKELGLETYKVNEVERLIHHVKGKSYPFRGPFPPVWNPITYLDHNNFWRTMDDMGREIPSDAPWKAPLAEEWDNMTMKELLDKLCWTESAKQLATLFVNLCVTAETHEVSALWFLWYVKQCGGTTRIISTTNGGQERKFVGGSGQVSERIMDLLGDRVKLERPVIYIDQTRENVLVETLNHEMYEAKYVISAIPPTLGMKIHFNPPLPMMRNQMITRVPLGSVIKCIVYYKEPFWRKKDYCGTMIIDGEEAPVAYTLDDTKPEGNYAAIMGFILAHKARKLARLTKEERLKKLCELYAKVLGSLEALEPVHYEEKNWCEEQYSGGCYTTYFPPGILTQYGRVLRQPVDRIYFAGTETATHWSGYMEGAVEAGERAAREILHAMGKIPEDEIWQSEPESVDVPAQPITTTFLERHLPSVPGLLRLIGLTTIFSATALGFLAHKRGLLVRV

SEQ ID NO: 25339 - protein, 476 aa, Homo sapiens
LNTGHPLGVNSDPFLMAAGFLGGNLAPFPRNSSPFPASSGSLASNPAPFPAGARDPSMASFPRGMNPTGTGAVSFPRPGGFLGPGPGRGPTLNPRTGALPGLGPLSNPRLGGLPGPGPISNLRAGSLLGAGPDPRSGGPMGPGSGPNLRAGVLLTSGNGPPNPWPVGLGPGPNPNLRSGFLGTNPAPTLGVFPRPSGLGLGRNLDARAGGLLGTGPGLKNSWTSRPRSFPHSKSGRSFRSKFSLSQASGNMGTSPSSMARVPGPMGPNLGPGPREIGLPGPNPSPMSRAPGPIGPNSAHFSRPGGPMGVNANPFPRGAGSSAFSQSSGTLASNPAIFQRSAGLQGSNPTVFPRASGPLGPNPANFPRAAGLQGPSLTTFPRSTGPLGSGQVTFSRSAAGHLGSSPAGPVGTNPAPFARPTGTLGLNPASFPRMNGPAGKSLVPFPRVGSLPGTNPAAFPRPGGPMAAVYPNGMLPP

SEQ ID NO: 25340 - protein, 1293 aa, Homo sapiens
MKSCGVSLATAAAAAAAFGDEEKKMAAGKASGESEEASPSLTAEEREALGGLDSRLFGFVRFHEDGARTKALLGKAVRCYESLILKAEGKVESDFFCQLGHFNLLLEDYPKALSAYQRYYSLQSDYWKNAAFLYGLGLVYFHYNAFQWAIKAFQEVLYVDPSFCRAKEIHLRLGLMFKVNTDYESSLKHFQLALVDCNPCTLSNAEIQFHIAHLYETQRKYHSAKEAYEQLLQTENLSAQVKATVLQQLGWMHHTVDLLGDKATKESYAIQYLQKSLEADPNSGQSWYFLGRCYSSIGKVQDAFISYRQSIDKSEASADTWCSIGVLYQQQNQPMDALQAYICAVQLDHGHAAAWMDLGTLYESCNQPQDAIKCYLNATRSKSCSNTSALAARIKYLQACKPHHPNTEPVLGLSQTPISQQSLPLHMIPSSQVDDLSSPAKRKRTSSPTKNTSDNWSGGHAVSHPPVQQQAHSWCLTPQKLQMRPTGVAQVRSTGIPNGPTADSSLPTNSVSGQQPQLALTRVPSVSQPGVRPACPGQPLANGPFSAGHVPCSTSRTLGSTDTILIGNNHITGSGSNGNVPYLQRNALTLPHNRTNLTSSAEEPWKNQLSNSTQGLHKGQSSHSAGPNGERPLSSTGPSQHLQAAGSGIQNQNGHPTLPSNSVTQGAALNHLSSHTATSGGQQGITLTKESKPSGNILTVPETSRHTGETPNSTASVEGLPNHVHQMTADAVCSPSHGDSKSPGLLSSDNPQLSALLMGKANNNVGTGTCDKVNNIHPAVHTKTDNSVASSPSSAISTATPSPKSTEQTTTNSVTSLNSPHSGLHTINGEGMEESQSPMKTDLLLVNHKPSPQIIPSMSVSIYPSSAEVLKACRNLGKNGLSNSSILLDKCPPPRPPSSPYPPLPKDKLNPPTPSIYLENKRDAFFPPLHQFCTNPNNPVTVIRGLAGALKLDLGLFSTKTLVEANNEHMVEVRTQLLQPADENWDPTGTKKIWHCESNRSHTTIAKYAQYQASSFQESLREENEKRSHHKDHSDSESTSSDNSGRRRKGPFKTIKFGTNIDLSDDKKWKLQLHELTKLPAFVRVVSAGNLLSHVGHTILGMNTVQLYMKVPGSRTPGHQENNNFCSVNINIGPGDCEWFVVPEGYWGVLNDFCEKNNLNFLMGSWWPNLEDLYEANVPVYRFIQRPGDLVWINAGTVHWVQAIGWCNNIAWNVGPLTACQYKLAVERYEWNKLQSVKSIVPMVHLSWNMARNIKVLSSKNSEAMSDIEGSSHCCRKRDYMAWADKRRTSSLL

SEQ ID NO: 25341 - protein, 122 aa, Homo sapiens
LLGHQLERREPAEHGFVHVSLLQFTLPSEGFDTYRCDCNLAMGVNLTIMSKILKCAGNEDIVTLRIEDNVNTLVLVFEASNQEKVSDYEIKLMDLDVEQLGIAEQEYHYVVKMLSGEFASIC

SEQ ID NO: 25342 - protein, 94 aa, Homo sapiens [sequence omitted]

SEQ ID NO: 25343 - protein, 150 aa, Homo sapiens
LMLIFAELKNILHKVQLKRSRKPWSLRGKRRVTWGHNHRKGIWIRASRVVTGVIRQISIDAWKAEITLRHQMFHQANSKDLFRLCSLDPKMSSVVWLTNGISLENMQKGISAIHERFGLGQRTNSSFQNRGLLVCLTSSHHPISPCPCLQ

SEQ ID NO: 25344 - protein, 15 aa, Homo sapiens
LKDTSARALPFGMKK

SEQ ID NO: 25345 - protein, 380 aa, Homo sapiens
LTARRRSRQETDCSVPTRGPGPVQPGWLVRPLQSLRQGGGRLNLQIPRASLSLSPSPSPEVPAALPDCCGGLSPAQISPATMSSIKIECVLPENCRCGESPVWEEVSNSLLFVDIPAKKVCRWDSFTKQVQRVTMDAPVSSVALRQSGGYVATIGTKFCALNWKEQSAVVLATVDNDKKNNRFNDGKVDPAGRYFAGTMAEETAPAVLERHQGALYSLFPDHHVKKYFDQVDISNGLDWSLDHKIFYYIDSLSYSVDAFDYDLQTGQISNRRSVYKLEKEEQIPDGMCIDAEGKLWVACYNGGRVIRLDPVTGKRLQTVKLPVDKTTSCCFGGKNYSEMYVTCARDGMDPEGLLRQPEAGGIFKITGLGVKGIAPYSYAG

SEQ ID NO: 25346 - protein, 18 aa, Homo sapiens
LRNFLLMGLLISCIGRNR

SEQ ID NO: 25347 - protein, 1078 aa, Homo sapiens
LPRGFSSSLAGRRGFRPAQGMSSSPLSKKRRVSGPDPKPGSNCSPAQSVLSEVPSVPTNGMAKNGSEADIDEGLYSRQLYVLGHEAMKRLQTSSVLVSGLRGLGVEIAKNIILGGVKAVTLHDQGTAQWADLSSQFYLREEDIGKNRAEVSQPRLAELNSYVPVTAYTGPLVEDFLSGFQVVVLTNTPLEDQLRVGEFCHNRGIKLVVADTRGLFGQLFCDFGEEMILTDSNGEQPLSAMVSMVTKDNPGVVTCLDEARHGFESGDFVSFSEVQGMVELNGNQPMEIKVLGPYTFSICDTSNFSDYIRGGIVSQVKVPKKISFKSLVASLAEPDFVVTDFAKFSRPAQLHIGFQALHQFCAQHGRPPRPRNEEDAAELVALAQAVNARALPAVQQNNLDEDLIRKLAYVAAGDLAPINAFIGGLAAQEVMKACSGKFMPIMQWLYFDALECLPEDKEVLTEDKCLQRQNRYDGQVAVFGSDLQEKLGKQKYFLVGAGAIGCELLKNFAMIGLGCGEGGEIIVTDMDTIEKSNLNRQFLFRPWDVTKLKSDTAAAAVRQMNPHIRVTSHQNRVGPDTERIYDDDFFQNLDGVANALDNVDARMYMDRRCVYYRKPLLESGTLGTKGNVQVVIPFLTESYSSSQDPPEKSIPICTLKNFPNAIEHTLQWARDEFEGLFKQPAENVNQYLTDPKFVERTLRLAGTQPLEVLEAVQRSLVLQRPQTWADCVTWACHHWHTQYSNNIRQLLHNFPPDQLTSSGAPFWSGPKRCPHPLTFDVNNPLHLDYVMAAANLFAQTYGLTGSQDRAAVATFLQSVQVPEFTPKSGVKIHVSDQELQSANASVDDSRLEELKATLPSPDKLPGFKMYPIDFEKDDDSNFHMDFIVAASNLRAENYDIPSADRHKSKLIAGKIIPAIATTTAAVVGLVCLELYKVVQGHRQLDSYKNGFLNLALPFFGFSEPLAAPRHQYYNQEWTLWDRFEVQGLQPNGEEMTLKQFLDYFKTEHKLEITMLSQGVSMLYSFFMPAAKLKERLDQPMTEIVSRVSKRKLGRHVRALVLELCCNDESGEDVEVPYVRYTIR

SEQ ID NO: 25348 - protein, 134 aa, Homo sapiens
LGCHDGVANALDNVDARMYMDRRCVYYRKPLLESGTLGTKGNVQVVIPFLTESYSSSQDPPEKSIPICTLKNFPNAIEHTLQVISCGRRERGQASGQAAASPPPGPCLAFRCCMPKCKMCLFSKPPSLTSHQAA

SEQ ID NO: 25349 - protein, 30 aa, Homo sapiens
VLHLSFFLLAKVPFATMGMYQVRPSRGNEW

SEQ ID NO: 25350 - protein, 138 aa, Homo sapiens
LATAHLGASKLLPRSELSTKQPPQFSLVPSPAWRRILLWARDGRVPSRCGRVLWYMQSEIAMDRMKKIKRQLSMTLRGGRGIDKTNGAPEQIGLDESGGGGGSDPGEAPTRAAPGELRSARGPLSSAPDCARGLEDGV

SEQ ID NO: 25351 - protein, 557 aa, Homo sapiens
LATAHLGASKLLPRSELSTKQPPQFSLVPSPAWRRILLWARDGRVPSRCGRVLWYMQSEIAMDRMKKIKRQLSMTLRGGRGIDKTNGAPEQIGLDESGGGGGSDPGEAPTRAAPGELRSARGPLSSAPEIVHEDLKMGSDGESDQASATSSDEVQSPVRVRMRNHPPRKISTEDINKRLSLPADIRLPEGYLEKLTLNSPIFDKPLSRRLRRVSLSEIGFGKLETYIKLDKLGEGTYATVYKGKSKLTDNLVALKEIRLEHEEGAPCTAIREVSLLKDLKHANIVTLHDIIHTEKSLTLVFEYLDKDLKQYLDDCGNIINMHNVKLFLFQLLRGLAYCHRQKVLHRDLKPQNLLINERGELKLADFGLARAKSIPTKTYSNEVVTLWYRPPDILLGSTDYSTQIDMWGVGCIFYEMATGRPLFPGSTVEEQLHFIFRILGTPTEETWPGILSNEEFKTYNYPKYRAEALLSHAPRLDSDGADLLTKLLQFEGRNRISAEDAMKHPFFLSLGERIHKLPDTTSIFALKEIQLQKEASLRSSSMPDSGRPAFRVVDTEF

SEQ ID NO: 25352 - protein, 65 aa, Homo sapiens
VMTMWTLSFQGFLEPLQSLGARLLSGNCRIFLLTPACLAPAAPVESTDASSASSLGKSGVVSRRA

SEQ ID NO: 25353 - protein, 234 aa, Homo sapiens
VDIYPLALRPCRHRRRSSAQRDTREPTMAPFEPLASGILLLLWLIAPSRACTCVPPHPQTAFCNSDLVIRAKFVGTPEVNQTTLYQRYEIKMTKMYKGFQALGDAADIRFVYTPAMESVCGYFHRSHNRSEEFLIAGKLQDGLLHITTCSFVAPWNSLSLAQRRGFTKTYTVGCEECTVFPCLSIPCKLQSGTHCLWTDQLLQGSEKGFQSRHLACLPREPGLCTWQSLRSQIA

SEQ ID NO: 25354 - protein, 425 aa, Homo sapiens
LVEVQGAVLNMITEGAQAPRLLLPPLLLLLTLPATGSDPVLCFTQYEESSGKCKGLLGGGVSVEDCCLNTAFAYQKRSGGLCQPCRSPRWSLWSTWAPCSVTCSEGSQLRYRRCVGWNGQCSGKVAPGTLEWQLQACEDQQCCPEMGGWSGWGPWEPCSVTCSKGTRTRRRACNHPAPKCGGHCPGQAQESEACDTQQVCPTHGAWATWGPWTPCSASCHGGPHEPKETRSRKCSAPEPSQKPPGKPCPGLAYEQRRCTGLPPCPVAGGWGPWGPVSPCPVTCGLGQTMEQRTCNHPVPQHGGPFCAGDATRTHICNTAVPCPVDGEWDSWGEWSPCIRRNMKSISCQEIPGQQSRGRTCRGRKFDGHRCAGQQQDIRHCYSIQHCPLKGSWSEWSTWGLCMPPCGPNPTRARQRLCTPLLPKYP

SEQ ID NO: 25355 - protein, 108 aa, Homo sapiens
LVEVQGAVLNMITEGAQAPRLLLPPLLLLLTLPATGSDPVLCFTQYEESSGKCKGLLGGGVSVEDCCLNTAFAYQKRSGGLCQPCSPYLCLLRTWCWPCSLPMVTPDA

SEQ ID NO: 25356 - protein, 123 aa, Homo sapiens
LVEVQGAVLNMITEGAQAPRLLLPPLLLLLTLPATGSDPVLCFTQYEESSGKCKGLLGGGVSVEDCCLNTAFAYQKRSGGLCQPCRLGGAWGGGWGGGKDCLWGSPKTGHFLSLGLPRVALRP

SEQ ID NO: 25357 - protein, 36 aa, Homo sapiens
LVEVQGAVLNMITEGAQAPRLLLPPLLLLLTLPATV

SEQ ID NO: 25358 - protein, 81 aa, Homo sapiens
MSLSDSSPDTSRIYVALGYGFFLELTLAEALKFIDRKSSLLTELSNSLTKDSMNIKAHIHMLLEGLRELQGLQNFPEKPHH

SEQ ID NO: 25359 - protein, 497 aa, Homo sapiens
VPLVTRNIEPRHLCRQTLPSVRSELECVTNITLANVIRQLGSLSKYAEDIFGELFTQANTFASPVSSLAERVDGLQVKVTQLDPKEEEVSLQVINTRKAFRSSTIQDQKLFDRNSLPVPVLETYNTCDTPPPLNNLTPYRDDGTEALKFYTDPSYFFDLWKKKMLQDTRDIMKEKRKHRKEKKDNPNRGNVNPRKIKTRKEEWEKIKMGQEFVESKEKLGPFGYPPTLVYQNGSIGCVENVDASSYPPPSQSDSASSPSPSFSEDNLPPPPAEFSYPVDNQRGSGLAGPKRSSVVSPSHPPPAPPLGSPPSSKPGFAPPPAPPPPPPPMIGIPPPPPPIGFGSPGTPPPPSSPSFPPHPDFAAPPPLPPPPAADYPTLPPPPLSQPTRGAPPPPPPPPPGPPPPPFTGADGQPAVPPPLSDTTKPKSSLPAISDAHSDLLSAICQGFQLRRVEEQQEQEKWDVVGNDVATILSRRIAVEYSDSEDDSSEFDGDDWSN

SEQ ID NO: 25360 - protein, 27 aa, Homo sapiens
LLLCIALLSSYSIHLLLTCAGIAGTGS

SEQ ID NO: 25361 - protein, 205 aa, Homo sapiens
MQAQLLLAALNIATHVLKPGGCFVAKIFRGRDVTLLYSQLQVFFSSVLCAKPRSSRNSSIEAFAVCQGYDPPEGFIPDLSKPLLDHSYDFNQLDGPTRIIVPFVTCGDLSSYDSDRSYPLDLEGGSEYKYTPPTQPPISPPYQEACTLKRKGQLAKEIRPQDCPISRVDTFPQPLAAPQCHTLLAPEVWKCDSQPALTPSPCAFF

SEQ ID NO: 25362 - protein, 33 aa, Homo sapiens
MKVVGNYRVNTANSSTDTSGEHLTCLRRFENNL

SEQ ID NO: 25363 - protein, 131 aa, Homo sapiens [sequence omitted]

SEQ ID NO: 25364 - protein, 109 aa, Homo sapiens [sequence omitted]

SEQ ID NO: 25365 - protein, 275 aa, Homo sapiens
LPASPPVRSPARWGSMAGSPLLWGPRAGGVGLLVLLLLGLFRPPPALCARPVKEPRGLSAASPPLAETGAPRRFRRSVPRGEAAGAVQELARALAHLLEAERQERARAEAQEAEDQQARVLAQLLRVWGAPRNSDPALGLDDDPDAPAAQLARALLRARLDPAALAAQLVPAPVPAAALRPRPPVYDDGPAGPDAEEAGDETPDVDPELLRYLLGRILAGSADSEGVAAPRRLRRAADHDVGSELPPEGVLGALLRVKRLETPAPQVPARRLLPP

SEQ ID NO: 25366 - protein, 33 aa, Homo sapiens
LSLCQLMCPVAPHPIPHRTIPAFHRGLGQGCRR

SEQ ID NO: 25367 - protein, 654 aa, Homo sapiens
LGLGSGTMAAGLATWLPFARAAAVGWLPLAQQPLPPAPGVKASRGDEVLVVNVSGRRFETWKNTLDRYPDTLLGSSEKEFFYDADSGEYFFDRDPDMFRHVLNFYRTGRLHCPRQECIQAFDEELAFYGLVPELVGDCCLEEYRDRKKENAERLAEDEEAEQAGDGPALPAGSSLRQRLWRAFENPHTSTAALVFYYVTGFFIAVSVIANVVETIPCRGSARRSSREQPCGERFPQAFFCMDTACVLIFTGEYLLRLFAAPSRCRFLRSVMSLIDVVAILPYYIGLLVPKNDDVSGAFVTLRVFRVFRIFKFSRHSQGLRILGYTLKSCASELGFLLFSLTMAIIIFATVMFYAEKGTNKTNFTSIPAAFWYTIVTMTTLGYGDMVPSTIAGKIFGSICSLSGVLVIALPVPVIVSNFSRIYHQNQRADKRRAQQKVRLARIRLAKSGTTNAFLQYKQNGGLEDSGSGEEQALCVRNRSAFEQQHHHLLHCLEKTTCHEFTDELTFSEALGAVSPGGRTSRSTSVSSQPVGPGSLLSSCCPRRAKRRAIRLANSTASVSRGSMQELDMLAGLRRSHAPQSRSSLNAKPHDSLDLNCDSRDFVAAIISIPTPPANTPDESQPSSPGGGGRAGSTLRNSSLGTPCLFPETVKISSL

SEQ ID NO: 25368 - protein, 719 aa, Homo sapiens
LPLLLTATTSRSQGLVETTIFEARLVAVTHGPLRRRCKSAQLPTCCALTQCEGNQGTRAKWVQTSTRILKGQVKQTLSSHQPRPLDSTKMEVKGQLISSPTFNAPAALFGEAAPQVKSERLRGLLDRQRTLQEALSLKLQELRKVCLQEAELTGQLPPECPLEPGERPQLVRRRPPTARAYPPPHPNQAHHSLCPAEELALEALEREVSVQQQIAAAARRLALAPDLSTEQRRRRRQVQADALRRLHELEEQLRDVRARLGLPVLPLPQPLPLSTGSVITTQGVCLGMRLAQLSQEDVVLHSESSSLSESGASHDNEEPHGCFSLAERPSPPKAWDQLRAVSGGSPERRTPWKPPPSDLYGDLKSRRNSVASPTSPTRSLPRSASSFEGRSVPATPVLTRGAGPQLCKPEGLHSRQWSGSQDSQMGFPRADPASDRASLFVARTRRSNSSEALLVDRAAGGGAGSPPAPLAPSASGPPVCKSSEVLYERPQPTPAFSSRTAGPPDPPRAARPSSAAPASRGAPRLPPVCGDFLLDYSLDRGLPRSGGGTGWGELPPAAEVPGPLSRRDGLLTMLPGPPPVYAADSNSPLLRTKDPHTRATRTKPCGLPPEAAEGPEVHPNPLLWMPPPTRIPSAGERSGHKNLALEGLRDWYIRNSGLAAGPQRRPVLPSVGPPHPPFLHARCYEVGQALYGAPSQAPLPHSRSFTAPPVSGRYGGCFY

SEQ ID NO: 25369 - protein, 170 aa, Homo sapiens
LGVQRPRNHEQVSRSSEAPGTPAHAMADSERLSAPGCWAACTNFSRTRKGILLFAEIILCLVILICFSASTPGYSSLSVIEMILAAIFFVVYMCDLHTKIPFINWPWSDFFRTLIAAILYLITSIVVLVERGNHSKIVAGVKAMGAALKHRAKGLRSQGPFLPLLLAEIV

SEQ ID NO: 25370 - protein, 177 aa, Homo sapiens
LGVQRPRNHEQVSRSSEAPGTPAHAMADSERLSAPGCWAACTNFSRTRKGILLFAEIILCLVILICFSASTPGYSSLSVIEMILAAIFFVVYMCDLHTKIPFINWPWSDFFRTLIAAILYLITSIVVLVERGNHSKIVAGVLGLIATCLFGYDAYVTFPVRQPRHTAAPTDPADGPV

SEQ ID NO: 25371 - protein, 129 aa, Homo sapiens
LIRGWGWGLLHLLLPVLGPRSVQRRAPPSHMHTGSLWPSPSLLPKVFAIFAFATCGSYSGELQLSVDCANKTESDLSIEVEFEYPFRCAPTLGYQQTWERKGQGGTGQYLPPQVAPAQLPPRGYIHWDH

SEQ ID NO: 25372 - protein, 55 aa, Homo sapiens
LLPTFSDPVLDPAPDSDTAPPWRRRTESSSIRCARPARQFLQMCRPCAPSPLSWL

SEQ ID NO: 25373 - protein, 80 aa, Homo sapiens
LGNSACDPSVGEDRIKMAMWQGAMDNRGFQQGSFSSFQNSSSDEDLMDIPATAMDFSMRDDVPPLDREVGGIIIGDDNLS

SEQ ID NO: 25374 - protein, 832 aa, Homo sapiens
LGNSACDPSVGEDRIKMAMWQGAMDNRGFQQGSFSSFQNSSSDEDLMDIPATAMDFSMRDDVPPLDREVGEDKSYNGGGIGSSNRIMDFLEEPIPGVGTYDDFNTIDWVREKSRDRDRHREITNKSKESTWALIHSVSDAFSGWLLMLLIGLLSGSLAGLIDISAHWMTDLKEGICTGGFWFNHEHCCWNSEHVTFEERDKCPEWNSWSQLIISTDEGAFAYIVNYFMYVLWALLFAFLAVSLVKVFAPYACGSGIPEIKTILSGFIIRGYLGKWTLVIKTITLVLAVSSGLSLGKEGPLVHVACCCGNILCHCFNKYRKNEAKRREVLSAAAAAGVSVAFGAPIGGVLFSLEEVSYYFPLKTLWRSFFAALVAAFTLRSINPFGNSRLVLFYVEFHTPWHLFELVPFILLGIFGGLWGALFIRTNIAWCRKRKTTQLGKYPVIEVLVVTAITAILAFPNEYTRMSTSELISELFNDCGLLDSSKLCDYENRFNTSKGGELPDRPAGVGVYSAMWQLALTLILKIVITIFTFGMKIPSGLFIPSMAVGAIAGRLLGVGMEQLAYYHQEWTVFNSWCSQGADCITPGLYAMVGAAACLGGVTRMTVSLVVIMFELTGGLEYIVPLMAAAMTSKWVADALGREGIYDAHIRLNGYPFLEAKEEFAHKTLAMDVMKPRRNDPLLTVLTQDSMTVEDVETIISETTYSGFPVVVSRESQRLVGFVLRRDLIISIENARKKQDGVVSTSIIYFTEHSPPLPPYTPPTLKLRNILDLSPFTVTDLTPMEIVVDIFRKLGLRQCLVTHNGRLLGIITKKDVLKHIAQMANQDPDSILFN

SEQ ID NO: 25375 - protein, 188 aa, Homo sapiens
MESILQALEDIQLDLEAVNIKAGKAFLRLKRKFIQMRRPFLERRDLIIQHIPGFWVKAFLNHPRISILINRRDEDIFRYLTNLQVRPERHFLVGSGTNLVLGGDGRWVGRAVVCWGGDRFHHHPHLEQVQDLRHISMGYKMKLYFQTNPYFTNMVIVKEFQRNRSGKWQYQSKSMFPPSICPCFVPSP

SEQ ID NO: 25376 - protein, 96 aa, Homo sapiens [sequence omitted]

SEQ ID NO: 25377 - protein, 1262 aa, Homo sapiens
LHCGVSRAGYLSSRAYGAACPTAAGAAAVMGFLKLIEIENFKSYKGRQIIGPFQRFTAIIGPNGSGKSNLMDAISFVLGEKTSNLRVKTLRDLIHGAPVGKPAANRAFVSMVYSEEGAEDRTFARVIVGGSSEYKINNKVVQLHEYSEELEKLGILIKARNFLVFQGAVESIAMKNPKERTALFEEISRSGELAQEYDKRKKEMVKAEEDTQFNYHRKKNIAAERKEAKQEKEEADRYQRLKDEVVRAQVQLQLFKLYHNEVEIEKLNKELASKNKEIEKDKKRMDKVEDELKEKKKELGKMMREQQQIEKEIKEKDSELNQKRPQYIKAKENTSHKIKKLEAAKKSLQNAQKHYKKRKGDMDELEKEMLSVEKARQEFEERMEEESQSQGRDLTLEENQVKKYHRLKEEASKRAATLAQELEKFNRDQKADQDRLDLEERKKVETEAKIKQKLREIEENQKRIEKLEEYITTSKQSLEEQKKLEGELTEEVEMAKRRIDEINKELNQVMEQLGDARIDRQESSRQQRKAEIMESIKRLYPGSVYGRLIDLCQPTQKKYQIAVTKVLGKNMDAIIVDSEKTGRDCIQYIKEQRGEPETFLPLDYLEVKPTDEKLRELKGAKLVIDVIRYEPPHIKKALQYACGNALVCDNVEDARRIAFGGHQRHKTVALDGTLFQKSGVISGGASDLKAKARRWDEKAVDKLKEKKERLTEELKEQMKAKRKEAELRQVQSQAHGLQMRLKYSQSDLEQTKTRHLALNLQEKSKLESELANFGPRINDIKRIIQSREREMKDLKEKMNQVEDEVFEEFCREIGVRNIREFEEEKVKRQNEIAKKRLEFENQKTRLGIQLDFEKNQLKEDQDKVHMWEQTVKKDENEIEKLKKEEQRHMKIIDETMAQLQDLKNQHLAKKSEVNDKNHEMEEIRKKLGGANKEMTHLQKEVTAIETKLEQKRSDRHNLLQACKMQDIKLPLSKGTMDDISQEEGSSQGEDSVSGSQRISSIYAREALIEIDYGDLCEDLKDAQAEEEIKQEMNTLQQKLNEQQSVLQRIAAPNMKAMEKLESVRDKFQETSDEFEAARKRAKKAKQAFEQIKKERFDRFNACFESVATNIDEIYKALSRNSSAQAFLGPENPEEPYLDGINYNCVAPGKRFRPMDNLSGGEKTVAALALLFAIHSYKPAPFFVLDEIDAALDNTNIGKVANYIKEQSTCNFQAIVISLKEEFYTKAESLIGVYPEQGDCVISKVLTFDLTKYPDANPNPNEQ

SEQ ID NO: 25378 - protein, 89 aa, Homo sapiens
LHCGVSRAGYLSSRAYGAACPTAAGAAAVMGFLKLIEIENFKSYKGRQIIGPFQRFTAIIGPNGSAQRPLSPRIGTLQLLSTLLWRRHF

SEQ ID NO: 25379 - protein, 174 aa, Homo sapiens
LVAATAISTIVVAASTTVTTPTTATTTVSISPTTKGSKSPAKVSDGGSSSTDFKMVSSGLTENQLQLSVEVLTSHSCSEEGLEDAANVLLQLSRGDSGTRDTVLKLLLNGARHLGYTLCKQIGTLLAELREYNLEQQRRAQCETLSPDGLPEEQPQTTKLKGKMQSRFLRFRLS

SEQ ID NO: 25380 - protein, 1040 aa, Homo sapiens
LARQRRWPRLLLLLLPPLPRLLARARAGGLSLCSGAEPAVPPPDPEAAAPPGAGPPPPAPPPQELEPSGELGPRAQARTMHGHRAPGGAGPSEPEHPATNPPGAAPPACADSDPGASEPGLLARRGSGSALGGPLDPQFVGPSDTSLGAAPGHRVLPCGPSPQHHRALRFSYHLEGSQPRPGLHQGNRILVKSLSLDPGQSLEPHPEGPQRLRSDPGPPTETPSQRPSPLKRAPGPKPQVPPKPSYLQMPRMPPPLEPIPPPPSRPLPADPRVAKGLAPRAEASPSSAAVSSLIEKFEREPVIVASDRPVPGPSPGPPEPVMLPQPTSQPPVPQLPEGEASRCLFLLAPGPRDGEKVPNRDSGIDSISSPSNSEETCFVSDDGPPSHSLCPGPPALASVPVALADPHRPGSQEVDSDLEEEDDEEEEEEKDREIPVPLMERQESVELTVQQKVFHIANELLQTEKAYVSRLHLLDQVFCARLLEEARNRSSFPADVVHGIFSNICSIYCFHQQFLLPELEKRMEEWDRYPRIGDILQKLAPFLKMYGEYVKNFDRAVELVNTWTERSTQFKVIIHEVQKEEACGNLTLQHHMLEPVQRIPRYELLLKDYLLKLPHGSPDSKDAQKSLELIATAAEHSNAAIRKMERMHKLLKVYELLGGEEDIVSPTKELIKEGHILKLSAKNGTTQDRYLILFNDRLLYCVPRLRLLGQKFSVRARIDVDGMELKESSNLNLPRTFLVSGKQRSLELQARTEEEKKDWVQAINSTLLKHEQTLETFKLLNSTNREDEDTPPNSPNVDLGKRAPTPIREKEVTMCMRCQEPFNSITKRRHHCKACGHVVCGKCSEFRARLVYDNNRSNRVCTDCYVALHGVPGSSPACSQHTPQRRRSILEKQASVAAENSVICSFLHYMEKGGKGWHKAWFVVPENEPLVLYIYGAPQDVKAQRSLPLIGFEVGPPEAGERPDRRHVFKITQSHLSWYFSPETEELQRRWMAVLGRAGRGDTFCPGPTLSEDREMEEAPVAALGATAEPPESPQTRDKT

SEQ ID NO: 25381 - protein, 194 aa, Homo sapiens
LNLSAFKLVIMMKLRHKNKKPGEGSKGHKKISWPYPQPAKQNGKKATSKVPSAPHFVHPNDHANREAELKKKWVEEMREKQQAAREQERQKRRTIESYCQDVLRRQEEFEHKEEVLQELNMFPQLDDEATRKAYYKEFRKVVEYSDVILEVLDARDPLGCRCFQMEEAVLRAQGNKKLVLVLNKIGNRGPFREG

SEQ ID NO: 25382 - protein, 63 aa, Homo sapiens
LRLRSFEFLYLRTESLGVVEGVGIGDLRKVRISLQAQQGRGRSVGFNLTQAFSPSGSALARPN

SEQ ID NO: 25383 - protein, 240 aa, Homo sapiens
LKRLQASFPRTAVSFEPLAGDMPRGRKSRRRRNARAAEENRNNRKIQASEASETPMAASVVASTPEDDLSGPEEDPSTPEEASTTPEEASSTAQAQKPSVPRSNFQGTKKSLLMSILALIFIMGNSAKEALVWKVLGKLGMQPGRQHSIFGDPKKIVTEEFVRRGYLIYKPVPRSSPVEYEFFWGPRAHVESSKLKVMHFVARVRNRCSKDWPCNYDWDSDDDAEVEAILNSGARGYSAP

SEQ ID NO: 25384 - protein, 78 aa, Homo sapiens
LRLCRQPKYPRRSAPRRNKLDYYAITKFPLTTVSAMKKIGDNSTLVFIVDVKANKHQIKQAVKKLYDTDVANQHPDLT

SEQ ID NO: 25385 - protein, 278 aa, Homo sapiens
LRRQRRGVRFVHLRPAIRDGMKTPFGKAAAGQRSRTGAGHGSVSVTMIKRKAAHKKHRSRPTSQPRGNIVGCRIQHGWKDGDEPLTQWKGTVLDQVPVNPSLYLIKYDGFDCVYGLELHRDERVSSLEVLPNRVASSRISDTHLAEIMVGKAVEHIFETEEGSKNEWRGMVLAQAPVMNTWFYITYEKDPVLYMYQLLDDYKDGDLRILQDSNDSPLAEREPGEVIDSLVGKQVEYAKDDGSKRTGMVIHQVEAKPSVYFIKFDDDFHIYVYDLVKTS

SEQ ID NO: 25386 - protein, 177 aa, Homo sapiens
LRRQRRGVRFVHLRPAIRDGMKTPFGKAAAGQRSRTGAGHGSVSVTMIKRKAAHKKHRSRPTSQPRGNIVGCRIQHGWKDGDEPLTQWKGTVLDQLLDDYKDGDLRILQDSNDSPLAEREPGEVIDSLVGKQVEYAKDDGSKRTGMVIHQVEAKPSVYFIKFDDDFHIYVYDLVKTS

SEQ ID NO: 25387 - protein, 317 aa, Homo sapiens
LLSEEVELYGETKAKVLLSALERLKHQPVGKYQVVTGITPTPLGEGKSTTTIGLVQALLAHLYQNFFMCVRQPSQGPTFGIKGGVAGGGYSQVIPMEEFNLHLTGDIHAITVSNNLVAAAIDAQIFHELTQTDKATFTHLVPSVNGVRKFSDIHIQRLNRLGIDKTDSTTLTDEEINRFARLDIDPETIAWQRVLNTNDRFLRKITIGQAPTKKSHTQTVHFDISVASEIMAVLALTTSLEDRRERLGKMVVASSKKGDPVSAEDLGVSGALIVLMKDTIKPNLMQRLEGTPVFVHAGPFAIIAHGNSSIIADRITL

SEQ ID NO: 25388 - protein, 14 aa, Homo sapiens
MKYSFQLWIAMMSL

SEQ ID NO: 25389 - protein, 69 aa, Homo sapiens
MAARHLPGFHTYTNLLFLLLPSLLMGYSESPPPITDSWAPFISLTHHVLSQSQSPLSSNCWICLSTHTQ

SEQ ID NO: 25390 - protein, 517 aa, Homo sapiens
MSFSLITGDSIVSAEAVWDHVTMANRELAFKAGDVIKVLDASNKDWWWGQIDDEEGWFPASFVRLWVNQEDEVEEGPSDVQNGHLDPNSDCLCLGRPLQNRDQMRANVINEIMSTERHYIKHLKDICEGYLKQCRKRRDMFSDEQLKVIFGNIEDIYRFQMGFVRDLEKQYNNDDPHLSEIGPCFLEHQDGFWIYSEYCNNHLDACMELSKLMKDSRYQHFFEACRLLQQMIDIAIDGFLLTPVQKICKYPLQLAELLKYTAQDHSDYRYVAAALAVMRNVTQQINERKRRLENIDKIAQWQASVLDWEGEDILDRSSELIYTGEMAWIYQPYGRNQQRVFFLFDHQMVLCKKDLIRRDILYYKGRIDMDKYEVVDIEDGRDDDFNVSMKNAFKLHNKETEEIHLFFAKKLEEKIRWLRAFREERKMVQEDEKIGFEISENQKRQAAMTVRKVPKQKGVNSARSVPPSYPPPQDPLNHGQYLVPDGIAQSQVFEFTEPKRSQSPFWQNFSRLTPFKK

SEQ ID NO: 25391 - protein, 55 aa, Homo sapiens
LAAAAAAAQQLQVARKQDTRQTATFRQQPPPMKVSELGNGCGGSKVSSHGRAVEG

SEQ ID NO: 25392 - protein, 634 aa, Homo sapiens
LQRLPHHHSLLNSSEQEKGRRGKGSRWKIQPSSRMEVQLGLGRVYPRPPSKTYRGAFQNLFQSVREVIQNPGPRHPEAASAAPPGASLLLLQQQQQQQQQQQQQQQQQQQQQQQETSPRQQQQQQGEDGSPQAHRRGPTGYLVLDEEQQPSQPQSALECHPERGCVPEPGAAVAASKGLPQQLPAPPDEDDSAAPSTLSLLGPTFPGLSSCSADLKDILSEASTMQLLQQQQQEAVSEGSSSGRAREASGAPTSSKDNYLGGTSTISDNAKELCKAVSVSMGLGVEALEHLSPGEQLRGDCMYAPLLGVPPAVRPTPCAPLAECKGSLLDDSAGKSTEDTAEYSPFKGGYTKGLEGESLGCSGSAAAGSSGTLELPSTLSLYKSGALDEAAAYQSRDYYNFPLALAGPPPPPPPPHPHARIKLENPLDYGSAWAAAAAQCRYGDLASLHGAGAAGPGSGSPSAAASSSWHTLFTAEEGQLYGPCGGGGGGGGGGGGGGGGGGGGGGGEAGAVAPYGYTRPPQGLAGQESDFTAPDVWYPGGMVSRVPYPSPTCVKSEMGPWMDSYSGPYGDMRLETARDHVLPIDYYFPPQKTCLICGDEASGCHYGALTCGSCKVFFKRAAEGFFRMNKLKES

SEQ ID NO: 25393 - protein, 676 aa, Homo sapiens
LQRLPHHHSLLNSSEQEKGRRGKGSRWKIQPSSRMEVQLGLGRVYPRPPSKTYRGAFQNLFQSVREVIQNPGPRHPEAASAAPPGASLLLLQQQQQQQQQQQQQQQQQQQQQQQETSPRQQQQQQGEDGSPQAHRRGPTGYLVLDEEQQPSQPQSALECHPERGCVPEPGAAVAASKGLPQQLPAPPDEDDSAAPSTLSLLGPTFPGLSSCSADLKDILSEASTMQLLQQQQQEAVSEGSSSGRAREASGAPTSSKDNYLGGTSTISDNAKELCKAVSVSMGLGVEALEHLSPGEQLRGDCMYAPLLGVPPAVRPTPCAPLAECKGSLLDDSAGKSTEDTAEYSPFKGGYTKGLEGESLGCSGSAAAGSSGTLELPSTLSLYKSGALDEAAAYQSRDYYNFPLALAGPPPPPPPPHPHARIKLENPLDYGSAWAAAAAQCRYGDLASLHGAGAAGPGSGSPSAAASSSWHTLFTAEEGQLYGPCGGGGGGGGGGGGGGGGGGGGGGGEAGAVAPYGYTRPPQGLAGQESDFTAPDVWYPGGMVSRVPYPSPTCVKSEMGPWMDSYSGPYGDMRLETARDHVLPIDYYFPPQKTCLICGDEASGCHYGALTCGSCKVFFKRAAEGFFRMNKLKESSDTNPKPYCMAAPMGLTENNRNRKKSYRETNLKAVSWPLNHT

SEQ ID NO: 25394 - protein, 606 aa, Homo sapiens
LQRLPHHHSLLNSSEQEKGRRGKGSRWKIQPSSRMEVQLGLGRVYPRPPSKTYRGAFQNLFQSVREVIQNPGPRHPEAASAAPPGASLLLLQQQQQQQQQQQQQQQQQQQQQQQETSPRQQQQQQGEDGSPQAHRRGPTGYLVLDEEQQPSQPQSALECHPERGCVPEPGAAVAASKGLPQQLPAPPDEDDSAAPSTLSLLGPTFPGLSSCSADLKDILSEASTMQLLQQQQQEAVSEGSSSGRAREASGAPTSSKDNYLGGTSTISDNAKELCKAVSVSMGLGVEALEHLSPGEQLRGDCMYAPLLGVPPAVRPTPCAPLAECKGSLLDDSAGKSTEDTAEYSPFKGGYTKGLEGESLGCSGSAAAGSSGTLELPSTLSLYKSGALDEAAAYQSRDYYNFPLALAGPPPPPPPPHPHARIKLENPLDYGSAWAAAAAQCRYGDLASLHGAGAAGPGSGSPSAAASSSWHTLFTAEEGQLYGPCGGGGGGGGGGGGGGGGGGGGGGGEAGAVAPYGYTRPPQGLAGQESDFTAPDVWYPGGMVSRVPYPSPTCVKSEMGPWMDSYSGPYGDMRNTRRKRLWKLIIRSINSCICSPRETEVPVRQQK

SEQ ID NO: 25395 - protein, 682 aa, Homo sapiens
LQRLPHHHSLLNSSEQEKGRRGKGSRWKIQPSSRMEVQLGLGRVYPRPPSKTYRGAFQNLFQSVREVIQNPGPRHPEAASAAPPGASLLLLQQQQQQQQQQQQQQQQQQQQQQQETSPRQQQQQQGEDGSPQAHRRGPTGYLVLDEEQQPSQPQSALECHPERGCVPEPGAAVAASKGLPQQLPAPPDEDDSAAPSTLSLLGPTFPGLSSCSADLKDILSEASTMQLLQQQQQEAVSEGSSSGRAREASGAPTSSKDNYLGGTSTISDNAKELCKAVSVSMGLGVEALEHLSPGEQLRGDCMYAPLLGVPPAVRPTPCAPLAECKGSLLDDSAGKSTEDTAEYSPFKGGYTKGLEGESLGCSGSAAAGSSGTLELPSTLSLYKSGALDEAAAYQSRDYYNFPLALAGPPPPPPPPHPHARIKLENPLDYGSAWAAAAAQCRYGDLASLHGAGAAGPGSGSPSAAASSSWHTLFTAEEGQLYGPCGGGGGGGGGGGGGGGGGGGGGGGEAGAVAPYGYTRPPQGLAGQESDFTAPDVWYPGGMVSRVPYPSPTCVKSEMGPWMDSYSGPYGDMRLETARDHVLPIDYYFPPQKTCLICGDEASGCHYGALTCGSCKVFFKRAAEGKQKYLCASRNDCTIDKFRRKNCPSCRLRKCYEAGMTLGAAVVVSERILRVFGVSEWLP

SEQ ID NO: 25396 - protein, 678 aa, Homo sapiens
LQRLPHHHSLLNSSEQEKGRRGKGSRWKIQPSSRMEVQLGLGRVYPRPPSKTYRGAFQNLFQSVREVIQNPGPRHPEAASAAPPGASLLLLQQQQQQQQQQQQQQQQQQQQQQQETSPRQQQQQQGEDGSPQAHRRGPTGYLVLDEEQQPSQPQSALECHPERGCVPEPGAAVAASKGLPQQLPAPPDEDDSAAPSTLSLLGPTFPGLSSCSADLKDILSEASTMQLLQQQQQEAVSEGSSSGRAREASGAPTSSKDNYLGGTSTISDNAKELCKAVSVSMGLGVEALEHLSPGEQLRGDCMYAPLLGVPPAVRPTPCAPLAECKGSLLDDSAGKSTEDTAEYSPFKGGYTKGLEGESLGCSGSAAAGSSGTLELPSTLSLYKSGALDEAAAYQSRDYYNFPLALAGPPPPPPPPHPHARIKLENPLDYGSAWAAAAAQCRYGDLASLHGAGAAGPGSGSPSAAASSSWHTLFTAEEGQLYGPCGGGGGGGGGGGGGGGGGGGGGGGEAGAVAPYGYTRPPQGLAGQESDFTAPDVWYPGGMVSRVPYPSPTCVKSEMGPWMDSYSGPYGDMRLETARDHVLPIDYYFPPQKTCLICGDEASGCHYGALTCGSCKVFFKRAAEGKQKYLCASRNDCTIDKFRRKNCPSCRLRKCYEAGMTLGEKFRVGNCKHLKMTRP

SEQ ID NO: 25397 - protein, 768 aa, Homo sapiens
LQRLPHHHSLLNSSEQEKGRRGKGSRWKIQPSSRMEVQLGLGRVYPRPPSKTYRGAFQNLFQSVREVIQNPGPRHPEAASAAPPGASLLLLQQQQQQQQQQQQQQQQQQQQQQQETSPRQQQQQQGEDGSPQAHRRGPTGYLVLDEEQQPSQPQSALECHPERGCVPEPGAAVAASKGLPQQLPAPPDEDDSAAPSTLSLLGPTFPGLSSCSADLKDILSEASTMQLLQQQQQEAVSEGSSSGRAREASGAPTSSKDNYLGGTSTISDNAKELCKAVSVSMGLGVEALEHLSPGEQLRGDCMYAPLLGVPPAVRPTPCAPLAECKGSLLDDSAGKSTEDTAEYSPFKGGYTKGLEGESLGCSGSAAAGSSGTLELPSTLSLYKSGALDEAAAYQSRDYYNFPLALAGPPPPPPPPHPHARIKLENPLDYGSAWAAAAAQCRYGDLASLHGAGAAGPGSGSPSAAASSSWHTLFTAEEGQLYGPCGGGGGGGGGGGGGGGGGGGGGGGEAGAVAPYGYTRPPQGLAGQESDFTAPDVWYPGGMVSRVPYPSPTCVKSEMGPWMDSYSGPYGDMRLETARDHVLPIDYYFPPQKTCLICGDEASGCHYGALTCGSCKVFFKRAAEGKQKYLCASRNDCTIDKFRRKNCPSCRLRKCYEAGMTLGARKLKKLGNLKLQEEGEASSTTSPTEETTQKLTVSHIEGYECQPIFLNVLEAIEPGVVCAGHDNNQPDSFAALLSSLNELGERQLVHVVKWAKALPDCERAASVHF

SEQ ID NO: 25398 - protein, 961 aa, Homo sapiens
LQRLPHHHSLLNSSEQEKGRRGKGSRWKIQPSSRMEVQLGLGRVYPRPPSKTYRGAFQNLFQSVREVIQNPGPRHPEAASAAPPGASLLLLQQQQQQQQQQQQQQQQQQQQQQQETSPRQQQQQQGEDGSPQAHRRGPTGYLVLDEEQQPSQPQSALECHPERGCVPEPGAAVAASKGLPQQLPAPPDEDDSAAPSTLSLLGPTFPGLSSCSADLKDILSEASTMQLLQQQQQEAVSEGSSSGRAREASGAPTSSKDNYLGGTSTISDNAKELCKAVSVSMGLGVEALEHLSPGEQLRGDCMYAPLLGVPPAVRPTPCAPLAECKGSLLDDSAGKSTEDTAEYSPFKGGYTKGLEGESLGCSGSAAAGSSGTLELPSTLSLYKSGALDEAAAYQSRDYYNFPLALAGPPPPPPPPHPHARIKLENPLDYGSAWAAAAAQCRYGDLASLHGAGAAGPGSGSPSAAASSSWHTLFTAEEGQLYGPCGGGGGGGGGGGGGGGGGGGGGGGEAGAVAPYGYTRPPQGLAGQESDFTAPDVWYPGGMVSRVPYPSPTCVKSEMGPWMDSYSGPYGDMRLETARDHVLPIDYYFPPQKTCLICGDEASGCHYGALTCGSCKVFFKRAAEGKQKYLCASRNDCTIDKFRRKNCPSCRLRKCYEAGMTLGARKLKKLGNLKLQEEGEASSTTSPTEETTQKLTVSHIEGYECQPIFLNVLEAIEPGVVCAGHDNNQPDSFAALLSSLNELGERQLVHVVKWAKALPGFRNLHVDDQMAVIQYSWMGLMVFAMGWRSFTNVNSRMLYFAPDLVFNEYRMHKSRMYSQCVRMRHLSQEFGWLQITPQEFLCMKALLLFSIKANLFARIPVDGLKNQKFFDELRMNYIKELDRIIACKRKNPTSCSRRFYQLTKLLDSVQPIARELHQFTFDLLIKSHMVSVDFPEMMAEIISVQVPKILSGKVKPIYFHTQ

SEQ ID NO: 25399 - protein, 954 aa, Homo sapiens
LQRLPHHHSLLNSSEQEKGRRGKGSRWKIQPSSRMEVQLGLGRVYPRPPSKTYRGAFQNLFQSVREVIQNPGPRHPEAASAAPPGASLLLLQQQQQQQQQQQQQQQQQQQQQQQETSPRQQQQQQGEDGSPQAHRRGPTGYLVLDEEQQPSQPQSALECHPERGCVPEPGAAVAASKGLPQQLPAPPDEDDSAAPSTLSLLGPTFPGLSSCSADLKDILSEASTMQLLQQQQQEAVSEGSSSGRAREASGAPTSSKDNYLGGTSTISDNAKELCKAVSVSMGLGVEALEHLSPGEQLRGDCMYAPLLGVPPAVRPTPCAPLAECKGSLLDDSAGKSTEDTAEYSPFKGGYTKGLEGESLGCSGSAAAGSSGTLELPSTLSLYKSGALDEAAAYQSRDYYNFPLALAGPPPPPPPPHPHARIKLENPLDYGSAWAAAAAQCRYGDLASLHGAGAAGPGSGSPSAAASSSWHTLFTAEEGQLYGPCGGGGGGGGGGGGGGGGGGGGGGGEAGAVAPYGYTRPPQGLAGQESDFTAPDVWYPGGMVSRVPYPSPTCVKSEMGPWMDSYSGPYGDMRLETARDHVLPIDYYFPPQKTCLICGDEASGCHYGALTCGSCKVFFKRAAEGKQKYLCASRNDCTIDKFRRKNCPSCRLRKCYEAGMTLGARKLKKLGNLKLQEEGEASSTTSPTEETTQKLTVSHIEGYECQPIFLNVLEAIEPGVVCAGHDNNQPDSFAALLSSLNELGERQLVHVVKWAKALPGFRNLHVDDQMAVIQYSWMGLMVFAMGWRSFTNVNSRMLYFAPDLVFNEYRMHKSRMYSQCVRMRHLSQEFGWLQITPQEFLCMKALLLFSIIPVDGLKNQKFFDELRMNYIKELDRIIACKRKNPTSCSRRFYQLTKLLDSVQPIARELHQFTFDLLIKSHMVSVDFPEMMAEIISVQVPKILSGKVKPIYFHTQ

SEQ ID NO: 25400 - protein, 102 aa, Homo sapiens
LAILGGAKFADKIHLINNMLDKVNEMIIGGGTAFTFLKVLNNMETGTSLFDEEGAKIVKDLMSQAEKNGVKITLPIDFVTAEKFDENAKTGQATVASGIPAG

SEQ ID NO: 25401 - protein, 29 aa, Homo sapiens
MVGVSLPQKAGGFLMKKELNYFVKVLESP

SEQ ID NO: 25402 - protein, 518 aa, Homo sapiens
VWPGGTEPVPGRPSREPGDRACAVGKPPLLPRDSDPGTVEASGRSPRPLREDPVGERARSPEASREVERNRAGSPGGAEPPSRLVRQRRAQENEPSGAEAHARVGGGCPVSPPGRPGGEERHRSRREGSTSRPAAAEDGRLSGSERSAAEEGEASFGEEAPRDPEVQSAPGKMARPGQRWLGKWLVAMVVWALCRLATPLAKNLEPVSWSSLNPKFLSGKGLVIYPKIGDKLDIICPRAEAGRPYEYYKLYLVRPEQAAACSTVLDPNVLVTCNRPEQEIRFTIKFQEFSPNYMGLEFKKHHDYYITSTSNGSLEGLENREGGVCRTRTMKIIMKVGQDPNAVTPEQLTTSRPSKEADNTVKMATQAPGSRGSLGDSDGKHETVNQEEKSGPGASGGSSGDPDGFFNSKVALFAAVGAGCVIFLLIIIFLTVLLLKLRKRHRKHTQQRAAALSLSTLASPKGGSGTAGTEPSDIIIPLRTTENNYCPHYEKVSGDYGHPVYIVQEMPPQSPANIYYKV

SEQ ID NO: 25403 - protein, 322 aa, Homo sapiens
LLLLLFFGVVLVIYLAPLCISSPCIMEPRDLPPKPGLVGHRGAPMLAPENTLMSLRKTAECGATVFETDVMVSSDGVPFLMHDEHLSRTTNVASVFPTRITAHSSDFSWTELKRLNAGSWFLERRPFWGAKPLAGPDQKEAESQTVPALEELLEEAAALNLSIMFDLRRPPQNHTYYDTFVIQTLETVLNARVPQAMVMLPGPPLPTLPSLGHDDEDDFEAAPTPRALPQLTYPILWSKLFAPVPALGIPRSSPASHPSFLNHRSFGYQMKIGLMSNDGHLECARYMDVREATERRGPSFLTSPIKICHYWISRHCIRIMSR

SEQ ID NO: 25404 - protein, 944 aa, Homo sapiens
LPLGLGPEATTGDTEPPVLEGEPWVRGSVGAEAPGRPPGPRPRSARAPPRVPPPSWSEQCECAREPGGGGGGGGGGGGGVESGVGWGVRAAGGSAMHKHQHCCKCPECYEVTRLAALRRLEPPGYGDWQVPDPYGPGGGNGASAGYGGYSSQTLPSQAGATPTPRTKAKLIPTGRDVGPVPPKPVPGKSTPKLNGSGPSWWPECTCTNRDWYEQARPAPLLVNPETLKHSLSVNGSDGMFKYEEIVLERGNSGLGFSIAGGIDNPHVPDDPGIFITKIIPGGAAAMDGRLGVNDCVLRVNEVDVSEVVHSRAVEALKEAGPVVRLVVRRRQPPPETIMEVNLLKGPKGLGFSIAGGIGNQHIPGDNSIYITKIIEGGAAQKDGRLQIGDRLLAVNNTNLQDVRHEEAVASLKNTSDMVYLKVAKPGSLHLNDMYAPPDYASTFTALADNHISHNSSLGYLGAVESKVSYPAPPQVPPTRYSPIPRHMLAEEDFTREPRKIILHKGSTGLGFNIVGGEDGEGIFVSFILAGGPADLSGELRRGDRILSVNGVNLRNATHEQAAAALKRAGQSVTIVAQYRPEEYSRFESKIHDLREQMMNSSMSSGSGSLRTSEKRSLYVRALFDYDRTRDSCLPSQGLSFSYGDILHVINASDDEWWQARLVTPHGESEQIGVIPSKKRVEKKERARLKTVKFHARTGMIESNRDFPGLSDDYYGAKNLKGVTSNTSDSESSSKGQEDAILSYEPVTRQEIHYARPVIILGPMKDRVNDDLISEFPHKFGSCVPHTTRPRRDNEVDGQDYHFVVSREQMEKDIQDNKFIEAGQFNDNLYGTSIQSVRAVAERGKHCILDVSGNAIKRLQQAQLYPIAIFIKPKSIEALMEMNRRQTYEQANKIYDKAMKLEQEFGEYFTAIVQGDSLEEIYNKIKQIIEDQSGHYIWVPSPEKL

SEQ ID NO: 25405 - protein, 894 aa, Homo sapiens
LEGEPWVRGSVGAEAPGRPPGPRPRSARAPPRVPPPSWSEQCECAREPGGGGGGGGGGGGGVESGVGWGVRAAGGSAMHKHQHCCKCPECYEVTRLAALRRLEPPGYGDWQVPDPYGPGGGNGASAGYGGYSSQTLPSQAGATPTPRTKAKLIPTGRDVGPVPPKPVPGKSTPKLNGSGPSWWPECTCTNRDWYEQVNGSDGMFKYEEIVLERGNSGLGFSIAGGIDNPHVPDDPGIFITKIIPGGAAAMDGRLGVNDCVLRVNEVDVSEVVHSRAVEALKEAGPVVRLVVRRRQPPPETIMEVNLLKGPKGLGFSIAGGIGNQHIPGDNSIYITKIIEGGAAQKDGRLQIGDRLLAVNNTNLQDVRHEEAVASLKNTSDMVYLKVAKPGSLHLNDMYAPPDYASTFTALADNHISHNSSLGYLGAVESKVSYPAPPQVPPTRYSPIPRHMLAEEDFTREPRKIILHKGSTGLGFNIVGGEDGEGIFVSFILAGGPADLSGELRRGDRILSVNGVNLRNATHEQAAAALKRAGQSVTIVAQYRPEEYSRFESKIHDLREQMMNSSMSSGSGSLRTSEKRSLYVRALFDYDRTRDSCLPSQGLSFSYGDILHVINASDDEWWQARLVTPHGESEQIGVIPSKKRVEKKERARLKTVKFHARTGMIESNRDFPGLSDDYYGAKNLKGQEDAILSYEPVTRQEIHYARPVIILGPMKDRVNDDLISEFPHKFGSCVPHTTRPRRDNEVDGQDYHFVVSREQMEKDIQDNKFIEAGQFNDNLYGTSIQSVRAVAERGKHCILDVSGNAIKRLQQAQLYPIAIFIKPKSIEALMEMNRRQTYEQANKIYDKAMKLEQEFGEYFTAIVQGDSLEEIYNKIKQIIEDQSGHYIWVPSPEKL

SEQ ID NO: 25406 - protein, 260 aa, Homo sapiens
MLKPSLPFTSLLFLQLPLLGVGLNTTILTPNGNEDTTADFFLTTMPTDSLSVSTLPLPEVQCFVFNVEYMNCTWNSSSEPQPTNLTLHYWYKNSDNDKVQKCSHYLFSEEITSGCQLQKKEIHLYQTFVVQLQDPREPRRQATQMLKLQNLVIPWAPENLTLHKLSESQLELNWNNRFLNHCLEHLVQYRTDWDHSWTEQSVDYRHKFSLPSVDGQKRYTFRVRSRFNPLCGSAQHWSEWSHPIHWGSNTSKGRCPEFPP

SEQ ID NO: 25407 - protein, 157 aa, Homo sapiens
MLKPSLPFTSLLFLQLPLLGVGLNTTILTPNGNEDTTADFFLTTMPTDSLSVSTLPLPEVQCFVFNVEYMNCTWNSSSEPQPTNLTLHYWYKNSDNDKVQKCSHYLFSEEITSGCQLQKKEIHLYQTFVVQLQDPREPRRQATQMLKLQNLGTISGL

SEQ ID NO: 25408 - protein, 12 aa, Homo sapiens
VGFLGTISEGRG

SEQ ID NO: 25409 - protein, 12 aa, Homo sapiens
LFLFMLRIWFCA

SEQ ID NO: 25410 - protein, 69 aa, Homo sapiens
LFPLLGHLISLIFWVFQGDLGWMTRGSMVGPFQEAAFALPVSGMDKPVFTDPPVKTKFGYHIIMVEGRK

SEQ ID NO: 25411 - protein, 35 aa, Homo sapiens
VLFVLGFAAGTIWQALSYVYHGFCHVDIMAGLPHC

SEQ ID NO: 25412 - protein, 71 aa, Homo sapiens
LIPGWPENLSLVKSNIKICLLLILMLPAQQVHQRARMNYGCHECPCEAVGKPWLDCEGYLKSILESTRSSM

SEQ ID NO: 25413 - protein, 106 aa, Homo sapiens
LKQPENGSKWLSHFKQWGMLTDCVVMSDPNTKPSRGFGFVTYDTVGEMDAAMNARPHKVDGRVVEPKRAVSREDSQRPGAHLTLKKIFVGGIKEDTEEHQLRDYFE

SEQ ID NO: 25414 - protein, 80 aa, Homo sapiens [sequence omitted]

SEQ ID NO: 25415 - protein, 154 aa, Homo sapiens
LSGSFLCMAPEVIRMQDKNSYSFQSDIYAFGIVLYELMTGQLPYSNINNRDQIIFMVGQGYLSPDLSKVRSNCPKAMKRLMAECLKKKRDERPLFPQILTSIKLLTRSLPKIHHSASKPSLNWAGFQTEDFSLYACSSPKTPIQAGGYGAFLVY

SEQ ID NO: 25416 - protein, 1995 aa, Homo sapiens
MADYALLEDCPYVDDCVFAAEFMTDDYVRVTQLYCDGVGKQYKDYVQSERNLEFDICSIWCSKPISVLQDYCDAIKINIFWPLLFQHQNSSVISRLHPCVDANNSRASEINLKRLQHLELMEDIVDLAKKAANDSLLIGGLLRIGYKIENKILAMEEALNWIKYAGDVTILTKLGSIDNCWPMLSIFFTEYKYHITKIVMEDCNLLEELKTQSCMDCIEQGELMKMKGNEEFSKERFDIAIIYYTRAIEYRPENHLLYGNRALCFLRTGQFRNALGDGKRATILKNTWPKGHYRYCDALSMLGEYNWALQANITAQKLCKNDPEGIKDLIQQHVKLQKQIEDLQGRTANKNPIKAFYENRAYTPRSLSAPVFSTSLNFVEKERDFRKINHEMANGGNQNLKVMDEALMVDDCDCHPEFSPPSSQPPKHKGKQKSRNNESEKFSSSSQLTLPADLKNILEKQFSKSSRGAHQDFANIMTMLRSLIQDGYTALLEQRCRSAAHAFTELLNGLDPQKIKQLNLAMINYVLVVYGLAISLLGIGQPEELSEAENQFKRIIEHYHNEGLDCLAYCGIGKVYLKKNRFLEALNHFEKARTLIYRLPGVLTWPTSNVIIEESQPEKIKMLLEKFVEECKFPPVPDAICCYQKCCGYSKIQIYITDPDFKGFIRISCCQYCKIEFHMNCWKKLKTTTFNDKIDKDFLQGICLTPDCEGVISKIIIFSSGGQVKCEFEHKVIKEKVPPRPILKQKCSSLEKLRLKEDKKLKRKIQKKEAKKLAQERMEEDLRESNPPKNEEQKETVDNVQHCQFLDDRILQCIKQYADKIKSGIWNTATLLKELLSWKVLSTEDYTTCFSSRNFLNEAVDYVIRHLIQEKNRVKTRIFLHVLSELKEVEPKLAAWIRKLNSFGLDATGPFFSRYEASLKQLDFSIMTFLWNEKYGHKLDSIEGKQLDYFFEPTSSKEARCLIWLLEEHRDKFPALHSALDEFFDIMDSRCTVLRKQDSGEAPFSSTKVKNKGKKKKPKDSKPMLVGSGTTSVTPNNEIITSSEDHSNQNSDTAGPFAVPDHLRQDVEEFEALYDQHSNEYVVRNKKLWDMNPKQKCSTLYDYFSQLLEEHGPLDMSHKMFSEEYEFFPEETRPILEKAGGLKSFLLGCPRFVVIDNCIALKKVASRLKKKRKKKNIKTKVEDISKAGEYLQVKLPLNSAAREFKPDVKSKPVSGSSSAPASEDVKPKPLSANSPKPACEDVKAKPVSDNSSRQVSEDGKPKGFSSNSPKPGSEDANYKRVSSNSPKPVLEDVKPTYWAQSHLVTGYCTYLPFQRFDNTRTSPAYINVLPGLPQYTSIYTPLVSLSPEYQLPRSVPVVPSFVANDRADKNATAYFEGHHLNAENAAGHQIASETQILEDSSLISVKSQCSTGDAHTVLSESNRKDGHCGNSNNKCEVIPESTSAVTNIPQVQMVAIQVSWNITHQEVNTEPYNPFEKQQGEISRIEKEYQVLQDQLKEAYENYEQIKLKGLEETRDLEEKLKRHLEENKISKTELDWLLQDLEREIKKWQEEKKEIQKTLKSLKKKIKKVSNANEMYTQKNDGNDKEHELHLDQSLEISNTLTNEKMKIEECIKKGKKDYEESHQRAVAAEVSVLENWKESEVYKLQIMQSQAEAYLKKLELISHDPAAYPDMESDICSWELFLSNVTKETEKAKYQFEEQIKAIKNGSRLSELSKVQISELSFPACNTVHPELLPESSGHDDQGFMTSASDVTGNQAALHRDPSVFSAGDSPGEAPSALLPGPPPSQPEATQLPGPKGAGQAALSEQSPAADQKQPVPPGCAACSSQSPKKPFNSIIEHLSVVFPCYNSTELAGFIKKVRSKNKNSLSGLSIDEIVQRVTEHILDEQKKKKPNPGKDKRTYEPSSAAHVTRSSQGPPLAVVAPSPKTKGQKAEDVPVRVALGASSCEICHEVFKSKNVRVLKCGHKYHKGCFKQWLKGQSACPACQTCDLLSEE

SEQ ID NO: 25417 - protein, 89 aa, Homo sapiens
VSVGQVGMACAISILGKSLADEFAFVDVLEDKLKGEMMDLQHGSLFLKKLKIVADKDYSVTASYKIVVVTSGVLQQEGERRLNLVQKKC

SEQ ID NO: 25418 - protein, 250 aa, Homo sapiens
MAARWRFWCVSVTMVVALLIVCDVPSASAQRKKEMVLSEKVSQLMEWTNKRPVIRMNGDKFRRLVKAPPRNYSVIVMFTALQLHRQCVVCKQADEEFQILANSWRYSSAFTNRIFFAMVDFDEGSDVFQMLNMNSAPTFINFPAKGKPKRGDTYELQVRGFSAEQIARWIADRTDVNIRVIRPPNYAGPLMLGLLLAVIGGLVYLRRSNMEFLFNKTGWAFAALVSEFQKTKNYLNKIPNSVFLGKLLFM

SEQ ID NO: 25419 - protein, 77 aa, Homo sapiens
LGWGAHCLTVLVPIPFFSFLSFPFLPGFHSTGGGDTATCCAKWNTEDKVSHVSTGGGASLELLEGKVLPGVDALSNI

SEQ ID NO: 25420 - protein, 10 aa, Homo sapiens
MADIVLVLLF

SEQ ID NO: 25421 - protein, 492 aa, Homo sapiens
LFDHIVEWLANFMDKLQIKDKKLPLGFTFSFPCRQTKLDESFLVSWTKGFKSSGVEGRDVVALIRKAIQRRGDFDIDIVAVVNDTVGTMMTCGYDDHNCEIGLIVGTGSNACYMEEMRHIEMVEGDEGQMCINMEWGAFGDDGSLNDIRTEFDQEIDMGSLNLGKQLFEKVISGMYMGELMRFILVKMAKEELLFRGKLSPELLNTGHFETKDISDTEGEKDGIRKAREVLMRLGMDPTQEDCVATHRICQIVSTHSASLCTATLAPVLQRIKENKGEEQLRSTIGVDGSVYKKHPHFAKRLHKTVWRLVPDCYVCFLRSEDGSGKGAAMVTAVAYRLADQHRARQKTLEPLQLSHDQLLEVKRRMKVEMERGLSKETHASAPVKMLPTYVCATPDGTEKGDFLALDLGGTNFRVLLVCIRNGKWSGVEMHNKIYGIPQEVMHGTGDELFDHIVQCIEDFLEYMGMKGVSLPLGFTFSFPCQQNSLDESILL

SEQ ID NO: 25422 - protein, 22 aa, Homo sapiens
LKLHLIFAKMCCFGYLSLGHLD

SEQ ID NO: 25423 - protein, 15 aa, Homo sapiens
LELGLAFLLLSLQTA

SEQ ID NO: 25424 - protein, 37 aa, Homo sapiens
MKDLFTRRLKVLRITSCSEIYANKKTDPERASYASCP

SEQ ID NO: 25425 - protein, 33 aa, Homo sapiens
MKDLFTRRLKVLRITSCSEIYANKKTDPERASL

SEQ ID NO: 25426 - protein, 32 aa, Homo sapiens
MKDLFTRRLKVLRITSCSEIYANKKTDPERAS

SEQ ID NO: 25427 - protein, 711 aa, Homo sapiens
LPQQRPDLGSADSFRNRTTPEMNLRSVFTVEQQRILQRYYENGMTNQSKNCFQLILQCAQETKLDFSVVRTWVGNKRRKMSSKNSESGTATTGTSLSAPDITVRNVVNIARPSSQQSSWTSANNDVIVTGIYSPASSSSRQGTNKHTDTQITEAHKIPIQKTATKNDTEFQLHIPVQRQVAHCKNASLLLGEKTIILSRQTSVLNAGNSVFNHAKKNYGNSSVQASEMTVPQKPSVCHRPCKIEPVGIQRSYKPEHTGPALHNLCGQKPTIRDPYCRTQNLEIREVFSLAVSDYPQRILGGNAPQKPSSAEGNCLSIAMETGDAEDEYAREEELASMRAQIPSYSRFYESGSSLRAENQSTTLPGPGRNMPNSQMVNIRDMSDNVLYQNRNYHLTPRTSLHTASSTMYSNTNPLRSNFSPHFASSNQLRLSQNQNNYQISGNLTVPWITGCSRKRALQDRTQFSDRDLATLKKYWDNGMTSLGSVCREKIEAVATELNVDCEIVRTWIGNRRRKYRLMGIEVPPPRGGPADFSEQPESGSLSALTPGEEAGPEVGEDNDRNDEVSICLSEGSSQEEPNEVVPNDARAHKEEDHHAVTTDNVKIEIIDDEESDMISNSEVEQVNSFLDYKNEEVKFIENELEIQKQKYFKLQTFVRSLILAMKADDKEQQQALLSDLPPELEEMDFNHASLEPDDTSFSVSSLSEKNVSESL

SEQ ID NO: 25428 - protein, 19 aa, Homo sapiens
LLSALVLLLVLQKRQKNKR

SEQ ID NO: 25429 - protein, 427 aa, Homo sapiens
VILSLLLASFCLPWLFLFVNSCLAHSLEKAAFFLFKENLLPVLREMGSGEPNPAGKKKKYLKAALYVGDLDPDVTEDMLYKKFRPAGPLRFTRICRDPVTRSPLGYGYVNFRFPADAEWALNTMNFDLINGKPFRLMWSQPDDRLRKSGVGNIFIKNLDKSIDNRALFYLFSAFGNILSCKVVCDDNGSKGYAYVHFDSLAAANRAIWHMNGVRLNNRQVYVGRFKFPEERAAEVRTRDRATFTNVFVKNIGDDIDDEKLKELFCEYGPTESVKVIRDASGKSKGFGFVRYETHEAAQKAVLDLHGKSIDGKVLYVGRAQKKIERLAELRRRFERLRLKEKSRPPGVPIYIKNLDETINDEKLKEEFSSFGSISRAKVMMEVGQGKGFGVVCFSSFEEATKAVDEMNGRIVGSKPLHVTLGQARRRC

SEQ ID NO: 25430 - protein, 223 aa, Homo sapiens
LDLFRRAQARASEDLEKLRLQGQITEGSNMIKTIAFGRYDLDTWYHSPYPEEYARLGRLYMCEFCLKYMKSQMILRQHMAKCVWKHPLGDEIYRKGSVSVFEVDGKKNKIYCQNLCLLAKLFLDHKTLYYDVEPFLFYVMTEADNTGCHLIGYFSKEKNSFLNYNVSCILTMPQYMRQGYGKMLIDFSYLLSKVEEKVGSPECPLSDLGLISCCSYWKEVLLR

SEQ ID NO: 25431 - protein, 1329 aa, Homo sapiens
LGALGGGLCACQVHRQRVRQPQCRCTAAGRAVPERLRLLRPLYLRLKYCPDSAVRPPGRADAARPAALGGCRQSRPANFEGVKLSSRAGGRGLGAARRSLGPSEPPGPPRAPAASAATSALEPPRVSPARRRAALGGTSPAASGATGRAQQAARAGGKLERRRRRSRRGVERRGQAEPRAAMESLLLPVLLLLAILWTQAAALINLKYSVEEEQRAGTVIANVAKDAREAGFALDPRQASAFRVVSNSAPHLVDINPSSGLLVTKQKIDRDLLCRQSPKCIISLEVMSSSMEICVIKVEIKDLNDNAPSFPAAQIELEISEAASPGTRIPLDSAYDPDSGSFGVQTYELTPNELFGLEIKTRGDGSRFAELVVEKSLDRETQSHYSFRITALDGGDPPRLGTVGLSIKVTDSNDNNPVFSESTYAVSVPENSPPNTPVIRLNASDPDEGTNGQVVYSFYGYVNDRTRELFQIDPHSGLVTVTGALDYEEGHVYELDVQAKDLGPNSIPAHCKVTVSVLDTNDNPPVINLLSVNSELVEVSESAPPGYVIALVRVSDRDSGLNGRVQCRLLGNVPFRLQEYESFSTILVDGRLDREQHDQYNLTIQARDGGVPMLQSAKSFTVLITDENDNHPHFSKPYYQVIVQENNTPGAYLLSVSARDPDLGLNGSVSYQIVPSQVRDMPVFTYVSINPNSGDIYALRSFNHEQTKAFEFKVLAKDGGLPSLQSNATVRVIILDVNDNTPVITAPPLINGTAEVYIPRNSGIGYLVTVVKAEDYDEGENGRVTYDMTEGDRGFFEIDQVNGEVRTTRTFGESSKSSYELIVVAHDHGKTSLSASALVLIYLSPALDAQESMGSVNLSLIFIIALGSIAGILFVTMIFVAIKCKRDNKEIRTYNCSNCLTITCLLGCFIKGQNSKCLHCISVSPISEEQDKKTEEKVSLRGKRIAEYSYGHQKKSSKKKKISKNDIRLVPRDVEETDKMNVVSCSSLTSSLNYFDYHQQTLPLGCRRSESTFLNVENQNTRNTSANHIYHHSFNSQGPQQPDLIINGVPLPETENYSFDSNYVNSRAHLIKSSSTFKDLEGNSLKDSGHEESDQTDSEHDVQRSLYCDTAVNDVLNTSVTSMGSQMPDHDQNEGFHCREECRILGHSDRCWMPRNPMPIRSKSPEHVRNIIALSIEATAADVEAYDDCGPTKRTFATFGKDVSDHPAEERPTLKGKRTVDVTICSPKVNSVIREAGNGCEAISPVTSPLHLKSSLPTKPSVSYTIALAPPARDLEQYVNNVNNGPTRPSEAEPRGADSEKVMHEVSPILKEGRNKESPGVKRLKDIVL

SEQ ID NO: 25432 - protein, 16 aa, Homo sapiens
LSILWSTLSLSFRLCL

SEQ ID NO: 25433 - protein, 64 aa, Homo sapiens
MASQLTQRGALFLLFFLTPAVTPTWYAVLCSLLSMSSKAGSVTGAGRPNTLGNHPHLASCLQDL

SEQ ID NO: 25434 - protein, 97 aa, Homo sapiens [sequence omitted]

SEQ ID NO: 25435 - protein, 60 aa, Homo sapiens
LAQRTLQFSVWHHGRFGRNTFLGEAEIQMDSWKLDKKLDHCLPLHGKVVCFNNSCSLDLR

SEQ ID NO: 25436 - protein, 16 aa, Homo sapiens
VKIALRTSGHLLLGVV

SEQ ID NO: 25437 - protein, 132 aa, Homo sapiens
LGISVFYKKMVLAILEWMIIEIRESSAFEDDDMLVGTTASNLLLESEQSTSNLNEKINHLEYEDQYKDNNFGEGNDGGILEDKLISNNDGSIFDDPPALSEAEVMLPEQPAHDDIRVRMIIHQWVGLIVLIQ

SEQ ID NO: 25438 - protein, 111 aa, Homo sapiens [sequence omitted]

SEQ ID NO: 25439 - protein, 192 aa, Homo sapiens
LGCKPCDLKAQGWAQRQGCGVTGLRGPGSGTRRLRERSTGAKVWEAAGWSWTPASRRRSALTGAVPEAASCGSGSVAETREGRCGVRLCKLGRPGMDSSSSSSAAGLGAVDPQLQHFIEVETQKQRFQQLVHQMTELCWEKCMDKPGPKLDSRAEACFVNCVERFIDTSQFILNRLEQTQKSKPVFSESLSD

SEQ ID NO: 25440 - protein, 17 aa, Homo sapiens
VTPLLWGLSFRTSALLV

SEQ ID NO: 25441 - protein, 431 aa, Homo sapiens
VTMQLRNPELHLGCALALRFLALVSWDIPGARALDNGLARTPTMGWLHWERFMCNLDCQEEPDSCISEKLFMEMAELMVSEGWKDAGYEYLCIDDCWMAPQRDSEGRLQADPQRFPHGIRQLANYVHSKGLKLGIYADVGNKTCAGFPGSFGYYDIDAQTFADWGVDLLKFDGCYCDSLENLADGYKHMSLALNRTGRSIVYSCEWPLYMWPFQKPNYTEIRQYCNHWRNFADIDDSWKSIKSILDWTSFNQERIVDVAGPGGWNDPDMLVIGNFGLSWNQQVTQMALWAIMAAPLFMSNDLRHISPQAKALLQDKDVIAINQDPLGKQGYQLRQGDNFEVWERPLSGLAWAVAMINRQEIGGPRSYTIAVASLGKGVACNPACFITQLLPVKRKLGFYEWTSRLRSHINPTGTVLLQLENTMQMSLKDLL

SEQ ID NO: 25442 - protein, 202 aa, Homo sapiens
LGCALALRFLALVSWDIPGARALDNGLARTPTMGWLHWERFMCNLDCQEEPDSCISEKLFMEMAELMVSEGWKDAGYEYLCIDDCWMAPQRDSEGRLQADPQRFPHGIRQLANYVHSKGLKLGIYADVGNKTCAGFPGSFGYYDIDAQTFADWGVDLLKFDGCYCDSLENLADGNVSFQRFSHKGKNFEAMVAEPKNQSSEF

SEQ ID NO: 25443 - protein, 15 aa, Homo sapiens
LTCAEVLLVLVVVPV

SEQ ID NO: 25444 - protein, 19 aa, Homo sapiens
LNGVGWLGNSMRQDKGGMV

SEQ ID NO: 25445 - protein, 163 aa, Homo sapiens
LGPLVGAVDQGTSSTSFLVFNSKTAELLSHHQVEIKQESPREGWVEQDPKEILHSVYECIEKTCEKLGQLNIDISNIKAIGVSNQRETTVVWDKITGEPLYNAVVWLDLRTQSTVESLSKRIPGNNNFVKSKTGLPLSTYFSAVKLRWLLDNVRKVQKAVEEK

SEQ ID NO: 25446 - protein, 55 aa, Homo sapiens [sequence omitted]

SEQ ID NO: 25447 - protein, 90 aa, Homo sapiens
MQNRTTEIEREISMTEERKKKIAGIMTLNRGNGISSGSGDSLYFLDLGFLPSSKPTMTSVDFLCCFNLTWSPCLPHLKYPCNYIGQDNPE

SEQ ID NO: 25448 - protein, 13 aa, Homo sapiens
LCLFYTLSVLLNY

SEQ ID NO: 25449 - protein, 56 aa, Homo sapiens
MRVQVHLHWWLWWLWIVGRPSPSAGLHLGTIILPQPERASALCIIDRGCMFGKRTL

SEQ ID NO: 25450 - protein, 224 aa, Homo sapiens
LVQLLPGLRVCCSQRSAKPEKEEQPVQNPRRKRRGNLDMEKLYSENEGMASNQGKMENEEQPQDERKPEVTCTLEDKKLENEGKTENKGKTGDEEMLKDKGKPEIEGKPESEGEPGSETRAAGKRPAEDDVPRKAKRKTNKGLAHYLKEYKEAIHDMNFSNEDMIREFDNMAKVQDEKRKSKQKLGAFLWMQRNLQDPFYPRGPREFRGGCRAPRRDIEDIPYV

SEQ ID NO: 25451 - protein, 253 aa, Homo sapiens
LVQLLPGLRVCCSQRSAKPEKEEQPVQNPRRKRRGNLDMEKLYSENEGMASNQGKMENEEQPQDERKPEVTCTLEDKKLENEGKTENKGKTGDEEMLKDKGKPESEGEAKEGKSEREGESEMEGGSEREGKPEIEGKPESEGEPGSETRAAGKRPAEDDVPRKAKRKTNKGLAHYLKEYKEAIHDMNFSNEDMIREFDNMAKVQDEKRKSKQKLGAFLWMQRNLQDPFYPRGPREFRGGCRAPRRDIEDIPYV

SEQ ID NO: 25452 - protein, 95 aa, Homo sapiens
LPGGPNWRVAAAVTSLGTALPRLGYLSAKHSLSRAAPGSLSGPGGASDPVPLQSYGDRKAKQSCRRGSIRCPPVERRSSKPNPNLNSVRLIAELS

SEQ ID NO: 25453 - protein, 46 aa, Homo sapiens
VKEDPLLFGLFRSAEVLGLILVSCPFLQRLQTSATRSYYETCIVVP

SEQ ID NO: 25454 - protein, 137 aa, Homo sapiens
LPGGPNWRVGAALAALGTVLPRLGYPSLGGRAHSLGRAAPGRLAAEEAAEIPFPCRATGTGRRNRAVDAGAHAAHQWSTSKERTRDCPARRGVGEAPPGLGGARLGESVTARQGMEHSLGLVALRKELWFIWMLPTG

SEQ ID NO: 25455 - protein, 427 aa, Homo sapiens
LRRAHPGASATADRLEWGQGRAREQPRAREGARARPSPTMSDEASAITSYEKFLTPEEPFPLLGPPRGVGTCPSEEPGCLDISDFGCQLSSCHRTDPLHRFHTNRWNLTSCGTSVASSEGSEELFSSVSVGDQDDCYSLLDDQDFTSFDLFPEGSVCSDVSSSISTYWDWSDSEFEWQLPGSDIASGSDVLSDVIPSIPSSPCLLPKKKNKHRNLDELPWSAMTNDEQVEYIEYLSRKVSTEMGLREQLDIIKIIDPSAQISPTDSEFIIELNCLTDEKLKQVRNYIKEHSPRQRPAREAWKRSNFSCASTSGVSGASASASSSSASMVSSASSSGSSVGNSASNSSANMSRAHSDSNLSASAAERIRDSKKRSKQRKLQQKAFRKRQLKEQRQARKERLSGLFLNEEVLSLKVTEEDHEADVDVLM

SEQ ID NO: 25456 - protein, 30 aa, Homo sapiens
LVSVHVLYIFSVLMSCVDNSKFELFLSWNK

SEQ ID NO: 25457 - protein, 52 aa, Homo sapiens
LKGLHFILLVNDFMSSLLLPPHSFIQGFGKAYAATYPRQLSPYFCPPSLGAS

SEQ ID NO: 25458 - protein, 32 aa, Homo sapiens
LERAPPPPAASGSEGGPVPDGRRQLRVEVSEG

SEQ ID NO: 25459 - protein, 7 aa, Homo sapiens
METQMLP

SEQ ID NO: 25460 - protein, 218 aa, Homo sapiens
MELLIMINACKIASASRVTAVIPCFPYARQDKKDKGFFDIPVDNLYAEPAVLKWIRENISEWRNCTIVSPDAGGAKRVTSIADRLNVDFALIHKERKKANEVDRMVLVGDVKDRVAILVDDMADTCGTICHAADKLLSAGATRVYAILTHGIFSGPAISRINNACFEAVVVTNTIPQEDKMKHCSKIQVIDISMILAEAIRRTHNGESVSYLFSHVPL

SEQ ID NO: 25461 - protein, 14 aa, Homo sapiens
LRIKSTPPLFPLGI

SEQ ID NO: 25462 - protein, 240 aa, Homo sapiens
LLPALPASTGTLESPQASSVGAHLPAAPDLAGQATSEPEKMAQSKLDCRSPVGLDCCNCCLDLAHRSGLQRGSSGENNNPGSPTVSNFRQLQEKLVFENLNTDKLNSIMRQDSLEPVLRDPCYLINEGICNRNIDQTMLSILLFFHSASGASVVAIDNKIEQAMDLVKNHLMYAVREEVEILKEQIRELVEKNSQLERENTLLKTLASPEQLEKFQSCLSPEEPAPESPQVPEAPGGSAV

SEQ ID NO: 25463 - protein, 143 aa, Homo sapiens [sequence omitted]

SEQ ID NO: 25464 - protein, 188 aa, Homo sapiens
VTNHVPALCTAGRGPRFAARPAGPTPSLVSSRFLIPERTLSWEIARGGDVGDFKTYVDQACRAAEEFVNIYYETMDKRRRALTRLYLDKATLIWNGNAVSGLDALNNFFDTLPSSEFQVNMLDCQPVHEQATQSQTTVLVVTSGTVKFDGNKQHFFNQNFLLTAQSTPNNTVWKIASDCFRFQDWSSS

SEQ ID NO: 25465 - protein, 9 aa, Homo sapiens
MILVLTYSL

SEQ ID NO: 25466 - protein, 74 aa, Homo sapiens
LPAFWTPTVLTICVCPLATSQTQLSSIQPTSIELHCWQEALTVSRNGESISYPWRLNCTFKTNLAWKRTFPETL

SEQ ID NO: 25467 - protein, 773 aa, Homo sapiens
LKAYFIVGFQRLLTFICITKIELPWLYCYSYCCFYYCLLQHNKAFKSQRITRNKHHFRSLSTMKLKLNVLTIILLPVHLLITIYSALIFIPWYFLTNAKKKNAMAKRIKAKPTSDKPGSPYRSVTHFDSLAVIDIPGADTLDKLFDHAVSKFGKKDSLGTREILSEENEMQPNGKVFKKLILGNYKWMNYLEVNRRVNNFGSGLTALGLKPKNTIAIFCETRAEWMIAAQTCFKYNFPLVTLYATLGKEAVVHGLNESEASYLITSVELLESKLKTALLDISCVKHIIYVDNKAINKAEYPEGFEIHSMQSVEELGSNPENLGIPPSRPTPSDMAIVMYTSGSTGRPKGVMMHHSNLIAGMTGQCERIPGLGPKDTYIGYLPLAHVLELTAEISCFTYGCRIGYSSPLTLSDQSSKIKKGSKGDCTVLKPTLMAAVPEIMDRIYKNVMSKVQEMNYIQKTLFKIGYDYKLEQIKKGYDAPLCNLLLFKKVKALLGGNVRMMLSGGAPLSPQTHRFMNVCFCCPIGQGYGLTESCGAGTVTEVTDYTTGRVGAPLICCEIKLKDWQEGGYTINDKPNPRGEIVIGGQNISMGYFKNEEKTAEDYSVDENGQRWFCTGDIGEFHPDGCLQIIDRKKDLVKLQAGEYVSLGKVEAALKNCPLIDNICAFAKSDQSYVISFVVPNQKRLTLLAQQKGVEGTWVDICNNPAMEAEILKEIREAANAMKLERFEIPIKVRLSPEPWTPETGLVTDAFKLKRKELRNHYLKDIERMYGGK

SEQ ID NO: 25468 - protein, 64 aa, Homo sapiens
LDPWQPRVSYVAPRSPETKRAVCMIPVRGQVGVSGPFPEGRGSFAWSNPRLVYWGLGRLRQNPP

SEQ ID NO: 25469 - protein, 264 aa, Homo sapiens
LNLKPWSTLKQDDSSASTSQSTRAASIFGGAKPVDTAAREREVEERLQKEQEKLQRQLSEPKLERRPRERHPSWRSEETQERERSRTGSESSQTGTSTTSGRNARRRESKKSLENETLNKEEDCHSPTSKPPKPDQPLKVMPAPPPKENAWVKRSSNPPARSQSSDAEQQSPTSGGGKVAPAQPSEEGPARQDENKVDGMNVPKGQTGNSSRGPGDGGNKDHWKESDRKDGKKDQDSRSAPEPKKPEENPASKFSSASNYAALS

SEQ ID NO: 25470 - protein, 245 aa, Homo sapiens
LFLRSEPEEREQVSQPSWSEEKPVTMRSSLTMVGTLWAFLSLVTAVTSSTSYFLPYWLFGSQMGKPVSFSTFRRCNYPVRGEGHSLIMVEECGRYASFNAIPSLAWQMCTVVTGAGCALLLLVALAAVLGCCMEELISRMMGRCMGAAQFVGGLLISSGCALYPLGWNSPEIMQTCGNVSNQFQLGTCRLGWAYYCAGGGAAAAMLICTWLSCFAGRNPKPVILVESIMRNTNSYAMELDHCLKP

SEQ ID NO: 25471 - protein, 28 aa, Homo sapiens
VVGLLAALTLNLSVRGEGICRCGFWSCS

SEQ ID NO: 25472 - protein, 34 aa, Homo sapiens
LIGDAAKNQAAMNPTNTVFDAKHLIGCRFDDAVV

SEQ ID NO: 25473 - protein, 99 aa, Homo sapiens
LVAEQADLEQTFNPSDLDCVYRLLQCTRQAVPLFSRIIHSTRFVTYFCEQVLPNLSTLTTPVEGLDIQLEVLKLLAEMSSFCGDMEKLETNLRKLFDKL

SEQ ID NO: 25474 - protein, 697 aa, Homo sapiens
VVGASRGCEGAGAGASQQEGAPAAPRDSLFGPRSAAPGGQAAGRQDAASKVIIQLLEVMDHLHRGELVAAILRNRSLVEEEDQHMKLSLGGSEMGLSSHLQSSKAGPTRIFTSNTHSSVVLQGFDQLRLEGLLCDVTLMPGDTDDAFPVHRVMMASASDYFKAMFTGGMKEQDLMCIKLHGVSKVGLRKIIDFIYTAKLSLNMDNLQDTLEAASFLQILPVLDFCKVFLISGVTLDNCVEVGRIANTYNLTEVDKYVNSFVLKNFPALLSTGEFLKLPFERLAFVLSSNSLKHCTELELFKATCRWLRLEEPRMDFAAKLMKNIRFPLMTPQELINYVQTVDFMRTDNTCVNLLLEASNYQMMPYMQPVMQSDRTAIRSDTTHLVTLGGVLRQQLVVSKELRMYDEKAHEWKSLAPMDAPRYQHGIAVIGNFLYVVGGQSNYDTKGKTAVDTVFRFDPRYNKWMQVASLNEKRTFFHLSALKGYLYAVGGRNAAGELPTVECYNPRTNEWTYVAKMSEPHYGHAGTVYGGVMYISGGITHDTFQKELMCFDPDTDKWIQKAPMTTVRGLHCMCTVGERLYVIGGNHFRGTSDYDDVLSCEYYSPILDQWTPIAAMLRGQSDVGVAVFENKIYVVGGYSWNNRCMVEIVQKYDPDKDEWHKVFDLPESLGGIRACTLTVFPPEETTPSPSRESPLSAP

SEQ ID NO: 25475 - protein, 735 aa, Homo sapiens
LGSRPPPSAAPPHPGEVRRRLCRCGRSSSAPIPGKPGTGTFENNCSGIRVRVRALRLRQDRVKWSGRAEGAKVRVLVPRSRREPRLRRATPSLALGAQHPADKRRDARTRRARSLVEEEDQHMKLSLGGSEMGLSSHLQSSKAGPTRIFTSNTHSSVVLQGFDQLRLEGLLCDVTLMPGDTDDAFPVHRVMMASASDYFKAMFTGGMKEQDLMCIKLHGVSKVGLRKIIDFIYTAKLSLNMDNLQDTLEAASFLQILPVLDFCKVFLISGVTLDNCVEVGRIANTYNLTEVDKYVNSFVLKNFPALLSTGEFLKLPFERLAFVLSSNSLKHCTELELFKATCRWLRLEEPRMDFAAKLMKNIRFPLMTPQELINYVQTVDFMRTDNTCVNLLLEASNYQMMPYMQPVMQSDRTAIRSDTTHLVTLGGVLRQQLVVSKELRMYDEKAHEWKSLAPMDAPRYQHGIAVIGNFLYVVGGQSNYDTKGKTAVDTVFRFDPRYNKWMQVASLNEKRTFFHLSALKGYLYAVGGRNAAGELPTVECYNPRTNEWTYVAKMSEPHYGHAGTVYGGVMYISGGITHDTFQKELMCFDPDTDKWIQKAPMTTVRGLHCMCTVGERLYVIGGNHFRGTSDYDDVLSCEYYSPILDQWTPIAAMLRGQSDVGVAVFENKIYVVGGYSWNNRCMVEIVQKYDPDKDEWHKVFDLPESLGGIRACTLTVFPPEETTPSPSRESPLSAP

SEQ ID NO: 25476 - protein, 116 aa, Homo sapiens
LTGGQRLLCAGLAGTLSLSLTAPLELATVLAQVGVVRGHARGPWATGHRVWRAEGLRALWKGNAVACLRLFPCSAVQLAAYRKCSPVLCWLPSCLHEPGENLERTPRSVLSPTELC

SEQ ID NO: 25477 - protein, 19 aa, Homo sapiens
MITKVVFPGRGLSIALWMC

SEQ ID NO: 25478 - protein, 13 aa, Homo sapiens
VVLLRLMYLLLCS

SEQ ID NO: 25479 - protein, 15 aa, Homo sapiens
VLMLSLMTRMLFLTK

SEQ ID NO: 25480 - protein, 485 aa, Homo sapiens
LGLEQRRGGPSLAPPPTGLGRARSVTLSLCRRSSSVSCAVAPVAAAPVAALADAGAMAATDIARQVGEGCRTVPLAGHVGFDSLPDQLVNKSVSQGFCFNILCVGETGLGKSTLMDTLFNTKFEGEPATHTQPGVQLQSNTYDLQESNVRLKLTIVSTVGFGDQINKEDSYKPIVEFIDAQFEAYLQEELKIRRVLHTYHDSRIHVCLYFIAPTGHSLKSLDLVTMKKLDSKVNIIPIIAKADAISKSELTKFKIKITSELVSNGVQIYQFPTDDESVAEINGTMNAHLPFAVIGSTEELKIGNKMMRARQYPWGTVQVENEAHCDFVKLREMLIRVNMEDLREQTHTRHYELYRRCKLEEMGFKDTDPDSKPFSLQETYEAKRNEFLGELQKKEEEMRQMFVQRVKEKEAELKEAEKELHEKFDRLKKLHQDEKKKLEDKKKSLDDEVNAFKQRKTAAELLQSQGSQAGGSQTLKRDKEKKNFF

SEQ ID NO: 25481 - protein, 490 aa, Homo sapiens
LGLEQRRGGPSLAPPPTGLGRARSVTLSLCRRSSSVSCAVAPVAAAPVAALADAGAMAATDIARQVGEGCRTVPLAGHVGFDSLPDQLVNKSVSQGFCFNILCVGETGLGKSTLMDTLFNTKFEGEPATHTQPGVQLQSNTYDLQESNVRLKLTIVSTVGFGDQINKEDSYKPIVEFIDAQFEAYLQEELKIRRVLHTYHDSRIHVCLYFIAPTGHSLKSLDLVTMKKLDSKVNIIPIIAKADAISKSELTKFKIKITSELVSNGVQIYQFPTDDESVAEINGTMNAHLPFAVIGSTEELKIGNKMMRARQYPWGTVQVENEAHCDFVKLREMLIRVNMEDLREQTHTRHYELYRRCKLEEMGFKDTDPDSKPFSLQETYEAKRNEFLGELQKKEEEMRQMFVQRVKEKEAELKEAEKELHEKFDRLKKLHQDEKKKLEDKKKSLDDEVNAFKQRKTAAELLQSQGSQAGGSQTLKRDKEKKNNPWLCTE

SEQ ID NO: 25482 - protein, 487 aa, Homo sapiens
LGLEQRRGGPSLAPPPTGLGRARSVTLSLCRRSSSVSCAVAPVAAAPVAALADAGAMAATDIARQVGEGCRTVPLAGHVGFDSLPDQLVNKSVSQGFCFNILCVGETGLGKSTLMDTLFNTKFEGEPATHTQPGVQLQSNTYDLQESNVRLKLTIVSTVGFGDQINKEDSYKPIVEFIDAQFEAYLQEELKIRRVLHTYHDSRIHVCLYFIAPTGHSLKSLDLVTMKKLDSKVNIIPIIAKADAISKSELTKFKIKITSELVSNGVQIYQFPTDDESVAEINGTMNAHLPFAVIGSTEELKIGNKMMRARQYPWGTVQVENEAHCDFVKLREMLIRVNMEDLREQTHTRHYELYRRCKLEEMGFKDTDPDSKPFSLQETYEAKRNEFLGELQKKEEEMRQMFVQRVKEKEAELKEAEKELHEKFDRLKKLHQDEKKKLEDKKKSLDDEVNAFKQRKTAAELLQSQGSQAGGSQTLKRDKEKKNLGFL

SEQ ID NO: 25483 - protein, 483 aa, Homo sapiens
LGLEQRRGGPSLAPPPTGLGRARSVTLSLCRRSSSVSCAVAPVAAAPVAALADAGAMAATDIARQVGEGCRTVPLAGHVGFDSLPDQLVNKSVSQGFCFNILCVGETGLGKSTLMDTLFNTKFEGEPATHTQPGVQLQSNTYDLQESNVRLKLTIVSTVGFGDQINKEDSYKPIVEFIDAQFEAYLQEELKIRRVLHTYHDSRIHVCLYFIAPTGHSLKSLDLVTMKKLDSKVNIIPIIAKADAISKSELTKFKIKITSELVSNGVQIYQFPTDDESVAEINGTMNAHLPFAVIGSTEELKIGNKMMRARQYPWGTVQVENEAHCDFVKLREMLIRVNMEDLREQTHTRHYELYRRCKLEEMGFKDTDPDSKPFSLQETYEAKRNEFLGELQKKEEEMRQMFVQRVKEKEAELKEAEKELHEKFDRLKKLHQDEKKKLEDKKKSLDDEVNAFKQRKTAAELLQSQGSQAGGSQTLKRDKEKKN

SEQ ID NO: 25484 - protein, 323 aa, Homo sapiens
LGLEQRRGGPSLAPPPTGLGRARSVTLSLCRRSSSVSCAVAPVAAAPVAALADAGAMAATDIARQVGEGCRTVPLAGHVGFDSLPDQLVNKSVSQGFCFNILCVGETGLGKSTLMDTLFNTKFEGEPATHTQPGVQLQSNTYDLQESNVRLKLTIVSTVGFGDQINKEDSYKPIVEFIDAQFEAYLQEELKIRRVLHTYHDSRIHVCLYFIAPTGHSLKSLDLVTMKKLDSKVNIIPIIAKADAISKSELTKFKIKITSELVSNGVQIYQFPTDDESVAEINGTMNAHLPFAVIGSTEELKIGNKMMRARQYPWGTVQAAREV

SEQ ID NO: 25485 - protein, 47 aa, Homo sapiens
LEFYSLSTRKVSFPASMMMEGRQLLSGVSAQFQQGRRVGVFFLLIGW

SEQ ID NO: 25486 - protein, 60 aa, Homo sapiens
VDHHFRFCLLLRLLRQLLTLLRDEEREVNPWQRSSRDQISKQTKHPLEFSPTGRLPQNSN

SEQ ID NO: 25487 - protein, 19 aa, Homo sapiens
LIDYIKIHANNKIFLPLSC

SEQ ID NO: 25488 - protein, 34 aa, Homo sapiens
LLLFIMVESFLIHVLCVQFCGLRDVPIVKLPCTT

SEQ ID NO: 25489 - protein, 206 aa, Homo sapiens
LPDPCKFNFFPIPGPSLSSPPSPWIMFKKFDEKENVSNCIQLKTSVIKGIKNQLIEQFPGIEPWLNQIMPKKDPVKIVRCHEHIEILTVNGELLFFRQREGPFYPTLRLLHKYPFILPHQQVDKGAIKFVLSGANIMCPGLTSPGAKLYPAAVDTIVAIMAEGKQHALCVGVMKMSAEDIEKVNKGIGIENIHYLNDGLWHMKTYK

SEQ ID NO: 25490 - protein, 15 aa, Homo sapiens
MDIVLYLCLCLCVTA

SEQ ID NO: 25491 - protein, 183 aa, Homo sapiens
LNKSINPDEAVAYGAAVQAAILSGDKSENVQDLLLLDVTPLSLGIETAGRVITDLIKHNTTIPTKQTQTFTTYSDNQPGVLIQLYEGEHTMTKDDNLLDKFELTGIPPAPRGVPQIEVTFDTNSNGILNVSAVDKSTRKKNKITITNDKGHLSKEDIEYMVQEAEKYKAEDQKQRESVIQELT

SEQ ID NO: 25492 - protein, 266 aa, Homo sapiens
LSSVMALGLKCSRMVHPAFRNYLAASIRPVSEVTLKKVYERQHGHRQYVAYSAVPVHHFATKKAKAKGKGKSQTRVNISAAFVEDIINLEEVNEEMKSVIEARKDNFNKTLNIGTSPGSLDKIAVVTADGKLALNQIRQISVKLPQLILVNMASFPEFTVAAIKAIRESGMNLNPEVEGTLIRVPIPQVIREHREMLVKLAKQNTNKATYSLRKVCTNAMNKLKKSKDTVSEGTIRLTEKQISQMADDTVAELYRHLAVKTKELLG

SEQ ID NO: 25493 - protein, 7 aa, Homo sapiens
MLLSASF

SEQ ID NO: 25494 - protein, 164 aa, Homo sapiens
MARQKKMGQSVLRAVFFLVLGLLGHSHGGFPNTISIGGLFMRNTVQEHSAFRFAVQLYNTNQNTTEKPFHLNYHVDHLDSSNSFSVTNACPAERDYLPWPGSIRENNWTALPCCKDHGLLHLKCSPGGPAKTGPIVSGALQVNCKMRTRSQVSTTSSLLEFSTE

SEQ ID NO: 25495 - protein, 191 aa, Homo sapiens
VLRAVFFLVLGLLGHSHGGFPNTISIGGLFMRNTVQEHSAFRFAVQLYNTNQNTTEKPFHLNYHVDHLDSSNSFSVTNAFCSQFSRGVYAIFGFYDQMSMNTLTSFCGALHTSFVTPSFPTDADVQFVIQMRPALKGAILSLLGHYKWEKFVYLYDTERGKKRHLLCSLDIHVIVFKLPQLMCPLLPINKI

SEQ ID NO: 25496 - protein, 12 aa, Homo sapiens
LVFLGCLYAARM

SEQ ID NO: 25497 - protein, 248 aa, Homo sapiens
MKSKENVKGGEKTPVSGSLKSPVPRSDIPEPEREQKRRKIDTHPSPSHSSTVKVTAILPKVPLGSENYASSPVISIHFLQDSLIELKESSAKLYINHTPPPLSKSKEREMDKKDLDKSRERSREREKKDEKDRKERKRDHSNNDREVPPDLTKRRKEENGTMGVSKHKSESPCESPYPNEKDKEKNKSKSSGKEKGSDSFKSEKMDKISSGGKKESRHDKEKIEKKEKRDSSGGKEEKKHHKSSDKHR

SEQ ID NO: 25498 - protein, 13 aa, Homo sapiens
LDARFSDSVKKAL

SEQ ID NO: 25499 - protein, 1082 aa, Homo sapiens
VQPLPPPRSPRPLPCPPTRSRSHGMEQDTAAVAATVAAADATATIVVIEDEQPGPSTSQEEGAAAAATEATAATEKGEKKKEKNVSSFQLKLAAKAPKSEKEMDPEYEEKMKADRAKRFEFLLKQTELFAHFIQPSAQKSPTSPLNMKLGRPRIKKDEKQSLISAGDYRHRRTEQEEDEELLSESRKTSNVCIRFEVSPSYVKGGPLRDYQIRGLNWLISLYENGVNGILADEMGLGKTLQTIALLGYLKHYRNIPGPHMVLVPKSTLHNWMNEFKRWVPSLRVICFVGDKDARAAFIRDEMMPGEWDVCVTSYEMVIKEKSVFKKFHWRYLVIDEAHRIKNEKSKLSEIVREFKSTNRLLLTGTPLQNNLHELWALLNFLLPDVFNSADDFDSWFDTKNCLGDQKLVERLHAVLKPFLLRRIKTDVEKSLPPKKEIKIYLGLSKMQREWYTKILMKDIDVLNSSGKMDKMRLLNILMQLRKCCNHPYLFDGAEPGPPYTTDEHIVSNSGKMVVLDKLLAKLKEQGSRVLIFSQMTRLLDILEDYCMWRGYEYCRLDGQTPHEEREEAIEAFNAPNSSKFIFMLSTRAGGLGINLASADVVILYDSDWNPQVDLQAMDRAHRIGQKKPVRVFRLITDNTVEERIVERAEIKLRLDSIVIQQGRLIDQQSNKLAKEEMLQMIRHGATHVFASKESELTDEDITTILERGEKKTAEMNERLQKMGESSLRNFRMDIEQSLYKFEGEDYREKQKLGMVEWIEPPKRERKANYAVDAYFREALRVSEPKIPKAPRPPKQPNVQDFQFFPPRLFELLEKEILYYRKTIGYKVPRNPDIPNPALAQREEQKKIDGAEPLTPEETEEKEKLLTQGFTNWTKRDFNQFIKANEKYGRDDIDNIAREVEGKSPEEVMEYSAVFWERCNELQDIEKIMAQIERGEARIQRRISIKKALDAKIARYKAPFHQLRIQYGTSKGKNYTEEEDRFLICMLHKMGFDRENVYEELRQCVRNAPQFRFDWFIKSRTAMEFQRRCNTLISLIEKENMEIEERERAEKKKRATKTPMSQKRKAESATESSGKKDVKKVKS

SEQ ID NO: 25500 - protein, 120 aa, Homo sapiens
MAIYPPRSKSQARGCFCQESQNVRADRTLEGHLAFLGKRLQNRSLERGVTCSESLQSRDGDQVSHLLLYDALFPLDDVFSKQMKCLFPRLGLGVAGRGREGRGKLAVNCPVVGLELLPPP

SEQ ID NO: 25501 - protein, 39 aa, Homo sapiens
MYLCVLVGLYLSFFGEDRAVAVRSCLQGCVYVSVDQPQG

SEQ ID NO: 25502 - protein, 630 aa, Homo sapiens
LTRRSCVRGKGRRRSRIAVAEMFRCGGLAAGALKQKLVPLVRTVCVRSPRQRNRLPVVQSHHLGSPSRSLASTGASGKDGSNLVYFLIVGATVTGAGVYYAYKTMKEDEKRYNERISGLGLTPEQKQKKAALSASEGEEVPQDKAPSHVPFLLIGGGTAAFAAARSIRARDPGARVLIVSEDPELPYMRPPLSKELWFSDDPNVTKTLRFKQWNGKERSIYFQPPSFYVSAQDLPHIENGGVAVLTGKKVVQLDVRDNMVKLNDGSQITYEKCLIATGGTPRSLSAIDRAGAEVKSRTTLFRKIGDFRSLEKISREVKSITIIGGGFLGSELACALGRKARALGTEVIQLFPEKGNMGKILPEYLSNWTMEKVRREGVKVMPNAIVQSVGVSSGKLLIKLKDGRKVETDHIVAAVGLEPNVELAKTGGLEIDSDFGGFRVNAELQARSNIWVAGDAACFYDIKLGRRRVEHHDHAVVSGRLAGENMTGAAKPYWHQSMFWSDLGPDVGYEAIGLVDSSLPTVGVFAKATAQDNPKSATEQSGTGIRSESETESEASEITIPPSTPAVPQAPVQGEDYGKGVIFYLRDKVVVGIVLWNIFNRMPIARKIIKDGEQHEDLNEVAKLFNIHED

SEQ ID NO: 25503 - protein, 634 aa, Homo sapiens
LTRRSCVRGKGRRRSRIAVAEMFRCGGLAAGALKQKLVPLVRTVCVRSPRQRNRLPGNLFQRWHVPLELQMTRQMASSGASGGKIDNSVLVLIVGLSTVGAGAYAYKTMKEDEKRYNERISGLGLTPEQKQKKAALSASEGEEVPQDKAPSHVPFLLIGGGTAAFAAARSIRARDPGARVLIVSEDPELPYMRPPLSKELWFSDDPNVTKTLRFKQWNGKERSIYFQPPSFYVSAQDLPHIENGGVAVLTGKKVVQLDVRDNMVKLNDGSQITYEKCLIATGGTPRSLSAIDRAGAEVKSRTTLFRKIGDFRSLEKISREVKSITIIGGGFLGSELACALGRKARALGTEVIQLFPEKGNMGKILPEYLSNWTMEKVRREGVKVMPNAIVQSVGVSSGKLLIKLKDGRKVETDHIVAAVGLEPNVELAKTGGLEIDSDFGGFRVNAELQARSNIWVAGDAACFYDIKLGRRRVEHHDHAVVSGRLAGENMTGAAKPYWHQSMFWSDLGPDVGYEAIGLVDSSLPTVGVFAKATAQDNPKSATEQSGTGIRSESETESEASEITIPPSTPAVPQAPVQGEDYGKGVIFYLRDKVVVGIVLWNIFNRMPIARKIIKDGEQHEDLNEVAKLFNIHED

SEQ ID NO: 25504 - protein, 345 aa, Homo sapiens
LTRRSCVRGKGRRRSRIAVAEMFRCGGLAAGALKQKLVPLVRTVCVRSPRQRNRLPGNLFQRWHVPLELQMTRQMASSGASGGKIDNSVLVLIVGLSTVGAGAYAYKTMKEDEKRYNERISGLGLTPEQKQKKAALSASEGEEVPQDKAPSHVPFLLIGGGTAAFAAARSIRARDPGARVLIVSEDPELPYMRPPLSKELWFSDDPNVTKTLRFKQWNGKERSIYFQPPSFYVSAQDLPHIENGGVAVLTGKKVVQLDVRDNMVKLNDGSQITYEKCLIATGGTPRSLSAIDRAGAEVKSRTTLFRKIGDFRSLEKISREVKSITIIGGGFLGSELACALGRKDI

SEQ ID NO: 25505 - protein, 41 aa, Homo sapiens
LSFTLLASVVLLLRLNPASSTPLGGRLLQAPPFSPRARSDS

SEQ ID NO: 25506 - protein, 12 aa, Homo sapiens
VSFWLTIYILGG

SEQ ID NO: 25507 - protein, 44 aa, Homo sapiens
MKGNNLRRQSPALRHCWRTETDFFLFTLIGASLLQSASGPCRIS

SEQ ID NO: 25508 - protein, 271 aa, Homo sapiens
LLLLSFRRLRRALRRTSRLSRAAPPLAAPPPPPLLRHRLPPPEQSARAPAGSVMATRSPGVVISDDEPGYDLDLFCIPNHYAEDLERVFIPHGLIMDRTERLARDVMKEMGGHHIVALCVLKGGYKFFADLLDYIKALNRNSDRSIPMTVDFIRLKSYCNDQSTGDIKVIGGDDLSTLTGKNVLIVEDIIDTGKTMQTLLSLVRQYNPKMVKVASLLVKRTPRSVGYKPDFVGFEIPDKFVVGYALDYNEYFRDLNHVCVISETGKAKYKA

SEQ ID NO: 25509 - protein, 48 aa, Homo sapiens
LEKATGEELRSPAISHLSEHGSGFSKLQLRLEMSTVAATSLTATYERP

SEQ ID NO: 25510 - protein, 216 aa, Homo sapiens
LAAGMKVFKFIGLMILLTSAFSAGSGQSPMTVLCSIDWFMVTVHPFMLNNDVCVHFHELHLGLGCPPNHVQPHAYQFTYRVTECGIRAKAVSQDMVIYSTEIHYSSKGTPSKFVIPVSCAAPQKSPWLTKPCSMRVASKSRATAQKDEKCYEVFSLSQSSQRPNCDCPPCVFSEEEHTQVPCHQAGAQEAQPLQPSHFLDISEDWSLHTDDMIGSM

SEQ ID NO: 25511 - protein, 27 aa, Homo sapiens
VGTPTRLRAFSSLLFFPFASLLTSPAH

SEQ ID NO: 25512 - protein, 40 aa, Homo sapiens
MVAMVFLKISVLPLMCRGQTKHKVLRDHAYPRVSQKRGHI

SEQ ID NO: 25513 - protein, 110 aa, Homo sapiens
LPTPLLLTRLPDDYIMLPTDLRCHCHRHPSHSTDRLLLLVICTHLGGIWAGHSPWTMIQTAGCPSRDLLPSARPISSPIPETFCAPATWLPGLSCAWQPNRVSHFLLWTS

SEQ ID NO: 25514 - protein, 83 aa, Homo sapiens
MDGRVQLIKALLALPIRPATRRWRNPIPFPETFDGDTDRLPEFIVQTGSYMFVDENTFSSDALKTCAATAIAIHRIPPTDCCS

SEQ ID NO: 25515 - protein, 83 aa, Homo sapiens
MDGRVQLMKALLAGPLRPAARRWRNPIPFPETFDGDTDRLPEFIVQTSSYMFVDENTFSNDALKTYATTAIAIHRISPTDCGS

SEQ ID NO: 25516 - protein, 40 aa, Homo sapiens
LRATFSVPGIENCSSLASSRDRVIQPPTTYPPQQATGPRS

SEQ ID NO: 25517 - protein, 61 aa, Homo sapiens
MDRLWFSIEDLHADSCHNFSFLSSPVMMISDSRLVPRSYTMDLAQKCFQKSLFLTKQHESH

SEQ ID NO: 25518 - protein, 20 aa, Homo sapiens
MALVYILLIQSLMQCKLYVK

SEQ ID NO: 25519 - protein, 40 aa, Homo sapiens
LMRGGKPVPLLACTMAIMFCTCNGYLQSRYLSHCAVYADD

SEQ ID NO: 25520 - protein, 826 aa, Homo sapiens
LRTGEMAEANPRRGKMRFRRNAASFPGNLHLVLVLRPTSFLQRTFTDIGFWFSQEDFMLKLPAIENFALTVKEMAQMLQSFGTELAETELPDDIPSIEEILAIRAERYHLLKNDITAVTKEGKILLTNLEVPDTEGAVSSRLECHRQISGDWQTINKLLTQVHDMETAFDGFWEKHQLKMEQYLQLWKFEQDFQQLVTEVEFLLNQQAELADVTGTIAQVKQKIKKLENLDENSQELLSKAQFVILHGHKLAANHHYALDLICQRCNELRYLSDILVNEIKAKRIQLSRTFKMHKLLQQARQCCDEGECLLANQEIDKFQSKEDAQKALQDIENFLEMALPFINYEPETLQYEFDVILSPELKVQMKTIQLKLENIRSIFENQQAGFRNLADKHVRPIQFVVPTPENLVTSGTPFFSSKQGKKTWRQNQSNLKIEVVPDCQEKRSSGPSSSLDNGNSLDVLKNHVLNELIQTERVYVRELYTVLLGYRAEMDNPEMFDLMPPLLRNKKDILFGNMAEIYEFHNDIFLSSLENCAHAPERVGPCFLERKDDFQMYAKYCQNKPRSETIWRKYSECAFFQECQRKLKHRLRLDSYLLKPVQRITKYQLLLKELLKYSKDCEGSALLKKALDAMLDLLKSVNDSMHQIAINGYIGNLNELGKMIMQGGFSVWIGHKKGATKMKDLARFKPMQRHLFLYEKAIVFCKRRVESGEGSDRYPSYSFKHCWKMDEVGITEYVKGDNRKFEIWYGEKEEVYIVQASNVDVKMTWLKEIRNILLKQQELLTVKKRKQQDQLTERDKFQISLQQNDEDLCRRWLSYIDEATMSNGK

SEQ ID NO: 25521 - protein, 930 aa, Homo sapiens
LRTGEMAEANPRRGKMRFRRNAASFPGNLHLVLVLRPTSFLQRTFTDIGFWFSQEDFMLKLPVVMLSSVSDLLTYIDDKQLTPELGGTLQYCHSEWIIFRNAIENFALTVKEMAQMLQSFGTELAETELPDDIPSIEEILAIRAERYHLLKNDITAVTKEGKILLTNLEVPDTEGAVSSRLECHRQISGDWQTINKLLTQVHDMETAFDGFWEKHQLKMEQYLQLWKFEQDFQQLVTEVEFLLNQQAELADVTGTIAQVKQKIKKLENLDENSQELLSKAQFVILHGHKLAANHHYALDLICQRCNELRYLSDILVNEIKAKRIQLSRTFKMHKLLQQARQCCDEGECLLANQEIDKFQSKEDAQKALQDIENFLEMALPFINYEPETLQYEFDVILSPELKVQMKTIQLKLENIRSIFENQQAGFRNLADKHVRPIQFVVPTPENLVTSGTPFFSSKQGKKTWRQNQSNLKIEVVPDCQEKRSSGPSSSLDNGNSLDVLKNHVLNELIQTERVYVRELYTVLLGYRAEMDNPEMFDLMPPLLRNKKDILFGNMAEIYEFHNDIFLSSLENCAHAPERVGPCFLERKDDFQMYAKYCQNKPRSETIWRKYSECAFFQECQRKLKHRLRLDSYLLKPVQRITKYQLLLKELLKYSKDCEGSALLKKALDAMLDLLKSVNDSMHQIAINGYIGNLNELGKMIMQGGFSVWIGHKKGATKMKDLARFKPMQRHLFLYEKAIVFCKRRVESGEGSDRYPSYSFKHCWKMDEVGITEYVKGDNRKFEIWYGEKEEVYIVQASNVDVKMTWLKEIRNILLKQQELLTVKKRKQQDQLTERDKFQISLQQNDEKQQGAFISTEETELEHTSTVVEVCEAIASVQAEANTVWTEASQSAEISEEPAEWSSNYFYPTYDENEEENRPLMRPVSEMALLY

SEQ ID NO: 25522 - protein, 40 aa, Homo sapiens
LVLLLHALLMRHRALSIENSQLMEQLRLLVCERASLLRQE

SEQ ID NO: 25523 - protein, 40 aa, Homo sapiens
LRQSEAVPAPLPPRVADAAGASGKRSGRRARSMDTGRSRS

SEQ ID NO: 25524 - protein, 30 aa, Homo sapiens
LETRTLAFVFVFVLPFPVLMGDFENVWEIG

SEQ ID NO: 25525 - protein, 56 aa, Homo sapiens
LRERAGEGGAKLHQGWRARVQTFPRRPNCTSSVFPQRAQKQQEGREHLTGVHAALG

SEQ ID NO: 25526 - protein, 10 aa, Homo sapiens
LLCAIGSLLV

SEQ ID NO: 25527 - protein, 274 aa, Homo sapiens
LCSSGALRLLPAMVAWRSAFLVCLAFSLATLVQRGSGDFDDFNLEDAVKETSSVKQPWDHTTTTTTNRPGTTRAPAKPPGSGLDLADALDDQDDGRRKPGIGGRERWNHVTTTTKRPVTTRAPANTLGNDFDLADALDDRNDRDDGRRKPIAGGGGFSDKDLEDIVGGGEYKPDKGKGDGRYGSNDDPGSGMVAEPGTIAGVASALAMALIGAVSSYISYQQKKFCFSIQQGLNADYVKGENLEAVVCEEPQVKYSTLHTQSAEPPPPPEPARI

SEQ ID NO: 25528 - protein, 50 aa, Homo sapiens
LLPAMVAWRSAFLVCLAFSLATLVQRGSGDFDDFNLEDAVKETSSVKLPG

SEQ ID NO: 25529 - protein, 237 aa, Homo sapiens
VSAPCRRLPLPLLPIPFPPPPPSLLLGGREGRSNSVRMAKGDPKKPKGKMSAYAFFVQTCREEHKKKNPEVPVNFAEFSKKCSERWKTMSGKEKSKFDEMAKADKVRYDREMKDYGPAKGGKKKKDPNAPKRPPSGFFLFCSEFRPKIKSTNPGISIGDVAKKLGEMWNNLNDSEKQPYITKAAKLKEKYEKDVADYKSKGKFDGAKGPAKVARKKVEEEDEEEEEEEEEEEEEEDE

SEQ ID NO: 25530 - protein, 108 aa, Homo sapiens
MPEKVTWMKRMRILHLLLRRYCESKKIDRHMYHSLYLKVQGNVFTNKPILMEHSHKLKADKAHKKLLADQAEARRPKTKEARKRSEERLQAKKEEIIKTLFKEEDTKK

SEQ ID NO: 25531 - protein, 32 aa, Homo sapiens
MPLTCALGVRDKRASASDSQLETGGGKPAQAL

SEQ ID NO: 25532 - protein, 267 aa, Homo sapiens [sequence omitted]

SEQ ID NO: 25533 - protein, 62 aa, Homo sapiens [sequence omitted]

SEQ ID NO: 25534 - protein, 128 aa, Homo sapiens
LVNNKISKIHEKAFSPLRKLQKLYISKNHLVEIPPNLPSSLVELRIHDNRIRKVPKGVFSGLRNMNCIEMGGNPLENSGFEPGAFDGLKLNYLRISELPLLSHHSHPEAPHEAFFSFTPKPKCPRLQS

SEQ ID NO: 25535 - protein, 184 aa, Homo sapiens
LASYLGRVRSLETENQKLESKIREHLEKKGSQVRDWSHYFKTIEDLRAQISANTVDNARTVLQIDSACLAADDFRVKYETELAMCQSVENNIHGLCKVIDDTNVTRLQLETEIEALKEELLFMKKNHEEEVKGLQAQIASSELTVEVEAPNLRTLPKSWQTSGPNMTSWLGRKERSWTVLVSAD

SEQ ID NO: 25536 - protein, 15 aa, Homo sapiens
MRFFRLTFKCFVDCF

SEQ ID NO: 25537 - protein, 36 aa, Homo sapiens
LDPRGRCRFLSAGAVGTVGGGGVGSAWTRCGLGPAW

SEQ ID NO: 25538 - protein, 87 aa, Homo sapiens
LTTAPRGGWYWIWPHLLALSWCHFPPVAIPVLHVTGDSGGWQGLVCAEPACVLQMHTPDIGGQGTTSEAIQDVIRHIRVINGRAVEA

SEQ ID NO: 25539 - protein, 10 aa, Homo sapiens
VFMGARFLFL

SEQ ID NO: 25540 - protein, 119 aa, Homo sapiens
VGSGCRSAAVSALVVRVAPPCPLCPHSAQHPTQVSWSLDHKSAHAGTYEVRFFDEESYSLLRKAQRNNEDISIIPPLFTVSVDHRGTWNGPWVSTEVLAAAIGLVIYYLAFSAKSHIQA

SEQ ID NO: 25541 - protein, 64 aa, Homo sapiens
MGSRVLGSCSWPVLLWAGLWAAHGRASDKLDQHCPCLRGVSLVFFFLDDYLKGKGRQRVRKGLA

SEQ ID NO: 25542 - protein, 141 aa, Homo sapiens
LSTPSARVSIAQAECSGTIMAQCSLNLLGSSDPSTSATQAGAQWRDLSSLQPPPPVFKLFSRLSLPSILLGLQFRDPEYGEWFGYLSREGKVALSIKGGPFKGCFHVPRCLAMCEEMLGALLSRPAPAPSPAPTPACRGAE

SEQ ID NO: 25543 - protein, 450 aa, Homo sapiens
LCQLSDSHGTATNSVWLPRGAGGMSKGLPARQDMEKERETLQAWKERVGQELDRVVAFWMEHSHDQEHGGFFTCLGREGRVYDDLKYVWLQGRQVWMYCRLYRTFERFRHAQLLDAAKAGGEFLLRYARVAPPGKKCAFVLTRDGRPVKVQRTIFSECFYTMAMNELWRATGEVRYQTEAVEMMDQIVHWVQEDASGLGRPQLQGAPAAEPMAVPMMLLNLVEQLGEADEELAGKYAELGDWCARRILQHVQRDGQAVLENVSEGGKELPGCLGRQQNPGHTLEAGWFLLRHCIRKGDPELRAHVIDKFLLLPFHSGWDPDHGGLFYFQDADNFCPTQLEWAMKLWWPHSEAMIAFLMGYSDSGDPVLLRLFYQVAEYTFRQFRDPEYGEWFGYLSREGKVALSIKGGPFKGCFHVPRCLAMCEEMLGALLSRPAPAPSPAPTPACRGAE

SEQ ID NO: 25544 - protein, 436 aa, Homo sapiens
LCQLSDSHGTATNSVWLPRGAGGMSKGLPARQDMEKERETLQAWKERVGQELDRVVAFWMEHSHDQEHGGFFTCLGREGRVWMYCRLYRTFERFRHAQLLDAAKAGGEFLLRYARVAPPGKKCAFVLTRDGRPVKVQRTIFSECFYTMAMNELWRATGEVRYQTEAVEMMDQIVHWVQEDASGLGRPQLQGAPAAEPMAVPMMLLNLVEQLGEADEELAGKYAELGDWCARRILQHVQRDGQAVLENVSEGGKELPGCLGRQQNPGHTLEAGWFLLRHCIRKGDPELRAHVIDKFLLLPFHSGWDPDHGGLFYFQDADNFCPTQLEWAMKLWWPHSEAMIAFLMGYSDSGDPVLLRLFYQVAEYTFRQFRDPEYGEWFGYLSREGKVALSIKGGPFKGCFHVPRCLAMCEEMLGALLSRPAPAPSPAPTPACRGAE

SEQ ID NO: 25545 - protein, 34 aa, Homo sapiens
MAAAAAAAPSGGGGGGEEERLLHKNTDSPVPALM

SEQ ID NO: 25546 - protein, 330 aa, Homo sapiens [sequence omitted]

SEQ ID NO: 25547 - protein, 2651 aa, Homo sapiens
LQHRPPGFSRLKMSSSHSRAGQSAAGAAPGGGVDTRDAEMPATEKDLAEDAPWKKIQQNTFTRWCNEHLKCVSKRIANLQTDLSDGLRLIALLEVLSQKKMHRKHNQRPTFRQMQLENVSVALEFLDRESIKLVSIDSKAIVDGNLKLILGLIWTLILHYSISMPMWDEEEDEEAKKQTPKQRLLGWIQNKLPQLPITNFSRDWQSGRALGALVDSCAPGLCPDWDSWDASKPVTNAREAMQQADDWLGIPQVITPEEIVDPNVDEHSVMTYLSQFPKAKLKPGAPLRPKLNPKKARAYGPGIEPTGNMVKKRAEFTVETRSAGQGEVLVYVEDPAGHQEEAKVTANNDKNRTFSVWYVPEVTGTHKVTVLFAGQHIAKSPFEVYVDKSQGDASKVTAQGPGLEPSGNIANKTTYFEIFTAGAGTGEVEVVIQDPMGQKGTVEPQLEARGDSTYRCSYQPTMEGVHTVHVTFAGVPIPRSPYTVTVGQACNPSACRAVGRGLQPKGVRVKETADFKVYTKGAGSGELKVTVKGPKGEERVKQKDLGDGVYGFEYYPMVPGTYIVTITWGGQNIGRSPFEVKVGTECGNQKVRAWGPGLEGGVVGKSADFVVEAIGDDVGTLGFSVEGPSQAKIECDDKGDGSCDVRYWPQEAGEYAVHVLCNSEDIRLSPFMADIRDAPQDFHPDRVKARGPGLEKTGVAVNKPAEFTVDAKHGGKAPLRVQVQDNEGCPVEALVKDNGNGTYSCSYVPRKPVKHTAMVSWGGVSIPNSPFRVNVGAGSHPNKVKVYGPGVAKTGLKAHEPTYFTVDCAEAGQGDVSIGIKCAPGVVGPAEADIDFDIIRNDNDTFTVKYTPRGAGSYTIMVLFADQATPTSPIRVKVEPSHDASKVKAEGPGLSRTGVELGKPTHFTVNAKAAGKGKLDVQFSGLTKGDAVRDVDIIDHHDNTYTVKYTPVQQGPVGVNVTYGGDPIPKSPFSVAVSPSLDLSKIKVSGLGEKVDVGKDQEFTVKSKGAGGQGKVASKIVGPSGAAVPCKVEPGLGADNSVVRFLPREEGPYEVEVTYDGVPVPGSPFPLEAVAPTKPSKVKAFGPGLQGGSAGSPARFTIDTKGAGTGGLGLTVEGPCEAQLECLDNGDGTCSVSYVPTEPGDYNINILFADTHIPGSPFKAHVVPCFDASKVKCSGPGLERATAGEVGQFQVDCSSAGSAELTIEICSEAGLPAEVYIQDHGDGTHTITYIPLCPGAYTVTIKYGGQPVPNFPSKLQVEPAVDTSGVQCYGPGIEGQGVFREATTEFSVDARALTQTGGPHVKARVANPSGNLTETYVQDRGDGMYKVEYTPYEEGLHSVDVTYDGSPVPSSPFQVPVTEGCDPSRVRVHGPGIQSGTTNKPNKFTVETRGAGTGGLGLAVEGPSEAKMSCMDNKDGSCSVEYIPYEAGTYSLNVTYGGHQVPGSPFKVPVHDVTDASKVKCSGPGLSPGMVRANLPQSFQVDTSKAGVAPLQVKVQGPKGLVEPVDVVDNADGTQTVNYVPSREGPYSISVLYGDEEVPRSPFKVKVLPTHDASKVKASGPGLNTTGVPASLPVEFTIDAKDAGEGLLAVQITDPEGKPKKTHIQDNHDGTYTVAYVPDVTGRYTILIKYGGDEIPFSPYRVRAVPTGDASKCTVTGAGIGPTIQIGEETVITVDTKAAGKGKVTCTVCTPDGSEVDVDVVENEDGTFDIFYTAPQPGKYVICVRFGGEHVPNSPFQVTALAGDQPSVQPPLRSQQLAPQYTYAQGGQQTWAPERPLVGVNGLDVTSLRPFDLVIPFTIKKGEITGEVRMPSGKVAQPTITDNKDGTVTVRYAPSEAGLHEMDIRYDNMHIPGSPLQFYVDYVNCGHVTAYGPGLTHGVVNKPATFTVNTKDAGEGGLSLAIEGPSKAEISCTDNQDGTCSVSYLPVLPGDYSILVKYNEQHVPGSPFTARVTGDDSMRMSHLKVGSAADIPINISETDLSLLTATVVPPSGREEPCLLKRLRNGHVGISFVPKETGEHLVHVKKNGQHVASSPIPVVISQSEIGDASRVRVSGQGLHEGHTFEPAEFIIDTRDAGYGGLSLSIEGPSKVDINTEDLEDGTCRVTYCPTEPGNYIINIKFADQHVPGSPFSVKVTGEGRVKESITRRRRAPSVANVGSHCDLSLKIPEISIQDMTAQVTSPSGKTHEAEIVEGENHTYCIRFVPAEMGTHTVSVKYKGQHVPGSPFQFTVGPLGEGGAHKVRAGGPGLERAEAGVPAEFSIWTREAGAGGLAIAVEGPSKAEISFEDRKDGSCGVAYVVQEPGDYEVSVKFNEEHIPDSPFVVPVASPSGDARRLTVSSLQESGLKVNQPASFAVSLNGAKGAIDAKVHSPSGALEECYVTEIDQDKYAVRFIPRENGVYLIDVKFNGTHIPGSPFKIRVGEPGHGGDPGLVSAYGAGLEGGVTGNPAEFVVNTSNAGAGALSVTIDGPSKVKMDCQECPEGYRVTYTPMAPGSYLISIKYGGPYHIGGSPFKAKVTGPRLVSNHSLHETSSVFVDSLTKATCAPQHGAPGPGPADASKVVAKGLGLSKAYVGQKSSFTVDCSKAGNNMLLVGVHGPRTPCEEILVKHVGSRLYSVSYLLKDKGEYTLVVKWGDEHIPGSPYRVVVP

SEQ ID NO: 25548 - protein, 2354 aa, Homo sapiens
LQHRPPGFSRLKMSSSHSRAGQSAAGAAPGGGVDTRDAEMPATEKDLAEDAPWKKIQQNTFTRWCNEHLKCVSKRIANLQTDLSDGLRLIALLEVLSQKKMHRKHNQRPTFRQMQLENVSVALEFLDRESIKLVSIDSKAIVDGNLKLILGLIWTLILHYSISMPMWDEEEDEEAKKQTPKQRLLGWIQNKLPQLPITNFSRDWQSGRALGALVDSCAPGLCPDWDSWDASKPVTNAREAMQQADDWLGIPQVITPEEIVDPNVDEHSVMTYLSQFPKAKLKPGAPLRPKLNPKKARAYGPGIEPTGNMVKKRAEFTVETRSAGQGEVLVYVEDPAGHQEEAKVTANNDKNRTFSVWYVPEVTGTHKVTVLFAGQHIAKSPFEVYVDKSQGDASKVTAQGPGLEPSGNIANKTTYFEIFTAGAGTGEVEVVIQDPMGQKGTVEPQLEARGDSTYRCSYQPTMEGVHTVHVTFAGVPIPRSPYTVTVGQACNPSACRAVGRGLQPKGVRVKETADFKVYTKGAGSGELKVTVKGPKGEERVKQKDLGDGVYGFEYYPMVPGTYIVTITWGGQNIGRSPFEVKVGTECGNQKVRAWGPGLEGGVVGKSADFVVEAIGDDVGTLGFSVEGPSQAKIECDDKGDGSCDVRYWPQEAGEYAVHVLCNSEDIRLSPFMADIRDAPQDFHPDRVKARGPGLEKTGVAVNKPAEFTVDAKHGGKAPLRVQVQDNEGCPVEALVKDNGNGTYSCSYVPRKPVKHTAMVSWGGVSIPNSPFRVNVGAGSHPNKVKVYGPGVAKTGLKAHEPTYFTVDCAEAGQGDVSIGIKCAPGVVGPAEADIDFDIIRNDNDTFTVKYTPRGAGSYTIMVLFADQATPTSPIRVKVEPSHDASKVKAEGPGLSRTGVELGKPTHFTVNAKAAGKGKLDVQFSGLTKGDAVRDVDIIDHHDNTYTVKYTPVQQGPVGVNVTYGGDPIPKSPFSVAVSPSLDLSKIKVSGLGEKVDVGKDQEFTVKSKGAGGQGKVASKIVGPSGAAVPCKVEPGLGADNSVVRFLPREEGPYEVEVTYDGVPVPGSPFPLEAVAPTKPSKVKAFGPGLQGGSAGSPARFTIDTKGAGTGGLGLTVEGPCEAQLECLDNGDGTCSVSYVPTEPGDYNINILFADTHIPGSPFKAHVVPCFDASKVKCSGPGLERATAGEVGQFQVDCSSAGSAELTIEICSEAGLPAEVYIQDHGDGTHTITYIPLCPGAYTVTIKYGGQPVPNFPSKLQVEPAVDTSGVQCYGPGIEGQGVFREATTEFSVDARALTQTGGPHVKARVANPSGNLTETYVQDRGDGMYKVEYTPYEEGLHSVDVTYDGSPVPSSPFQVPVTEGCDPSRVRVHGPGIQSGTTNKPNKFTVETRGAGTGGLGLAVEGPSEAKMSCMDNKDGSCSVEYIPYEAGTYSLNVTYGGHQVPGSPFKVPVHDVTDASKVKCSGPGLSPGMVRANLPQSFQVDTSKAGVAPLQVKVQGPKGLVEPVDVVDNADGTQTVNYVPSREGPYSISVLYGDEEVPRSPFKVKVLPTHDASKVKASGPGLNTTGVPASLPVEFTIDAKDAGEGLLAVQITDPEGKPKKTHIQDNHDGTYTVAYVPDVTGRYTILIKYGGDEIPFSPYRVRAVPTGDASKCTVTVSIGGHGLGAGIGPTIQIGEETVITVDTKAAGKGKVTCTVCTPDGSEVDVDVVENEDGTFDIFYTAPQPGKYVICVRFGGEHVPNSPFQVTALAGDQPSVQPPLRSQQLAPQYTYAQGGQQTWAPERPLVGVNGLDVTSLRPFDLVIPFTIKKGEITGEVRMPSGKVAQPTITDNKDGTVTVRYAPSEAGLHEMDIRYDNMHIPGSPLQFYVDYVNCGHVTAYGPGLTHGVVNKPATFTVNTKDAGEGGLSLAIEGPSKAEISCTDNQDGTCSVSYLPVLPGDYSILVKYNEQHVPGSPFTARVTGDDSMRMSHLKVGSAADIPINIAEISFEDRKDGSCGVAYVVQEPGDYEVSVKFNEEHIPDSPFVVPVASPSGDARRLTVSSLQESGLKVNQPASFAVSLNGAKGAIDAKVHSPSGALEECYVTEIDQDKYAVRFIPRENGVYLIDVKFNGTHIPGSPFKIRVGEPGHGGDPGLVSAYGAGLEGGVTGNPAEFVVNTSNAGAGALSVTIDGPSKVKMDCQECPEGYRVTYTPMAPGSYLISIKYGGPYHIGGSPFKAKVTGPRLVSNHSLHETSSVFVDSLTKATCAPQHGAPGPGPADASKVVAKGLGLSKAYVGQKSSFTVDCSKAGNNMLLVGVHGPRTPCEEILVKHVGSRLYSVSYLLKDKGEYTLVVKWGDEHIPGSPYRVVVP

SEQ ID NO: 25549 - protein, 2659 aa, Homo sapiens
LQHRPPGFSRLKMSSSHSRAGQSAAGAAPGGGVDTRDAEMPATEKDLAEDAPWKKIQQNTFTRWCNEHLKCVSKRIANLQTDLSDGLRLIALLEVLSQKKMHRKHNQRPTFRQMQLENVSVALEFLDRESIKLVSIDSKAIVDGNLKLILGLIWTLILHYSISMPMWDEEEDEEAKKQTPKQRLLGWIQNKLPQLPITNFSRDWQSGRALGALVDSCAPGLCPDWDSWDASKPVTNAREAMQQADDWLGIPQVITPEEIVDPNVDEHSVMTYLSQFPKAKLKPGAPLRPKLNPKKARAYGPGIEPTGNMVKKRAEFTVETRSAGQGEVLVYVEDPAGHQEEAKVTANNDKNRTFSVWYVPEVTGTHKVTVLFAGQHIAKSPFEVYVDKSQGDASKVTAQGPGLEPSGNIANKTTYFEIFTAGAGTGEVEVVIQDPMGQKGTVEPQLEARGDSTYRCSYQPTMEGVHTVHVTFAGVPIPRSPYTVTVGQACNPSACRAVGRGLQPKGVRVKETADFKVYTKGAGSGELKVTVKGPKGEERVKQKDLGDGVYGFEYYPMVPGTYIVTITWGGQNIGRSPFEVKVGTECGNQKVRAWGPGLEGGVVGKSADFVVEAIGDDVGTLGFSVEGPSQAKIECDDKGDGSCDVRYWPQEAGEYAVHVLCNSEDIRLSPFMADIRDAPQDFHPDRVKARGPGLEKTGVAVNKPAEFTVDAKHGGKAPLRVQVQDNEGCPVEALVKDNGNGTYSCSYVPRKPVKHTAMVSWGGVSIPNSPFRVNVGAGSHPNKVKVYGPGVAKTGLKAHEPTYFTVDCAEAGQGDVSIGIKCAPGVVGPAEADIDFDIIRNDNDTFTVKYTPRGAGSYTIMVLFADQATPTSPIRVKVEPSHDASKVKAEGPGLSRTGVELGKPTHFTVNAKAAGKGKLDVQFSGLTKGDAVRDVDIIDHHDNTYTVKYTPVQQGPVGVNVTYGGDPIPKSPFSVAVSPSLDLSKIKVSGLGEKVDVGKDQEFTVKSKGAGGQGKVASKIVGPSGAAVPCKVEPGLGADNSVVRFLPREEGPYEVEVTYDGVPVPGSPFPLEAVAPTKPSKVKAFGPGLQGGSAGSPARFTIDTKGAGTGGLGLTVEGPCEAQLECLDNGDGTCSVSYVPTEPGDYNINILFADTHIPGSPFKAHVVPCFDASKVKCSGPGLERATAGEVGQFQVDCSSAGSAELTIEICSEAGLPAEVYIQDHGDGTHTITYIPLCPGAYTVTIKYGGQPVPNFPSKLQVEPAVDTSGVQCYGPGIEGQGVFREATTEFSVDARALTQTGGPHVKARVANPSGNLTETYVQDRGDGMYKVEYTPYEEGLHSVDVTYDGSPVPSSPFQVPVTEGCDPSRVRVHGPGIQSGTTNKPNKFTVETRGAGTGGLGLAVEGPSEAKMSCMDNKDGSCSVEYIPYEAGTYSLNVTYGGHQVPGSPFKVPVHDVTDASKVKCSGPGLSPGMVRANLPQSFQVDTSKAGVAPLQVKVQGPKGLVEPVDVVDNADGTQTVNYVPSREGPYSISVLYGDEEVPRSPFKVKVLPTHDASKVKASGPGLNTTGVPASLPVEFTIDAKDAGEGLLAVQITDPEGKPKKTHIQDNHDGTYTVAYVPDVTGRYTILIKYGGDEIPFSPYRVRAVPTGDASKCTVTVSIGGHGLGAGIGPTIQIGEETVITVDTKAAGKGKVTCTVCTPDGSEVDVDVVENEDGTFDIFYTAPQPGKYVICVRFGGEHVPNSPFQVTALAGDQPSVQPPLRSQQLAPQYTYAQGGQQTWAPERPLVGVNGLDVTSLRPFDLVIPFTIKKGEITGEVRMPSGKVAQPTITDNKDGTVTVRYAPSEAGLHEMDIRYDNMHIPGSPLQFYVDYVNCGHVTAYGPGLTHGVVNKPATFTVNTKDAGEGGLSLAIEGPSKAEISCTDNQDGTCSVSYLPVLPGDYSILVKYNEQHVPGSPFTARVTGDDSMRMSHLKVGSAADIPINISETDLSLLTATVVPPSGREEPCLLKRLRNGHVGISFVPKETGEHLVHVKKNGQHVASSPIPVVISQSEIGDASRVRVSGQGLHEGHTFEPAEFIIDTRDAGYGGLSLSIEGPSKVDINTEDLEDGTCRVTYCPTEPGNYIINIKFADQHVPGSPFSVKVTGEGRVKESITRRRRAPSVANVGSHCDLSLKIPEISIQDMTAQVTSPSGKTHEAEIVEGENHTYCIRFVPAEMGTHTVSVKYKGQHVPGSPFQFTVGPLGEGGAHKVRAGGPGLERAEAGVPAEFSIWTREAGAGGLAIAVEGPSKAEISFEDRKDGSCGVAYVVQEPGDYEVSVKFNEEHIPDSPFVVPVASPSGDARRLTVSSLQESGLKVNQPASFAVSLNGAKGAIDAKVHSPSGALEECYVTEIDQDKYAVRFIPRENGVYLIDVKFNGTHIPGSPFKIRVGEPGHGGDPGLVSAYGAGLEGGVTGNPAEFVVNTSNAGAGALSVTIDGPSKVKMDCQECPEGYRVTYTPMAPGSYLISIKYGGPYHIGGSPFKAKVTGPRLVSNHSLHETSSVFVDSLTKATCAPQHGAPGPGPADASKVVAKGLGLSKAYVGQKSSFTVDCSKAGNNMLLVGVHGPRTPCEEILVKHVGSRLYSVSYLLKDKGEYTLVVKWGDEHIPGSPYRVVVP

SEQ ID NO: 25550 - protein, 2619 aa, Homo sapiens
LQHRPPGFSRLKMSSSHSRAGQSAAGAAPGGGVDTRDAEMPATEKDLAEDAPWKKIQQNTFTRWCNEHLKCVSKRIANLQTDLSDGLRLIALLEVLSQKKMHRKHNQRPTFRQMQLENVSVALEFLDRESIKLVSIDSKAIVDGNLKLILGLIWTLILHYSISMPMWDEEEDEEAKKQTPKQRLLGWIQNKLPQLPITNFSRDWQSGRALGALVDSCAPGLCPDWDSWDASKPVTNAREAMQQADDWLGIPQVITPEEIVDPNVDEHSVMTYLSQFPKAKLKPGAPLRPKLNPKKARAYGPGIEPTGNMVKKRAEFTVETRSAGQGEVLVYVEDPAGHQEEAKVTANNDKNRTFSVWYVPEVTGTHKVTVLFAGQHIAKSPFEVYVDKSQGDASKVTAQGPGLEPSGNIANKTTYFEIFTAGAGTGEVEVVIQDPMGQKGTVEPQLEARGDSTYRCSYQPTMEGVHTVHVTFAGVPIPRSPYTVTVGQACNPSACRAVGRGLQPKGVRVKETADFKVYTKGAGSGELKVTVKGPKGEERVKQKDLGDGVYGFEYYPMVPGTYIVTITWGGQNIGRSPFEVKVGTECGNQKVRAWGPGLEGGVVGKSADFVVEAIGDDVGTLGFSVEGPSQAKIECDDKGDGSCDVRYWPQEAGEYAVHVLCNSEDIRLSPFMADIRDAPQDFHPDRVKARGPGLEKTGVAVNKPAEFTVDAKHGGKAPLRVQVQDNEGCPVEALVKDNGNGTYSCSYVPRKPVKHTAMVSWGGVSIPNSPFRVNVGAGSHPNKVKVYGPGVAKTGLKAHEPTYFTVDCAEAGQGDVSIGIKCAPGVVGPAEADIDFDIIRNDNDTFTVKYTPRGAGSYTIMVLFADQATPTSPIRVKVEPSHDASKVKAEGPGLSRTGVELGKPTHFTVNAKAAGKGKLDVQFSGLTKGDAVRDVDIIDHHDNTYTVKYTPVQQGPVGVNVTYGGDPIPKSPFSVAVSPSLDLSKIKVSGLGEKVDVGKDQEFTVKSKGAGGQGKVASKIVGPSGAAVPCKVEPGLGADNSVVRFLPREEGPYEVEVTYDGVPVPGSPFPLEAVAPTKPSKVKAFGPGLQGGSAGSPARFTIDTKGAGTGGLGLTVEGPCEAQLECLDNGDGTCSVSYVPTEPGDYNINILFADTHIPGSPFKAHVVPCFDASKVKCSGPGLERATAGEVGQFQVDCSSAGSAELTIEICSEAGLPAEVYIQDHGDGTHTITYIPLCPGAYTVTIKYGGQPVPNFPSKLQVEPAVDTSGVQCYGPGIEGQGVFREATTEFSVDARALTQTGGPHVKARVANPSGNLTETYVQDRGDGMYKVEYTPYEEGLHSVDVTYDGSPVPSSPFQVPVTEGCDPSRVRVHGPGIQSGTTNKPNKFTVETRGAGTGGLGLAVEGPSEAKMSCMDNKDGSCSVEYIPYEAGTYSLNVTYGGHQVPGSPFKVPVHDVTDASKVKCSGPGLSPGMVRANLPQSFQVDTSKAGVAPLQVKVQGPKGLVEPVDVVDNADGTQTVNYVPSREGPYSISVLYGDEEVPRSPFKVKVLPTHDASKVKASGPGLNTTGVPASLPVEFTIDAKDAGEGLLAVQITDPEGKPKKTHIQDNHDGTYTVAYVPDVTGRYTILIKYGGDEIPFSPYRVRAVPTGDASKCTVTGAGIGPTIQIGEETVITVDTKAAGKGKVTCTVCTPDGSEVDVDVVENEDGTFDIFYTAPQPGKYVICVRFGGEHVPNSPFQVTAPERPLVGVNGLDVTSLRPFDLVIPFTIKKGEITGEVRMPSGKVAQPTITDNKDGTVTVRYAPSEAGLHEMDIRYDNMHIPGSPLQFYVDYVNCGHVTAYGPGLTHGVVNKPATFTVNTKDAGEGGLSLAIEGPSKAEISCTDNQDGTCSVSYLPVLPGDYSILVKYNEQHVPGSPFTARVTGDDSMRMSHLKVGSAADIPINISETDLSLLTATVVPPSGREEPCLLKRLRNGHVGISFVPKETGEHLVHVKKNGQHVASSPIPVVISQSEIGDASRVRVSGQGLHEGHTFEPAEFIIDTRDAGYGGLSLSIEGPSKVDINTEDLEDGTCRVTYCPTEPGNYIINIKFADQHVPGSPFSVKVTGEGRVKESITRRRRAPSVANVGSHCDLSLKIPEISIQDMTAQVTSPSGKTHEAEIVEGENHTYCIRFVPAEMGTHTVSVKYKGQHVPGSPFQFTVGPLGEGGAHKVRAGGPGLERAEAGVPAEFSIWTREAGAGGLAIAVEGPSKAEISFEDRKDGSCGVAYVVQEPGDYEVSVKFNEEHIPDSPFVVPVASPSGDARRLTVSSLQESGLKVNQPASFAVSLNGAKGAIDAKVHSPSGALEECYVTEIDQDKYAVRFIPRENGVYLIDVKFNGTHIPGSPFKIRVGEPGHGGDPGLVSAYGAGLEGGVTGNPAEFVVNTSNAGAGALSVTIDGPSKVKMDCQECPEGYRVTYTPMAPGSYLISIKYGGPYHIGGSPFKAKVTGPRLVSNHSLHETSSVFVDSLTKATCAPQHGAPGPGPADASKVVAKGLGLSKAYVGQKSSFTVDCSKAGNNMLLVGVHGPRTPCEEILVKHVGSRLYSVSYLLKDKGEYTLVVKWGDEHIPGSPYRVVVP

SEQ ID NO: 25551 - protein, 155 aa, Homo sapiens
LLCFQESGLKVNQPASFAVSLNGAKGAIDAKVHSPSGALEECYVTEIDQGEALSLPGRPALLAGSRLRVQKEGTASVSSQDGAPTPGPPKPGNPFPIGDPSRWGCGSPPTAIRKAFYPAVPCHLHRERLKVQPQCCPALQPRPWYLCTGLGQPCG

SEQ ID NO: 25552 - protein, 1142 aa, Homo sapiens
VDVTYDGSPVPSSPFQVPVTEGCDPSRVRVHGPGIQSGTTNKPNKFTVETRGAGTGGLGLAVEGPSEAKMSCMDNKDGSCSVEYIPYEAGTYSLNVTYGGHQVPGSPFKVPVHDVTDASKVKCSGPGLSPGMVRANLPQSFQVDTSKAGVAPLQVKVQGPKGLVEPVDVVDNADGTQTVNYVPSREGPYSISVLYGDEEVPRSPFKVKVLPTHDASKVKASGPGLNTTGVPASLPVEFTIDAKDAGEGLLAVQITDPEGKPKKTHIQDNHDGTYTVAYVPDVTGRYTILIKYGGDEIPFSPYRVRAVPTGDASKCTVTGAGIGPTIQIGEETVITVDTKAAGKGKVTCTVCTPDGSEVDVDVVENEDGTFDIFYTAPQPGKYVICVRFGGEHVPNSPFQVTALAGDQPSVQPPLRSQQLAPQYTYAQGGQQTWAPERPLVGVNGLDVTSLRPFDLVIPFTIKKGEITGEVRMPSGKVAQPTITDNKDGTVTVRYAPSEAGLHEMDIRYDNMHIPGSPLQFYVDYVNCGHVTAYGPGLTHGVVNKPATFTVNTKDAGEGGLSLAIEGPSKAEISCTDNQDGTCSVSYLPVLPGDYSILVKYNEQHVPGSPFTARVTGDDSMRMSHLKVGSAADIPINISETDLSLLTATVVPPSGREEPCLLKRLRNGHVGISFVPKETGEHLVHVKKNGQHVASSPIPVVISQSEIGDASRVRVSGQGLHEGHTFEPAEFIIDTRDAGYGGLSLSIEGPSKVDINTEDLEDGTCRVTYCPTEPGNYIINIKFADQHVPGSPFSVKVTGEGRVKESITRRRRAPSVANVGSHCDLSLKIPEISIQDMTAQVTSPSGKTHEAEIVEGENHTYCIRFVPAEMGTHTVSVKYKGQHVPGSPFQFTVGPLGEGGAHKVRAGGPGLERAEAGVPAEFSIWTREAGAGGLAIAVEGPSKAEISFEDRKDGSCGVAYVVQEPGDYEVSVKFNEEHIPDSPFVVPVASPSGDARRLTVSSLQVRHREKPPTWGSWARTDQSHRRDQALALCSVTPLAQLWVPGLCSGRVQPTLGVGRKYPAHHVEFFSCLRSKGFEQKPVPLEHQGCGLKRDSLPRLGAAHRVGQPSLPATWVCATAECGGRGGDVRLWLAAPCKSVALPL

SEQ ID NO: 25553 - protein, 152 aa, Homo sapiens
MRMSHLKVGSAADIPINISETDLSLLTATVVPPSGREEPCLLKRLRNGHVGISFVPKETGEHLVHVKKNGQHVASSPIPVVISQSEIGDASRVRVSGQGLHEGHTFEPAEFIIDTRDAGRQWLPTSWGGSTVHSTEAQGYPSPRLWWAQPVH

SEQ ID NO: 25554 - protein, 66 aa, Homo sapiens
LSSLAVPLLVLTPFRSVLVFRSDSLFFVAATEDPGVAMGRRPARCYRYCKNKPYPKSRFCRGVPGK

SEQ ID NO: 25555 - protein, 147 aa, Homo sapiens
LSSLAVPLLVLTPFRSVLVFRSDSLFFVAATEDPGVAMGRRPARCYRYCKNKPYPKSRFCRGVPDAKIRIFDLGRKKAKVDEFPLCGHMVSDEYEQLSSEALEAARICANKYMVKSCGKDGFHIRVRLHPFHVIRINKMLSCAGADR

SEQ ID NO: 25556 - protein, 251 aa, Homo sapiens
LSSLAVPLLVLTPFRSVLVFRSDSLFFVAATEDPGVAMGRRPARCYRYCKNKPYPKSRFCRGVPDAKIRIFDLGRKKAKVDEFPLCGHMVSDEYEQLSSEALEAARICANKYMVKSCGKDGFHIRVRLHPFHVIRINKMLSCAGADRLQTGMRGAFGKPQGTVARVHIGQVIMSIRTKLQNKEHVIEALRRAKFKFPGRQKIHISKKWGFTKFNADEFEDMVAEKRLIPDGCGVKYIPSRGPLDKWRALHS

SEQ ID NO: 25557 - protein, 11 aa, Homo sapiens
VYAACWLYGLL

SEQ ID NO: 25558 - protein, 122 aa, Homo sapiens
MPWLPVFLSLAAAAAAAAAEQQVPLVLWSSDRDLWAPAADTHEGHITSDLQLSTYLDPALELGPRNVLLFLQDKLSIEDFTAYGGVFGNKQDSAFSNLEHTQVRRCPIHSGPHSGPPFQGGP

SEQ ID NO: 25559 - protein, 430 aa, Homo sapiens
MRPRLTAPLLCPARDLWAPAADTHEGHITSDLQLSTYLDPALELGPRNVLLFLQDKLSIEDFTAYGGVFGNKQDSAFSNLENALDLAPSSLVLPAVDWYAVSTLTTYLQEKLGASPLHVDLATLRELKLNASLPALLLIRLPYTASSGLMAPREVLTGNDEVIGQVLSTLKSEDVPYTAALTAVRPSRVARDVAVVAGGLGRQLLQKQPVSPVIHPPVSYNDTAPRILFWAQNFSVAYKDQWEDLTPLTFGVQELNLTGSFWNDSFARLSLTYERLFGTTVTFKFILANRLYPVSARHWFTMERLEVHSNGSVAYFNASQVTGPSIYSFHCEYVSSLSKKGSLLVARTQPSPWQMMLQDFQIQAFNVMGEQFSYASDCASFFSPGIWMGLLTSLFMLFIFTYGLHMILSLKTMDRFDDHKGPTISLTQIV

SEQ ID NO: 25560 - protein, 74 aa, Homo sapiens
VAAAAVAAATAAVKEEEEPSGRWHRGLTMDEEYDVIVLGTGLTMPLGVLVLEGHPVSAGCPASLKASVISLSAL

SEQ ID NO: 25561 - protein, 68 aa, Homo sapiens
VAAAAVAAATAAVKEEEEPSGRWHRGLTMDEEYDVIVLGTGLTERRQVGVQRMVSPSPRNASCRASCL

SEQ ID NO: 25562 - protein, 175 aa, Homo sapiens
VAAAAVAAATAAVKEEEEPSGRWHRGLTMDEEYDVIVLGTGLTECILSGIMSVNGKKVLHMDRNPYYGGESSSITPLEELYKRFQLLEGPPESMGRGRDWNVDLIPKFLMANGQLVKMLLYTEVTRYLDFKVVEGSFVYKGGKIYKVPSTETEALASRPPLNPRDIAKCLSQEGP

SEQ ID NO: 25563 - protein, 475 aa, Homo sapiens
VAAAAVAAATAAVKEEEEPSGRWHRGLTMDEEYDVIVLGTGLTECILSGIMSVNGKKVLHMDRNPYYGGESSSITPLEELYKRFQLLEGPPESMGRGRDWNVDLIPKFLMANGQLVKMLLYTEVTRYLDFKVVEGSFVYKGGKIYKVPSTETEALASNLMGMFEKRRFRKFLVFVANFDENDPKTFEGVDPQTTSMRDVYRKFDLGQDVIDFTGHALALYRTDDYLDQPCLETVNRIKLYSESLARYGKSPYLYPLYGLGELPQGFARLSAIYGGTYMLNKPVDDIIMENGKVVGVKSEGEVARCKQLICDPSYIPDRVRKAGQVIRIICILSHPIKNTNDANSCQIIIPQNQVNRKSDIYVCMISYAHNVAAQGKYIAIASTTVETTDPEKEVEPALELLEPIDQKFVAISDLYEPIDDGCESQVFCSCSYDATTHFETTCNDIKDIYKRMAGTAFDFENMKRKQNDVFGEAEQ

SEQ ID NO: 25564 - protein, 212 aa, Homo sapiens
VKEEEEPSGRWHRGLTMDEEYDVIVLGTGLTECILSGIMSVNGKKVLHMDRNPYYGGESSSITPLEELYKRFQLLEGPPESMGRGRDWNVDLIPKFLMANGQLVKMLLYTEVTRYLDFKVVEGSFVYKGGKIYKVPSTETEALASNLMGMFEKRRFRKFLVFVANFDENDPKTFEGVDPQTTSMRDVYRKFDLGQDVIDFTGHALALYRTDE

SEQ ID NO: 25565 - protein, 221 aa, Homo sapiens
VGMVGGRSCPLRQVWVGNKSGLLVGAEAGGSAADGVTLPQECILSGIMSVNGKKVLHMDRNPYYGGESSSITPLEELYKRFQLLEGPPESMGRGRDWNVDLIPKFLMANGQLVKMLLYTEVTRYLDFKVVEGSFVYKGGKIYKVPSTETEALASNLMGMFEKRRFRKFLVFVANFDENDPKTFEGVDPQTTSMRDVYRKFDLGQDVIDFTGHALALYRTDE

SEQ ID NO: 25566 - protein, 139 aa, Homo sapiens
VGVNQGCCYSPSYLDQPCLETVNRIKLYSESLARYGKSPYLYPLYGLGELPQGFARLSAIYGGTYMLNKPVDDIIMENGKVVGVKSEGEVSPSRACSAVPWLRRGLVTFSVLSSLLLHSPKGLGAGNWGSRSLQSHDCG

SEQ ID NO: 25567 - protein, 173 aa, Homo sapiens
LGGLDSFPLGGWRLGCYLLCGAGEGQSGQTCVQPLEPLSAYGQRLWPELTELFLWPDIYVCMISYAHNVAAQGKYIAIASTTVETTDPEKEVEPALELLEPIDQKFVAISDLYEPIDDGCESQVFCSCSYDATTHFETTCNDIKDIYKRMAGTAFDFENMKRKQNDVFGEAEQ

SEQ ID NO: 25568 - protein, 93 aa, Homo sapiens
LTELFLWPDIYVCMISYAHNVAAQGKYIAIASTTVETTDPEKEVEPALELLEPIDQKFVAISDLYEPIDDGCESQVSSSSQPWAPGCPPRIPV

SEQ ID NO: 25569 - protein, 71 aa, Homo sapiens
LAARPGYLSDSPWALGSGCFQVFCSCSYDATTHFETTCNDIKDIYKRMAGTAFDFENMKRKQNDVFGEAEQ

SEQ ID NO: 25570 - protein, 411 aa, Homo sapiens
LPLPLSLSPPPPPAAAAAAAAAAMAQYKGAASEAGRAMHLMKKREKQREQMEQMKQRIAEENIMKSNIDKKFSAHYDAVEAELKSSTVGLVTLNDMKAKQEALVKEREKQLAKKEQSKELQMKLEKLREKERKKEAKRKISSLSFTLEEEEEGGEEEEEAAMYEEEMEREEITTKKRKLGKNPDVDTSFLPDRDREEEENRLREELRQEWEAKQEKIKSEEIEITFSYWDGSGHRRTVKMRKGNTMQQFLQKALEILRKDFSELRSAGVEQLMYIKEDLIIPHVSPFSPSTRSGCSTLGFGSGWWGQCAQAGGVGRGRDGPSRRRFPALGSQHHSFYDFIVTKARGKSGPLFNFDVHDDVRLLSDATVEKDESHAGKVVLRSWYEKNKHIFPASRWEPYDPEKKWDKYTIR

SEQ ID NO: 25571 - protein, 52 aa, Homo sapiens
VWAAAAAAARLGPGARGEAVGTCERGRGGARGRVHVARGRPPGASGGTGVPG

SEQ ID NO: 25572 - protein, 40 aa, Homo sapiens
LTASRLLSAGRDPWSRLARGGEVAGARSQSRGLSGGPPSR

SEQ ID NO: 25573 - protein, 530 aa, Homo sapiens
LSPPGSAGPRKLDSVMAEQVALSRTQVCGILREELFQGDAFHQSDTHIFIIMGASGDLAKKKIYPTIWWLFRDGLLPENTFIVGYARSRLTVADIRKQSEPFFKATPEEKLKLEDFFARNSYVAGQYDDAASYQRLNSHMNALHLGSQANRLFYLALPPTVYEAVTKNIHESCMSQIGWNRIIVEKPFGRDLQSSDRLSNHISSLFREDQIYRIDHYLGKEMVQNLMVLRFANRIFGPIWNRDNIACVILTFKEPFGTEGRGGYFDEFGIIRDVMQNHLLQMLCLVAMEKPASTNSDDVRDEKVKVLKCISEVQANNVVLGQYVGNPDGEGEATKGYLDDPTVPRGSTTATFAAVVLYVENERWDGVPFILRCGKALNERKAEVRLQFHDVAGDIFHQQCKRNELVIRVQPNEAVYTKMMTKKPGMFFNPEESELDLTYGNRYKNVKLPDAYERLILDVFCGSQMHFVRSDELREAWRIFTPLLHQIELEKPKPIPYIYGSRGPTEADELMKRVGFQYEGTYKWVNPHKL

SEQ ID NO: 25574 - protein, 576 aa, Homo sapiens
LSPPGSAGPRKLDSVMAEQVALSRTQVCGILREELFQGDAFHQSDTHIFIIMGASGDLAKKKIYPTIWWLFRDGLLPENTFIVGYARSRLTVADIRKQSEPFFKATPEEKLKLEDFFARNSYVAGQYDDAASYQRLNSHMNALHLGSQANRLFYLALPPTVYEAVTKNIHESCMSQIGWNRIIVEKPFGRDLQSSDRLSNHISSLFREDQIYRIDHYLGKEMVQNLMVLRFANRIFGPIWNRDNIACVILTFKEPFGTEGRGGYFDEFGIIRGPGRQGGSGSESCSLSLGSLVWGPHALEPGEQGGELRRALASSVPRDVMQNHLLQMLCLVAMEKPASTNSDDVRDEKVKVLKCISEVQANNVVLGQYVGNPDGEGEATKGYLDDPTVPRGSTTATFAAVVLYVENERWDGVPFILRCGKALNERKAEVRLQFHDVAGDIFHQQCKRNELVIRVQPNEAVYTKMMTKKPGMFFNPEESELDLTYGNRYKNVKLPDAYERLILDVFCGSQMHFVRSDELREAWRIFTPLLHQIELEKPKPIPYIYGSRGPTEADELMKRVGFQYEGTYKWVNPHKL

SEQ ID NO: 25575 - protein, 751 aa, Homo sapiens
MSEEELTKAMEGLGMDEGDGEGNILPIMQSIMQNLLSKDVLYPSLKEITEKYPEWLQSHRESLPPEQFEKYQEQHSVMCKICEQFEAETPTDSETTQKARFEMVLDLMQQLQDLGHPPKELAGEMLTWLFFCGSQWVYGPWLTYVGWLQQTSFKMSSKGSSTDGRTDLANGSLSSSPEEMSGAEEGRETSSGIEVEASDLSLSLTGDDGGPNRTSTESRGTDTESSGEDKDSDSMEDTGHYSINDENRVHDRSEEEEEEEEEEEEEQPRRRVQRKRANRDQDSSDDERALEDWVSSETSALPRPRWQALPALRERELGSSARFVYEACGARVFVQRFRLQHGLEGHTGCVNTLHFNQRGTWLASGSDDLKVVVWDWVRRQPVLDFESGHKSNVFQAKFLPNSGDSTLAMCARDGQVRVAELSATQCCKNTKRVAQHKGASHKLALEPDSPCTFLSAGEDAVVFTIDLRQDRPASKLVVTKEKEKKVGLYTIYVNPANTHQFAVGGRDQFVRIYDQRKIDENENNGVLKKFCPHHLVNSESKANITCLVYSHDGTELLASYNDEDIYLFNSSHSDGAQYVKRYKGHRNNATVKGVNFYGPKSEFVVSGSDCGHIFLWEKSSCQIIQFMEGDKGGVVNCLEPHPHLPVLATSGLDHDVKIWAPTAEASTELTGLKDVIKKNKRERDEDSLHQTDLFDSHMLWFLMHHLRQRRHHRRWREPGVGATDADSDESPSSSDTSDEEEGPDRVQCMPS

SEQ ID NO: 25576 - protein, 267 aa, Homo sapiens
LSQPRSEHREGGSNGAVHRGGDRSDSKFAYTGTEMRTVAEKVDAVRIVHIHSVIILRRSDKRKDRVEISPEQLSAASTEAERLAELTGRPMRVVGWYHSHPHITVWPSHVDVRTQAMYQMMDQGFVGLIFSCFIEDKNTKTGRVLYTCFQSIQAQKSSEYERIEIPIHIVPHVTIGKVCLESAVELPKILCQEEQDAYRRIHSLTHLDSVTKIHNGSVFTKNLCSQMSAVSGPLLQWLEDRLEQNQQHLQELQQEKEELMQELSSLE

SEQ ID NO: 25577 - protein, 85 aa, Homo sapiens
LKPENILLDRDGHIKLTDFGFAKKLVDRQGLILSPKLKCRCTILSHYSLKLLGSSDPPSSASEVAGTTGMCHHTRLIFLFLILEM

SEQ ID NO: 25578 - protein, 58 aa, Homo sapiens
LLVLFRFDDRGRSDYDGIGNRERPGFGRFERSGHSRWCDKSVEDDWSKPLPPSERLEQ

SEQ ID NO: 25579 - protein, 44 aa, Homo sapiens
MSHGSSAGFDRHITIFSPEGRLYQVEYAFKAINQGGLTSVAVRG

SEQ ID NO: 25580 - protein, 115 aa, Homo sapiens
VLLTEDPLNPKDNREKMTQIMFETFNTPAMYVAIRDVLSLYAFGRTTGIVMDCGHRVTHTVPIYEGYSLPHAILHLDLTGWDLTEYLKKILKERGYSFTNTAQREIMRDIKEKLC

SEQ ID NO: 25581 - protein, 80 aa, Homo sapiens
MGRAMVARLGLGLLLLALLLPTQIYSSETTTGTSSNSSQSTSNTGLAPNPTNATTKAAGGALQSTASLFVVSLSLLHLYS

SEQ ID NO: 25582 - protein, 87 aa, Homo sapiens
MADRLKCVTTELYADSSQLSWEQRALQLEELKKDSILCLPSVYKPRTPSHTNSAQLTQRGGKEIRTKSQNVFWRRILPARITVRDVA

SEQ ID NO: 25583 - protein, 59 aa, Homo sapiens
LSCSSIFWLPVLALAFPSVKITGKEVLLLMQALNTLSTPEEKLAALCKKYADLGNSPLL

SEQ ID NO: 25584 - protein, 61 aa, Homo sapiens
LDYLNIEIDKNKAITWGEDTLIEYFENSRKYIPGTKMIFASIKNNAERADLIAYLKKATSE

SEQ ID NO: 25585 - protein, 159 aa, Homo sapiens
LALQEGLPARSCSAQGSRPSARHQERRGRGFGKETQVRSGGAQQSPCPAWEEASAQLMSRCVGSQTVTWHGHPGPKAESLQKSQPRWTARCTCQPRRSPPRCRSPHPPHPCGENSAGFPVVGFVTLKAEAADWELNPRGRRSTHWKPSSCCCSQQFFFL

SEQ ID NO: 25586 - protein, 110 aa, Homo sapiens
LEATGRFFFFFFFGWSLALSPRLECNAPSRLTATFASRFQVILRPQPPEQLGIQEKLNIRVGKDRSSLNSHPYELCTTIVEGHWQYTVKLKLRPFVCILSKAAFRVQQQS

SEQ ID NO: 25587 - protein, 100 aa, Homo sapiens
LEATGRFFFFFFFGWSLALSPRLECNAPSRLTATFASRFQVILRPQPPEQLGIQEKLNIRVGKDRSSLNSHPYELCTTIVEGHWQYTVKLKAAFRVQQQS

SEQ ID NO: 25588 - protein, 47 aa, Homo sapiens
VYLLLAIIFLFQACHQGSKALTPSFQTLAREADGRGLKGLLGCDCRG

SEQ ID NO: 25589 - protein, 125 aa, Homo sapiens
LLFRHRTLVFLRNRKTVAQRKRKSFEEGARRGQWGSAPAQPLLHRVGGKGCRGSRRGEGRGVPGLAGVCPGPAAQPQMPRPALAEEPGCAPVTTRVRGASGARVVPRAHVCRARSPQRVPRGARV

SEQ ID NO: 25590 - protein, 30 aa, Homo sapiens
LACLPLLMALVTASRSLAGSTSPTAAFTTR

SEQ ID NO: 25591 - protein, 27 aa, Homo sapiens
LTTTELDKEGEEEEQRFPSNRTACVMA

SEQ ID NO: 25592 - protein, 91 aa, Homo sapiens
LENPVLELSCSSIAPHGRRIPSTVHHWHTTWSGVRTVASFLRHSDPGDSQTGAPVLGEDRFWWKVGQKSMCNSRIAEDEQVHRVKLLHHER

SEQ ID NO: 25593 - protein, 22 aa, Homo sapiens
LYMYSASVSWHLLWVTVLGTGS

SEQ ID NO: 25594 - protein, 408 aa, Homo sapiens
VPGARPWRAPWGGSSRRGRAAAPKAPPGPAARLPSAAASGGRPAAPRTSYWGAAPPAPAPPGCRPRAARERGSWAPPGLRSDSAPAPTRVGSAPARAPTCPGCRALAGGLHASPAAPPPAAADAIARARTKPRSGVARAHTLPPSPLPCALPPASRAARRPRSLRALPRAHTLHTHTCRGAHSRAHTCAGGGEGDPGPIVGGRPENEDSPRFPDVPTRPAGPSPFYCEGTEPGSQAWSARAGTASWETAAAQRPDQLEETRPPGAARPGARRLRSLASRLPRGGRWLDGGGSGRLTREPASLPNPIPPGSRVGAGGSERQNSKRIVYAGPGELRELVEVGEPKSDPLLWEAGLDRAQVLGLRRRKTAHALDVGGRGRRARSLSALSRNCAGRAGAPSLILLRKNKEKL

SEQ ID NO: 25595 - protein, 96 aa, Homo sapiens [sequence omitted]

SEQ ID NO: 25596 - protein, 10 aa, Homo sapiens
LEILPTRIQK

SEQ ID NO: 25597 - protein, 64 aa, Homo sapiens
LGILVLRASKMVASLLFSDLGFLASRISRNGILDHAAEDLARRLRTQASKMATAAPKITRGSLH

SEQ ID NO: 25598 - protein, 67 aa, Homo sapiens
LGILVLRASKMVASLLFSDLGFLASRISRNGILDHAAEDLARRLRTQASKMATAAPKITRISNNVEK

SEQ ID NO: 25599 - protein, 35 aa, Homo sapiens
MKQQSLMKALLFILWFTEYFKPTVETYCFKKKIPF

SEQ ID NO: 25600 - protein, 161 aa, Homo sapiens
LVLTGLDSEQRCPDCSPDNCHSQARPLAVSAPPRGPSLPTSGLPRPPGCAADPPRPRSRQGPLGLQPLPGTAKGRPGRFFPRWSGASRAALAWPMGPEEGAHPRTTVRAASPGPAWCRVPTSPGWQVLLGKPVLCLLSRPYHTDKGEAVELIPRLGPAANS

SEQ ID NO: 25601 - protein, 18 aa, Homo sapiens
LFLPLAQKTERQQARDPR

SEQ ID NO: 25602 - protein, 37 aa, Homo sapiens
LLFKWRIMHIWRHKGRSPWRRRDEAVKERCYECALDR

SEQ ID NO: 25603 - protein, 104 aa, Homo sapiens
LSPFLFLAIGRLTEIQQPRLQPACHLQSIICGYIEHCADRLSFNVMIYRPMKRNRNPLLMLISLRRLLVSSTWHAASFSLTTTKTILIFLASALCRNLKDKKMQ

SEQ ID NO: 25604 - protein, 14 aa, Homo sapiens
LLLFTLGVCFFCEL

SEQ ID NO: 25605 - protein, 102 aa, Homo sapiens
MGYKNISAPYSLDPVGSKYKKRIGSWYLKCDLMAIMSSFEKCLFRSFVYFLMCIFVFLLLSCLSSLYVWILALYQISALQIFSPNLWVFPSLCCFLCCAEDF

SEQ ID NO: 25606 - protein, 10 aa, Homo sapiens
LAFSNDSKEM

SEQ ID NO: 25607 - protein, 157 aa, Homo sapiens
LALTPAKGRTGLRPFRCPSSFGITQCTGFNRSQQDAPLRFSEALEPAQLFYKRRWLCLVLDGRVLCMVRRERQLTVHSCVAVGWCACFQVWRHRGKTMGGHSKKVAFCKPGREASPETNPASTSNLTKDSRRTSGLQNFEKMSIVKPRKLCYLSVAA

SEQ ID NO: 25608 - protein, 70 aa, Homo sapiens
LEPAQLFYKRRWLCLVLDGRVLCMVRRERQLTVHSCVAVGWCACFQVWRTFSPCFPQMKSSIQKTYSPEK

SEQ ID NO: 25609 - protein, 44 aa, Homo sapiens
LFYKRRWLCLVLDGRVLCMVRRERQLTVHSCVAVGWCACFQVWR

SEQ ID NO: 25610 - protein, 90 aa, Homo sapiens
MEPFILRWRGLSFAVLAENDRAPENDLEGDPLGTTLLETRRTVLQVYPAAPKRQRPSRTSHDDDGGLSKRKWGNVGKREIRLLLCLCRKK

SEQ ID NO: 25611 - protein, 31 aa, Homo sapiens
LGGTAGSRLRTCRPGLRAEPTKKHASQGRGV

SEQ ID NO: 25612 - protein, 72 aa, Homo sapiens
MSPLGGKNNSRRAALRAVTLTAKVCSFTPEPARPRTQQKEKSPNTSKHQKEQTPVRHLKSCNTHHEGPRLHS

SEQ ID NO: 25613 - protein, 64 aa, Homo sapiens
VVGGAGVGGVLLFCLGWSQTPGLNRSYHLGLPKVPLFLFSPKHNAVGILIEITLFIIFVILKNL

SEQ ID NO: 25614 - protein, 127 aa, Homo sapiens
LESSGSHMPFTKIKCALFLSGRITLCSSGFCPELSLEPRGDLDHHPLVKLTAESVSPGLLLAPESDALFSSTDFCFLWQQLHKYWQKHGQTTWFHWWISSSHFPRCSGAPCASLGGFLSTGIASVLS

SEQ ID NO: 25615 - protein, 118 aa, Homo sapiens
LGLQVPAMTPSGRITLCSSGFCPELSLEPRGDLDHHPLVKLTAESVSPGLLLAPESDALFSSTDFCFLWQQLHKYWQKHGQTTWFHWWISSSHFPRCSGAPCASLGGFLSTGIASVLS

SEQ ID NO: 25616 - protein, 53 aa, Homo sapiens
MGQLCPMGGPLSVSPGYLGKVRAITALPGIPPARAPALSLPDPFAQPPLYPTP

SEQ ID NO: 25617 - protein, 52 aa, Homo sapiens [sequence omitted]

SEQ ID NO: 25618 - protein, 28 aa, Homo sapiens
MTRKLAFLSTSDPSKRDSSKIEASVFYN

SEQ ID NO: 25619 - protein, 48 aa, Homo sapiens
MLFTVPAVPTCLALVWAGMSGIGMFSHRSFSGEAPGCDQAPALHVTQA

SEQ ID NO: 25620 - protein, 105 aa, Homo sapiens
LVVFAINLLFSPPVAVASVGSGTDRRDTAAATEAQHLSSESKEKTSAQKSGHPFGILKADFTISTLMDPEEMKDQFLRQIQEVLKLTLGHEQFRLKWVSFEVNKK

SEQ ID NO: 25621 - protein, 91 aa, Homo sapiens
LVVFAINLLFSPPVAVASVGSGTDRRDTAAATEAQHLSSESKEKTSAQKSGHPFGILKADFTISTLMDPEEMKDQFLRQVRLLHTLLILIR

SEQ ID NO: 25622 - protein, 66 aa, Homo sapiens
LVVFAINLLFSPPVAVASVGSGTDRRDTAAATEAQHLSSESKEKTSAQKSGNCFCLPSSYSYQWSS

SEQ ID NO: 25623 - protein, 329 aa, Homo sapiens
LRMRCIHFIQGCPMSPSTQRNLPSPPQANSLCLQLWPPLWHYSGQRAQEGSRRTSDIQSGQSKGREGEWWERRAEGTASSIHSIWEDSPVTLGRNPSAPLEMEGMEGTRCPSCPPPLQRSQPSYPAQPSGALKARVQEQKRTYFWPWQLGQETICESSILCPVAAVPATVSSPQPGHSLASPASPAASRLDTCPFSPCGSPAFRLISSAHISPCPLPARVSQVSSVASTKTSHCSGCAELAADVCSTVSALGILLLLGVPEGGIPGLSKHCCVTHARSLRLPVKLGALHIEGGRLSFQQSLVAFSESDYAAARPTTEVTTTTPVPMTIL

SEQ ID NO: 25624 - protein, 37 aa, Homo sapiens
MIGILGQFFVAGYYPVPCRMFSSITTLDPLNTCNFPP

SEQ ID NO: 25625 - protein, 30 aa, Homo sapiens
LSSWPFTCLHDLLLLTFLDTMLCTCGEKHT

SEQ ID NO: 25626 - protein, 127 aa, Homo sapiens
LAWTMSPPSDWELPKLLPVIIQPLQTHDAILKTGSAGTQPPSQSLSGATFPHHLSHIQHQPQHVQTYCLQHKEHPSLLMLLLPQGLACDPSRGTGTTKTPTTCKWKEKQKQDTPLYPYFTRSPYNGL

SEQ ID NO: 25627 - protein, 158 aa, Homo sapiens
VSKLSLPKLSEKSMTGGCFPPPRPLQRRVLSPSKRCKPFHIPALPSCAAFGDLRVFRHELWEGLSLSPRLECNDAITAHCSLQLLGSSDSPASASLVQRLLPNESGLTLLPGLECNGVISTHCNLCLLGSSNPPASASQVAGTAAVCHHHTQLIFVFL

SEQ ID NO: 25628 - protein, 151 aa, Homo sapiens
LPSRRPLCVSQRPTWTSHPAQGLPRPPGPYSPHTAGRHNSTSSSSRGSSPRRGSAAGTLGRATVMARRVRTRTRRRDSAESQLRPAAGASCKKRKLKRPKEREHTMRKKEKVGPIPRIMQAILLDVKWYLIVTRRLSLQEMLKEIVQTESN

SEQ ID NO: 25629 - protein, 11 aa, Homo sapiens
MATCAHPKKKN

SEQ ID NO: 25630 - protein, 36 aa, Homo sapiens
LGPEQTPGSWPQMKQRRSCHPDGVSWCLMVVLICLS

SEQ ID NO: 25631 - protein, 39 aa, Homo sapiens
LGPEQTPGSWPQMKQRRRWPGDPGTRYCFVAWAGIELGK

SEQ ID NO: 25632 - protein, 42 aa, Homo sapiens
LGPEQTPGSWPQMKQRRSPALPLGEQALWCLCRLQCYLGFLQ

SEQ ID NO: 25633 - protein, 40 aa, Homo sapiens
VTSVPTGRTRAGRRGRGGPAELREVPGGSEGGSMGAEVGI

SEQ ID NO: 25634 - protein, 96 aa, Homo sapiens
MRIMVEEAATEPGCRDITEGGVRPLGQMSQRPPTKELSSLPLPFLSPLEFQLPLDTSSPPLSSPSPYTCPHVWGIFSSSSLQHRLGTVCEQIRRGY

SEQ ID NO: 25635 - protein, 24 aa, Homo sapiens
LFFTVLCGFWMGSCQMAGEVFRGT

SEQ ID NO: 25636 - protein, 26 aa, Homo sapiens
MPQTSSASDSISVKRVQGTADIRALL

SEQ ID NO: 25637 - protein, 91 aa, Homo sapiens
LFLLCLLVYKPFPHYCVLTCVCMSTADGPCSPSCPPVCCPFTCRPQIFQAMTVEKKVSPTIEKKVSPTRTAAVSLLTCTMVPTSTPVTSDR

SEQ ID NO: 25638 - protein, 98 aa, Homo sapiens
VCWARTLLCFVSFPRDQGEHRYIPFSVQRKTPNNNLNKHNNNSKRTKREPEIPSASPTSRSALLPGGPPDPPEPPGSCPSSCNLQKRRLVRREMPWPH

SEQ ID NO: 25639 - protein, 165 aa, Homo sapiens
VCWARTLLCFVSFPRDQGEHRYIPFSVQRKTPNNNLNKHNNNSKRTKREPEIPSASGAAEIMDHKCLCNQAAPRHFSAFLMFQPYPTCQEEAPARQEGRRPLLLPLQNLIRVYCLPTVYLSSSPTSRSALLPGGPPDPPEPPGSCPSSCNLQKRRLVRREMPWPH

SEQ ID NO: 25640 - protein, 27 aa, Homo sapiens
MTGSPCRRFSPGFLCSSSWWPPACSLT

SEQ ID NO: 25641 - protein, 74 aa, Homo sapiens
LFRSDYSNSKNCNLRHKRLRMEPKSLGPQGGLKHILTHLNMLENRKERLKLVWVCWIQTLPSPPHQVLWRPKFS

SEQ ID NO: 25642 - protein, 42 aa, Homo sapiens
MQVFPDGGREACRHGVVMQERSSELREPRALIMGGKCIIHLL

SEQ ID NO: 25643 - protein, 23 aa, Homo sapiens
LLTVMMDYMHAAEEERSTADRKT

SEQ ID NO: 25644 - protein, 161 aa, Homo sapiens
LEKAPDQRTQPAGRRAALRPAWAPGTAAGAASYLVKFVLPSAWTQAPVAAREGTGLARLLARPPLPARSPPAASLARPLRSSGSHYSSFQYGILSVRMLGALFFFFFFFFLRFCVCVYVCACACSELLQRPFPALAKFLKPISLRDVIGSFPSQLRAIPCA

SEQ ID NO: 25645 - protein, 67 aa, Homo sapiens
LLLCCLFMAVNWNFTDSLIPSPRNPYFVMTNYAPGIGRDSGYKKWQKSNLVISKLTLCRISEKSNIN

SEQ ID NO: 25646 - protein, 41 aa, Homo sapiens
LLLMFLLAVVLPSPLISWSFIERHRSNTANITNLQHRMLLL

SEQ ID NO: 25647 - protein, 12 aa, Homo sapiens
LETMMVILLWLK

SEQ ID NO: 25648 - protein, 43 aa, Homo sapiens
LLWELSQVFLLLVARNKILLLNPPWLCRCWHGCGEKGTLTLCW

SEQ ID NO: 25649 - protein, 58 aa, Homo sapiens
VAVFEKNKERHIFALTQETSPVTGETVAVPERVGMEFAVTQALTGTRGCVRAPRSRWN

SEQ ID NO: 25650 - protein, 42 aa, Homo sapiens
VTFAAGEIRVQFVFVRVLLHQACRICCTQISQLPRPGCGGIC

SEQ ID NO: 25651 - protein, 78 aa, Homo sapiens
LGYPRLLQMLRGGSKRLQIKASDLLHMVDTPASAQSPSTLKGNSQLLANLQAWEEAQADTEDGLKAIRCPEVVGSWSH

SEQ ID NO: 25652 - protein, 112 aa, Homo sapiens
LGYPRLLQMLRGGSKRLQIKASDLLHMVDTPASAQSPSTLKGNSQLLANLQAWEEAQADTEDGLKHDQGPGYIHQTTEPFHFGGSFGIRIRMEGRNIRVAIRCPEVVGSWSH

SEQ ID NO: 25653 - protein, 77 aa, Homo sapiens
MKEYPRLLQMLRGGSKRLQIKASDLLHMVDTPASAQSPSTLKGNSQLLANLQAWEEAQADTEDGLKAEYGWNTAQMN

SEQ ID NO: 25654 - protein, 86 aa, Homo sapiens
LLQMLRGGSKRLQIKASDLLHMVDTPASAQSPSTLKGNSQLLANLQAWEEAQADTEDGLKVSFAGAFLVLDIWIRQGRQHKLQVYP

SEQ ID NO: 25655 - protein, 65 aa, Homo sapiens
LGYPRLLQMLRGGSKRLQIKASDLLHMVDTPASAQSPSTLKGNSQLLANLQAWEEAQADTEDGLK

SEQ ID NO: 25656 - protein, 72 aa, Homo sapiens
LNASLQEQQRMSFTPKPSERNEQLRRAALRAVTLTAKVCSFPREPARRRTHQKEETPDTSEHQKGQTPDAPP

SEQ ID NO: 25657 - protein, 20 aa, Homo sapiens
LQIPPTNTKILVFQHMNGSC

SEQ ID NO: 25658 - protein, 34 aa, Homo sapiens
MPRMRLFHLPIMAAACAPLLSHPALIGSADYLDQ

SEQ ID NO: 25659 - protein, 124 aa, Homo sapiens [sequence omitted]

SEQ ID NO: 25660 - protein, 11 aa, Homo sapiens
VLLLQWMLFGA

SEQ ID NO: 25661 - protein, 355 aa, Homo sapiens
LAVSLNMNRQGWGERGVRLICICSTARARPCEAPPKPHLVPARPTQLPELPGAQCSPGLINFVSLCRQRSCLVLSKSSAIVFHSLFLSYFPSFLILLLSLSLRLVLVSCVRRPCMWRPPCVCVCVCVCVCPSLSLTLLVSFLLFPSGLMFLPVSPAPLSDACTQTHTLLTPSSRYHHRTLPLLLNSFHLQNHFAGRLRQGGPGFLPQERLPAPSPPPSPISALGPPRFSTLFLHPGSSPSPPRCLGESPGHQPGPGELGKAAVTHLAGTTQLVQDCLEGAPPPPPPPPDAPGSPGAFTVSFSGWSLLRQHRGPSPEELTAWLGPSHLSHFQSGSGAIPPSVGVPAWPPSSGMTSA

SEQ ID NO: 25662 - protein, 90 aa, Homo sapiens
LQPWMTGLPRDPSPSWSQPSLAFLLTVIPASCFTHVAPDMLFEKICKNVASRVISKIPRRYQPYTVADTADKERASFCFGPRYVEEFSAS

SEQ ID NO: 25663 - protein, 34 aa, Homo sapiens
LFLSFLLHFRLILLVPVNQPAISGCSSERTKGDG

SEQ ID NO: 25664 - protein, 46 aa, Homo sapiens
LFLSFLLHFRLILLVPVNQPAISGCSSERTKGDGPSNSKWSCNQSL

SEQ ID NO: 25665 - protein, 160 aa, Homo sapiens
LKGKKAILFSICILLLNLLPTLNKAPKIRFQPGNPTTGLNLAFKVYNNREESQLFASAVRETPATSPAHKNFKMPKPQRSGIPSGLPLPASCFKCLKSGHWTKECPQPGIPPKPSPVCAGPHWKSDCPTHLAATPRAPGTLAQGSLTDSFPDLLGLVAED

SEQ ID NO: 25666 - protein, 18 aa, Homo sapiens
LMLPGHLRSLLDHHRCFG

SEQ ID NO: 25667 - protein, 8 aa, Homo sapiens
MFGCLLFC

SEQ ID NO: 25668 - protein, 37 aa, Homo sapiens
LDLWVFIQAGREAYGAYTGWEDDSQQKFVDQGYSMNQ

SEQ ID NO: 25669 - protein, 53 aa, Homo sapiens
MRGWSSLQSGGKPRLQVSPRSLSSGIWQEIRGTDVLVSEPISFLLIGSPVTRR

SEQ ID NO: 25670 - protein, 125 aa, Homo sapiens
VPSNQAGFGKEAGVFRRKVLPKMVQRAQTRQLCHPLNLAGALISEAAGRIWHFDPISSLLGQSGRQRCSTQQLSSFTEAPHTHKAPPKWFPWMLLSSPPHRRGMNLVPSWNPSLDSRFPHLFSRS

SEQ ID NO: 25671 - protein, 108 aa, Homo sapiens
VILLPWPPRSAGITGVSHHSWTSLRILRGNHSRFRVALNPMTGVLKRGQRGAREDGGRDWNDVATCQGMLGHQKLQEAKKNSSLTLLERASPCQLLNFRLLVFATMRE

SEQ ID NO: 25672 - protein, 94 aa, Homo sapiens
LRRGLTFCTAGLLRALLMLLVPGPPLRPWMTSEVLPPCKNPQLLGPLPALPKPFQIFSCSPHKELGVAVSAAVDSHVGLSCQGNMERKGGEKRQ

SEQ ID NO: 25673 - protein, 176 aa, Homo sapiens
LLAAGACLPHVFLGLTPPLLPLCPRAFHRMGTGHLAVKKSQTLLSRSLLSGRRLDPSHRGASAKGQPRVAAVGSRSGTWSLSGHRVPHSSCSRGPLPFPPPLKAEWRTGGPQGVARAELCREEALAPLGATEERNRAWIRRTPTTFLKHAQHSANQHDRHVGSGATHKMISCSRKH

SEQ ID NO: 25674 - protein, 70 aa, Homo sapiens
LFWLLLVPWEVFHLAASQSAVDAGQESPQVEHSVSGTGGFLVSQTLRMKPRTLAVSVTVLKGSVSGVFSF

SEQ ID NO: 25675 - protein, 40 aa, Homo sapiens
LVILLANLHCFPLPLYSLVPSVLKFDQMAKQALLDHFIMK

SEQ ID NO: 25676 - protein, 87 aa, Homo sapiens
VRRRIKKGTLSTDLHRHLYMEFGYSKIRCYLTSYKKQRTNCNSFLCSRTRLRQYLNDPASTHAHHIWKNRGVLFRSCRSSRTHPSKC

SEQ ID NO: 25677 - protein, 89 aa, Homo sapiens
LLLLTLWVHTAFTSCNTYREGLQLHSLSQRDQEPTGRKNNSRRASLRAVTLTMKVCSFTPEPGRPRTHRKEETPNTSEHQKEQTPEAPP

SEQ ID NO: 25678 - protein, 28 aa, Homo sapiens
MTVILAHLEAKDGGSREVRSSRPAWRRW

SEQ ID NO: 25679 - protein, 56 aa, Homo sapiens
LGKPHNHGGRQRGTSHILHGWQRQRDKSKLKKTEVQEKNPLPSKEMIEQEKQAGES

SEQ ID NO: 25680 - protein, 59 aa, Homo sapiens
LSQWVCNVAPAREVGEGKLSRGYGTSKGVKVRKATMCTRKSHAAQRSWTRSAKQGMEMG

SEQ ID NO: 25681 - protein, 87 aa, Homo sapiens
MGMMITESGSQDGGRSPGWGVPKALPSAWHSKCPGGCCFPLRLEAPESWWQRAHPELKTPAHSCARAPGTLEAPWAGEPGQAGCGSP

SEQ ID NO: 25682 - protein, 248 aa, Homo sapiens [sequence omitted]

SEQ ID NO: 25683 - protein, 88 aa, Homo sapiens
LGIFFQPSTGFSIALLRIMAAAGNPKGPTAHQRDTQAAALEGSGETGRINATEANCCLQRREAKERKPYPTPAPSRPHQRRASAGNQE

SEQ ID NO: 25684 - protein, 61 aa, Homo sapiens
MWCPCAVSLFYLQIILLESCISLQSQGFVKFCWQAEMNKHGFLHLQLCLTTHIEFSLRDIF

SEQ ID NO: 25685 - protein, 67 aa, Homo sapiens
VPPKMREASRNPSPGKGHQGAPETPETANSPKREYSAIQPPLSKRRISLHLRPPGTQSCLWSLQVSL

SEQ ID NO: 25686 - protein, 62 aa, Homo sapiens
VQINRNPSPGKGHQGAPETPETANSPKREYSAIQPPLSKRRISLHLRPPGTQSCLWSLQVSL

SEQ ID NO: 25687 - protein, 167 aa, Homo sapiens
LNLKKVLQHFWCTTWGFEKRFSGQIKPSKMNLTQSLEDRKTYKSTACSILIQKEQQGKRPEEGAYCGFQNTIEEERDGGSLHHQGGVQWRDLSSLRAPPPGFKRFSCLSLPSSWDYRRHAQGDSEPCKLLPICREPHQNAVKTFSQSPLSRLLDLLWRTLLLSPEKA

SEQ ID NO: 25688 - protein, 28 aa, Homo sapiens
VFFFTRMSMLSHFICTAILSSSDYIAMS

SEQ ID NO: 25689 - protein, 85 aa, Homo sapiens
LCLPHWSTFLNCDFLFICLYLLCTACSLWVEAVPCSPIHPPGGVAVPGRMLPVQKCRSHTHRETSCHTEGEQGLSGCDYGSQELE

SEQ ID NO: 25690 - protein, 150 aa, Homo sapiens
LGEIPGGHRGWRRGKQSPGWLRFQSDDTRVRVPGPDPFAAHRPPAPPGSSQSQARSPPPVRRPLGSPRSHHCGRPSRGGVAARPAPFLGLPGEGQERALADRAEGCRDLDAACDLLPRPGVLRPPGVLPAKTSHLQVQRVLNLAPAKNCG

SEQ ID NO: 25691 - protein, 88 aa, Homo sapiens
LDLTKVSLRMFCSEQGLKNMIFSTVDCSLVFRTLPPAEKIDEGNTGGGIRAVSCLGWLKTNLEEHDVTTSTEIKRRHQSEGPVGTVEQ

SEQ ID NO: 25692 - protein, 93 aa, Homo sapiens
LGGPGWWLRLGTLQLKMTLQGLKNMIFSTVDCSLVFRTLPPAEKIDEGNTGGGIRAVSCLGWLKTNLEEHDVTTSTEIKRRHQSEGPVGTVEQ

SEQ ID NO: 25693 - protein, 38 aa, Homo sapiens
LPGGYGRRRMRRKEMPAWMVLAHRSSCFLLSRKPNHAS

SEQ ID NO: 25694 - protein, 136 aa, Homo sapiens
LSILSTPWGCCLFLFAFGAFPDQQACCGSPSGHSHIIAYHVRGVPGAVSAAEAVGSGEASQKAPAGPNARSPHAIDPCAHPHDSPYSRCLPSSWPDKVSSAVPTACHLLTAQLLQFWGSPCSSVHCIRRTAVWRLD

SEQ ID NO: 25695 - protein, 27 aa, Homo sapiens
MILINFLGQSSLLWLHWVSLLYSASSH

SEQ ID NO: 25696 - protein, 94 aa, Homo sapiens
LRSETLVFPLFILFEVMKVILMNLHEADHNSNIQAIWVCKKRKKEKTQTVVSHVPRPSTEGRGPDCSTSEAFHFILFHGPQLLFTVLGRRNFRE

SEQ ID NO: 25697 - protein, 81 aa, Homo sapiens
VTELVHKTMVPRILNCAMLCMAADMWGLVVPRACLRCTGPHHWASEVQSARRHLLPGNWKQRPLGPSVPQSSYCRHDDWSK

SEQ ID NO: 25698 - protein, 146 aa, Homo sapiens
LDPLPTAMDPRTGLLPSRELASLSLFWSCQGPKHCWEIGESLGSAMSHWRWQREAFPFAFTQMKWGNPRSQHSAARRRPCGTSETLQKGLFSEFSRVAGGRSPALKSPNPTEGWRRGGGFAVRQTCVRIPALVQMTSCVPWGKSFV

SEQ ID NO: 25699 - protein, 58 aa, Homo sapiens
MLGKGMPGITTHLGGDRSLGPVGPHITSCSVLPFLQPSSLCLRLCPSPLCTYHTERPC

SEQ ID NO: 25700 - protein, 17 aa, Homo sapiens
VLSDCRAVRVEGKGKAG

SEQ ID NO: 25701 - protein, 35 aa, Homo sapiens
LQTQRTAAASGALLTSFLSILLCPLTVPELEILEV

SEQ ID NO: 25702 - protein, 76 aa, Homo sapiens
LHILGLSACSSLDLYSQSLLGHLKLGMSKPQFLSLPHPNQLLPISDHGDSPAFHSLKPRYRVHLPSSFVHTSCPVC

SEQ ID NO: 25703 - protein, 58 aa, Homo sapiens
LMTSQHTRRRPARRCQEREGKQMYTLVHLPSAHRKCAVPGAVCSKAGLMLNFGQSFAE

SEQ ID NO: 25704 - protein, 99 aa, Homo sapiens
LHLHHDSCEDPASPGRSDLCLVPHPTRPAVRGGRPAGGRCPAVPAEGPWRHLQQVGAATHPPPDQRAAPCPSAVTCVYPASLPRPNLLLASSLFSMPCE

SEQ ID NO: 25705 - protein, 63 aa, Homo sapiens [sequence omitted]

SEQ ID NO: 25706 - protein, 40 aa, Homo sapiens
VKPHIKSACEDREDVGDHQNLFIFPLKILKGSMCMFTDAL

SEQ ID NO: 25707 - protein, 97 aa, Homo sapiens
LDTGSELTLIPGDPKHHCGPPVKVEAYGGQRELDCFLTPEDITLDHYIDDIMLIGSSEKEVANTLDLLPALMASWVVPYHQLIEEEKTGTWFADCST

SEQ ID NO: 25708 - protein, 60 aa, Homo sapiens [sequence omitted]

SEQ ID NO: 25709 - protein, 86 aa, Homo sapiens [sequence omitted]

SEQ ID NO: 25710 - protein, 78 aa, Homo sapiens
MAIQAGDPASDQAQQAPACCPECGALRARAHPEPMPDCKHRAAPALVCASPSTPPWSRGSRLQPPPAPERGPHSAVVG

SEQ ID NO: 25711 - protein, 36 aa, Homo sapiens
LTLQCFSVCLFFLLCCSGANKEPNNLCTTLHVIGQN

SEQ ID NO: 25712 - protein, 152 aa, Homo sapiens
LASLLLSLLTAYRGTSPCDHGEFKAQNKSSPFVLRSTSAFNKCRITGKGVVYIDGVCATLDLLQDCVYFVNHLMQKEGRNRERRKEERKKKKGRNREARRKKEKERNQKKERTKRKGRKEGRKGGRERGGEGRGERKIRVISVFSLVSESSH

SEQ ID NO: 25713 - protein, 98 aa, Homo sapiens
VAGEPEEELGNWIRILAQLLAMAFTLVPRPPCPTQEGDEIGCRSSQPGYCEDESKDMARAQKSTWPIRKCQCWRKWERKLEKPGGVIISDTCLTPGLL

SEQ ID NO: 25714 - protein, 102 aa, Homo sapiens [sequence omitted]

SEQ ID NO: 25715 - protein, 14 aa, Homo sapiens
LLLWAWFIGPGVAI

SEQ ID NO: 25716 - protein, 73 aa, Homo sapiens
LLSSHCLAAGTFLSLRSLTFSPAISSVLQAADPKMLSHTKVLRPSKEHSTGKRRMPRVSMRTTPVNIPCMHHS

SEQ ID NO: 25717 - protein, 916 aa, Homo sapiens
LGMASFFSTLTFPSLKASWGCKAKNHELLCGLSHGSSGRQMSGLPVSQSGPSSGSGGQTSGLTVSQSGPSSGSGGQTSGLTVSQVALPPAPEDRRPAHGVTEWPFLRLWRTDVRAHGVTSGPSSGSGGQTSGSRCHRVALPPALEDRRPGSRCHRGALPPALEDRRPGSRCHRGALPPALEDRRPGSRCHRVALPPALEDRRPGSRCQQRVPSSGSGGQTSGLAVSQRGPSSGSGGQTSELAVSAEWPFLRLWRTDVRARGVSRVALPPPLEDRRPGSRCQQSGPSSASGGQTSGLAVSAEWPFLRLWRTDVRARGVSRVALPPALEDRRPGSRCHRGALPPALEDRRPGSRCHRGALPPALEDRRPGSRCQQRGPSSGSGGQTSGLAVSAEWPFLRLWRTHVRARGVTEWPFLCLWRTDVRDRGVTEWPFLRLWRTDVRDPGVSRVALPPALEDRRPGSRCHRGALPPALEDRRPGSRCQQRGPSSGSGGQTSGIAVSAEWPFLRLWRTDVRARCVTEWPFLRLWRTDVRAPGVSRVALPPPLEDRCPGSRCHRVALPPALEDRLPGSRCHRVALPPALEDRRPGSRCQQSGPSSGSGGQTSGLAVSQSGPSSGSGAQTSGIAVSAEWPFLRLWRTDVRARGVTEWPFLRLWRTDVRARGVTEWPFLRLWRTDVRDRGVSRVALPPALEDRRPGSRCHRVALPPALEDRRPGSRCQQSGPSSGSGGQTSGLAVSQSGPSSGSGGQTSGLAVSAEWPFLRLWRTDVRARGVTEWPFLRLWRTDVRARGVSRVALPPALEDRSLGSRCHRVALPPALEDRSLGSRCQQSGPSSGSGGQTSGLAVSQSGPSSGSGRQTSGITVSAEWPFLWLWRTDVWDHGVSRGALPLEPLVGNLLVASFGFWWLVFLFSFFIFFFF

SEQ ID NO: 25718 - protein, 92 aa, Homo sapiens
LGLLLPEMRSRCVAQAGLKFLASSNLPASASQSTGMTGMSHHDQMHGKFCVLCIVPHTRKFKKHLAMHVFQSNSNCSERLKSPLKNLHYRLL

SEQ ID NO: 25719 - protein, 205 aa, Homo sapiens
VCLFFFNWMFLFFSSRALALAHRVGMIHRETRPGSPTASDTGGSLLHRWPSYPWCGLTMETLEVSPCPKGRVALWSVEYQAELLYCLIEHIVHELKDAGVFSLTWKNNVSRRSSEDGVGCGAEHNDSAFLEPGYDVCLEDLGDLHRAAWRGIVPRVELILMLRDPGLDKRDKKKRSRSTWDVESLEESQGPGRFMSPQNENHTQP

SEQ ID NO: 25720 - protein, 31 aa, Homo sapiens
LRLVSLWLVVVMETAAWLECNNEPFLDWIVM

SEQ ID NO: 25721 - protein, 45 aa, Homo sapiens
LDAEDRSLEGVRKMQQRSGEEITGKTGSGVRLVLEQGEAWEVAKR

SEQ ID NO: 25722 - protein, 100 aa, Homo sapiens
LLHLLDLKDTFFSTRLAPESQKLFAFQWEDPGLGVTTQYTWTRRPQGFRNSLTIFREALAQDLRKFPARDLGCVLLQYVNDLLLGHPTAIGCAKGTDALL

SEQ ID NO: 25723 - protein, 25 aa, Homo sapiens
LQVTETGLGLRSHLPNHNKYLYIWR

SEQ ID NO: 25724 - protein, 166 aa, Homo sapiens
LSLYLSCRVSSQGRRGRRRADCWGCFLAVTPPPQPRSSLPLRVAPAFCFTRGTTNAAAAMLTTEPGGGARSRRAECGCAGPADGARGRDPEPPPRARRAGALSPERESPRGHRRVAAERPRLAPGAPTPSRASGFLPRPGCAWLVVASAVARLGATLRKSGVNGGS

SEQ ID NO: 25725 - protein, 47 aa, Homo sapiens
LILFTLEFIYLLPLPRLFVLSGICKPVPGCPQPPLSDSLLWLSVPKV

SEQ ID NO: 25726 - protein, 10 aa, Homo sapiens
VFLQLLMLVT

SEQ ID NO: 25727 - protein, 31 aa, Homo sapiens
MMSPRSWTFSWMLFWLTLNPQRFLASWMAKH

SEQ ID NO: 25728 - protein, 34 aa, Homo sapiens
LPSPLTWRLLVKPDNAHRYAEFLESGSKGGVCYF

SEQ ID NO: 25729 - protein, 34 aa, Homo sapiens
LESLQNYEFTRHLGILLFRRPPKQLTSPFTGYGR

SEQ ID NO: 25730 - protein, 26 aa, Homo sapiens
MLSPLIIICRWEWRRRLGDNRTENLV

SEQ ID NO: 25731 - protein, 31 aa, Homo sapiens
MNFLKSPCIGFLPSSVLLLYSLQVFSGITSK

SEQ ID NO: 25732 - protein, 68 aa, Homo sapiens
LVTLAGAFMFCAEAIRLCAEFVCAATSGKGWNVQRGFHLTLFSLRDGRAERYLLTSLSGQRGPDTQAP

SEQ ID NO: 25733 - protein, 202 aa, Homo sapiens
LAPTELRTEPFLSLMCFFPGGECGVHVGVRGVDPMLVPGLPKCALVGKRRKGEQDPVSIVLIFCGHRNEKAEKMSKSSVGELTLSWVVKVNHTASGSCQELGTPRGLAATQCWTFPPHPGCCAGGSRIHRDAEDVVGRDHGRATEAEAPPSPLPAHPPPKLGAPNMQPEKKKSLKAGSHLLPREQILTDVNFTYMEVNIFTS

SEQ ID NO: 25734 - protein, 56 aa, Homo sapiens
LVFVFLVETGFRRVGRAGLQLLTASDLPPRPPEVPGLQTESRSLSAQWCPGWSAVA

SEQ ID NO: 25735 - protein, 49 aa, Homo sapiens
MPVLPRPPCGTGPRSRPSSWLHLHPPVPAPGLTGPFSDRHSQPPVSFLS

SEQ ID NO: 25736 - protein, 98 aa, Homo sapiens
MPVLPRPPCGTGPRSRPSSWLHLHPPVPAPGLTGPFSDRHSQAERKSLPRSTGACRAETSTPSACPGLGPLLLLSPSRGSLPHLPGREPISRWGFGRC

SEQ ID NO: 25737 - protein, 42 aa, Homo sapiens
LKSGKIRIIAAASAPGRGGSGLWLAGEGCTGRLGEDLAGARE

SEQ ID NO: 25738 - protein, 29 aa, Homo sapiens
MERMSWKYPGGPNAQRNHKSPYKRESGKW

SEQ ID NO: 25739 - protein, 158 aa, Homo sapiens [sequence omitted]

SEQ ID NO: 25740 - protein, 52 aa, Homo sapiens
LAQGRSRNAVKSLSLDSRTPPRTLLVLYPSVAELVPKVQDKASFMFPSAFLK

SEQ ID NO: 25741 - protein, 17 aa, Homo sapiens
LKIFSFLRIFIVMGLSL

SEQ ID NO: 25742 - protein, 26 aa, Homo sapiens
MVFCFCVLCICLSSTSIPHRRVLASY

SEQ ID NO: 25743 - protein, 26 aa, Homo sapiens
MLESYFLGLLFRSLLACGMGWTRAGS

SEQ ID NO: 25744 - protein, 88 aa, Homo sapiens [sequence omitted]

SEQ ID NO: 25745 - protein, 95 aa, Homo sapiens
LPLPVTYCVASGKSQSLSEPHPHLYQDQDSTVSKGLQSPSEGGREGLEKETLLAREAQHIFMALTRLPALTSRQVPTRPEELREPGREGTRGCFK

SEQ ID NO: 25746 - protein, 124 aa, Homo sapiens
VGRPRAGGEFVPLGATALPEGASKSFKGNLRPEPGRLLHIPDRCARRLLLDASRDKELTPQQGGLLVHQAWHLIHLCRVPQMENARQLTQMQDPQQPQVLDLFPSSTERSSCNSQEYMSLLQLY

SEQ ID NO: 25747 - protein, 166 aa, Homo sapiens
LWLGLGRGRPAGLRRGKLREKSSTWLGAAGEGRRPPPVPAPTAGRQVGRPRAGGEFVPLGATALPEGASKSFKGNLRPEPGRLLHIPDRCARRLLLDASRDKELTPQQGGLLVHQAWHLIHLCRVPQMENARQLTQMQDPQQPQRLNYFLLDGNESSPPPSPSTGL

SEQ ID NO: 25748 - protein, 11 aa, Homo sapiens
MFVSFYYSVLV

SEQ ID NO: 25749 - protein, 38 aa, Homo sapiens
LLEFFFPFFLLLSQEILSSVEQNDFKKMFFQMLEMVVI

SEQ ID NO: 25750 - protein, 69 aa, Homo sapiens
LLEEIFMSFIGVGLCLQSIIFLGKPRVTSSTAVSESRQKHSSCGWLPLELNINKRQATEMECQSALPKT

SEQ ID NO: 25751 - protein, 62 aa, Homo sapiens
LLLLLDKWWLWFSCPAHYHWAVDEMDILSSPLPLDHFCRAHLSPHLAVWSLEFSKCPDRSCH

SEQ ID NO: 25752 - protein, 34 aa, Homo sapiens
MQDDPEASCSGRSDQKKTCYEYSKCSMKAKWNGI

SEQ ID NO: 25753 - protein, 90 aa, Homo sapiens
LGAAPWSGARPRVLLPDDRPRARRGSWRGVNGAATGTPAGLQHVETQELGGHPWATGAAPTKMKQAETGDSQTHCSLRLEQCGIPSIRDC

SEQ ID NO: 25754 - protein, 80 aa, Homo sapiens
LFPFFFFWPGLFLRAMLFFDKELRGESTSDLLAQPSCGGTQEGGVGFSGSPTDFSIPHAAQGKEDVGSGARHGSDGTGTP

SEQ ID NO: 25755 - protein, 16 aa, Homo sapiens
LSPSARSRGVLVAVFL

SEQ ID NO: 25756 - protein, 99 aa, Homo sapiens
VSVCCMLDTSKGRRNSTTTEMNTGYPRAGGKCWRKDLKSSDGWLQGRHNRELLGSRRRNLQYKYYHVISLMDKYKFGYKMNNEIYLVSMRCFAQWKKII

SEQ ID NO: 25757 - protein, 91 aa, Homo sapiens
LEDGPSAKVSAPKAEGLGELEEAGFQEGWPDAPGRRVETGLWGQRSGETSQEAAAAVSLYSPRPDEGRQRQNSRMDLVWDLSDWVHAGVLA

SEQ ID NO: 25758 - protein, 92 aa, Homo sapiens
LEDGPSAKVSAPKAEGLGELEEAGFQEGWPVDAPGRRVETGLWGQRSGETSQEAAAAVSLYSPRPDEGRQRQNSRMDLVWDLSDWVHAGVLA

SEQ ID NO: 25759 - protein, 203 aa, Homo sapiens
LPCGAVWALARSKNHPTNHLGQSRRRQLPFLKQQPWRLSHALQLRVTNAVTILVPRRIIPPTPRATEDYTTAPSCHGGLFHRPLMPRRIIPPPVPRRIIPPPPRATEDYSTPPPACHRGLFHRSLVPWRIIPLLPRATEDYPTTPPCHRGLSHRPPCAVEDYSTPTPCHGGLSHRPHPASASQGSRGSPPGVYNPDLPPSPGS

SEQ ID NO: 25760 - protein, 206 aa, Homo sapiens
LQNPPAHMSLVFRGGNSQLGRNPPAPMACGSEDSSPTSCANHCLVKAPLLPARSPLTFFGTQRRHLGVGMGAQAEALVRCPTDQASLSPRLSWWRLQRGPRNRRRDRTCPVASNGRTAGSEHTPAPTVSPLSQLSCLPRRPGCNPRRRRAIGPHPAPPKLLLFLCKCPGLDVKPQSGRGGPDQGPAAGSLCLVSLLKPLEEETHKM

SEQ ID NO: 25761 - protein, 150 aa, Homo sapiens
VAPGTQRRHLGVGMGAQAEALVRCPTDQASLSPRLSWWRLQRGPRNRRRDRTCPVASNGRTAGSEHTPAPTVSPLSQLSCLPRRPGCNPRRRRAIGPHPAPPKLLLFLCKCPGLDVKPQSGRGGPDQGPAAGSLCLVSLLKPLEEETHKM

SEQ ID NO: 25762 - protein, 64 aa, Homo sapiens
LGPPFIWVSAHSVLFYFLSLIASLAQACNICSASHLGLQAAQMVCSECCWEGGCWDSGPGRLRS

SEQ ID NO: 25763 - protein, 52 aa, Homo sapiens
LVWFAIVFPGPVTCLTCSRMNKWGHTEHEEARAILNKSCPDVGGQKKHETLP

SEQ ID NO: 25764 - protein, 113 aa, Homo sapiens
LWAGPHCGRDPAHSPQLLARVLSPSLLGPAALPATRSAGPAEPAPTQNSLACECSAQPLFPPARLPPHLRASKGSRLQPRPAQRVPPTVQRRAEGLASQAWPEWTPRLRRRPE

SEQ ID NO: 25765 - protein, 48 aa, Homo sapiens
LVAPGIPWLVDASLPSLLPFSCGLSSMCVCVFSSASYEDTCHRLYNPP

SEQ ID NO: 25766 - protein, 99 aa, Homo sapiens
VADMRNHRENSWYSWTSGSWMTRSRHPLNPSRNTCTWKQADADPPTKAEAKENSPMTRLCRCHTERVLFRQLAEPKASFPQSIRRGHLAAVAIARTTGN

SEQ ID NO: 25767 - protein, 102 aa, Homo sapiens
LWPPERERNHRENSWYSWTSGSWMTRSRHPLNPSRNTCTWKQADADPPTKAEAKENSPMTRLCRCHTERVLFRQLAEPKASFPQSIRRGHLAAVAIARTTGN

SEQ ID NO: 25768 - protein, 109 aa, Homo sapiens
LSSAMIMKPPQLCRTNHRENSWYSWTSGSWMTRSRHPLNPSRNTCTWKQADADPPTKAEAKENSPMTRLCRCHTERVLFRQLAEPKASFPQSIRRGHLAAVAIARTTGN

SEQ ID NO: 25769 - protein, 137 aa, Homo sapiens
LFPFIFGVYLGMNSWALGCELFVKPQNGFPQRRFDFTTSNTEGCSFPDILANTHVPVCFSYFIVIKHNKMYHLNHFKCAVQWYQIHSHYGAAVTPIQLLNSVHLVKQKLDARYIVTPHSPSSSPQGTSILYSVCDFD

SEQ ID NO: 25770 - protein, 38 aa, Homo sapiens
LQGQHLLLQVLPGLLLLLLLLLKTVLLLFQLPDPTAQV

SEQ ID NO: 25771 - protein, 12 aa, Homo sapiens
LIGLMKLIYLCL

SEQ ID NO: 25772 - protein, 72 aa, Homo sapiens
LSLEGGAHEQEAVPSLLPLLEKGCPLGSTLGSSMEGDWVLAGASEPLRNQPWSCPTLDPCVIRKNTLASASV

SEQ ID NO: 25773 - protein, 31 aa, Homo sapiens
LFVMAKGTQPCQGASSGRKFSVYLRLIRGPS

SEQ ID NO: 25774 - protein, 47 aa, Homo sapiens
LDGEGDALALFLGVLRCVAAAVRMSSSRSPGDHTITTKLLAGLPAET

SEQ ID NO: 25775 - protein, 31 aa, Homo sapiens
LMSPTGHGGDGGKKQQKRRRGRRDDGAKVKT

SEQ ID NO: 25776 - protein, 73 aa, Homo sapiens
LKPGHRFKMEKVSPLVHVVHMVPHAAEETEDYGFRLHFPSRCAHASCTWLCPPALSLLINRMGNRGKKRQGGF

SEQ ID NO: 25777 - protein, 21 aa, Homo sapiens
LWEGFIMMVALLSLALLSQLL

SEQ ID NO: 25778 - protein, 193 aa, Homo sapiens
LKGARLPAGAPACRRRPACAPRPGHCGEGRPHKRGSGGRGDSGEAGSGRPRLPSLRRWPAPPGLIARPAPGPPDARTPPAPGARDEVGAREGRAGGDLPHAELPGSRADSPGNQTRDGPALPAAPGQRVPRRSRKMHLQTWRFPFALAYGLLIIFFFLRRSFALSPRLECSGTISTHCNLRLPGSSNSPAYAS

SEQ ID NO: 25779 - protein, 216 aa, Homo sapiens
LRRWPAPPGLIARPAPGPPDARTPPAPGARDEVGAREGRAGGDLPHAELPGSRADSPGNQTRDGPALPAAPGQRVPRRWGRWAGAAAGIARGAPARTAPGAGREPRERGGLTGQRHARPLRAGRRGRAAGRAEKVRRGRLPSGGRREMQLSLRGCRQGHKWGRAGRSGAAGGAGRGPGCGAPGPFPYGRPLSREEGSGPGGPETYMVAGGGEGSTQ

SEQ ID NO: 25780 - protein, 242 aa, Homo sapiens
LRRWPAPPGLIARPAPGPPDARTPPAPGARDEVGAREGRAGGDLPHAELPGSRADSPGNQTRDGPALPAAPGQRVPRRWGRWAGAAAGIARGAPARTAPGAGREPRERGGLTGQRHARPLRAGRRGRAAGRAGEGLQSAAVAAGPGSAAAARLGRGEAEKVRRGRLPSGGRREMQLSLRGCRQGHKWGRAGRSGAAGGAGRGPGCGAPGPFPYGRPLSREEGSGPGGPETYMVAGGGEGSTQ

SEQ ID NO: 25781 - protein, 93 aa, Homo sapiens
LPKRHRMALCFLLVLQPSKPLGHMQALWKNFIKPRVILLQIPDCLGSWTCIFPKRTVLEEDRRAARGLGVEGRKRGQDGGLPLEASLHCLLGR

SEQ ID NO: 25782 - protein, 88 aa, Homo sapiens
MASCLLLLFLNGWSFTMLPGLILNSWPQAILPPWTPKLLGLEGFTHWPGWSAMARSQLTATSASWVQAILPPQPPQQLELQAPTTVPS

SEQ ID NO: 25783 - protein, 50 aa, Homo sapiens
LGMSIAGLFLPSILEDLGLVLPADDWDLRNRALQKDWQDHMSRGGQCFQQ

SEQ ID NO: 25784 - protein, 168 aa, Homo sapiens
MEGVVLLKLAVFRTGRGISRTGALRFFERRVDLNSLETGWGREGPPLRAGSPDSPASNKNDEHGSSLGPAVGGLRRRPVVEAPSSPGRFEWKPSRPPVVGPGAALGSGGSALGRARAPEAGVPLRGRAWVCLHRLPGLKGVILPRCISSRHGTGRRDAPTVHFISSQD

SEQ ID NO: 25785 - protein, 82 aa, Homo sapiens
LVSSSYKKYINQLKIVLRADMMMSWPSQETHESASSSVPGKWGQSVVLGPLLGRVGEAGSLWLYLIPGLAKLPGRTTKTMLL

SEQ ID NO: 25786 - protein, 87 aa, Homo sapiens
LSQNLHFNKIPSDCALRSQKHWPILQIRKSLVFFETASLSVTQAPVQWRDHSSLQPETPGLKRSSCLSLQSCRDYRHEPPCPATFLV

SEQ ID NO: 25787 - protein, 58 aa, Homo sapiens
MHCLYPICCWRQRILMAMELIMKRNKESHEKMKTILLNAFVIKLLDLRKKVPTEFPCI

SEQ ID NO: 25788 - protein, 93 aa, Homo sapiens
LVWKVQCSFGMVVAGLECGGVKSVVEGHTEFLTIQQQRSKKTLESMRRILMAMELIMKRNKESHEKMKTILLNAFVIKLLDLRKKVPTEFPCI

SEQ ID NO: 25789 - protein, 42 aa, Homo sapiens
VRLRLKKKKKNVNCSWLCRGMAQVTGLLRGQRDPDQPVVSLE

SEQ ID NO: 25790 - protein, 32 aa, Homo sapiens
LVPGAVFAYLSLLSAAKNLEQWFSHQHHLHPV

SEQ ID NO: 25791 - protein, 29 aa, Homo sapiens
MLLLLLLAFHLLRITLSSNSRPRYSPAGL

SEQ ID NO: 25792 - protein, 57 aa, Homo sapiens
MLAICFFTSLLVTWCFQFVKIQCTRDMCTFLDVCYTKTSEELMCILKSRLSWNLGTW

SEQ ID NO: 25793 - protein, 123 aa, Homo sapiens
LPLKLRPTCLLLLLFMLFHWRKSRSHPASRENTQRAGVSQVDPTGLLLWRVEAKSTSYSRICSKLQNILDLQIKKKEKEKEKEKEEQEEEEEEEEEEEEEEKEKWKRKRRRKRRKRRRRNLKD

SEQ ID NO: 25794 - protein, 94 aa, Homo sapiens
LPLKLRPTCLLLLLFMLFHWRKSRSHPASRENTQRAGNILDLQIKKKEKEKEKEKEEQEEEEEEEEEEEEEEKEKWKRKRRRKRRKRRRRNLKD

SEQ ID NO: 25795 - protein, 67 aa, Homo sapiens
LPLKLRPTCLLLLLFMLFHWRKSRSHPASRENTQRAGVSQVDPTGLLLWRVEAKSTSYSRICSKLQV

SEQ ID NO: 25796 - protein, 68 aa, Homo sapiens
VCSSSAFVCFLSLLLPSQDVLASPLPFCHYCKFHEASEPRFLYSLQNWSPPGMAIPFSPRALANSTPI

SEQ ID NO: 25797 - protein, 82 aa, Homo sapiens
VCSSSAFVCFLSLLLPSQDVLASPLPFCHYCKFHEASEPRFLYSLQNCDHSTLLLMSCSGSGSPPGMAIPFSPRALANSTPI

SEQ ID NO: 25798 - protein, 65 aa, Homo sapiens
VCSSSAFVCFLSLLLPSQDVLASPLPFCHYCDHSTLLLMSCSGSGSPPGMAIPFSPRALANSTPI

SEQ ID NO: 25799 - protein, 51 aa, Homo sapiens
VCSSSAFVCFLSLLLPSQDVLASPLPFCHYWSPPGMAIPFSPRALANSTPI

SEQ ID NO: 25800 - protein, 105 aa, Homo sapiens
LNPKFHTGRGGARPLPDAKGVNFLRLYLSGQAGGSFSRDPLTSGCLGKNHHFLAWSPQLTSMHYSKVECHETEGYRGGQNTKAKEWGRVALREADGIIPPWGFMS

SEQ ID NO: 25801 - protein, 60 aa, Homo sapiens
LSGRLNPKFHTGRGGARPLPDAKGVNFLRLYLSGQAGGSFSRDPLTSGCLGVGKSGFERS

SEQ ID NO: 25802 - protein, 101 aa, Homo sapiens
LCQRHTLIDPLSRTRAANLTGDLTYLNHLRKQEGWEREVTVQLSLNSDQMFNQMHEEWAKCKPQLNPSGRGVKVLVILNYVFSCLESGSYNSLQGKLRASL

SEQ ID NO: 25803 - protein, 90 aa, Homo sapiens
LCQRHTLIDPLSRTRAANLTGDLTYLNHLRKQEGWEREVTVQLSLNSDQMFNQMHEEWAKCKPQLNPSGRGVKVLVILNYEKEPSQNQQP

SEQ ID NO: 25804 - protein, 39 aa, Homo sapiens
LLLFTPCVCVLWFRIWWGCLRGDIDLTFIKKEEKTAKEN

SEQ ID NO: 25805 - protein, 22 aa, Homo sapiens
VQFLKMQVSSVWWLILMSTRLD

SEQ ID NO: 25806 - protein, 96 aa, Homo sapiens
LVFEEWSGGPQPRLQPVSGCPCLQDQPHTLFAVSRWLPLTLSPKNSGALLVRTPWFCLHRPHLCDFLKSFLTKAVRLAGRQAIPDLTPRWPGRVSS

SEQ ID NO: 25807 - protein, 90 aa, Homo sapiens
VAAELHGGIARQGPLARTTRSTETHQEPSAARVTHQECPVDLGEAQCVTVDLLPWRPPSSHHQNQPLLSVRGVPGMGPALKADRQGRPGV

SEQ ID NO: 25808 - protein, 94 aa, Homo sapiens
LPSSTLPPALTPGATLPSPSLPRDLPRLAPVPPLFGPARILPPGLGSSAEPRLPPPSFGFLRAWLRLFPPSFGFPIRPRLASYHGAACPSLSPT

SEQ ID NO: 25809 - protein, 15 aa, Homo sapiens
LQDALFIQGKIYHQS

SEQ ID NO: 25810 - protein, 137 aa, Homo sapiens
LGSFPSLLKVAMEFLPYFICKPFLPHYSGRLKPVDASKNRSVLDLFSQVSQLSRHLRCDSFTWQSLSSKHELSFLLSYGQLMRGGGFMNWPHAALKQFGQDSMLIAKMKISKLAVCFYDVLQPATKTLILATSSALT

SEQ ID NO: 25811 - protein, 193 aa, Homo sapiens
LAREGRGLRHNGHCLRHQDSFHCSLGKKAAPWAGNDATLWKDPWVRVREATQLHRANERRPNHPIWTKEFLPYFICKPFLPHYSGRLKPVDASKNRSVLDLFSQVSQLSRHLRCDSFTWQSLSSKHELSFLLSYGQLMRGGGFMNWPHAALKQFGQDSMLIAKMKISKLAVCFYDVLQPATKTLILATSSALT

SEQ ID NO: 25812 - protein, 141 aa, Homo sapiens
LGQAAEPAGWSQARTLRAGAGGRADAAGSGGGRAPRIRPEPNPVALRLAGQRRWGQRGAFCNERLRGTPGAGAPLRSPQASTPLATRAETSPAAGCKRTALQTFAEDTVPRPRPYASGREEIQAGPAPGWWAGQAGGGGRY

SEQ ID NO: 25813 - protein, 193 aa, Homo sapiens
LLLLTLWVYTTFMSCNTHREGLQLHSKPARPGTHQEEQTTPDMPPLRAVTLTAKVCGFTPKVSETTNPTKETPDTSEYLKEQTPDTPSLRTVTLTARVCSFILEVSETKNPPEGTNSGHILVTTKGLLPITKRIKAIKLQMVLQTETQMSSTNNFYRGPLDRPTGPFTGLESSPLEDTTTAGPLLCPCPAGSS

SEQ ID NO: 25814 - protein, 70 aa, Homo sapiens
LGVAVRPEATAGRTQCAAHSRSTFPRIIRAGDKIPGATNRRYRKTTLPRSLCGRADLGRRGQTDLGFLKN

SEQ ID NO: 25815 - protein, 88 aa, Homo sapiens [sequence omitted]

SEQ ID NO: 25816 - protein, 36 aa, Homo sapiens
LRVRSIPELLLIPGLPRSRALSGLFIAAPTPCGHPP

SEQ ID NO: 25817 - protein, 183 aa, Homo sapiens
VSAPNEVDTQLRNANVEEEKTLQRTRRKVQQRGRGKLSRSGAAMEETGAGGRRPGGQEAGVVFLRRELPGAHPQELKAAGAQVLPRDLDAWGICTNEHKLQRGSCPRYQRLLSSRHRHHSQPLLQAQETAASVHRDTQAIFCLFVCLFGDRVLLCHPSWSAASQLTAASNSYAQAILQPRHPE

SEQ ID NO: 25818 - protein, 24 aa, Homo sapiens
LACLVSTSFPGCLRLLQCNRILSG

SEQ ID NO: 25819 - protein, 67 aa, Homo sapiens
LITWALAASLGGLPGWVVQTSTPESPSPWSSRPPLALAAALVHSPSNMDERVQGDTLMDLLSAEWSQ

SEQ ID NO: 25820 - protein, 60 aa, Homo sapiens
LAGLLLGFITGGQPLTPPFAIGGGCPAPEALLPPAPPTGGASSHLSTASGVPTAEAAVGG

SEQ ID NO: 25821 - protein, 173 aa, Homo sapiens
LAGLLLGFITGGQPLTPPFAIGGGCPAPEALLPPAPPTGGASSHLSTASGVPTAEAAVGGTWKRSKGRDRSSQSCLQERPETRFTELGRGARDPGQEGLADAQKVRRKQLQFPECARLPGASERLQVWPPCLKHPHPPAGLATSQSALSSYLFLPHFPTERVWLLSALPAPHP

SEQ ID NO: 25822 - protein, 135 aa, Homo sapiens
MLLTCRTTLKKNRETQEHRGGAARGGTPGRSQGGAQDTSRLTGDPRGGERSPPKCQSMKQQEGAPSGHCWDQWCHGASEELFGLKAGSVPKSLHHHVGSHLAPQHSGQDRSLLSAHQTSCAALQTPCSPAIPTHF

SEQ ID NO: 25823 - protein, 120 aa, Homo sapiens
LGADQGEHAALRLQGCLFEWQLLLETMQNKPRAPQKRALPFPELELRDYASVLTRYSLGLRNKEPSLGHRWGTQRLGRSPCSEGSQAHTTDAADVQNHSKEEQRDAGAQRRCGQGRHTWA

SEQ ID NO: 25824 - protein, 54 aa, Homo sapiens
MMTGDTAVGGKKFMSIKILNFSDLERKTAMNSLGGRWSWPTRLTSCRDVTEVKR

SEQ ID NO: 25825 - protein, 50 aa, Homo sapiens
LIITASMGRFFINRRNEERKIAPSSLKSARCAGPERHEYVYDATLCLGKV

SEQ ID NO: 25826 - protein, 106 aa, Homo sapiens
MEPNLCAPSMWNMWSSKKMWGRIFTKMGLLGAPARKRASSISRPQRRRVFSTRAPELAALLAVTSHHPWKVQISLLDGFVRSRASPPSQRSHCVPARPISIPCAQE

SEQ ID NO: 25827 - protein, 63 aa, Homo sapiens
LRFLCTALVGCSMHAADLPFSGTSIPQSTPRCDGTGVEPGELVQPDKVENAEVCGKQETGIEK

SEQ ID NO: 25828 - protein, 125 aa, Homo sapiens
LGTQGELVKRPQNFPELLFSVTLQQGLVPAHEIIAQKKTLWPPCLLEHCVEFEPRPEVPPEMALEDPSEEVWSCEHPLGQSWLPQDLLACYSTQNHPMDDFLMDDDCPDILAPMALCSLSRSHRY

SEQ ID NO: 25829 - protein, 24 aa, Homo sapiens
LRFYFLLLSVISARLTVTRGCGQA

SEQ ID NO: 25830 - protein, 46 aa, Homo sapiens
LWPGMRENVSLLAALVIATCLPQNRSSMDEQTEKCVRRLVTETDQG

SEQ ID NO: 25831 - protein, 60 aa, Homo sapiens
LWPGMRENVSLLAALVIATCLPQNRSSMDEQTEKCVRRLVTETDQGLDFSYGECSKKIPS

SEQ ID NO: 25832 - protein, 92 aa, Homo sapiens
LYRQRRAFLMALGLTGLVAEGPSFNGLLLNEKTSFSSHAWTPGKRFSPNPDLPPFSHSVGPVQSLGENYVWDSGTSPGSLEPARWGRGLGGD

SEQ ID NO: 25833 - protein, 20 aa, Homo sapiens
LRLAWDALQCPILAKKCENS

SEQ ID NO: 25834 - protein, 109 aa, Homo sapiens
LSRYLKIKKWAMEIFGERVLQAEGLVSAKAQAREHVSCWRSSEVASVAGMVRAREGMILASHPVTEDQEKSDPPKCPQLLKCPLSTFLVTDNGNTCFKNKMDLLNIWDH

SEQ ID NO: 25835 - protein, 82 aa, Homo sapiens
LPPNVCLLRVLHPVVLLASLEDGSSALSGGHGCLRGISLGPPALPQLRRCTWRRPWISQGDLHAHSMARMEVISRTTLRAMC

SEQ ID NO: 25836 - protein, 44 aa, Homo sapiens
LIIEEACKLAENKSYQDLLLQLHIEDSSLFKNTLIFPVSFIAII

SEQ ID NO: 25837 - protein, 102 aa, Homo sapiens [sequence omitted]

SEQ ID NO: 25838 - protein, 47 aa, Homo sapiens
MLDIFFSFVTCLLAVDCIIYFPISQSLCFRSECHFQGCEFQQELNDT

SEQ ID NO: 25839 - protein, 42 aa, Homo sapiens [sequence omitted]

SEQ ID NO: 25840 - protein, 170 aa, Homo sapiens
LNVDNTLNCAIYKISDTPTSLLLQLSMMYMTSAYSNMLTDYTPVILMAVAAAVVAAAITPAATQRCDWGCTFHGGVGSSAPSDVGKEIPRCPCICPNCGCGSEAPGWQVGSFRVQLRPPSQVQDPGVSAACTLGGPRKDPYPCRLGGVCFFCLASLGSRCMLSYLSGGWC

SEQ ID NO: 25841 - protein, 22 aa, Homo sapiens
LLCGLRMWLYLRFLKLKFLIDG

SEQ ID NO: 25842 - protein, 385 aa, Homo sapiens
MPGRIQISVSPRTPVRVAGGPSWVVPHWARPQDLHATENSNLCQPENTGGIGRRLWLKGPSLGGTLRTTCQGEFRSLSAREHRWGWLETTVERSLTGQDLKTSMPGRIQISVSPKTLAGVAGGRGPSLGQTWRPPYQGEFKSLSAREHRWGWLEAPGGRSLTGRDPKTSMPGRTQISVSPRTLAGVAGGPSWEVLHWVRPRDLHARENSNLSPRTLAGVAGGPGWEVPHWAGPQDCHARENSNLCQPQNTSGVGWRPQIKGPSLGRTSRTMCQGEFKSVSLRTPGAGGWRPRLGGPSLGGTPRPPCQGELKPLSAPEHWWRWLEAPVGRSLTGQAGPKDLHARENSNLCQPENTGGIGWRPQLKGPSLDRILRTTCQGEFRSLSA

SEQ ID NO: 25843 - protein, 383 aa, Homo sapiens
MPGRIQISVSPRTPVRVAGGPSWVVPHWARPQDLHATENSNLCQPENTGGIGRRLWLKGPSLGGTLRTTCQGEFRSLSAREHRWGWLETTVERSLTGQDLKTSMPGRIQISVSPKTLAGVAGGRGPSLGQTWRPPYQGEFKSLSAREHRWGWLEAPGGRSLTGRDPKTSMPGRTQISVSPRTLAGVAGGPSWEVLHWVRPRDLHARENSNLSPRTLAGVAGGPGWEVPHWAGPQDCHARENSNLCQPQNTSGVGWRPQIKGPSLGRTSRTMCQGEFKSVSLRTPGAGGWRPRLGGPSLGGTPRPPCQGEFRSLSAPEHQRGWLEATVGRSLTGPDLEASMPGRIQNSVSPRTLAGVAGGLSWEVPLLAGPQDLHARENPNLSS

SEQ ID NO: 25844 - protein, 252 aa, Homo sapiens
VAGGPSWVVPHWARPQDLHATENSNLCQPENTGGIGRRLWLKGPSLGGTLRTTCQGEFRSLSAREHRWGWLETTVERSLTGQDLKTSMPGRIQISVSPKTLAGVAGGRGPSLGQTWRPPYQGEFKSLSAREHRWGWLEAPGGRSLTGRDPKTSMPGRTQISVSPRTLAGVAGGPSWEVLHWVRPRDLHARENSNLSPRTLAGVAGGPGWEVPHWAGPQDCHARENSNLCQPQNTSGVGWRPQIKGPSPVFSG

SEQ ID NO: 25845 - protein, 239 aa, Homo sapiens
LSAREHRWGWLETTVERSLTGQDLKTSMPGRIQISVSPKTLAGVAGGRGPSLGQTWRPPYQGEFKSLSAREHRWGWLEAPGGRSLTGRDPKTSMPGRTQISVSPRTLAGVAGGPSWEVLHWVRPRDLHARENSNLSPRTLAGVAGGPGWEVPHWAGPQDCHARENSNLCQPQNTSGVGWRPQIKGPSLGRTSRTMCQGEFKSVSLRTPGAGGWRPELKRPTLGRKWRPPCQEEFKSLSA

SEQ ID NO: 25846 - protein, 92 aa, Homo sapiens
LTSGWGGRAEAGGGPRRLAQEGAATRSDLWTRPLSARGLGPPPLWVPGPQPLRVSSSPGARSRGLRHSAWREVGRGRDSGYGHGGITLTRSF

SEQ ID NO: 25847 - protein, 107 aa, Homo sapiens
MDLILELRLLKPGSCAAQISFKTDKMPFSHWFPACHLPPSPQDMQFMPPRAATPEAPTAAPALLLQNFRILSTFCSASPVLPTLPTASILKPLCFTAAVSGLGLGQP

SEQ ID NO: 25848 - protein, 102 aa, Homo sapiens
LKSVRPRTHQFWTQEHRCLFKILISFPLDVYPAVGFVFIRRFSMSTLVPLLEDPSIFYKGFLPILLRSGIPFGSSVPSASPSVVSIPCHNYRICNLSLLDES

SEQ ID NO: 25849 - protein, 75 aa, Homo sapiens
LMSLTSLITEGRAPKYMRFSMSTLVPLLEDPSIFYKGFLPILLRSGIPFGSSVPSASPSVVSIPCHNYRICNLVK

SEQ ID NO: 25850 - protein, 130 aa, Homo sapiens
LKSVRPRTHQFWTQEHRCLFKILISFPLDVYPAVGFVFIRRFSMSTLVPLLEDPSIFYKGFLPILLRSGIPFGSSVPSASPSVVSIPCHNYRICNLRLRSSMICSLQAGYLPGLVGHKANDINSSSSLKA

SEQ ID NO: 25851 - protein, 107 aa, Homo sapiens
LMSLTSLITEGRAPKYMRFSMSTLVPLLEDPSIFYKGFLPILLRSGIPFGSSVPSASPSVVSIPCHNYRICNLRLRSSMICSLQAGYLPGLVGHKANDINSSSSLKA

SEQ ID NO: 25852 - protein, 45 aa, Homo sapiens
LMSLTSLITEGRAPKYMRFSMSTLVPLLEDPSIFYKGFLPILLRG

SEQ ID NO: 25853 - protein, 86 aa, Homo sapiens
LLPQAHNGVVFHNHSHRDCGIPSGKTRFSMSTLVPLLEDPSIFYKGFLPILLRSGIPFGSSVPSASPSVVSIPCHNYRICNLEKMT

SEQ ID NO: 25854 - protein, 84 aa, Homo sapiens
MFTIKIKKIDFVKCDTIFIKTTNLRFSMSTLVPLLEDPSIFYKGFLPILLRSGIPFGSSVPSASPSVVSIPCHNYRICNLEKMT

SEQ ID NO: 25855 - protein, 100 aa, Homo sapiens
LKSVRPRTHQFWTQEHRCLFKILISFPLDVYPAVGFVFIRRFSMSTLVPLLEDPSIFYKGFLPILLRSGIPFGSSVPSASPSVVSIPCHNYRICNLEKMT

SEQ ID NO: 25856 - protein, 77 aa, Homo sapiens
LMSLTSLITEGRAPKYMRFSMSTLVPLLEDPSIFYKGFLPILLRSGIPFGSSVPSASPSVVSIPCHNYRICNLEKMT

SEQ ID NO: 25857 - protein, 99 aa, Homo sapiens
LMSLTSLITEGRAPKYMRFSMSTLVPLLEDPSIFYKGFLPILLRSGIPFGSSVPSASPSVVSIPCHNYRICNLISESDQKKRINVQPPCHKAGQHYVVP

SEQ ID NO: 25858 - protein, 31 aa, Homo sapiens
MKRMNHLLLIIIYNLSLQVKELLKQGFSYCS

SEQ ID NO: 25859 - protein, 35 aa, Homo sapiens
MKRMNHLLLIIIYNLSLQVKELLKQGKLNKATSTF

SEQ ID NO: 25860 - protein, 172 aa, Homo sapiens
LAQRTTPGSAWSQMWIKTARSFPLLVKTRARGLSFFIRNVVTMTSLCKAAAGLSGNTPVRYLGLRTASPAQDPDVYLGVPSALPGWKTPRGNLGRRADGHLPRDELTRWPPTSPAVFQRLRITGTAVVLTDSGSSGLSQLGKALQTFWKSDTKGKHLLGRPLSFYASITEDP

SEQ ID NO: 25861 - protein, 181 aa, Homo sapiens
LAQRTTPGSAWSQMWIKTARSFPLLVKTRARGLSFFIRNVVTMTSLCKAAAGLSGNTPVRYLGLRTASPAQDPDVYLGVPSALPGWKTPRGNLGRRADGHLPRDELTRWPPTSPAVFQRLRITGTAVVLTDSGSSGLSQLGKALQTFWKSDTKGKHLLGRPLSFYASIRHETSQPAKNELS

SEQ ID NO: 25862 - protein, 18 aa, Homo sapiens
MFLARRRALLLILSGRLF

SEQ ID NO: 25863 - protein, 37 aa, Homo sapiens
LLLPSILMFVLLEASSNWTVALGEENPPAAKGGICFL

SEQ ID NO: 25864 - protein, 84 aa, Homo sapiens
LLEIFTMNLYYFQIYRSNAYLYLESWSILQFQKVRKCTFSLCLSLSLSHTHTHTHTHTHTHTHTDGGYVKGMQEPTKRAANGQS

SEQ ID NO: 25865 - protein, 95 aa, Homo sapiens
LQTGAVPIQPSWNSGLLFLNMKASMYISNAYLYLESWSILQFQKVRKCTFSLCLSLSLSHTHTHTHTHTHTHTHTDGGYVKGMQEPTKRAANGQS

SEQ ID NO: 25866 - protein, 53 aa, Homo sapiens
LLLKLESAPRKARAPSAGHLYTRTRGSVSKGVESGMVMQRDKKKKKKMRQTWW

SEQ ID NO: 25867 - protein, 55 aa, Homo sapiens
LLLKLESAPRKARAPSAGHLYTRTRGSVSKGVESGMVMQRDKKKKKKMRQTWCIK

SEQ ID NO: 25868 - protein, 59 aa, Homo sapiens
MLILATTPRLPTIQTGSSKSSTPNELSILSPSSLRTGFTSLGPSFPSSLKTGWEQSLWL

SEQ ID NO: 25869 - protein, 38 aa, Homo sapiens
LATEFLLKAARKPHGSSVRELLVISLGNPASENLYPEN

SEQ ID NO: 25870 - protein, 100 aa, Homo sapiens
MVEGEVGAGTSHGKSKSKRERVKLLISMEFLTSNISMKIITIYFLKFWEGMETSHCSRCWGCSNEQDRPDPYSQINTMIQVSRHLVGICIKLLGNGRQQH

SEQ ID NO: 25871 - protein, 112 aa, Homo sapiens
MENAAWRARKPNHNDSAGMKLGNKTSTLTLPYLLHGTSVVIQWLKSTGSLQGKTCLLGHRAGMETSHCSRCWGCSNEQDRPDPYSQINTMIQVSRHLVGICIKLLGNGRQQH

SEQ ID NO: 25872 - protein, 35 aa, Homo sapiens
LEAYRERPASWDTEQVSRHLVGICIKLLGNGRQQH

SEQ ID NO: 25873 - protein, 92 aa, Homo sapiens
LEAYRERPASWDTEQLLISMEFLTSNISMKIITIYFLKFWEGMETSHCSRCWGCSNEQDRPDPYSQINTMIQVSRHLVGICIKLLGNGRQQH

SEQ ID NO: 25874 - protein, 35 aa, Homo sapiens
MAQVALPGARLGQVAPLSPLEPESHPALLCYTDSS

SEQ ID NO: 25875 - protein, 41 aa, Homo sapiens
LNFASWILRSAFCGREILESMNCELEPWDYQQPAEILRATL

SEQ ID NO: 25876 - protein, 28 aa, Homo sapiens
LRSAFCGREILESMNCELEPWDYQQLKF

SEQ ID NO: 25877 - protein, 81 aa, Homo sapiens
MLLLRAVTLTAKICSFTSEPSKTTSPPGGTNNSGRATLRAVTLTVKVGSFTSEPARPRTHQKEETPNTSEHQKGQTPHAPS

SEQ ID NO: 25878 - protein, 96 aa, Homo sapiens
MPPVRSLAPQTQSLLLPGKRAALCDPAQESPSGGREERGSVLGASPKSVSPMAGETGCTLSVAPTPGAYPPLPVEPGTGRAPPGSGLHRRPRRAAR

SEQ ID NO: 25879 - protein, 56 aa, Homo sapiens
LWLWYEDQTESPEGFSRGTSEKPVEISQPKDKTVRPGVVARTCNPSTLEGRSRGIT

SEQ ID NO: 25880 - protein, 59 aa, Homo sapiens
LQESPGGLVKLQLLMGKSEGKPETWHFQHVRGVKMLSAATLPARSQGIDDLYANCESLK

SEQ ID NO: 25881 - protein, 60 aa, Homo sapiens
LQESPGGLVKLQLLMGKSEGKPETWHFQHVRGVKMLSAATLPARSQGIDDLYANSPLNGK

SEQ ID NO: 25882 - protein, 67 aa, Homo sapiens
VFCKLECLKESPGGLVKLQLLMGKSEGKPETWHFQHVRGVKMLSAATLPARSQGIDDLYANSPLNGK

SEQ ID NO: 25883 - protein, 36 aa, Homo sapiens
LYLYKPQTLGFRSRRGNEQKNRRTAEWHGREKKGTI

SEQ ID NO: 25884 - protein, 87 aa, Homo sapiens
LPPSQAETQKEVQQRQAAMQETALWFTGHIQPKTHKHTGTHTQTHREWERNTQRLRDRERRENGRHTHTQTKGHTAEALKHTPPGNP

SEQ ID NO: 25885 - protein, 21 aa, Homo sapiens
MPLGIRGLLPEGHSQILPAHL

SEQ ID NO: 25886 - protein, 70 aa, Homo sapiens
VVLGQSSKRVKMEAAKFFKLRHPPSPAIGHLGPSDLDQDRCCWLPWSSGFQIRTGTASPAFSGLQLADGR

SEQ ID NO: 25887 - protein, 37 aa, Homo sapiens
LHREGLWFQRLTQLAGLLLLVSRRLPALSNRSNCGSR

SEQ ID NO: 25888 - protein, 12 aa, Homo sapiens
VQPLPPGFRRFS

SEQ ID NO: 25889 - protein, 157 aa, Homo sapiens
LPLLKSRKGLVCLEGCATWQEENKHLGNSGCAVHLLCGLRQATDFSELRIYKLRISNRRISVKYFKNRRCLSDSLHLKGTKRMQRIPCHRNHCLQCHAWQFLFVRISPCFRVSDKSAFKMSAYAGISCKDSTWEEAVSRLRRLLGGFSSLRAVRLRT

SEQ ID NO: 25890 - protein, 92 aa, Homo sapiens
MWTNSMKMWTSGLLLWDPFRGLAEVIQDSACAIVQPQERSQTEHICAAGIQIQKQEVTSTTPFMPLPTTTAQRPHHPGFCSIDQICLFLHFI

SEQ ID NO: 25891 - protein, 85 aa, Homo sapiens
LVVVVPRAQLSFLLSLCLVSLFLHSLVTTHREKPTDPVGLVPTGACGKIPVKLRTTSPASPLGSAGELRRPRSRLEFQQAPKEKV

SEQ ID NO: 25892 - protein, 119 aa, Homo sapiens
VCLVPALWKLGKLQASFPPKALERSDRPCHWPPGPRSPPWTLCPPWVPAMQRPPPSCDKDEPKAGAVPSDPRAPTPAGTVLGTPGRQRMGPAGRIKRDAQPGLWGAGRWNRGPHLLGPP

SEQ ID NO: 25893 - protein, 23 aa, Homo sapiens
LERKFAKAQKRMLRKLLQLCCLL

SEQ ID NO: 25894 - protein, 39 aa, Homo sapiens
MKMVKAHLIATEFRPRATKELMSAKTHMKDLAYRFTSLI

SEQ ID NO: 25895 - protein, 38 aa, Homo sapiens
LELSLSSIRNRVKLENTGRNHRLDLWGVVSQEDLISGL

SEQ ID NO: 25896 - protein, 20 aa, Homo sapiens
LVLILVFIQLSVLKLCSQAI

SEQ ID NO: 25897 - protein, 40 aa, Homo sapiens
LLPALGRAGHLCLLSFAPCVLWSPATCRAAVPHEALQRMP

SEQ ID NO: 25898 - protein, 22 aa, Homo sapiens
VEQGIQVLMIHDKKGPSLVRHK

SEQ ID NO: 25899 - protein, 114 aa, Homo sapiens
LCWGLGLLCTQDPFRVTGRRLHTAASGGMSSPDSMQNRTQLRGSHLFPEMPTSCSSPSPRRCAPLGRYQIVTSWAGLCLCAPVTSRAVGVEMLTISPEEGWTGSKKLFSPWDGI

SEQ ID NO: 25900 - protein, 28 aa, Homo sapiens
MTVLKFSGTIFLCLMHRTRAPPPWILDA

SEQ ID NO: 25901 - protein, 35 aa, Homo sapiens
MSLGSALLSLKGRTLGKEAACFSSCPEEPACMSPF

SEQ ID NO: 25902 - protein, 13 aa, Homo sapiens
MLPGILRGLFLLQ

SEQ ID NO: 25903 - protein, 145 aa, Homo sapiens
LSRLALIAIKATNKFIEMLFPSGNLNLSLACTERGSASGVGEMRRRMSSAYHVVQTQADRGPQKCKYVSSVGNCILGRKSYVLEYHKHPFLPCGTAQRWCEAIHRREVPRTQFSWLKDSNVYISSKRPTLLELHFTCEIRVLGSE

SEQ ID NO: 25904 - protein, 26 aa, Homo sapiens
VSWPCVSTAHGRRGLDAALELQRNLV

SEQ ID NO: 25905 - protein, 90 aa, Homo sapiens
MEGGGWTRHWSCREIWCNLLTGLIGFRETVLHLPASWSPFYKHRSDPLLRREEKNTPKPSARGSPTLYDTWAIKNGFYPWNHHFCLPIRL

SEQ ID NO: 25906 - protein, 83 aa, Homo sapiens
MFNFLLGTFSLLVSRRTIFTPKRRWSEDRNFACFVYHCVSRLSTRPGRHHFKWICVIVEECLTPREAVGQCLWLLNIEPSGLS

SEQ ID NO: 25907 - protein, 152 aa, Homo sapiens [sequence omitted]

SEQ ID NO: 25908 - protein, 32 aa, Homo sapiens
LLCRGPKGKPSRGCLSLIKGKTESMFWVAHRN

SEQ ID NO: 25909 - protein, 69 aa, Homo sapiens
VSSLLITLSVFPCWMLPSSPPALGHQTSWSLAFGLWDLHQRPPGGLQGFILRPRPTQSASLVLRLLDLD

SEQ ID NO: 25910 - protein, 57 aa, Homo sapiens [sequence omitted]

SEQ ID NO: 25911 - protein, 97 aa, Homo sapiens
LKLFTTVAVALSCSAVSAPTLLSLTRTPGCCAGNFPVAPASGSCNLNTYWLLGVIHLLHREVLKRPLLYSGMPSPVCLPKSSLTFKFQRREVPGRIS

SEQ ID NO: 25912 - protein, 62 aa, Homo sapiens
VSPVPAHSTDGKTGLLEVTALPFEATQEIGAGTGAAWVPGGGAERALGGSWALGSSPSPASH

SEQ ID NO: 25913 - protein, 215 aa, Homo sapiens [sequence omitted]

SEQ ID NO: 25914 - protein, 61 aa, Homo sapiens
LVEMAPQRPRQALHPALPHGCLPSAERLVRARPGRGQLQGHLHQQACPDSPSTGHYSSFLD

SEQ ID NO: 25915 - protein, 73 aa, Homo sapiens [sequence omitted]

SEQ ID NO: 25916 - protein, 115 aa, Homo sapiens
LLGVTQVLLLLALLAPPTRGCCACAHAPVKPRDSAGRPRVRPPPSCSSRVSPASATQTRIGALAPFVQVIGTPTQNRQNEDDGRVSFLGVGLKGPNVRDGKQSSRHRAGHTVGAR

SEQ ID NO: 25917 - protein, 58 aa, Homo sapiens
LGKGKGGRPATRELLENLRGSGAPGGDHGSLQGYEVSPSTTFARFYFLGKYLKQIFQK

SEQ ID NO: 25918 - protein, 27 aa, Homo sapiens
LLFALNLAAAHSGLWVSTAFMSCNTYC

SEQ ID NO: 25919 - protein, 90 aa, Homo sapiens
VCVFVCVCVCAHWCLCVCVLRQGLTLLPRLECSGAILAHYNLDLLASSDPPGLSLPSGWDHRGQSTSTDWLMQKSKDPVRSYNRLVDAEI

SEQ ID NO: 25920 - protein, 70 aa, Homo sapiens [sequence omitted]

SEQ ID NO: 25921 - protein, 41 aa, Homo sapiens
VMELTHRVRRKWPGSLTEHVRTQEEGICLHTRRRDLTRTQS

SEQ ID NO: 25922 - protein, 97 aa, Homo sapiens
LRLLTLWVCTTFMSCNTHHEGLCLHSLKSVRPRTHWEEQTTPDAPPLRAVTLTAKVCGFTSEVSETTNPLEGRNSRHTIFKSCNTHRKGLWLHSQSQ

SEQ ID NO: 25923 - protein, 41 aa, Homo sapiens
LKHHFSFAVWTMVMELLLYCPRRSEVKSLKWVLQLHWTKEV

SEQ ID NO: 25924 - protein, 101 aa, Homo sapiens
LLPSLDCSDMITAHYNLNLPGIKLSSHLSFPSHWDYRECAAVPSQTGSSVCLCNFPGAECFQLWSFNRTFETRRWNDIGFPVSFSPSCSLLRRSHHEPGDG

SEQ ID NO: 25925 - protein, 92 aa, Homo sapiens
LLPSLDCSDMITAHYNLNLPGIKLSSHLSFPSHWDYRECAAVPSQTGSSVCLCNFPGAECFQLWSFNRTFETRRDRGALSCHHQDWLYGESH

SEQ ID NO: 25926 - protein, 20 aa, Homo sapiens
MGQGEEWNLSEMYFDRLKAR

SEQ ID NO: 25927 - protein, 144 aa, Homo sapiens
VASLGDHAPSQQAGRVPPRLAPPGRPPPAGAQRYPASSLRHQRLLSVSAIIRPCDRPKSARVPFHLAAYSHLVGAARAHSPARVQSRPRQFRPLPGHRPYSACPQGWPAAPGLSSLPAPFSIPLVRLLSRRILNPERTLGRGKG

SEQ ID NO: 25928 - protein, 29 aa, Homo sapiens
MASSEPKILRHVTHNLVTPSKRNPEGTGT

SEQ ID NO: 25929 - protein, 101 aa, Homo sapiens
LDLVMCLALATGILICMTKNLESVHSFVLAHSCYHHENKPRPECCFQKKTRDIKCKVKLPRHAHARLTNPQLTHRSMKINNCCIKPLRFGVTCYAALCDNN

SEQ ID NO: 25930 - protein, 65 aa, Homo sapiens
MGTPWLQRGAAHYERPGGDFMILFIPQDFLRTGTIFHHCLLPSATCELSPQVIGKNCLAYSCLNQ

SEQ ID NO: 25931 - protein, 62 aa, Homo sapiens
MGTPWLQRGAAHYERPGGDFMILFIPQDFLRTGTIFHHCLLPSATCELSPQGEEGNCIERHR

SEQ ID NO: 25932 - protein, 20 aa, Homo sapiens
LPQSPQPSATTNLINQQPIT

SEQ ID NO: 25933 - protein, 103 aa, Homo sapiens
VGRAVGAARGPLPTQVGTCGAKSRGGAAAVKRRGGRGNFPLAGAMKAGRTRWLNGAESGSAEARAEPSAPGLSGVGSSLHRGHLQLCRVCAALWPWQRFSGHL

SEQ ID NO: 25934 - protein, 104 aa, Homo sapiens
LRIRQVKLLQNQTKKIVELGFNPQSVNSEVKALPQGLKTQELASEMSQKHDAIWFLRALTQPTSAASVLEQKWKENSWDFSASCSQPQALFFYRFWDAKILLLL

SEQ ID NO: 25935 - protein, 17 aa, Homo sapiens
LRMTSGGLGPIAERAAG

SEQ ID NO: 25936 - protein, 93 aa, Homo sapiens
LCCLLCLLCVVRAQGSCSQASSSQPVLLGSCSPILLPMDMGLSPIWSHDEQSCDEHPVCASRWAPLDPGTVCRVTGRRRERGQSRKNIEEAIS

SEQ ID NO: 25937 - protein, 110 aa, Homo sapiens
LRARYFRSMHCAVCTFCLWFQLLSRTSSPLPADVGCLRFPAINTPRRAPGKIPTPPFRACVNIFLSHGKMMLDFIWDSQQVPLQNSFFHFLPRQCLSCPHTAWPLAGSPL

SEQ ID NO: 25938 - protein, 164 aa, Homo sapiens
LYGFLQDSAVETEAGGPGGSRRKRVGGGRLPLDTQDSLAHHGGGEANGDSGDQEGGGGWGAWGGAEGPRSPALQDDQHRFQVSSQLQGFLTHSTPCFEPSGRPPIQDQDPAPSRPGSRGPTSTAPDLSAPPAPASPAGRCPGEGAADGSPARIERLPHSVHVSA

SEQ ID NO: 25939 - protein, 85 aa, Homo sapiens
LRAESTLFVLIMTLVEHFSACATLNCFTNQISQGKNFSFTGISSEVPLSSTLRGSLEGHTEPGTGTKAQGWDGDSQFTVNILILI

SEQ ID NO: 25940 - protein, 53 aa, Homo sapiens
MLFFFSFFLHLQCHGFPWSGCVEASPNDRSVWPGWRSIQRWMLSAEAFGPELL

SEQ ID NO: 25941 - protein, 71 aa, Homo sapiens
LRLMFACLLSVTLLSRRTGQAGATGRACSSVGAPGPRKRLDAAVLVAKKQHAFLFSGKTQINRNHPLSYHR

SEQ ID NO: 25942 - protein, 44 aa, Homo sapiens
VLLKPLADVRGPLMPSLMAAKTSHSTVWCQRRGKGHNFSFLGNC

SEQ ID NO: 25943 - protein, 57 aa, Homo sapiens
MDPDRTGLFHLKAAGFLLAQGMSRNVIWELGPGKGASQLWLVLYPTVAELVQIKILN

SEQ ID NO: 25944 - protein, 58 aa, Homo sapiens
MDPDRTGLFHLKAAGFLLAQGMSRNVIWELGPGKGASQLWLVLYPTVAELEIQMRISV

SEQ ID NO: 25945 - protein, 58 aa, Homo sapiens
MDPDRTGLFHLKAAGFLLAQGMSRNVIWELGPGKGASQLWLVLYPTVAELADFGKYVL

SEQ ID NO: 25946 - protein, 52 aa, Homo sapiens
MDPDRTGLFHLKAAGFLLAQGMSRNVIWELGPGKGASQLWLVLYPTVAELAG

SEQ ID NO: 25947 - protein, 75 aa, Homo sapiens [sequence omitted]

SEQ ID NO: 25948 - protein, 66 aa, Homo sapiens
MPQNIPGIPSVDLMMVFHLRVSQGVLVLCKPLLLLHSYAQFGLPLKQRVAPFLFLWPERPFLKFAA

SEQ ID NO: 25949 - protein, 70 aa, Homo sapiens
LILLGFIFLPCWMLPSVQHRTPTSSAFGLLDLDQWFARISRAFGHRPKTALSASLLLRFWYLDWLPHSSA

SEQ ID NO: 25950 - protein, 88 aa, Homo sapiens
LSLRFPLALLQLLLPQLPFPDRSAALQFFSYNLVQEPMDLDQRPRTLKIPTESTPRLNAQHSLQLKRKPKAKPTLAARGDFPAVFLGS

SEQ ID NO: 25951 - protein, 60 aa, Homo sapiens
LPTLVSNSWPQVIHLPQPPKMLGLQICAVSARPDRWSLTGDCTATSASWVQVILLPPLPK

SEQ ID NO: 25952 - protein, 59 aa, Homo sapiens
LSPGVNRRSSHQTRRLDLRRSHSPGLPEIKSSAPFAAHRQQAAPVCPAASPGGARPRGD

SEQ ID NO: 25953 - protein, 29 aa, Homo sapiens
MTKRTTILPPSLRMCLLTATLTFHTSAVQ

SEQ ID NO: 25954 - protein, 59 aa, Homo sapiens
VTPAPRKINGKSDPKIHTELQEASDCQNYPIKELNWKTYTSQFQKLLQNCSNQDSMVLA

SEQ ID NO: 25955 - protein, 115 aa, Homo sapiens
LNTKNYKTSLEEIKHLNMWKDILCSSIRRINIVKTAIVPILVYRFNPIPIKILTAFFFFFFFCRNGKSDPKIHTELQEASDCQNYPIKELNWKTYTSQFQKLLQNCSNQDSMVLA

SEQ ID NO: 25956 - protein, 74 aa, Homo sapiens
VSGRPSEVDNNQLRAITEVDPLTTTREVAEELNNDHSAVVRHLKQIGKVLKKLYKWVPHELSKTKKKKKKKKTL

SEQ ID NO: 25957 - protein, 92 aa, Homo sapiens
LRLQIAWAVIYGAITKGSFFRMVLCGDEPEAEAEGCVTLPHTLWSLIGCANLRELPNHSGPCFPGFATLQLCDPGKLSTSLCLHFHICKMGI

SEQ ID NO: 25958 - protein, 180 aa, Homo sapiens
VGLIFLMTRTCVVKASTASSHTEDCFQCMHQITEVGQQVKTIFLFYSFYECPGTRKGTCLYNNTQYKVCNPRSDQPDVCYDPSEPPMITVFEIRLSTGPFLGDTSKVIARTEERGVPKHETLKFDTWATINSNQQGLGCCSRDWEKSYTAGNKYVCHESYSCTNVCQYWSCIIWATWKKD

SEQ ID NO: 25959 - protein, 43 aa, Homo sapiens
LSYTGCPRTELFFLMAYLPIKATSTSPADTEATSSIDFFTSFP

SEQ ID NO: 25960 - protein, 41 aa, Homo sapiens
MFLLEGFCLFFLMAYLPIKATSTSPADTEATSSIDFFTSFP

SEQ ID NO: 25961 - protein, 20 aa, Homo sapiens
VVRGGAAQDPRSLALVDGAS

SEQ ID NO: 25962 - protein, 30 aa, Homo sapiens
MGTLTFWSPLLLGTTPSVCAAAARPPCPPG

SEQ ID NO: 25963 - protein, 62 aa, Homo sapiens
LLPSKSLWVISAFLFFLIFECEGRDFNLGNKSTEHEISEGVWDTSWLHKNPFTIVPASLSSK

SEQ ID NO: 25964 - protein, 24 aa, Homo sapiens
LTVKEQPSRLINLLDLGLLILSLG

SEQ ID NO: 25965 - protein, 45 aa, Homo sapiens
LDGHLIYFLVHSYCGWSSLSVCLSCSVCASALQENRNFFFCACLC

SEQ ID NO: 25966 - protein, 68 aa, Homo sapiens
MGWGSFLFLAPAHSTEHAALALPSLLQPASSEQLLKMGSHCHQKSKTRIPDWQRRNWFLQEAFPASLV

SEQ ID NO: 25967 - protein, 15 aa, Homo sapiens
VVKMLKFLYIALFHK

SEQ ID NO: 25968 - protein, 45 aa, Homo sapiens
VLLYCLTISFVNRRSTLMLRAALFTAARRGTSPRCSSVDEWIKKM

SEQ ID NO: 25969 - protein, 16 aa, Homo sapiens
LSVFPSSFFLYMCMYL

SEQ ID NO: 25970 - protein, 19 aa, Homo sapiens
LIVLWYCILSPRRARETSF

SEQ ID NO: 25971 - protein, 93 aa, Homo sapiens
VCFTVLVWLLRLQPPPLHSRQEVGKVGGRQKRPLLKASPRSDFFPLLDHFLEDGTDWAWPPVPEEVLIDLQQNEIVHSWSHSVWPLTDLTVLT

SEQ ID NO: 25972 - protein, 197 aa, Homo sapiens
MRVPVGPYWVVTDRLPMTGLAALGEAGSGRALRALSIVQTLSEGKSRGEVASSGEAGAVGAAGSRREGWGRRGGRGFLFTQKAPWQPEGNIPRAPAKGEDGVAWTPGLSTRCAEADRKLVWNARTRVGAAARPATERPLGSKSRVPLLPASPLSILSLVGLQDAARRGALEMGSVSPRPWPCGSREKMPSARASSPP

SEQ ID NO: 25973 - protein, 63 aa, Homo sapiens [sequence omitted]

SEQ ID NO: 25974 - protein, 33 aa, Homo sapiens
MVQLNVILPDIKLTNERNHKDTSCNQKCNLLLY

SEQ ID NO: 25975 - protein, 52 aa, Homo sapiens
MNEFLTSKSVFLLLSICFSSSLTLLGHLKRCIINQVKEKEQNKTGYLDQLGC

SEQ ID NO: 25976 - protein, 80 aa, Homo sapiens
LLLVIFPPKISSGEVHTLLTMTITETSIYIFLLAPNSFLGHQNRHRYECVGSMRTTPGRIQKHWSVSGEVICPPPTCQRW

SEQ ID NO: 25977 - protein, 58 aa, Homo sapiens
LKDPLSRQFAYIMLIVSRKPQFLLMWASPQAARVPSQDGGCLASEEETEENKSVSWPR

SEQ ID NO: 25978 - protein, 147 aa, Homo sapiens
VEGGIPRRSLRSPSSRTSPRPGLPRSPGWWGCAEGERGVLRREAAAQARVARAAASSPALSSRSCAAAPPSFKLRKTLRRTPFAGYPAWASRSGLGESALTRRLCSALRRRNICRAGAGAVGHAEGMLHRGMRTRTVSGMRTREPCG

SEQ ID NO: 25979 - protein, 75 aa, Homo sapiens
LFYLVLFLFSNESTLPVITGVLGRQPVAVLAPYLGVDGLYVQAAICGSGSLEPGLGATCAWLTNYIMITSSSSLS

SEQ ID NO: 25980 - protein, 11 aa, Homo sapiens
LLMQALVVALM

SEQ ID NO: 25981 - protein, 93 aa, Homo sapiens
LPDSQIVFSFIFFLLEVLVPEGGMLPPRDTTTIPLNWKLRLPPGHFVLLLPSSQQAKKGVTVLAVVIDLDYQDEISLLLHNRDKTTVNMNSKW

SEQ ID NO: 25982 - protein, 73 aa, Homo sapiens
LAPPRARRRLSGGDSGWSPALTSPTPTSALARKKKKKKKIPDSIAESCQIRKINKNRRSAGASYKKGFVHRFS

SEQ ID NO: 25983 - protein, 54 aa, Homo sapiens
LFKTAWHVSPSLLLLLLPCDKPAPSSSSFMRPHQKWSRCWCHACTACRMSHQTF

SEQ ID NO: 25984 - protein, 54 aa, Homo sapiens
LFKTAWHVSPSLLLLLLPCDKPAPSSSSFMRPHQKWSRCWCHACTACRMTYNQI

SEQ ID NO: 25985 - protein, 29 aa, Homo sapiens
LCCCLMWNVVADEPGKRRNKKRAERGKRW

SEQ ID NO: 25986 - protein, 39 aa, Homo sapiens
LLGSEPLETFLLVRRPMWPAELYRPKALPELPQKRGGTV

SEQ ID NO: 25987 - protein, 40 aa, Homo sapiens
LGITFQLDLAVALSGQLVVFFSSQAQSLETGAADLECVTK

SEQ ID NO: 25988 - protein, 102 aa, Homo sapiens
VLRSACVMAARNSVEESWPVGLDEEPASGRSGTLTCRGERGLFSLAPELGRAHFGLRTLWGGRQRGLPELGDLRYLVPCMIWPEPLRMGVERVETKWASTYG

SEQ ID NO: 25989 - protein, 531 aa, Homo sapiens
MLFFKCISLLLIWLIPGQSTTGLVPCSATPTTFGDLRAANGQGQQRRRITSVQPPTGLQEWLKMFQSWSGPEKLLALDELIDSCEPTQVKHMMQVIEPQFQRDFISLLPKELALYVLSFLEPKDLLQAAQTCRYWRILAEDNLLWREKCKEEGIDEPLHIKRRKVIKPGFIHSPWKSAYIRQHRIDTNWRRGELKSPKVLKGHDDHVITCLQFCGNRIVSGSDDNTLKVWSAVTGKCLRTLVGHTGGVWSSQMRDNIIISGSTDRTLKVWNAETGECIHTLYGHTSTVRCMHLHEKRVVSGSRDATLRVWDIETGQCLHVLMGHVAAVRCVQYDGRRVVSGAYDFMVKVWDPETETCLHTLQGHTNRVYSLQFDGIHVVSGSLDTSIRVWDVETGNCIHTLTGHQSLTSGMELKDNILVSGNADSTVKIWDIKTGQCLQTLQGPNKHQSAVTCLQFNKNFVITSSDDGTVKLWDLKTGEFIRNLVTLESGGSGGVVWRIRASNTKLVCAVGSRNGTEETKLLVLDFDVDMK

SEQ ID NO: 25990 - protein, 62 aa, Homo sapiens
LTSFYLLAKRVTHMLVSCLFLEPVRLAGLCSLSRHLDPQLSAYLPVIAEVSAQMPSLLRGFS

SEQ ID NO: 25991 - protein, 158 aa, Homo sapiens
MWGKCMRLVYSSHCLVTKEHPEVSEKRLCDSSIVPATEQDPSADIYVFIMVEEAAWKQVSCKCMLLLNLFRSSSSNLQDGDTCFTARQMGRPSNARKHQGSQCPALPGLAVWRRQLKSSTYGSLTQQKKHIKEVDQIGYTDNVFMFVQKHLLPIPSQD

SEQ ID NO: 25992 - protein, 72 aa, Homo sapiens
LKSLSCKPWVRVCLRPDLPGLGAKCKVRSREVESAPAGARGSGPGPASRGRCAPPALEQPRFGDPGRRGGLR

SEQ ID NO: 25993 - protein, 74 aa, Homo sapiens
LSRVGSLNSCSWIPPMHLGAGVGPELSQSATPPGVFLLDAEATEKEAAQRMNPGEGARGRRVPAMWRHSLTGIV

SEQ ID NO: 25994 - protein, 28 aa, Homo sapiens
LLLLAFWVHIAFMSCTTHREDLQLHFRA

SEQ ID NO: 25995 - protein, 42 aa, Homo sapiens
MMKLSFLGCLFYVSSDLLFRGKKKKKICVDICLPQTKNRTGD

SEQ ID NO: 25996 - protein, 36 aa, Homo sapiens
LDIGFPASRMIRLRPQAWWHAAGSLSYLEGWSRRTT

SEQ ID NO: 25997 - protein, 71 aa, Homo sapiens
MCTYIRCPQPKPVGSSAPSVSLSALPCGSLQGASHTMLENRKGPGARGGGLSILENAVILWTPEGAAAPGI

SEQ ID NO: 25998 - protein, 43 aa, Homo sapiens
LFIANRVMVECIHMVPNSNKQQEVSLPPCLPPTWFSFSGGNLG

SEQ ID NO: 25999 - protein, 164 aa, Homo sapiens
LWLLVLRMLPLNVSYQLLMEAKTRDIKYFGVPSCITGIGHVQTKASSSAEEELQRSKSSAPRRLVPPPALRRPAWARAPPAGSRHRCRRSTVDSELPPVLWVALPPSLLKPPAVAVPLYPAWGGYLERRMRGFFPVGRTKGSTDDLKLGSREQTRLSCIQIRRQ

SEQ ID NO: 26000 - protein, 112 aa, Homo sapiens
LGGKDPPDPFSPCLYPFSTFLGGKNPPNPFSFTLSGKYRFSGGQERPDPFSPCLYPFSAFLGGKNPLTPSLRVSTLSFLLARLLHYGQPSTLHSSFSLILCSQELKTSSTHT

SEQ ID NO: 26001 - protein, 27 aa, Homo sapiens
MLLIILMYVLFTNSRMQSQKTSSDHYA

SEQ ID NO: 26002 - protein, 31 aa, Homo sapiens
MLSLLYSLTLLFFCCGIMKHKGPHQMPVPYY

SEQ ID NO: 26003 - protein, 31 aa, Homo sapiens
LLWPLSYALRLSITFPLLLISHSSRMRTVIS

SEQ ID NO: 26004 - protein, 49 aa, Homo sapiens
MVLREEVLPSSLTVIHLRSKLSPLGRGFKRFSDVPMAYSCSRTMKMRLL

SEQ ID NO: 26005 - protein, 43 aa, Homo sapiens
MVLREEVLPSSLTVIHLRRSLVVELVLLFAFFPSTSQNKSLFY

SEQ ID NO: 26006 - protein, 24 aa, Homo sapiens
MLAFGLIRAFLLSPYMTEDSRTKI

SEQ ID NO: 26007 - protein, 28 aa, Homo sapiens
LAFGLIRAFLLSPYMTEDSRTKCTIAER

SEQ ID NO: 26008 - protein, 34 aa, Homo sapiens
LFFVILCLPTFLSVARLKCSFKWIWTPQEDLLMV

SEQ ID NO: 26009 - protein, 122 aa, Homo sapiens
LFFFVCFSLVLFLRWSCSVTQAGVQWCDHGSLQPQPLGLKQSSSLRLLSRGPQALATMPRESPKWQVQKGRSPGRRKWSGHLLKEILTLVSSQCSSYFGFQLPQRSPFSAAPDCPIPPDFSQ

SEQ ID NO: 26010 - protein, 171 aa, Homo sapiens
VIPQSASGARGSSSPLGGRKPAAGCCCPLPCSEEKRLHNFVRERGSLLRRLLLLLPAAGLPLCWSRALEAEEGGWGAGPLGRALPPPPPGKGLASGQPGVRSPDEKGADQRQPSGPRLCSAPAPPRRSRPAAAGPATLFRKISPTTFPGQRLPGLGGHRGHRVGNLAPQVT

SEQ ID NO: 26011 - protein, 28 aa, Homo sapiens
LGLGKEIRLQVSEKILKRLLISETRKYT

SEQ ID NO: 26012 - protein, 92 aa, Homo sapiens
LLSSIASGMFKEMETTPGISRRKEFNTGDDLALREAAGCKVSSRCSCLQNSCGSPKIAHLPKPTCSPHCQRSTTVMTASLLPSKSHVSAPSE

SEQ ID NO: 26013 - protein, 52 aa, Homo sapiens [sequence omitted]

SEQ ID NO: 26014 - protein, 208 aa, Homo sapiens
VHRPQPPGDVPAPPCTDLSPRETCLPRRAHTSAPGRRACPAVHTPQPPGGRACPAVHRPQPPGDVPAPPCTHLVTVIHVQQEPRLPRLLKPPVLVLLGPSRERKTNISGCWAKDSRAAVCPERSGTPHLRRGSPTRYYTPRPHVKRVFGAPPLPEARSRNPTPCCRLTRKHVDATLTLATPGLTTDPKSPWAPPPHGSHGFYRGGRMK

SEQ ID NO: 26015 - protein, 68 aa, Homo sapiens
LPFCPLLFLFLPRTGMEWLKLHWQPTGVFGTTEDGSHTPEDGRTQGQKDLAHWGSDEAAMLTQTSLTI

SEQ ID NO: 26016 - protein, 101 aa, Homo sapiens
LDLAARRCALLGPAVVRVASGTLRNCSGCSRLLACGAEGRSQWPRKSDAARQAPPCSVPAAVAPRSPPPPELRWVTMEREAAACKASRHRGHPPIFSGNIL

SEQ ID NO: 26017 - protein, 79 aa, Homo sapiens
VKGSYGLTLTLMGVTSPASHRPRKSDAARQAPPCSVPAAVAPRSPPPPELRWVTMEREAAACKASRHRGHPPIFSGNIL

SEQ ID NO: 26018 - protein, 133 aa, Homo sapiens
LPRDSPVASQKLPRMAQHMRRLPISLSPRWEAMRAGILTSSSGPVALSRGTDWKQMWHKSPHAASLLTLRTSTLGTSRTKKTLSHMLAAVPIYDGCKFHLPAAVHEWKSTWDPLLTWRPTHPNAYLAAPVDVS

SEQ ID NO: 26019 - protein, 320 aa, Homo sapiens
LSRRLHRQGTRLPPSRQGTRLPPSRPHRECVRGDPWPAGGALGHSIRPVTAGSRCSIPPVPPSRLLPQPSSASAFAPRLLPSPSQSRREAGLGERVSPGSTVEARGAGAEPAQGCRRELQGWPGAHPLPGARERRGTLCWICVLSGHASASGLGTRRETQMWVISLWKLYPRPWEWRALGCEWRQDAPRAREREVERVPDGRGSEWEAAGLGEPRWGRRGAQGASCPLHLRLRELICFTLGRCRICACSHLTSWAVPEVTGRVFSDEVTHTSHHGMTVSRCHGRCVKIAPVVNWKLAVPGSASTGLMHLCSSFFIKIQSV

SEQ ID NO: 26020 - protein, 236 aa, Homo sapiens
MVARPQPPGRLRAPKVGLEAGTWPCGAGACGARLSRRLHRQGTRLPPSRQGTRLPPSRPHRECVRGDPWPAGGALGHSIRPVTAGSRCSIPPVPPSRLLPQPSSASAFAPRLLPSPSQSRREAGLGERVSPGSTVEARGAGAEPAQGCRRELQGWPGAHPLPGARERRGTLCWICVLSGHASASGLGTRRETQMCRICACSHLTSWAVPEVTGRVFSDEVTHTSHHGMTVSRCHGR

SEQ ID NO: 26021 - protein, 120 aa, Homo sapiens
LNLGLLASLLSRLSFQLYLMSWCRNREGGRVRPPFLPLSSPCSFPWPNSPFQNLLETQGSHTSFPLLANTSNTRDTSGVSKGDIPSVRNPCPLFPSQKTQRWAKGFLVPASRRPSMSPYQ

SEQ ID NO: 26022 - protein, 133 aa, Homo sapiens
LNLGLLASLLSRLSFQLYLMSWCRNREGGRVRPPFLPLSSPCSFPWPNSPFQNLLETQGSHTSFPLLANTSNTRDTSGERKTKQNKVWLAAQSHANDLHRQDPTKPLGAAAVPREDLPGSTNPHNLARHLITM

SEQ ID NO: 26023 - protein, 96 aa, Homo sapiens
LGEPTGEGKQLRREDEHKVGKSKNELEPKTRAGHSFTVSNFKDMSILARGADTFCHRTRHTHSSGIKKGEGRLREKLLPHPNKVNQLIGDKVDEPQ

SEQ ID NO: 26024 - protein, 93 aa, Homo sapiens
LRVQGKQLRREDEHKVGKSKNELEPKTRAGHSFTVSNFKDMSILARGADTFCHRTRHTHSSGIKKGEGRLREKLLPHPNKVNQLIGDKVDEPQ

SEQ ID NO: 26025 - protein, 90 aa, Homo sapiens
LGKQLRREDEHKVGKSKNELEPKTRAGHSFTVSNFKDMSILARGADTFCHRTRHTHSSGIKKGEGRLREKLLPHPNKVNQLIGDKVDEPQ

SEQ ID NO: 26026 - protein, 34 aa, Homo sapiens
MPGPPFLLCLWICLCGEGTSPTCRVKSLLPPQHC

SEQ ID NO: 26027 - protein, 24 aa, Homo sapiens
VLVNKVTFFLLHLTVVTGLCKCYH

SEQ ID NO: 26028 - protein, 20 aa, Homo sapiens
LVNKVTFFLLHLTVVTGLCK

SEQ ID NO: 26029 - protein, 152 aa, Homo sapiens
LELKSALLVFRLWTWTGTTPIDFPGSPPACNRWPSYLNCNITSSWISMLPAHSADFGPASLHSLMSEFLKINLSLFFSVHTTHTHKHTHAHTHPPLVLFLWRTLTNTAINDKIIYYPLEDIDAVISPNFKHRTGVKLRTIEHNEIKIECFTD

SEQ ID NO: 26030 - protein, 20 aa, Homo sapiens
LKLKLEQVILGLLLLMLHCC

SEQ ID NO: 26031 - protein, 11 aa, Homo sapiens
LRLLLLMLHCC

SEQ ID NO: 26032 - protein, 37 aa, Homo sapiens
LFFVLWYVWCERGILSGKKKKKTWVRCKVSPPHWDLC

SEQ ID NO: 26033 - protein, 38 aa, Homo sapiens
MCLGLLFCFMPLSLVVSSEEARFKVAADLCGFATGNSW

SEQ ID NO: 26034 - protein, 8 aa, Homo sapiens
LSLMFLFT

SEQ ID NO: 26035 - protein, 59 aa, Homo sapiens [sequence omitted]

SEQ ID NO: 26036 - protein, 50 aa, Homo sapiens
LCSLQTEGTVGRCSFCGASAGTHQQMCTPLDSCPSADACGNESGTQRNLK

SEQ ID NO: 26037 - protein, 18 aa, Homo sapiens
VLLLWGLSRDASANVHPP

SEQ ID NO: 26038 - protein, 42 aa, Homo sapiens
MTGLVPSGRGRDSRTFSLCHLRTRPEGSPAWTLKLDFQPPEL

SEQ ID NO: 26039 - protein, 54 aa, Homo sapiens
MTGLVPSGRGRDSRTFSLCHLRTRPEGSPAWTLKLDFQPPELVSISRLIEAGRG

SEQ ID NO: 26040 - protein, 20 aa, Homo sapiens
LKKMLPTLALPAARIWIKRD

SEQ ID NO: 26041 - protein, 23 aa, Homo sapiens
LVFYRKMLPTLALPAARIWIKRD

SEQ ID NO: 26042 - protein, 27 aa, Homo sapiens
LSAAMCLVSFTMIVRPPLPRGTAPSKT

SEQ ID NO: 26043 - protein, 23 aa, Homo sapiens
LSAAMCLVSFTMIVRPPLPRGTT

SEQ ID NO: 26044 - protein, 28 aa, Homo sapiens
LSAAMCLVSFTMIVRPPLPRGTPRDCQQ

SEQ ID NO: 26045 - protein, 133 aa, Homo sapiens
VLVLRRISVPAKTDHLESSTVSLYKSLRTSSNSPPPPSSGVCAQRGQSLEFLGRECGTAVSPSRHAYEPGDFFFKGALISCTSTLPRKGAQGTRRGLWSAVGLGQAPTVYPSGSGWLGLKGKVRVEGTSFSRR

SEQ ID NO: 26046 - protein, 177 aa, Homo sapiens
VLVRTAEIRLKTDRGLGSLRGGCTDRLCTGPGIQGLGSLIWGKVEKVLRRISVPAKTDHLESSTVSLYKSLRTSSNSPPPPSSGVCAQRGQSLEFLGRECGTAVSPSRHAYEPGDFFFKGALISCTSTLPRKGAQGTRRGLWSAVGLGQAPTVYPSGSGWLGLKGKVRVEGTSFSRR

SEQ ID NO: 26047 - protein, 173 aa, Homo sapiens
LVRTAEIRLKTDRGLGSLRGGCTDRLCTGPGIQGLGSLIWGKVLRRISVPAKTDHLESSTVSLYKSLRTSSNSPPPPSSGVCAQRGQSLEFLGRECGTAVSPSRHAYEPGDFFFKGALISCTSTLPRKGAQGTRRGLWSAVGLGQAPTVYPSGSGWLGLKGKVRVEGTSFSRR

SEQ ID NO: 26048 - protein, 50 aa, Homo sapiens
LPPCGQSPPQLRKRERLAARLRVGARDPASARSIQEVAITWKDGERRLPG

SEQ ID NO: 26049 - protein, 97 aa, Homo sapiens
LVYMLQKSLILMITTALFSHSITFVSLPSLLCQVTIPFHWQVCPCVKYEYPVFGLLHCLNKNAGLLMKIKCLGMDCSMMQNLLMHQQIISALLSDVI

SEQ ID NO: 26050 - protein, 37 aa, Homo sapiens
LAAHPDQGWGRKALALEALDVPDLEAKHRDVLAKTRH

SEQ ID NO: 26051 - protein, 29 aa, Homo sapiens
LEAGNTKSRCWQDNTPSKTSRRRSLPLSF

SEQ ID NO: 26052 - protein, 94 aa, Homo sapiens
LKIWTCFFVDEGMCTQEARTPGHLHERFEVVPHIPEGDVVSDDAHGHCQGGSRTAAAWAVYSAGRHALGASLKSSSEKVIKLHFQKQNKKVKTD

SEQ ID NO: 26053 - protein, 52 aa, Homo sapiens
LLLLLPSLHRAVSPRRKQMLTWKFYQASTPRVRVVRKSISCLELWLCHKQKS

SEQ ID NO: 26054 - protein, 78 aa, Homo sapiens
MLASPLLSIMIVSYLSTAPTQPCLLYSLWKYIMEYENTQNVYTVKITCGKIMKTVEERQNGKEEKREKQNNHFPAYLK

SEQ ID NO: 26055 - protein, 44 aa, Homo sapiens
MLASPLLSIMIVSYLSTAPTQPCLLYSLWKCKLIKEPSLRYYGI

SEQ ID NO: 26056 - protein, 36 aa, Homo sapiens
LSPRGVDSPEGLLCWLLLVTLNLLSAAENLPILDAS

SEQ ID NO: 26057 - protein, 29 aa, Homo sapiens
LLLRIYLFWMLHETIPLSKRALCTLQGWK

SEQ ID NO: 26058 - protein, 42 aa, Homo sapiens [sequence omitted]

SEQ ID NO: 26059 - protein, 73 aa, Homo sapiens
LHFLLNRMLLWTRTCGLQMHLSFLCHLVSDGVQPEGGTGRRPKGIRKGETRVFLLPSAFRGVSGREFAFLPWF

SEQ ID NO: 26060 - protein, 126 aa, Homo sapiens [sequence omitted]

SEQ ID NO: 26061 - protein, 42 aa, Homo sapiens
LSRLEGSSVITDHHSLERLGSSDPPISASQVAGAMGSCHCVG

SEQ ID NO: 26062 - protein, 69 aa, Homo sapiens
LCSASASFKKKMACLPRPDFLLPPAGTQMWNRGSGFNSADSRLHEGQPPQSPALSPEHLCGRNEFAIAG

SEQ ID NO: 26063 - protein, 54 aa, Homo sapiens
LCSASASFKKKMACLPRPDFLLPPAGTQMWNRGSGFNSAESYPGSYAAFSHPGS

SEQ ID NO: 26064 - protein, 69 aa, Homo sapiens
LCSASASFKKKMACLPRPDFLLPPAGTQMWNRGSGFNSAESKGSSGILSSVCGAAAVSVERLGALMARH

SEQ ID NO: 26065 - protein, 52 aa, Homo sapiens
LCSASASFKKKMACLPRPDFLLPPAGTQMWNRGSGFNSAALLGSTSCGLVHF

SEQ ID NO: 26066 - protein, 23 aa, Homo sapiens
MEITMNKRTLDREFLSYYGGTFT

SEQ ID NO: 26067 - protein, 101 aa, Homo sapiens
LHPSLCVQQSGVCWGSRMETLKRKHTAPWGVLRALAGHGRVPDSWRVARCRSCDHGTLRPAESLSLLARGVRACAGAAPGEELRVASSLQPARSRSSVVQI

SEQ ID NO: 26068 - protein, 54 aa, Homo sapiens
LHPSLCVQQSGVCWGSRMETLKRKHTAPWGVLRALAGHGRVPGRLLEGGQMPQL

SEQ ID NO: 26069 - protein, 32 aa, Homo sapiens
MGTSRGKKGDGAAGARDGGWERRLLVWGFFLG

SEQ ID NO: 26070 - protein, 17 aa, Homo sapiens
LLSLGAVRRAGAGGAQS

SEQ ID NO: 26071 - protein, 45 aa, Homo sapiens
VRTPTLLCLWLQLLRKAVTEPWKLGGKCERSGPSLAQKDTASHCP

SEQ ID NO: 26072 - protein, 69 aa, Homo sapiens
LPIRPSKGGHLLTWLLLVTDLVWPWELKRCCGLCSPQHSFWHYRHAVFTAEMERFSALSPPCPAPSSGL

SEQ ID NO: 26073 - protein, 53 aa, Homo sapiens
LHKEMVISLRTLLLLLGTCSVTTGPGAWRLGAVIRTENRTREPLWGESGRSIP

SEQ ID NO: 26074 - protein, 59 aa, Homo sapiens
LRPHFCALAPPLLLSLAVSRVLPGGPRQRPETPRTFLKIGMISFLKPRYSMLKMPGLTY

SEQ ID NO: 26075 - protein, 57 aa, Homo sapiens
LRPHFCALAPPLLLSLAVSRVLPGGPRQRPETPRLVMMELWLDFGSEHTTLGIWRPP

SEQ ID NO: 26076 - protein, 25 aa, Homo sapiens
MYLFIWIFIHILSNTLHNKSVNVFP

SEQ ID NO: 26077 - protein, 86 aa, Homo sapiens
VLMVGYYYCCFTLLLFLLSLEMLLREASKSADLGSFGWVHFNSNPLIQFSSTTSFQRTGTHGRRQVYAVCICTETLFEGNSWRILR

SEQ ID NO: 26078 - protein, 17 aa, Homo sapiens
MMHHFALQLPIFVCFLG

SEQ ID NO: 26079 - protein, 108 aa, Homo sapiens
MPGRISVCEKQRKRKTHVTPVNWSNQHKNSPGLKCFACQCPGRVLPVFISPLSCPNQVKIRYSFLVSASLKQHKKRQHSLQKGKGPCGLLWTGVGFNPQEALARGVES

SEQ ID NO: 26080 - protein, 30 aa, Homo sapiens
LGDMLLSLLILLCFGTGSHSRHPGWSAVAL

SEQ ID NO: 26081 - protein, 18 aa, Homo sapiens
LFLYLTSVFCMPLPFFCP

SEQ ID NO: 26082 - protein, 70 aa, Homo sapiens
LTTLYMIFSALYLAEVSSQCLLCAEDIEEQNRPVSFSWWSWDDGANTMTPTFKNSVLLPWIEIRYILPSL

SEQ ID NO: 26083 - protein, 62 aa, Homo sapiens
LPPSVLILQFMCLQMVPATASSGSAETPDAMRRRQATLPEFLTHRNYDRCVGGDKLCPWSCT

SEQ ID NO: 26084 - protein, 32 aa, Homo sapiens
LAPIRLLTALVVLLGAPRRGRCAAETHATPGS

SEQ ID NO: 26085 - protein, 148 aa, Homo sapiens
LVFLLFQFCHWSYPQEGHLSPEAKPALFWCCLRLMGKLVKSQSLVDKNCTCLKIEAMLSQVALINKELPAGSRFLRRNVQHPIRGPGGEGHKETSTYRERGHRTSSSWGLPRHDLGAGPCVKNAAFPQMECVPVTSESRFLSLGSIVV

SEQ ID NO: 26086 - protein, 69 aa, Homo sapiens
LSPSLSLTLCLATQAMWAIFTDSSHQPIWLPLPQNVTFIDTSLQVSGRRTRRMSSPHGQSQGSQGLPWQ

SEQ ID NO: 26087 - protein, 76 aa, Homo sapiens
LENIAGPAKPRKCGLSFVAHFLNFPEGAKFLPAPPCTGGCEERRSGFAARKDFRSDHNYRPLAPQLRPPHIKNSSV

SEQ ID NO: 26088 - protein, 43 aa, Homo sapiens
LFLFCFLRRSLAVAHAEVQWRGSRLIVTSASRVQVILLPQPPE

SEQ ID NO: 26089 - protein, 11 aa, Homo sapiens
LDPSQPSLVHR

SEQ ID NO: 26090 - protein, 216 aa, Homo sapiens
LCFGFLICKTGITVVSHSRVLRRLGDVTLAKCLAQSRSTNSCPFSFSLPESPHPTCQTPCPRSSGGRKQDRRSVSAPVRVFIAVCCQPDVVFRLHIYFYIFHRHTWFLSAVEKQRGWRVVDAESGECRRRSRMAQDSTEGRPRSLLSQLRSHRWFPITLCPQPGLLRHGSRPSREGLHVGMILRTAAAFLTTGSLHSPRLSHFLPRVHNQGKANRT

SEQ ID NO: 26091 - protein, 71 aa, Homo sapiens
VKTCSFAPEPSETMSPRGGMNNSRRAALKVVTFTMKVCSFTPEPARPRTHQKEETPNTFEHQKEQTPDALP

SEQ ID NO: 26092 - protein, 158 aa, Homo sapiens
MKGESTETRLPPSSPAPPATGSGWGRRALKSAPAAPALGRLRRLREADLKGPTRILRRYSQGPCKNPRPARLPSRRSPPKPERTRPPYNREGRFLPLSRGRMLLLSQPARLGKGCRPKLKERAQRMRERQENQPNQFLVKCSLPTGSQPSHKLPPNNT

SEQ ID NO: 26093 - protein, 133 aa, Homo sapiens
MFPNAPPQRSPGQGVGHSGKLRPSDRPTRILRRYSQGPCKNPRPARLPSRRSPPKPERTRPPYNREGRFLPLSRGRMLLLSQPARLGKGCRPKLKERAQRMRERQENQPNQFLVKCSLPTGSQPSHKLPPNNT

SEQ ID NO: 26094 - protein, 281 aa, Homo sapiens
LQPPRARTMEAGAGGAGAGGAGAGGTGSDTKGGGSPATPEDPRSPAKPAAPEDPQMPAQPALPQLPRRPRTLDEDGAPSEDGAAGGSEPAPEDAPAQAAGEAGPVSKAAAGGAPHIGFVGEPPPYAPPDPKAAPLLYPPFPQVPVVLQPAPSALFPPPAQLYPAAPTPPALFSPPAGAAFPFPVYNGPMAGVPGPATVEHRPLPKDYMMESVLVTLFCCLLTGLIAIVYSHEARAALGRGDLAQAEEASRKARSLVLFSLLFGVFVSTSWVIYVVVALYLP

SEQ ID NO: 26095 - protein, 155 aa, Homo sapiens
VIYMGAPRSLGPASAPAGCSNRLPLQQEGENLGTWPRGSQRLCVADLAGRGSLRAATADSTAAPTWEVAPRTECLTGPGLQEAWGAAVLPGQVPSASFTDSTVWGTDGTVWGMDGTVWATDGTIWGADGTIWGTDGTVWGADGTVWGWGMGAGAK

SEQ ID NO: 26096 - protein, 109 aa, Homo sapiens
LAFQGCCSLLDWALLALLEHVLRTIQEYHVQAKPAGEAPREQHKQVTAVLSSLVDMVEWRSSMDQGLERSLFVPTVERTPDCHPDHSHRCEGRGNPSLDPPQPCKTCSA

SEQ ID NO: 26097 - protein, 69 aa, Homo sapiens
LAFQGCCSLLDWALLALLEHVLRTIQEYHVQAKPAGEAPREQHKQVTAVLSSLVDMVECSCNHLSTLSP

SEQ ID NO: 26098 - protein, 92 aa, Homo sapiens
LAFQGCCSLLDWALLALLEHVLRTIQEYHVQAKPAGEAPREQHKQVTAVLSSLVDMVECQLTICTARPLGPAFLVLIVPAPRTPGVPVLTDK

SEQ ID NO: 26099 - protein, 86 aa, Homo sapiens
LEWGPRLALPSFLLGAVFGAGHLPPQPLLSCPAPCGGAGGGGHSCVCAFGVVLPVEAAHGGSDGAAFRGHPVLGMGQHVAHLDRAS

SEQ ID NO: 26100 - protein, 174 aa, Homo sapiens
LLPSLGWGRAPEEAAFPAGVGGPGTGSRHWNKGAGPSCPPGPSLAAGLPGRRAGSWAPVLWTRAALRAGTATFSTVAPSPPQEREPPLPDMSRSSRNIWTSKGHQEVAQQKRPRACFLYRWLAANIPKETCQARSASSRLSFHRFGRPRQGDHLPQKFETSLGNIVRPLSLQKT

SEQ ID NO: 26101 - protein, 63 aa, Homo sapiens
LRAGTATFSTVAPSPPQEREPPLPDMSRSSRNIWTSKGHQEHEQTKKSRIWTNKKKCMSARVS

SEQ ID NO: 26102 - protein, 89 aa, Homo sapiens
LRAGTATFSTVAPSPPQEREPPLPDMSRSSRNIWTSKGHQEVAQQKRPRACFLYRWLAANIPKETCQHEQTKKSRIWTNKKKCMSARVS

SEQ ID NO: 26103 - protein, 29 aa, Homo sapiens
LGLHGRAQMPGVRCSVHPGLRLQGLTLHG

SEQ ID NO: 26104 - protein, 115 aa, Homo sapiens
VSGTTVPTLGLIVLTVGSPRLPRSEDTVTSSTACPASDEPAYFTMNVQDVGDKDMNNSDKGCFRGTRLRFPAPASRRTQLCAQPCLPCLSTPTFLCASAHLGHPNFLQEERQVLG

SEQ ID NO: 26105 - protein, 38 aa, Homo sapiens
METVSPSATFEFIVVSLCVTLILSSCGGSGGPSARRIQ

SEQ ID NO: 26106 - protein, 59 aa, Homo sapiens
METVSPSATFEFIVVSLCVTLILSSCGGSGGPSARRIQRQAKHQQRPVAASPGGVSWDE

SEQ ID NO: 26107 - protein, 53 aa, Homo sapiens
LLQAPRDTRKTVSLLAFSVGRLMVWGKFSALGTSCLEIGSVLLEGHGGIETSL

SEQ ID NO: 26108 - protein, 55 aa, Homo sapiens
LFICLCLCLIFPRQIWNESWLGLVLVNKEEQVSNQILGIHCSGGAVCPLQKHVEI

SEQ ID NO: 26109 - protein, 48 aa, Homo sapiens
LTISACLFPDSSLCLLLTACPCEMLQNPALGLTESCCLHLGIWMALSK

SEQ ID NO: 26110 - protein, 25 aa, Homo sapiens
MDPSGPKMFKEKSAGLLLGKNFSSW

SEQ ID NO: 26111 - protein, 54 aa, Homo sapiens
LPSTYLSILALVSPTIGGLYFCTREDRPLLILDSNTDGSSPGEERGSPLSRASR

SEQ ID NO: 26112 - protein, 14 aa, Homo sapiens
LVQQMMSGKRRSQV

SEQ ID NO: 26113 - protein, 13 aa, Homo sapiens
LVLTTGCVLTLTV

SEQ ID NO: 26114 - protein, 69 aa, Homo sapiens
LVLFCLLLYPQHLALLPATSQCSIEAPRTNSHPEEMEHRSVQQLPSRVTLGFPVEEDCQHSIFSHTFRQ

SEQ ID NO: 26115 - protein, 85 aa, Homo sapiens
MAPLLANVCVKLTYCGPFLHNYGKENSDRKGPPRTLLGGMRARKRKTLVLGPFPRVISGSNAKMDTLSPACACAFALYGIPKPAA

SEQ ID NO: 26116 - protein, 129 aa, Homo sapiens
MSEFTGNLVSTCHFSPLLLLLFPCDVTAPILPSAINKSSLRPTQKPADISTMFTVQPAETDLWKFDLESEHSMYLVEEMSKQQSIQDVAWLLLTTYTKMWKQRNDLKLEFIFKLEAEHKSLKICHLAMW

SEQ ID NO: 26117 - protein, 11 aa, Homo sapiens
MTEPLIDVGRR

SEQ ID NO: 26118 - protein, 80 aa, Homo sapiens
MESCIFCRLLVCLLLVIGPRENAAGPGLVPGTTRIKTCWVPTTHVVVSSLHTLSLEHWDAAWSQEDDSVVHSSALVMHYA

SEQ ID NO: 26119 - protein, 102 aa, Homo sapiens
LCSRRIIPIELLQKRQHLTLSPRLECSGMITVHWSCNFPGSSDPPASASGVVGTTGMHYHTWRILIFCRDRQGLTKLPRLILNSWPRAIPRTQPPEVLGLQP

SEQ ID NO: 26120 - protein, 72 aa, Homo sapiens
LDTDTDKGECHVKTHTDTQRRRPCEDGVREWSCAATSQGMLGAIRNWKKQGRILLYKLQREYGPANTLISYY

SEQ ID NO: 26121 - protein, 244 aa, Homo sapiens [sequence omitted]

SEQ ID NO: 26122 - protein, 75 aa, Homo sapiens
LGLGSMSLWVAMFPVSSGCFQEQQETNKSLTLLRCSQRDTSPLMDGQTWAGYVSLNLPPLPQLPTTDTSDDTPGK

SEQ ID NO: 26123 - protein, 148 aa, Homo sapiens
VRTGAMLLPLFLLIHTGIGPSYSASDRAEPRPSPGGRLTARIWIKGVKEDGGTMQGAVDWGEGVEDAQDASLRAIRLQTNGIRHGIPWVVRPSLERQPLDRGWVSAILACPPPRCPGLRPERRPRMRSVRRGSTTSVAGQSQVEQGGC

SEQ ID NO: 26124 - protein, 24 aa, Homo sapiens
LLPLPVGLKAHHCSCKAKCAGLSS

SEQ ID NO: 26125 - protein, 172 aa, Homo sapiens
LTSQGSQQYRALTVAELTQQMFDAKNMMAARDPRHGRYLTAAAIFQGRMPMREVDEQMFNIQNKNSSYFADWLPNNLKTAVCDIPPRELKMSVTFIGNNTAIQELFKRVSEQFTAMFRRKAFLHWYTGEGMEEMEFTEAESNMNDLVSEYQQYQDATAEEEEFEEYAEEEVA

SEQ ID NO: 26126 - protein, 34 aa, Homo sapiens
VLAAAAEALAEAARTSGQDAWNRTCRRHHRCHHI

SEQ ID NO: 26127 - protein, 26 aa, Homo sapiens
MKASCVLCPKIWLPEGIAKERLWQSR

SEQ ID NO: 26128 - protein, 11 aa, Homo sapiens
LKIASLLSSKV

SEQ ID NO: 26129 - protein, 90 aa, Homo sapiens
LRMLLRTRNRHSRTSGHFVRFKKDASRFLSPFWRQIRSGRFFSLDLLRIPSNSYLERRRSALRILALTFNFRVLYIEGRVGQEDVTQAHS

SEQ ID NO: 26130 - protein, 79 aa, Homo sapiens
VLVGASMWVCSTLWRVRTPARQWRGLLPASGCHGPAASSYSASAEPARVRALVYGHHGDPAKVVETVIPGHTWQLRNVA

SEQ ID NO: 26131 - protein, 74 aa, Homo sapiens
LVGASMWVCSTLWRVRTPARQWRGLLPASGCHGPAASSYSASAEPARVRALVYGHHGDPAKVVECTALASKEPL

SEQ ID NO: 26132 - protein, 64 aa, Homo sapiens
LVGASMWVCSTLWRVRTPARQWRGLLPASGCHGPAASSYSASAEPARVRALVYGHHGDPAKVVE

SEQ ID NO: 26133 - protein, 88 aa, Homo sapiens
LILASPQHRSVPACSQKLPMRPQPGLTGPRSQHTLVQRDMAAGPGAHMRTHGSLCRPEPSLFSLQGAKKLCPQCNTITAPGDLRRIYL

SEQ ID NO: 26134 - protein, 7 aa, Homo sapiens
LSFKQIF

SEQ ID NO: 26135 - protein, 90 aa, Homo sapiens
VQRFLGGGAGLGGGREEQRFSRTSPPPLLSWPTFSRSVPGPGHPESTKSNSRSRTALVPFYVICTFKLTPSQTGPRRHHPHPSNITSFRV

SEQ ID NO: 26136 - protein, 77 aa, Homo sapiens
LPKPLSLTLALLLILQVYFEDEDRAELYRVPAKSTLLQVLQHQRYFVKALTPAFLVCVGSSPFCKNFLRGRKVYQIR

SEQ ID NO: 26137 - protein, 92 aa, Homo sapiens
VALREIWRYQKSTELLIRKLPFQRLVREIAQDFKTDLRFQSSAVTALALQEASEAYLVGLFEDTNLCAIHAKRVTIMPKDIQLVSRIRGERA

SEQ ID NO: 26138 - protein, 9 aa, Homo sapiens
LTWTIAFLL

SEQ ID NO: 26139 - protein, 123 aa, Homo sapiens
VYKVLKRVHPDTGIWCKAMGIMNSFLNDIFERIAGEASRLAHYNKRSTITSRRSRRPCACCCPASWPSTPCPRAPRRSPSTPAPSESLPGPGARSLPPSLPPRVAGCFVSKGSFQGHLTPLVK

SEQ ID NO: 26140 - protein, 75 aa, Homo sapiens
LGPARRPAEFPVPTPRGHFQCGVAEAWGPRGAGAAQRSGQGRAAGGSGRAMPRGRNESAAGVFPQRILHPSISRL

SEQ ID NO: 26141 - protein, 43 aa, Homo sapiens
VVGEGGGRVAAALAVSGCPAVSRGSARPGVFPQRILHPSISRL

SEQ ID NO: 26142 - protein, 72 aa, Homo sapiens
LLRQGRGGQRAAEAAVANMAQSRDGGNPFAEPSELDNPFQDPAVIQHRPSRQYATLDVYNPFETREVSYWRA

SEQ ID NO: 26143 - protein, 89 aa, Homo sapiens
MPTMRLLSFVVLALFAVTQAEEGARLLASKSLLNRYAVEGRDLTLQYNIYNVGSRLALPVHLDREESWLSGSLTGDSPLIFWTGQPLGS

SEQ ID NO: 26144 - protein, 114 aa, Homo sapiens
MKAQVLRDNSTMGYMAAKKHLEINPDHSIIETLRQKAEADKYKSVQDLVVLLYKTALLSSGFGLEDPQTHANRIYRMIKLGVGIDENDPTADDTAEEMSPLEGDNDTSCMEETD

SEQ ID NO: 26145 - protein, 89 aa, Homo sapiens
LGDKKEGEYIKLKVIGQDSSEIHFKVKMTTHLKKLKESYCQRQGVPMNSFRFLFEGQRIADNHTPKELGMEEEDVIEVYQEQMGGHSTV

SEQ ID NO: 26146 - protein, 74 aa, Homo sapiens
MATAGGGSGADPGSRGLLRLLSFCVLLAGLCRGNSVERKIYIPLNKTAPCVRLLNATHQIGCQCELRWIHVCGH

SEQ ID NO: 26147 - protein, 30 aa, Homo sapiens
MLAKGVFLIRLFFGPRERRKKEIVMEKGGL

SEQ ID NO: 26148 - protein, 21 aa, Homo sapiens
MVLLLVTFLSMDDLLGYGESA

SEQ ID NO: 26149 - protein, 55 aa, Homo sapiens
LGFEGAILRSVLLSLYICLISWVHGKHESVGTWDKKKTRHLHKENQVLKKVSSQL

SEQ ID NO: 26150 - protein, 12 aa, Homo sapiens
LMTHKKNITNLD

SEQ ID NO: 26151 - protein, 57 aa, Homo sapiens
MSSSLYVTRYKEFLEKLPAITPKCLVQSTLLFCFPVSTSSTTKSPASSASGLVISCL

SEQ ID NO: 26152 - protein, 76 aa, Homo sapiens
LRCALTMVGPAPRRRLRPLAALALVLALAPGLPTARAGQTPRPAERGPPVRLFTEEELARYGGEESFMDEEPPTMP

SEQ ID NO: 26153 - protein, 67 aa, Homo sapiens
LAALALVLALAPGLPTARAGQTPRPAERGPPVRLFTEEELARYGGEELLPCFLGRSAHLLGSEGSGV

SEQ ID NO: 26154 - protein, 50 aa, Homo sapiens
LENKSGPRNEGKQAIRQESLSKESAPPARTAHLCLLSLLEPSVHMPSPRD

SEQ ID NO: 26155 - protein, 114 aa, Homo sapiens
LRICSQVGLLLSLSCRAALPCFGVPEAVPRASPCFWLVLHWQGDGLGDLKDWCLTGSSSDQEQSPASASMQCLQPALDPPARRLCMPPICCAHPCCSCGPADNSPHEAPSSQLG

SEQ ID NO: 26156 - protein, 203 aa, Homo sapiens [sequence omitted]

SEQ ID NO: 26157 - protein, 26 aa, Homo sapiens
LQIRLRPFCEKQTSLGAGGRTPVSAC

SEQ ID NO: 26158 - protein, 89 aa, Homo sapiens
LAPLPFQRADRPRSASIPPARPGEDAQLGPRGRRGRGTASAGIFQEESEVASGCCPRRTPAAEGRGRRWSLGGRGQGCPPPEDGKLGPE

SEQ ID NO: 26159 - protein, 17 aa, Homo sapiens
LGFNTLGTLWVSLSSVA

SEQ ID NO: 26160 - protein, 44 aa, Homo sapiens
LSFFFFFFLDGVSLLSRLECSSAIIALCSLHLPGPNHPPASASE

SEQ ID NO: 26161 - protein, 79 aa, Homo sapiens
VRSAERLWRLPCFGPALLLLLLRSPVVSPALDRSDGGCQGGRSRGSAGRGRRSRRAQPPVPGRIRGIFCTGISFISWRQ

SEQ ID NO: 26162 - protein, 57 aa, Homo sapiens
LLLAFPYGLYLAFPYGLYSTYCLENVAHETPGYYQKERGRRSPLSPEPQHLLVWKGY

SEQ ID NO: 26163 - protein, 153 aa, Homo sapiens
MACGSSLGSSWVPLARRISRGFMEEAALGLSTRPASRVPALPGQLRVQSPCPLGSSLEATLPRESLGKVRPPGAGRGGGKEGEVPPVHVTAPLPQIAKDVKQFYDQALQQAVVDDDANNAKAVVKTFHETVRPRGARAGSRAPGTRRGVSRPG

SEQ ID NO: 26164 - protein, 46 aa, Homo sapiens
LSLVYFSGVTSVPSFKGGALSLWVICTDCAKQSICSPNVNCQGAAN

SEQ ID NO: 26165 - protein, 124 aa, Homo sapiens [sequence omitted]

SEQ ID NO: 26166 - protein, 134 aa, Homo sapiens
LEEDLGRRQVLWTITMGIQGGSVLFGLLLVLAVFCHSGHSLQCYNCPNPTADCKTAVNCSSDFDACLITKAELGYHYVAQAGRRQSSHFSLLKCWDYRCEPSHWPHCPYFNWGYKCITSVGSLSIAISTTSQPA

SEQ ID NO: 26167 - protein, 33 aa, Homo sapiens
MAQAPGARVPGPPEKEQVQSRQLAQKVSVGQAA

SEQ ID NO: 26168 - protein, 16 aa, Homo sapiens
MPKLFLTACETRASWM

SEQ ID NO: 26169 - protein, 119 aa, Homo sapiens
VPVPVPGGAMATGANATPLDFPSKKRKRSRWNQDTMEQKTVIPGMPTVIPPGLTREQERAYIGPLPLSPSTIARGSGLTPESSAPAKSWKRSGTTSSQRWLHSIRISSHLQITNLQQHV

SEQ ID NO: 26170 - protein, 25 aa, Homo sapiens
MQFLGDEEMVRKAMEAVAAQGKAKK

SEQ ID NO: 26171 - protein, 143 aa, Homo sapiens
VSSWFSQGHRGSDSFRAALATDSGHLSTAPLAPPVRQDRFSSGARSKSRLSLIKMTTSQKHRDFVAEPMGEKPVGSLAGIGEVLGKKLEERGFDKAYVVLGQFLVLKKDEDLFREWLKDTCGANAKQSRDCFGCLREWCDAFL

SEQ ID NO: 26172 - protein, 8 aa, Homo sapiens
LPLPHLRS

SEQ ID NO: 26173 - protein, 52 aa, Homo sapiens
VMPARTLAWSLVLHWRLLGAGPGGLEHGQCGRSPYLASFFLKAKSLLHHNQI

SEQ ID NO: 26174 - protein, 46 aa, Homo sapiens
LRRPLGSRAASVFAAPALRFTTLKNLPIPILSPCSNKSHYGDLETL

SEQ ID NO: 26175 - protein, 91 aa, Homo sapiens
MLEAAAAAATRPGGVLSPVAAAAATTAATAALPGPCSLWACPSWCSWWPRSRAIWGFWGPRTSRRKTPSLSAPTWTRSTASWSTSTPSTIL

SEQ ID NO: 26176 - protein, 106 aa, Homo sapiens
LARAQPLAGLVRVSVRARGLEKHAAVLSASRSLPRWLSLARSASPPGLCRRGRGGGAGRGEGRLLHSCGRGGIRASVTGLQKSPAAAPGPRQASRCPPGPAGMGTG

SEQ ID NO: 26177 - protein, 28 aa, Homo sapiens
LLAHHPILASLLLHLLSLPSPLPRKPPI

SEQ ID NO: 26178 - protein, 94 aa, Homo sapiens
VEDRMEEMCFGEATRMVWLPWVYGNLVSLNMVLSPSPPHPHRRDPSKIKWGDAGAEYVVESTGVFTTMEKAGVSAGGPAGGEADSALQRQDPGS

SEQ ID NO: 26179 - protein, 157 aa, Homo sapiens [sequence omitted]

SEQ ID NO: 26180 - protein, 100 aa, Homo sapiens
MAAAIFRGCMSMREVDEQMFNIQNKNSSYFVDWLPYNIKTAVCDIPPQGLKTSSTFIGNNTAIQELFKLVSEQFTAMFRCKAFLHWYRGEGMDETEFTEA

SEQ ID NO: 26181 - protein, 8 aa, Homo sapiens
LHPIPPSA

SEQ ID NO: 26182 - protein, 20 aa, Homo sapiens
MDPQRRFLVASLVAGVCIET

SEQ ID NO: 26183 - protein, 89 aa, Homo sapiens
LGGSAGHSPTLPPRSSSLLLLPPAPPPSCSPDEVRTGTYRQLFHPEQLITGKEDAANNYARGHYTIGKEIIDLVLDRIRKLVCFFSRIK

SEQ ID NO: 26184 - protein, 57 aa, Homo sapiens
LTAGEEPGPLPGGGARRVCVLILAIGARACEPVGVAAAGTIGLSRGRHVAFRGAGSI

SEQ ID NO: 26185 - protein, 54 aa, Homo sapiens
LPGGGARRVCVLILAIGARACEPVGVAAAGTIGLSRGRHVAFRGDDKTEPQRLK

SEQ ID NO: 26186 - protein, 61 aa, Homo sapiens
LPGGGARRVCVLILAIGARACEPVGVAAAGTIGLSRGRHVAFRGAFMGLSGMGFLFLIVNR

SEQ ID NO: 26187 - protein, 55 aa, Homo sapiens
LPGGGARRVCVLILAIGARACEPVGVAAAGTIGLSRGRHVAFRGVRIRASTAPFR

SEQ ID NO: 26188 - protein, 493 aa, Homo sapiens
LGRERSGCLRPFCLPRGQHRYLRAMSRQLTHFPRGERLGFSGCSAVLSGGIGSSSASFRARVKGSASFGSKSLSCLGGSRSLALSAAARRGGGRLGGFVGTAFGSAGLGPKCPSVCPPGGIPQVTVNKSLLAPLNVEMDPEIQRVRAQEREQIKALNNKFASFIDKVRFLEQQNQVLETKWNLLQQLDLNNCRKNLEPIYEGYISNLQKQLEMLSGDGVRLDSELRNMQDLVEDYKKRYEVEINRRTAAENEFVVLKKDVDAAYMNKVELQAKVDSLTDEIKFFKCLYEGEITQIQSHISDTSIVLSMDNNRDLDLDSIIAEVRAQYEEIALKSKAEAETLYQTKCADLETAIADAEQRGDCALKDARAKLDELEGALHQAKEELARMLREYQELVSLKLALDMEIATYRKLLESEECRMSGEYPNSVSISVISSTNAGAGGAGFSMGFGASSSYSYKTAAADVKTKGSCGSELKDPLAKTSGSSCATKKASR

SEQ ID NO: 26189 - protein, 116 aa, Homo sapiens
LTFTQKWNTDNTLGTQITVEDQLARVLKLTFDSSFSPNTGGKKAKIKTGYKWEHINLGCDMDFDIAGPSIQCALVLGYGGWLANYQMNFETAKSRVTQSNFAVGYKTDEFQLHTNV

SEQ ID NO: 26190 - protein, 101 aa, Homo sapiens
LLGALLWAVLWLLRDRQSLPASNAFVFITGCDSGFGRLLALQLDQRGFRVLASCLTPSGAEDLQRVASSRLHTTLLDITDPQSVQQAAKWVEMHVKEAGGM

SEQ ID NO: 26191 - protein, 104 aa, Homo sapiens
LALPTVRSVTFPQAYPLKRSKQRKYYYEAAFLAILEKNRQMAKERGLISPSDFAQLQKYMECESSCQAFSSGDPAPENPSSSSLHPLPPSFLSGFEQCAAQMCP

SEQ ID NO: 26192 - protein, 298 aa, Homo sapiens
MAAETLLSSLLGLLLLGLLLPASLTGGVGSLNLEELSEMRYGIEILPLPVMGGQSQSSDVVIVSSKYKQRYECRLPAGAIHFQREREEETPAYQGPGIPELLSPMRDAPCLLKTKDWWTYEFCYGRHIQQYHMEDSEIKGEVLYLGYYQSAFDWDDETAKVARVWDSGRKGSGHRLRALTRRGGSRLADLFLGAWWPLGQSFLGPGGTGHSFVSLGTQCHPSSLLSFSCPPFLPHVFSRPPSSIVLNATTARPMAMGPSATLMGGPGRPRFGSSVTRVQVSLGTTSIAWTSPCPALMC

SEQ ID NO: 26193 - protein, 19 aa, Homo sapiens
LLLRSDRGQWGTYARLLDY

SEQ ID NO: 26194 - protein, 114 aa, Homo sapiens [sequence omitted]

SEQ ID NO: 26195 - protein, 63 aa, Homo sapiens
VDFCFVILTLAVSPPARRRAWLLVAIRKQQPFHLSFLHSGICSRAKGGRVLKEGLMSSSFSNS

SEQ ID NO: 26196 - protein, 69 aa, Homo sapiens
VDFCFVILTLAVSPPARRRAWLLVAIRKQQPFHLSFLHSGICSRAKGGRVLKEGLMSSSFSNSCKLCVG

SEQ ID NO: 26197 - protein, 14 aa, Homo sapiens
LGRSSCLWIAVIVT

SEQ ID NO: 26198 - protein, 102 aa, Homo sapiens
LMPSKTEDPFCITELWIICGSLVISHLHSLLQSLNTYLGSSLPYLVKDGIQPDLYWSNLGFAVFSLCCHLLRGVLYALLALGITAGQACVLRYLPEVLISCA

SEQ ID NO: 26199 - protein, 141 aa, Homo sapiens [sequence omitted]

SEQ ID NO: 26200 - protein, 57 aa, Homo sapiens
LTAVGSGHSDADRGLNARWYGIQTLLISICSDPYLDCTSTLHPEDLNMLTGGCRFVF

SEQ ID NO: 26201 - protein, 127 aa, Homo sapiens
LSKSLLLVPSALSLLLALLLPHCQKLFVYDLHAVKNDFQPGTCVCSVCTILLLHTKSPSGTNSGSVVHHKQDIDLYIGTAAFHLWFLHLDCSHKWTYVRSVLRQQNVPGASGALHPQLDGKILFLDT

SEQ ID NO: 26202 - protein, 117 aa, Homo sapiens
VPPPGKNIKGCTMPPIHSLPSVTQMVEDVKGLHQATFTLSVAFLPLGKEGLPVAFPHSVVFVGIGSMQEHLPPPSPTSPHPIPVPSRVCLTAKSRSWSSLHLQSPFHDLGGLIQSPH

SEQ ID NO: 26203 - protein, 53 aa, Homo sapiens
LLHFQVSRSAFLLLSVSPSCQISVSLAGLLAVGGCVGGPYEDAQCSRSPGPAP

SEQ ID NO: 26204 - protein, 52 aa, Homo sapiens
MQSGPPPGLGRGRTPGPRAPGAGGLPASRVSVVAEPKPRSPWGRWRSRPWPT

SEQ ID NO: 26205 - protein, 122 aa, Homo sapiens
LGFPSLLPIWILWAPLRWPRFSFSLFTAVHKHYSLVQWQEFAGQNPDCLEHLAASSGTGSSDFEQLEQILEAIPQVKYICLDVANGYSEHFVEFVKDVRKRFPQHTIMDAVFQLLCLRQGMW

SEQ ID NO: 26206 - protein, 125 aa, Homo sapiens
VGAKMAAAAAATAAAAASIRERQTVALKRMLNFNVPHIKNSTGEPVWKVLIYDRFGQDIISPLLSVKELRDMGITLHLFLTNISILLLWKMICLYYVIKIRSLFHIVPLTGQISQTRKWKLLWTL

SEQ ID NO: 26207 - protein, 43 aa, Homo sapiens
VVAVFSAAVTVIVFASLAKTSALDQDGGWTAFLTFTGPGGADA

SEQ ID NO: 26208 - protein, 53 aa, Homo sapiens
LVVTAITCLSTVLSIDFKPSEIEVGVVTVENPKFRILTEAEIDAHLVALAERD

SEQ ID NO: 26209 - protein, 60 aa, Homo sapiens
LTKLEQEKELCHEKWKTPEKLFQRQESSRQAGLGKILPARPAECMTHNQHPRNVYRGINE

SEQ ID NO: 26210 - protein, 111 aa, Homo sapiens
LGGRSATPLQVGEVVPGYPASLARPRLLPPPPSRGGGNCWPRGLGNGPGPRPQVPGRLKLLKILNKFQLSISNWAYHWFLLLANRLLMKLIEELQNGLLGVFWEKQEFYSC

SEQ ID NO: 26211 - protein, 163 aa, Homo sapiens
LNTRRSTAVLRSIVGEVLKQLTEEKFIVKATNGPRYVVGCRRQLDKSKLKPGTRVALDMTTLTIMRYLPREVDPLVYNMSHEDPGNVSYSEIGGLSEQIRELREVIELPLTNPELFQRVGIIPPKGCLLYGPPGTGKTLLARAVASQLDCNFLKVKGRLFCTY

SEQ ID NO: 26212 - protein, 37 aa, Homo sapiens
LAAAAPVQTLTLPPKAQPSPNNPQPCTDVGCESLCLI

SEQ ID NO: 26213 - protein, 82 aa, Homo sapiens
MFAPAVMRAFRKNKTLGYGVPMLMDPELEKKLKENKISLESEYEKIKDSKFDDWKNIRGPRPWEDPDLLQGRNPESLKTKTT

SEQ ID NO: 26214 - protein, 31 aa, Homo sapiens
LCLLLLPSQILLTVVVSSALGILIHSGGWDG

SEQ ID NO: 26215 - protein, 84 aa, Homo sapiens
LRVGLDARAAAQRLNRCGPPRPPLPTLASAVSSLASPTFLLLCCLRFWSSAVLAARPEESPRPPRSRFPLARSRRDFGTVSPSG

SEQ ID NO: 26216 - protein, 139 aa, Homo sapiens
LQNLSQREMSGGRKPLIVFSAVGDTVAEDEVVCEIETDKTSVQVPSPANGVIEALLVPDGGKVEGGTPLFTLRKTGGKEVLLVVKLLLLRPSRLKLLLLQPQKQNLQQRQFLPLQHPYPLRCHRCPRPHSLLLANLCLQ

SEQ ID NO: 26217 - protein, 61 aa, Homo sapiens
VKKKSVRHSESLTSAAELRHVMTNLGEKLTDEEVDEMIREADIDGDGQVNYEEFVQMMTAK

SEQ ID NO: 26218 - protein, 49 aa, Homo sapiens
LSFFLLSPVLFILLLGSEESQGAIHRSMSQPEASSSSYDSSRTRKRVQK

SEQ ID NO: 26219 - protein, 22 aa, Homo sapiens
LAADLWCVLSRLSCAKIKEVRL

SEQ ID NO: 26220 - protein, 208 aa, Homo sapiens [sequence omitted]

SEQ ID NO: 26221 - protein, 112 aa, Homo sapiens
VPGRGGGMWGLAGGRLFGIFSAPVLVAVVCCAQSVNDPGNMSFVKETVDKLLKGYDIRLRPDFGGPPVCVGMNIDIASIDMVSEVNMNHHDSSMHDGPQEIPPGRAELHSGN

SEQ ID NO: 26222 - protein, 41 aa, Homo sapiens
LPIISPPLRMLIWLLFLIKEKLLNMENMKSCFQNQMGYTEN

SEQ ID NO: 26223 - protein, 174 aa, Homo sapiens
LLVWQCGEGEIPEKQAGGAMVEMADGYAVDRVITHLNNNFMFGQKLNVCVSKQPAIMPGQSYGLEDGSCSYKDFSESRNNRFSTPEQAAKNRIQHPSNVLHFFNAPLEATEENFFEIYDELGVKRPSSVKVFSGESERSSSGLLEWESKSDALETPGFLNHYLMKNPMVHTLTL

SEQ ID NO: 26224 - protein, 115 aa, Homo sapiens
LHDMLASLGKNPTDAYLDATMNEAPGPINFTMFGEKLNGTDPEDVIRNASACFDEEATGTIQEDYLRELMTTMGDQFTDEEVDELHREAPIDKKGNFNYIEFTSILKHGVKDKDD

SEQ ID NO: 26225 - protein, 85 aa, Homo sapiens
VSNPLALRLCAWSQSHHARVSSCSAHRSQHRWHSLCPESAAGPFCASFPSGSLSPPGPLPGVRGLPLPSVFYSCGAHPKVLKVAL

SEQ ID NO: 26226 - protein, 55 aa, Homo sapiens
VSNPLALRLCAWSQSHHARVSSCSAHRSQHRWHSLCPESAAGPFCASFPSVCSSA

SEQ ID NO: 26227 - protein, 395 aa, Homo sapiens
LGQLRAEPSSGCSGHDWEQPPPPPRESEPPLLHWQGPPEVGAAPGEGGRSPARGTGGGIAGPRRRGALQGAAAAADRAPGAARGGGSRWRLGIMRRGRLLEIALGFTVLLASYTSHGADANLEAGNVKETRASRAKRRGGGGHDALKGPNVCGSRYNAYCCPGWKTLPGGNQCIVPICRHSCGDGFCSRPNMCTCPSGQIAPSCGSRSIQHCNIRCMNGGSCSDDHCLCQKGYIGTHCGQPVCESGCLNGGRCVAPNRCACTYGFTGPQCERDYRTGPCFTVISNQMCQGQLSGIVCTKTLCCATTSMNVKLEHTTVANMLYVPIQQEASNVAAVPGGLEMALSALIWTNVPMEPICAASMQTARIPWDLTAVCARKDTQVMASLVQTLMSALRT

SEQ ID NO: 26228 - protein, 32 aa, Homo sapiens
VLLLFLLLFLLLLRAPVRPIRSAHDLCRNHCG

SEQ ID NO: 26229 - protein, 114 aa, Homo sapiens
LVLLHTAELGSGLWASHCHDGNGELDFSTFLTIMHMQIKQEDPKKEILLAMLMVDKEKKGYVMASDLRSKLTSLGEKLTHKEVDDLFREADIEPNGKVKYDEFIHKITLPGRDY

SEQ ID NO: 26230 - protein, 50 aa, Homo sapiens
LCPMSRVSSVAPCLRLTMLHCLHAPEADVCQGLGFRVPLPPAHPPCEMEL

SEQ ID NO: 26231 - protein, 196 aa, Homo sapiens [sequence omitted]

SEQ ID NO: 26232 - protein, 14 aa, Homo sapiens
LPLFLIIWDLIFFY

SEQ ID NO: 26233 - protein, 96 aa, Homo sapiens
LSHRGPLPLRSCMLLFLMHRLLPRCFSAHWVRICHSLQVSLTYCVKARQPSLTQTCFNRRWRVAAVSPPAQGCPQASFLGLTPRASACPALWWDVK

SEQ ID NO: 26234 - protein, 23 aa, Homo sapiens
LGHTVLLLLGSTLGCKGCSSTFL

SEQ ID NO: 26235 - protein, 34 aa, Homo sapiens
MCFDQLWRYKAGNLINQVLFVNGKDWKFTLKCLQ

SEQ ID NO: 26236 - protein, 22 aa, Homo sapiens
LAYLVRTAGPICQRPGRSQYPW

SEQ ID NO: 26237 - protein, 75 aa, Homo sapiens
LTPLSFSGHSISGQELLLPKEFWGDSCTCAGSCKCKECKCTSCKKSCCSCCPVGCAKCAQGCICKGASDKCSCCA

SEQ ID NO: 26238 - protein, 31 aa, Homo sapiens
MGCCSCCPVGCAKCAQGCICKGTSDKCSCCA

SEQ ID NO: 26239 - protein, 54 aa, Homo sapiens
MQSNKTFNLEKQNHTPRKHHQHHHQQQQLQPPPPPIPANGQQASSQNEGFDYLA

SEQ ID NO: 26240 - protein, 61 aa, Homo sapiens
MDASLEKIADPTLAEMGKNLKEAVKMLEDSQRRTEEENGKKLISRDIPGPLQGSCLRKKKT

SEQ ID NO: 26241 - protein, 75 aa, Homo sapiens
LWRAASGLQPCSGAGAEPAANPRSPRSLVPSLESTSTSVPPAPGTMATDSWALAVDEQEAAAESRTELPSPYSTS

SEQ ID NO: 26242 - protein, 109 aa, Homo sapiens
LETQGLTPVLSPVTLLLSPLVTIFVFQVDDINADKNISSAQIVGPGPKPEASAKLPSRPADNYDNFVLPELPSVPDTLPTASAGASTSASEDIDFDDLSRRFEELKKKT

SEQ ID NO: 26243 - protein, 40 aa, Homo sapiens [sequence omitted]

SEQ ID NO: 26244 - protein, 118 aa, Homo sapiens
LTVIFFFLLFEKVLSVWEVAMVPSHSAPPVCLCSAGMDLTVTGFQWWNTGYGPDSRSRPSSQKLGIDGLIVTNTTVSRPAGLQGALRSETGGLSGKPLRDLSTQTIREMYALTQGKFP

SEQ ID NO: 26245 - protein, 37 aa, Homo sapiens
MRQLESPQLVGRILPDIRTDGEQQKPCGAELLFTVSS

SEQ ID NO: 26246 - protein, 20 aa, Homo sapiens
LPGLFQTRDLSVNNAELMQT

SEQ ID NO: 26247 - protein, 182 aa, Homo sapiens
MAMQKIFAREILDSRGNPTVEVDLHTAKGRFRAAVPSGASTGIYEALELRDGDKGRYLGKGVLKAVENINNTLGPALLQKKLSVVDQEKVDKFMIELDGTENKSKFGANAILGVSLAVCKAGAAEKGVPLYRHIADLAGNPDLILPVPVSAATRPSQISPGQSQPRPARVGPPGKSTFQTSS

SEQ ID NO: 26248 - protein, 15 aa, Homo sapiens
MEPPGPVRVHRDKRR

SEQ ID NO: 26249 - protein, 98 aa, Homo sapiens
MQAARMAASLGRQLLRLGGGSSRLTALLGQPRPGPARRPYAGGAAQVSHRSLGKGVWERRSASAPAIGRDLPLGARYLPTAQSPKVGERASQGALGRN

SEQ ID NO: 26250 - protein, 58 aa, Homo sapiens
LRRTLLWSEAVGASSTRGGTGIPGSGEGGAGPGGGEGAMLEAMAEPSPEATRETAENN

SEQ ID NO: 26251 - protein, 91 aa, Homo sapiens
MSASQDSRSRDNGPDGMEPEGVIESNWNEIVDSFDDMNLSESLLRGIYAYGFEKPSAIQQRAILPCIKGETSQSQKTLWTVPDLGRVASGW

SEQ ID NO: 26252 - protein, 144 aa, Homo sapiens
LLTDRAASLRCDNLSEPPSLPIKARVIKSCKFLENDSNPICGVKKQTTTTRGLFSQGNTWLPVQVPGWRVQAQTLPPPKGQTVWKEVATPVRTHLSLRRNQRCTKALPTPTQRPARASHHARGCALEMPALPFSSCSSQAFTIY

SEQ ID NO: 26253 - protein, 10 aa, Homo sapiens
LRWSEPGEKG

SEQ ID NO: 26254 - protein, 56 aa, Homo sapiens
VVAAAFEQLRGPGPDGKRPAPDHPLLTAPHTGTRALLPVPTAAGPEVHALGSGHPP

SEQ ID NO: 26255 - protein, 84 aa, Homo sapiens
LLLCHWCVWFWFFQEESAEGEGHGLHHLHSHPAPAVRLPGRLRPLPAAAVGAREGLPAECCGGDHRRHLRAGQRMCKSLLCCGC

SEQ ID NO: 26256 - protein, 104 aa, Homo sapiens
LEDGGTLSDYNIQKESTLHLVLRLRGGMKIFVKTLTGKTITLEVEPSDTIENVKAKIQDEEGIPPDQQRLIFAGKKLEDGRTLSDYSIQKESTLHLVLRLRGGC

SEQ ID NO: 26257 - protein, 33 aa, Homo sapiens
VYRQLAVEPALFSRGLECKQPLGYRHRRPTSTG

SEQ ID NO: 26258 - protein, 27 aa, Homo sapiens
LRGVALLFWFIRGSPKKARGPRPGLLG

SEQ ID NO: 26259 - protein, 53 aa, Homo sapiens
LIERTERMKKTMASQVSIRRIKDYDANFKIKDFPEKAKDIFIEAHLCLNKLGP

SEQ ID NO: 26260 - protein, 29 aa, Homo sapiens
MLKYPTIICGFLLSMLSFLVLHVFLKLYY

SEQ ID NO: 26261 - protein, 87 aa, Homo sapiens
LFVPRLPASHATWMGKIHSKEHFKEKYAVDDVQDADEIAIVLTSQKPSVLLTLRGVNTDSSSVCREASFEGISKFKVNNTILHPEIV

SEQ ID NO: 26262 - protein, 80 aa, Homo sapiens
LGKKKEKKNNANSPASVSNPTVTKHAFGMEEELQREGSIETLSNSSGSTSGSIPRNFDGYRSPLPTNESQPLSLFPTGFP

SEQ ID NO: 26263 - protein, 346 aa, Homo sapiens
LGTLSAKMTARAFWLLCLIVGSSPEAPVAERKTSPPHSRKPDSRGCPSAEETPGPRAQPLLEAPQRPRAAEVAPAARAWPDPRRRKPPPPADNQASFREAARAPAGPPGPRLAQAENRASPRREPASEDAPRRARSRALRFPAARPPALATEGSAGHAHPNRPRAAALAPGPAPAPPPRFSLSFGLSPPQRDAEPGAEPCARACRSDLDEREAFCESEFAVNGIVHDVDVLGAGIRLVTLLVDRDGLYKMNRLYLTPDGFFFRVHMLALDSSSCNKPCPEFKPGSRYIVMGHIYHKRRQLPTALLQVLRGRLRPGDGLLRSSSSYVKRFNRKREGQIQGAIHTQCI

SEQ ID NO: 26264 - protein, 119 aa, Homo sapiens
LCARLVRTWYLFCEAAAEETPALAMADEKPKEGVKTENNDHINLKVAGQDGSVVQFKIKRHTPLSKLMKAYCERQGLSMRQIRFRFDGQPINETDTPAQLEMEDEDTIDVFQQQTGGVY

SEQ ID NO: 26265 - protein, 10 aa, Homo sapiens
LKTFMFLLLI

SEQ ID NO: 26266 - protein, 109 aa, Homo sapiens
LSASLSHLPGTRSGRSGPSGDCPGAAQGEGAPADTRAELRPQGPRVPASAPRPARGLSGPARLTPQVLGNGAELPGSSGREDTAEACRSSGRRPANWLRAPPGPASSRL

SEQ ID NO: 26267 - protein, 26 aa, Homo sapiens
LLGTAPLSCNKVETRAGAAFVLPSLC

SEQ ID NO: 26268 - protein, 62 aa, Homo sapiens
LFPTHDGEDPLQRVHEAPVLSQDGALPLDVGDYELLRQPVRQLIKKATFRMSFENLASKKVM

SEQ ID NO: 26269 - protein, 391 aa, Homo sapiens
MAETERNDEEQFECQERLKCQVQVGAPEEEEEDAGLVAEAEAEAVAAGWMLEFLCFSLCRAFPDGRSEDFCRTRNSAEAIIHGLSSLTAYQLRTIYICQFLTRIAAGKTLDAQFENDERITPLESALIIWGSIEKKHDKLQEEIQNLIKIQAIAVCMENGNFKEAEEVFERLFGDPNSYMPLKSKLLMIISQKDTFHSFFQHFSYNHMMEKIKSYVNYVLSEKSSTFLMKAAAKVVESKRTRTITSQDKLNGNYVEMETEASLDTRKRSHKNLFLSKLQHGTQQQDLNKKERRVGTLQSTKKKKESRRATESRIPVSKSQPVTPEKHQARKRQAWLQEEDKNLRSGVRKYGEGNWSKILLHYKFNNRTSVTLKDRWRTTKKLKLICSDSED

SEQ ID NO: 26270 - protein, 168 aa, Homo sapiens
MAQADIVLIRLAVMGQNLILTMKDHGFVVCAFNRTVSEVDDFLANEAKGTKVVGAQSLKEMVSKLKKPQRIILLVKAGQAVDYFIKKLIPLLDIGDIIIDGGNSEYRDTTRRCQDLKAKGILFVGSGVSGGEEGAWYGSLLTPGGNKEAWPHIKTIFQGVAAKVGTLL

SEQ ID NO: 26271 - protein, 183 aa, Homo sapiens
VGDEGAGHFVKMAHNRIEYGDMQLICEAYHLMKDVLGMAQDKMAQAFEDWNKTELDSFLIEITANILKFQGADGKHLLPKIRDSAGQKGMGKWTTISALEYGIPVTLIGEAVFAWCLSSLKDGRIQASKKLKGPQKFQFDGDKKSFLEDIQNVPLCFQDHLLCSRLYAAKAGSHRVWLDPQLW

SEQ ID NO: 26272 - protein, 98 aa, Homo sapiens
LKQPPLGASRLGRHASACRLGPHWPHHAEARPRLRGRPLRGERVGAKGKLRPGGAVWGTGRGRGNRRPTELLLSDQPRAPIITAPRFQAPRTTVPGMP

SEQ ID NO: 26273 - protein, 32 aa, Homo sapiens
LPGPLLLLLSPAPAAPTRRPTSSWCAEVMFAP

SEQ ID NO: 26274 - protein, 69 aa, Homo sapiens
MPGLCVCSFWVLTVSWLVCQKFPELKFKYVEEEQPEEFFIPYVWSLVYNSAVGLYWNPQDIQLFTMDSD

SEQ ID NO: 26275 - protein, 109 aa, Homo sapiens
LGVWSLAAFSVASLFSRRLLASAPTRPGLEPSRGRAAGRTGAGSVPAETWKHGGLSRCAPPGLRRRQRLLLTPLPPSHPSAGPWSWSRSPSRLRQVVFWKCRFKDKLSA

SEQ ID NO: 26276 - protein, 98 aa, Homo sapiens
MVTAHFRFSEDRKALTGSFEESLRGIEASGIGSKLPWKETQAGLLHDERSHQREQSSQPNLRHQTCDGAILDSSPQPTPCGAEANPLHGVLPELQTCE

SEQ ID NO: 26277 - protein, 180 aa, Homo sapiens
LMLALPLVLTTDLAGLAPLLCVGRPHPVTGALFSRIIQQLVNGIITPATIPSLGPWGVLHSNPMDYAWGANGLDAIITQVQRGHGPECLLGEGWAAHPWELPHCLDPRSPTKVKGDAGTASTLWRAQGAAPAFLLPFLSLGNFGGSPVFTRNVVAKPRGGLAHSHMVRRPRGPSSREVAP

SEQ ID NO: 26278 - protein, 57 aa, Homo sapiens [sequence omitted]

SEQ ID NO: 26279 - protein, 68 aa, Homo sapiens
LCSHMFSLSLSLSLSLSLSLSLSQAGHHSVISSNKTSQVPKTFNSKRNPPSPRQKRRSHRPDGVEWTL

SEQ ID NO: 26280 - protein, 67 aa, Homo sapiens
MRGKIQHYLFFYLCHVGCGILSSGSDDGTSCCQPLKPSCNQSGAIQPGTEPTEPIHLSPTSGALLAG

SEQ ID NO: 26281 - protein, 214 aa, Homo sapiens
MGRRPARCYRYCKNKPYPKSRFCRGVPDAKIRIFDLGRKKAKVDEFPLCGHMVSDEYEQLSSEALEAARICANKYMVKSCGKDGFHIRVRLHPFHVIRINKMSSCAGADRLQTGMRGAFGKPQGTVARVHIGQVIMSIRTKLQNKERVIEALRRAKFKFPGRQKIHISKKWGFTKFNADEFEDMVAEKRLIPDGCGVKYIPNRGPLDKWWALHS

SEQ ID NO: 26282 - protein, 49 aa, Homo sapiens
LCGPVTCRYWRATAKMPGTPGSLEMVYVLIFLKTFGQSRAWKILFKKYY

SEQ ID NO: 26283 - protein, 39 aa, Homo sapiens
MGHKIIFGLGKRVVVPHGCACWEKPWRFTARRKAWGFQR

SEQ ID NO: 26284 - protein, 23 aa, Homo sapiens
LVPSRDRAVGDRTEQSVTGHSGW

SEQ ID NO: 26285 - protein, 57 aa, Homo sapiens [sequence omitted]

SEQ ID NO: 26286 - protein, 33 aa, Homo sapiens
LSMSFLFTIPVFFTFSLLEGHSSGWRGPDFRRY

SEQ ID NO: 26287 - protein, 89 aa, Homo sapiens
LPESGLWTLWAHDSSQLCFLSSWYWDLVKESLSSYWESAKTAAQNLYEKTYLPAVDEKLRDLYSKSTAAMSTYTGIFTDQVLSVLKGEE

SEQ ID NO: 26288 - protein, 43 aa, Homo sapiens
LLSPFVAAMDNSGKEAEAMALLAEAERKVKNSQSFFSGLFGGH

SEQ ID NO: 26289 - protein, 43 aa, Homo sapiens
LLSPFVAAMDNSGKEAEAMALLAEAERKVKNSQSFFSGLFGPF

SEQ ID NO: 26290 - protein, 68 aa, Homo sapiens
LLSPFVAAMDNSGKEAEAMALLAEAERKVKNSQSFFSGLFGPHPDPTERIPKCVAVGLWFDEMSTSCG

SEQ ID NO: 26291 - protein, 41 aa, Homo sapiens
LLSPFVAAMDNSGKEAEAMALLAEAERKVKNSQSFFSGLFG

SEQ ID NO: 26292 - protein, 168 aa, Homo sapiens
LRGSRLSQLLTVFPSLQLYRFLARRTNSTFNQVVLKRLFMSRTNRPPLSLSRMVSGWSREHGRPGSRWVLSVWKGGRTWSSGSNQGIKGLSQPVASVELGLLVGTECPWAVGKSPGPPLLLFVRWRCPGGFRRLPQVITEFYVKGSAEGGPIEQSAFFFLSGAFPSWT

SEQ ID NO: 26293 - protein, 81 aa, Homo sapiens
MRKPLARWSGEAGGQEPRTACPRPREHSRAHPPCTTNGSAWSCVLSTPSTTFCSSSSLARRLPMRSARGPCPSWPCPRYWG

SEQ ID NO: 26294 - protein, 15 aa, Homo sapiens
MGFFLFYLPVAVLPI

SEQ ID NO: 26295 - protein, 106 aa, Homo sapiens
MPLQCLPGVAMAAAGSPAAPRFPLASPSCSRYIPPAPASPTTPLASRMGRVPAVAVAPHRRTPTPSIATHAPGETARWASPLAAQPPVPYPQPHSPARPPGPSQSL

SEQ ID NO: 26296 - protein, 57 aa, Homo sapiens
LGLTRPCSRGPLLFIYLFSVGASECARALATRRGGGGGRAREKGELEPGSKRRVTCR

SEQ ID NO: 26297 - protein, 361 aa, Homo sapiens
MATPAVPASAPPATPAPVPAAVPASAPASVPAPTPAPAAAPVPAAAPASSSDPAAASATTAAPGQTPASAQAPAQTPAPALPGPALPGPFPGGRVVRLHPVILASIVDSYERRNEGAARVIGTLLGTVDKHSVEVTNCFSVPHNESEDEVAVDMEFAKNMYELHKKVSPNELILGWYATGHDITEHSVLIHEYYSREAPNPIHLTVDTSLQNGRMSIKAYVSTLMGVPGRTMGVMFTPLTVKYAYYDTERIGVELIMKTCFSPNRVIGLLSDLQQVGGASARIQDALSTVLQYAEDVLSGKVSADNTVGRFLMSLVNRVPKIVPDDFETMLNSNINDLLMVTYLANLTQSQIALNEKLVNL

SEQ ID NO: 26298 - protein, 261 aa, Homo sapiens
MTRRGFSRAGAAQRSTRPAAEPQPPAARALQPRPGVPGPLRCREYLQPPAPRREAEGLSHQGSEVGAESGARPKERGAEPELGRLWLRTVSSWRLGWHFDFGVAEKPGVKMTERFDCHHCNESLFGKKYILREESPYCVVCFETLFANTCEECGKPIGCDCKVPARWSTRAAAGMRPASSATAASSQLEPRVSSPKTIRISVCPAMRNNMPCSAFSAKSPSPREGSLTGSSPGTRSASCAPPAGSSCLGSASQLAMTLPTA

SEQ ID NO: 26299 - protein, 88 aa, Homo sapiens
VSWALSVLGRAGAMAPVLAALAHVLCPYMAPGLCREPIRLLIAILEPPGAMAVRRLPSAFGAVLAIKNFLERQSAKEGTGDSERQMFW

SEQ ID NO: 26300 - protein, 11 aa, Homo sapiens
VCTSLGMEGNK

SEQ ID NO: 26301 - protein, 117 aa, Homo sapiens
LGAGPRGGQAGGGAGARADLRASAAIADCAVPSPHPLHALLGRVELGGVGSLSLRGTASSGAGPPVRRDVRRGDSSVSPRPRPWRWAAAGPDRSAHGAATTPSRGRKARGAEFFTSF

SEQ ID NO: 26302 - protein, 31 aa, Homo sapiens
LAFLCLCLAASMVDLKCLGMNSTLLQPSIKE

SEQ ID NO: 26303 - protein, 242 aa, Homo sapiens
LGDPRPLPPSVPFLRKPPRHPAPPAGARRACAPRRDVRTAARTPDVRQLQASRRGIAVASWCSPRWFAGEEMAFVKSGWLLRQSTILKRWKKNWFDLWSDGHLIYYDDQTRQNIEDKVHMPMDCINIRTGQECRDTQPPDGKSKDCMLQIVCRDGKTISLCAESTDDCFRLMAMGHTVVRTRQELKLSTLRMGRRMPCPTSTHMQDFMDSSLLTKSSFESAIETTTATWHWACWQEQPRAWP

SEQ ID NO: 26304 - protein, 196 aa, Homo sapiens
VRQLQASRRGIAVASWCSPRWFAGEEMAFVKSGWLLRQSTILKRWKKNWFDLWSDGHLIYYDDQTRQNIEDKVHMPMDCINIRTGQECRDTQPPDGKSKDCMLQIVCRDGKTISLCAESTDDCLLMAMGHTVVRTRQELKLSTLRMGRRMPCPTSTHMQDFMDSSLLTKSSFESAIETTTATWHWACWQEQPRAWP

SEQ ID NO: 26305 - protein, 56 aa, Homo sapiens
MSASQASAAAAAAGPCARQGGLGFGLPPVPWKRARDQRGSSSRGGGSSASLSSPSA

SEQ ID NO: 26306 - protein, 19 aa, Homo sapiens
LAGLGSLTAESLRVCGGGR

SEQ ID NO: 26307 - protein, 45 aa, Homo sapiens
LELLICCAIAIFPRAALSLDLAFQNCNSKMCKTGYSLLCCQGTWI

SEQ ID NO: 26308 - protein, 213 aa, Homo sapiens
LISLSFPHLSPFSIPQNRHRHHGLFSMSCWVHLPDGVAAGQRGSSLPRWGGQADAPPTSLPDGIAGRAGADPPPPSPTGRLAGRGLTPTPPSRTGRLPGGGAPHFSDGVAAGRRRSSLPRQGGCRAEGLLTSQTGQLRAEGLLTSQTGWPGREAPHIPDGGAGQRRSPHLRRWAAGQRRSSLHPRRGGGRAEAVISAPWGAKAGGWEAEAVAS

SEQ ID NO: 26309 - protein, 14 aa, Homo sapiens
LSFSQCTLLLLYYL

SEQ ID NO: 26310 - protein, 39 aa, Homo sapiens [sequence omitted]

SEQ ID NO: 26311 - protein, 124 aa, Homo sapiens
VPSARTLRSPEQLLEGNRGAAPGIRLGPLALLCGEGAGPPAGPEPSGSAPSPVPPPRRLLWLLWGFAGAGDPRSGRHAGIAAAVGAAARRARGRGHLPGLHPEPAQRHLGGGAVRPRPAPTWRL

SEQ ID NO: 26312 - protein, 403 aa, Homo sapiens
VPAELQQPVSGAPQPPRALRPPASRMAGMALVMRLLELFQGRIMRQKQSMEQLVVFIWVLPTPVWQLWKVNKQRCWRMPKVPELPLQLWPLQQMVSDLLACQSSNRLSPTQTMHSMLPNVSLSSYPEVQKDIKNIPFKIVCASNGDAWVEAHGKLYSPSQIGAFVSMKMKETAENYLGHTAKNAVIAVPAYFNDLQRQATKDAGQISGLNVLRVINEPTAAALAYGLDKSKDKVIAVYDLGGGTFDISILEFQKGVFEVKSTNGDTFLGGEDFDQALLQHIVKEFKRETGVDLTKDNVAFQRVWEAAEKAKCELSSSVQTDINLPYLTMDSSGPKHLNTKLTHAQFEGIVTDLIRRTIAPCQKAMQDAEVSKSDIGEVILVGGMTRMPKFNRLCRTFFGRAPK

SEQ ID NO: 26313 - protein, 54 aa, Homo sapiens
MTVTVVLGLMFFCLAVLWAEVVKRPSSQRALMNAVSSSCSPHPITNRLQFFGFF

SEQ ID NO: 26314 - protein, 40 aa, Homo sapiens
MEDPDPEVMAKVKVLFVRNLANTVTEEILEKAFSQFGKLE

SEQ ID NO: 26315 - protein, 35 aa, Homo sapiens [sequence omitted]

SEQ ID NO: 26316 - protein, 9 aa, Homo sapiens
LLLVLSLWG

SEQ ID NO: 26317 - protein, 28 aa, Homo sapiens
LDHSGKLCWLGVGFCLPWGTLLSVDHTS

SEQ ID NO: 26318 - protein, 61 aa, Homo sapiens
LKEKYEKDIAAYQAKGKPEAAKKGVVKAEKSKKKKEEEEDEEDEEDEEEEDEEDEEDDDDE

SEQ ID NO: 26319 - protein, 34 aa, Homo sapiens
VPVGVLVLLSLLQGLGPPELLRAPLRLCFVTRDP

SEQ ID NO: 26320 - protein, 19 aa, Homo sapiens
LGFFILFSVCETLTAHEAA

SEQ ID NO: 26321 - protein, 59 aa, Homo sapiens
MRQSLRELWQHQVTVPEVNRREKSLLSAVRPVSCRREYSQRSLWPSRTTLPPMRPSSVF

SEQ ID NO: 26322 - protein, 111 aa, Homo sapiens [sequence omitted]

SEQ ID NO: 26323 - protein, 70 aa, Homo sapiens
LILDPMLKRQLLYKACSFCDDGRSLRDKSHYANMAQDSIIQHLLTFNWPKSVKVSGAEKNILPEKEGKSE

SEQ ID NO: 26324 - protein, 88 aa, Homo sapiens
LIVSVYLFTHHLSLFIFLSSIGDFCCDVIVCRGCGNQNFAWRTECNQCKAPKPEGFLPPPFPPPGRCRFHECPLSFLVLNLFSYLWAW

SEQ ID NO: 26325 - protein, 178 aa, Homo sapiens
VDPEKAPSLTRQSQNPPSLTAPLGMPSACSCLPCGPAPEAAIILAGPPTALTVLPKGTGLKKSKRLLLESLMRRRIAHLKWGLPRRILESYFLFNFLGSCSLTLAGARLSGLNTGQELQAQQERYCEAQGSPPGLKSPERFQRVQRPDRKSSKLPIQARALERNRPHMSEPIKHFHPA

SEQ ID NO: 26326 - protein, 32 aa, Homo sapiens
LLFPPALQILFPRGMCLLPGGSKVGRQGRGGG

SEQ ID NO: 26327 - protein, 30 aa, Homo sapiens
LQQENFHLALLALILTGHQTRGTEGREDAR

SEQ ID NO: 26328 - protein, 36 aa, Homo sapiens
LLLIKTFPLKLASGLISLFQESLWLVGFQYAPVPDC

SEQ ID NO: 26329 - protein, 93 aa, Homo sapiens
LRSASAFAGRRREARAPRRTSPQPPAARAALQRRRGGRASTHWSATALRPPPRHAYWPERRRSPGRRWRRPSLAPALKRRRGSGRLPAPRPSG

SEQ ID NO: 26330 - protein, 105 aa, Homo sapiens
LTIGFHLARTFYVALLLWPMCCILCPQCATGPQRNVCLSNHGSGAVWQECKSGWRPGSPPGALHPPSRRTQQHDALRRSHCVQAPHLPGTALLRVPPSRNEGVHP

SEQ ID NO: 26331 - protein, 79 aa, Homo sapiens
LGVVGLRGCHGARGQQTEDTVVTKTRLLPWKSPERVKGDSHITPEIHDSWISPGRGRPRCGSSGEVQLNVEFGGGYLDL

SEQ ID NO: 26332 - protein, 655 aa, Homo sapiens
LADTGATMKPPRPVRTCSKVLVLLSLLAIHQTTTAEKNGIDIYSLTVDSRVSSRFAHTVVTSRVVNRANTVQEATFQMELPKKAFITNFSMIIDGMTYPGIIKEKAEAQAQYSAAVAKGKSAGLVKATGRNMEQFQVSVSVAPNAKITFELVYEELLKRRLGVYELLLKVRPQQLVKHLQMDIHIFEPQGISFLETESTFMTNQLVDALTTWQNKTKAHIRFKPTLSQQQKSPEQQETVLDGNLIIRYDVDRAISGGSIQIENGYFVHYFAPEGLTTMPKNVVFVIDKSGSMSGRKIQQTREALIKILDDLSPRDQFNLIVFSTEATQWRPSLVPASAENVNKARSFAAGIQALGGTNINDAMLMAVQLLDSSNQEERLPEGSVSLIILLTDGDPTVGETNPRSIQNNVREAVSGRYSLFCLGFGFDVSYAFLEKLALDNGGLARRIHEDSDSALQLQDFYQEVANPLLTAVTFEYPSNAVEEVTQNNFRLLFKGSEMVVAGKLQDRGPDVLTATVSGKLPTQNITFQTESSVAEQEAEFQSPKYIFHNFMERLWAYLTIQQLLEQTVSASDADQQALRNQALNLSLAYSFVTPLTSMVVTKPDDQEQSQVAEKPMEGESRNRNVHSGSTFFKYYLQGAKIPKPGDKVGGGGRGD

SEQ ID NO: 26333 - protein, 8 aa, Homo sapiens
VLLGHRQT

SEQ ID NO: 26334 - protein, 327 aa, Homo sapiens
LRKLFIGGLSFETTDDSLREHFEKWGTLTDCVVMRDPQTKRSRGFGFVTYSCVEEVDAAMCARPHKVDGRVVEPKRAVSREDSVKPGAHLTVKKIFVGGIKEDTEEYNLRDYFEKYGKIETIEVMEDRQSGKKRGFAFVTFDDHDTVDKIVVQKYHTINGHNCEVKKTLSKQEMQSAGSRRGRGGGSGNFMGRGGNFGGGGGGGSRGSYGGGDGGYNGFGGDGGNYGGGPGYSSRGGYGDGGPGYGNQGGGYGGGGGYDGYNEGGNFGGGNYGGGGNYNDFGNYSGQQQSNYGPMKGGSFGGRSSGGPYGGGYGSGGGSGGYGSRRF

SEQ ID NO: 26335 - protein, 97 aa, Homo sapiens
LGSPGDGEALFGPPSAALTPQLCRRRRACPRSGARPHIVGAHAGRLRKTVEAGNGTTALLPRLFVVRFGWFLKVSEPPRKSWGRRRQTLEFFLCKSL

SEQ ID NO: 26336 - protein, 166 aa, Homo sapiens
LTTARREPAFRCRHIPGTRLRALQSIWGGRRRSRPLSLGCRRARRCQEAALEAPRLAHSARPSAGAGALAATLLIWGQSRNPVTRLRPNPRPRPPAAAKASSPAPGARATPVARAFQSRLQQKLSITSNWVVERIHLRRLLLLQGLSSLHSMANSSAAAEALLEAS

SEQ ID NO: 26337 - protein, 33 aa, Homo sapiens
LKLEETCSECKKLPCLRSPRKEPSEPATESWSL

SEQ ID NO: 26338 - protein, 44 aa, Homo sapiens
MVADKEVQTRTLLLSSLWIVCCLHLDSLISKNILSMQLGDIYRR

SEQ ID NO: 26339 - protein, 144 aa, Homo sapiens
LAFPMLAAPLAAAALSPPPTPRSRRLSRGGENDRGAVAGCPQRDGRCLPGRSGFVLGEQHGRLHCRRLLVVQMRLDQDGLPVLLPAGCLHLGIHHRLPGQQRGHLDVRLPHEALERHLRVHVQFGSGRLLVRADSASPDLLLLQ

SEQ ID NO: 26340 - protein, 23 aa, Homo sapiens
LAPRHTPPASSPALLPGGLLQAL

SEQ ID NO: 26341 - protein, 66 aa, Homo sapiens
LLLLHSALFWRLAPLRCRLLLDQASFSTSARGADPSGTLPPRLVLSPSPPRLRPWPRWLCATETPR

SEQ ID NO: 26342 - protein, 138 aa, Homo sapiens
LPLLALPARSRLLGCLWLGSAILSPTLGHCSASLPAGCPRSAPGPGEPSGRASLVVVEALAIINDRGYNDFAVSAGSHHALLLAETRDAFPAVHQLGSMELLLPHRRGEDHREVQPGRREDGEGQGSRDHAERSTRGA

SEQ ID NO: 26343 - protein, 122 aa, Homo sapiens
VATKSCSGSRRDRAGSGQGGTPRTARGQRGQKVGRRKKGRRHLGTGARAAGSEVCGGPPPGPGHSRRTSLAEVWLQLPGRRRWLRAPRRAGAERAPLPLRAGFCVWHLLLMLRLATYCGGRC

SEQ ID NO: 26344 - protein, 13 aa, Homo sapiens
LVSRLVLIVLNFQ

SEQ ID NO: 26345 - protein, 74 aa, Homo sapiens
LFRSPEPALLWLVLMRTRISAPVSPCQRPCEASQCSRDPRRRAQKMEKEPGPEGGCRSESACGARRQRRVGVLA

SEQ ID NO: 26346 - protein, 55 aa, Homo sapiens
LHSLSARYHDFYLAPARLSTVLACSKRCLLQLGSWLQSCLLPTLGNSSQDSYTQM

SEQ ID NO: 26347 - protein, 28 aa, Homo sapiens
MEPKSRSYASPLLYSQTCRTLVTREMMG

SEQ ID NO: 26348 - protein, 43 aa, Homo sapiens
LAGVILVFAPSAFDIVQQRNGYGEAQSAACRAGVCEAILYFAE

SEQ ID NO: 26349 - protein, 123 aa, Homo sapiens
LLSIATTLACGLLLVEEAINENEYHSGNLGWSDLIFSHSGHRYFRPPRGSLTLSILLAPLFEELGTISPGTGLERQDLTMLPRLVSNSWTQVILLPWPPKVLELQELASLLSDQPQNFLPLIP

SEQ ID NO: 26350 - protein, 115 aa, Homo sapiens
LLTGPSPLMTAALGTTSLLSIATTLACGLLLVEEAINENEYHSGNLGWSDLIFSHSGHRYFRPPRGSLTLSILLAPLFEELGTISPGTGLEVLLNNTTVFFFLSTKGPLMSQDQT

SEQ ID NO: 26351 - protein, 68 aa, Homo sapiens
LGLMPNNSLQKELWSQTTTKLHETSPHLCTDKCLTLEPRLLLSSLVVNPSQSENLGILHQEVENKEEK

SEQ ID NO: 26352 - protein, 61 aa, Homo sapiens
LEWKRVLSRDKDPEHLQHEASSCFPVISVLPLKVLQGHLYISRGSGGEKVLSKKIYSPLLR

SEQ ID NO: 26353 - protein, 26 aa, Homo sapiens
LLFSLDLLTLLLSEICICVNTSSLIP

SEQ ID NO: 26354 - protein, 62 aa, Homo sapiens [sequence omitted]

SEQ ID NO: 26355 - protein, 349 aa, Homo sapiens
LPRKCGRKAPCSLSSVPSSTLRMCPTEELIQDTTQRLFLLQVKEGILSDDIYCRPETAVLLASHAVQSKYGNFSKEVHKSGYLAGDELLPQRVLEQHKLSKDQWEERIQVWHEEHRGMLREDAVLEYLKIAQDLEMYGVNYFSIKKKKGSELWLGVDALGLNIYEQHDRLTPKIGFPWSEIRSISFNDKNFVIKPIDKRAPDFVFYAPWLQINKRILALCMGNRELYMRRRKPDTIEVQQMKARAREEKHQKQMERAMLENEKKREMAEKQKEKIEREKELMGRLKQIEEQTKKAQQELEEQTRRALELGKERKHAQSEAEKLAKELQEAEEAKEVLLQASRDQKKTQE

SEQ ID NO: 26356 - protein, 77 aa, Homo sapiens
LAVSGEWDPIPWGYVGEVGGCSCRGFLLVSSRNGGGARCGWANPGSPRTLRSARQGARACQGRRAGVNVASVGLQPR

SEQ ID NO: 26357 - protein, 16 aa, Homo sapiens
LKDRKLSFDILTIFFL

SEQ ID NO: 26358 - protein, 67 aa, Homo sapiens
MKSYLIKAFFLYFVSGSGDMDSISKNSPNNMSLSNQPGTPRDDGEMGGNFLNPFQSESYSPSMTMSV

SEQ ID NO: 26359 - protein, 59 aa, Homo sapiens
LVPRAGRCALLPRWNGRQSSAGVLCRHPFLAGRHFGCRVLPTLRDLGSSAFQNLPTHLV

SEQ ID NO: 26360 - protein, 25 aa, Homo sapiens
MMTDAGLGDTPHSPCHSGVIRHPRV

SEQ ID NO: 26361 - protein, 126 aa, Homo sapiens
LGDLGGSVWAAAHLPGKLSICPVLVCRNDGTEFGGSIYQKVNKKLETAVNLAWTAGNSNTRFGIAAKYQIDPDACFSAKVNNSSLIGLGYTQTLKPGIKLTLSALLDGKNVNAGGHKLGLGLEFQA

SEQ ID NO: 26362 - protein, 53 aa, Homo sapiens [sequence omitted]

SEQ ID NO: 26363 - protein, 8 aa, Homo sapiens
MSRNLPLT

SEQ ID NO: 26364 - protein, 68 aa, Homo sapiens
LRNKDWNPHWMLEVDSEKIATGGKWRLCKSCHTAESWSCCASFWRPCGRPGPGRFAILCGKRSTEAPS

SEQ ID NO: 26365 - protein, 247 aa, Homo sapiens
VGRTSRGARVPRVRGRAPREEAAPPRGSCPAASLPRCRKKAGAGRGLRNPLATQARSPWGAAVSWDALPDTPAAGLRFWAPGRRLLRVTPGGALRAAGADPGASSREEGGFRRRRAGGRGSRASRTRGRAAPGLETDSGTLGCGGLSDLPRGKRGRGVAYRGPSPRGTGPGRGDERLQHGGGQPRRAPRRPSCRRPGLRPELLPHRGRRALRPARGQRLLQQEGPEEHLAEETQAGHRQERKAPIYL

SEQ ID NO: 26366 - protein, 95 aa, Homo sapiens [sequence omitted]

SEQ ID NO: 26367 - protein, 38 aa, Homo sapiens
LVLFCFVLFCFWFYREEIFITKKKIPVNCAEMLVFTPS

SEQ ID NO: 26368 - protein, 165 aa, Homo sapiens
MVNPTVSFNIAVNGEPLGCVSFKLFADKFPKTAENFRALSTGEKGFDYKCSSFHRIIPGFMCQGGDFTRHNGTGGKSIYGEKFDDENFILKHTGPGILSMANAGPNTNDSQFFICTAKTEWLDGKPMVFGKVKDGMNIVEAMEHFGSGNGKTIKKITIADCTQLD

SEQ ID NO: 26369 - protein, 697 aa, Homo sapiens
LSWSRLKFAGRDGVGGGGTPVVQFDIEGAPTYSLGLRNLDVSKLKRRRRETRPQRTMATAKGIAIGIDLGTTYSCVGVFQHGKVEIIANDQGNRTTPSYVAFTDTERLIGDAAKNQVAMNPQNTVFDAKRLIGRKFNDPVVQADMKLWPFQVINEGGKPKVLVSYKGENKAFYPEEISSMVLTKLKETAEAFLGHPVTNAVITVPAYFNDSQRQATKDAGVIAGLNVLRIINEPTAAAIAYGLDKGGQGERHVLIFDLGGGTFDVSILTIDDGIFEVKATAGDTHLGGEDFDNRLVSHFVEEFKRKHKKDISQNKRAVRRLRTACERAKRTLSSSTQANLEIDSLYEGIDFYTSITRARFEELCADLFRGTLEPVEKALRDAKMDKAKIHDIVLVGGSTRIPKVQRLLQDYFNGRDLNKSINPDEAVAYGAAVQAAILMGDKSEKVQDLLLLDVAPLSLGLETAGGVMTALIKRNSTIPTKQTQIFTTYSDNQPGVLIQVYEGERAMTKDNNLLGRFDLTGIPPAPRGVPQIEVTFDIDANGILNVTATDKSTGKVNKITITNDKGRLSKEEIERMVLDAEKYKAEDEVQREKIAAKNALESYAFNMKSVVSDEGLKGKISESDKNKILDKCNELLSWLEVNQLAEKDEFDHKRKELEQMCNPIITKLYQGGCTGPACGTGYVPGRPATGPTIEEVD

SEQ ID NO: 26370 - protein, 18 aa, Homo sapiens
LAYNSVIHVGLLSSIQNP

SEQ ID NO: 26371 - protein, 67 aa, Homo sapiens
LKMIFQALGLTLCLFNKKTLEPKKMLSFVKQTLKNLKDSFNSIVNKCSKGSTWKQIITKNVRNLRMS

SEQ ID NO: 26372 - protein, 74 aa, Homo sapiens
LHMLKNAESDAELKGLEVDSLVIEHIQINKAPKTHCWTYRAHGWINPYMSSLCHIEMILTEKEQIVPKPEEGVA

SEQ ID NO: 26373 - protein, 36 aa, Homo sapiens
LLLAPQAPEREASDEIGLLGSFKKPRCCFEIAPLSF

SEQ ID NO: 26374 - protein, 39 aa, Homo sapiens
LVNPANVTFKTYEGMMHSSCQQEMMNVKQFIDKLLPPID

SEQ ID NO: 26375 - protein, 72 aa, Homo sapiens
VPRELLSRGPGDAKDVSHSRRGALLAEGKEIERGESHNQHTFMKITPTAVWQVIKKEQDQRRAGKLVRKQAP

SEQ ID NO: 26376 - protein, 35 aa, Homo sapiens
LGFFYYFFFFRTTLGLLFLCSTFPPFFPPSCAAAF

SEQ ID NO: 26377 - protein, 14 aa, Homo sapiens
LLLLSFLVLGLHIC

SEQ ID NO: 26378 - protein, 208 aa, Homo sapiens
LCFYCFSAFWLRSSVFFSVIHSSYCIGAAVPHFETFAIARGAAFHIFQVIDKKPSIDNFSTAGYKPESIEGTVEFKNVSFNYPSRPSIKILKGLNLRIKSGETVALVGLNGSGKSTVVQLLQRLYDPDDGFIMVDENDIRALNVRHYRDHIGVVSQEPVLFGTTISNNIKYGRDDVTDEEMERAAREANAYDFIMEFPNVSTLCSLCP

SEQ ID NO: 26379 - protein, 157 aa, Homo sapiens
LETLLVLFFRQLQRSGFQSLKLRRVRGLQERRLVLGGCGGRGSSRGCRGPGVRLVQLRRLAWLQRLLPHLQQRRSRRRRRRSRRLQLALRQRLLCFPGPRSFRGQRRRRRGRRRRLLRALAGRLPPAGVHLQGAHLCGRAAGHLPAGGHGAPVRVVV

SEQ ID NO: 26380 - protein, 54 aa, Homo sapiens
LLGAGGGLRVVRWTGSRSRPAKPRPSGRGATADPQFPGQPGAAGQEPPVKVSSL

SEQ ID NO: 26381 - protein, 69 aa, Homo sapiens
LPLSGLPFKQISRERSVEALGLHSSPPWELLARASEPALAPCSRKVAAAGAPEAQDTGEGTEECRLLEI

SEQ ID NO: 26382 - protein, 103 aa, Homo sapiens
LGLQFTEALAELIRSHPAYQQISRERSVEALGLHSSPPWELLARASEPALAPCSRKVAAAGAPEAQDTGLLLLQNPQVFLEEICRQNFVLRFYLGKEQKSVVS

SEQ ID NO: 26383 - protein, 108 aa, Homo sapiens
LPLSGLPFKFTEALAELIRSHPAYQQISRERSVEALGLHSSPPWELLARASEPALAPCSRKVAAAGAPEAQDTGLLLLQNPQVFLEEICRQNFVLRFYLGKEQKSVVS

SEQ ID NO: 26384 - protein, 176 aa, Homo sapiens
LSGRVRGSKCACVLLTPQLRALLRSSQNSESKNFPEVSESPDRRARPHPQPPLLIPTSLQSWLLPSRRWGLWPSGAERQSPPPQSDFPLPPKGKHEERQDEHGYISRCFTRKYTLPPGVDPTQVSSSLSPEGTLTVEAPMPKLATQSNEITIPVTFESRAQLGGPEAAKSDETAAK

SEQ ID NO: 26385 - protein, 14 aa, Homo sapiens
LNGLILLLVYFVPL

SEQ ID NO: 26386 - protein, 34 aa, Homo sapiens
VKSHSIIFFLFGRVAVWDLRSYLPCKLPVTLVMN

SEQ ID NO: 26387 - protein, 32 aa, Homo sapiens
MFAMSTVAGMPQCFGYQCIGLHSNRIYQRRTS

SEQ ID NO: 26388 - protein, 54 aa, Homo sapiens
LLQQGWGLQYPLLLLLPVLPLLLPSPASPHPRRGTSAFICLVDFQKQLFGFWCC

SEQ ID NO: 26389 - protein, 210 aa, Homo sapiens
LHPCVCFRGGHPSLLPDPCRAVGGGWEAPRCCLHEALCQSLGCKAEEIVSVSESSSAQRCWYLLRGRKAGGRGPASPVLFALMRLESLCHLCLACLFFRLPATRTVYCMNEAEIVDVALGILIESRKQEKACEQPALAGADNPEHSPPCSVSPHTSSGSSSEEEDSGKQALAPGLSPSQRPGGSSSACSRSPEEEEEEDVLKYVREIFFS

SEQ ID NO: 26390 - protein, 35 aa, Homo sapiens
MLQFLLGFTLGNVVGMYLAQNYDVSGHIHDFLDSM

SEQ ID NO: 26391 - protein, 53 aa, Homo sapiens
LPFASWAEKLLPPGNNRLPLLAGCYCPEPALQGTAGQTVSGVQRRLWTRRGPR

SEQ ID NO: 26392 - protein, 23 aa, Homo sapiens
LQMCVVFLFGLALAVLSFTSSSF

SEQ ID NO: 26393 - protein, 101 aa, Homo sapiens
LVLAFSSHRRPEPPPLLEKGAQRRRKRRGTTVESAVPARPLRIPETKKLLLLLYPACPSQLRRAPSWDHQPEDRDGEASVLPPLQLPGYAGPPVPPEPGTV

SEQ ID NO: 26394 - protein, 44 aa, Homo sapiens
LFLSLLLSLSLSLSFFSALAGAVLEERKKERQRIAFIRYVLEIS

SEQ ID NO: 26395 - protein, 58 aa, Homo sapiens
LCSIHRAVLLGRAGGSCKSLCSPRLSFLPSSLAPAGTGSPGRGRRNGESAGRVLHAAP

SEQ ID NO: 26396 - protein, 40 aa, Homo sapiens
LDCVSFRDVRRVASLPPGSAYPRHRPASKCQVGAGKRPWW

SEQ ID NO: 26397 - protein, 247 aa, Homo sapiens
LSRGSDLGGAWRGVVAIRGPENLHFKVRVCPFSFHSNRRLKSEHPVMDKNELVQKAKLAEQAERYDDMAACMKSVTEQGAELSNEERNLLSVAYKNVVGARRSSWRVVSSIEQKTEGAEKKQQMAREYREKIETELRDICNDVLSLLEKFLIPNASQAESKVFYLKMKGDYYRYLAEVAAGDDKKGIVDQSQQAYQEAFEISKKEMQPTHPIRLGLALNFSVFYYEILNSPEKACSLAKTVCILPVT

SEQ ID NO: 26398 - protein, 16 aa, Homo sapiens
LFFKRMLFCFLKIIPL

SEQ ID NO: 26399 - protein, 227 aa, Homo sapiens [sequence omitted]

SEQ ID NO: 26400 - protein, 29 aa, Homo sapiens
LPSTCDQPPVSSTLGWGESSILMGGGVRG

SEQ ID NO: 26401 - protein, 86 aa, Homo sapiens
LGCAWLLLVGALSRRPAWGGGGVDSSPASPWRGGLHSLLRPPPLGPQRLGPASCFPACRRSRWLEEVFTSQESQSVSGPRWEKNWL

SEQ ID NO: 26402 - protein, 211 aa, Homo sapiens
MLRQSCSFPVTSLPALGGVCGREGAGAEVPPAACGCEGRDPDTERSCGRSSTGGCSPCSGPGPSSPRTSRGALSPSLGRLFPHLQVVIKLRIQLAPAVHLALPTCSLLTSSPPLEGCCHRLNEEAEVQRGFRPIAVELEFENQPLGAETRLRNGRRAGVKRSEGRGQVRPGQVRSTGPEGGLTRMERKAARLQWDSGSIKMSENEQLWEEP

SEQ ID NO: 26403 - protein, 15 aa, Homo sapiens
LISVFFLTFDMTDNR

SEQ ID NO: 26404 - protein, 127 aa, Homo sapiens [sequence omitted]

SEQ ID NO: 26405 - protein, 42 aa, Homo sapiens
VCCYSLIIIIPFINRSGHRNQSETIASAIKTIVHHGGTHGYL

SEQ ID NO: 26406 - protein, 201 aa, Homo sapiens
MNPGYDCLFKLLLIGDSGVGKSCLLLRFADDPYTESYISTIGVDFKIQTIELDGKTIKLQIWDTAGQERFWTITSSYYRGAHGFLVVYDVTDQESYANVKQWLQEIDRHASENVNKLLVGNKSDLTTKKVVDNTTAKEFADSLGIPFLETSAKNATNVEQAFMTMAAEIKKQMGPGAASGGERPNLKIDSTPVKPAGGGCC

SEQ ID NO: 26407 - protein, 75 aa, Homo sapiens [sequence omitted]

SEQ ID NO: 26408 - protein, 15 aa, Homo sapiens
LESKDLPKVTDLVAD

SEQ ID NO: 26409 - protein, 474 aa, Homo sapiens
VTQKSSGPWAFSSCTYVSGPGVCISSLSCSRVGSSSFRGGLGGGYGGASGMGGIIAIMVNQSLLSPLNLEVDPNIQAVCTQEKEQIKTLNNKFASFIDKVWFLEQQNKVLETKWSLLQQQKMARSNMDNMLESYINNLRRQLETLGQEKLKLEAELGNMQGLGEDFKNKYEDEINKHTEVENEFVLIKKDVDEAYMNKAELESLLEGLTDEINFLRQLYEEEIRELQSQISDMSMVLSMDYSCSRDMDSIIPEVKVQYEEIANCSRAEAESMYQIKYEELQTLAGKYGDDLSRTKTEISEMNRNISWLQAETEGLKGQRASLEAAITDAEQRGELAVKDANAKLSELEAALQRAKQDMMGQLREYQELMNVGLTLDIEIATYRKLLEGEESRLESGMQNVSIHTKTTSSYAGGLSSAYGGLTSPGIIYRLGSSFGSAAGSSSFSRTSSTRAVVVRKIETHDGKLESESSDVLSK

SEQ ID NO: 26410 - protein, 22 aa, Homo sapiens
MGWEMWLESTLENIQSRYLMAY

SEQ ID NO: 26411 - protein, 43 aa, Homo sapiens
LARAALLELLSKGLIKLVSKHRAQVIYTRNTKGRDAPAAGEDA

SEQ ID NO: 26412 - protein, 85 aa, Homo sapiens
LAAGGLILVLALSQTSCLISGNVSISRLSSMFLSCLSVDNILDSHVKDLSWESQGHLGMFDRCVPENKPSDICYIDAELSGDSGL

SEQ ID NO: 26413 - protein, 67 aa, Homo sapiens
VILLTFLSTFYNLVSDDESPAPGQSVTGKRHREAGASSWQPGWAIFSWTPAVYQELRHLLECWRFIS

SEQ ID NO: 26414 - protein, 26 aa, Homo sapiens
LRRLAACPLLCVLSLSTVTLSLLSLE

SEQ ID NO: 26415 - protein, 35 aa, Homo sapiens
LRRSPTSGLSVDLLALLLGLSPFSSTWDAETSCPA

SEQ ID NO: 26416 - protein, 235 aa, Homo sapiens
LLEALDCILPPTRPTDKPLRLPLQDVYKIGGIGTVPVGRVETGVLKPGMVVTFAPVNVTTEVKSVEMHHEALSEALPGDNVGFKVKNVSVKDVRRGNVAGDSKNDPPMEAAGFTAQVIILNHPGQISAGYAPVLDCHMAHIACKFAELKEKIDRRSGKKLEDGPKFLKSGDAAIVDMVPGKPMCVESFSDYPPLGRFAVRDMRQTVAVGVIKAVDKKAAGAGKVTKSAQKAQKAK

SEQ ID NO: 26417 - protein, 94 aa, Homo sapiens
LFTNTGSRQVRAAPPVRGRGSRVAPAGLGVPGRGLRCWLRARFFHAVLGHRKIRRQALSPTRAVAWLGPEMGRRAFSGSVEAARASPSRCCDRK

SEQ ID NO: 26418 - protein, 284 aa, Homo sapiens
LGSRETAGHLADEHRQWRAVETPGTTALRAITHPPAPPREPRPASPAPRAPPREPRPASPAPRAPHRRPRTASPASPAPPRALLALAESPRPHPLPDWGRYWTRRPRPIGAALAATQRSEAEQGRGRVGAGAGAAWSSCGVSGPGRGMGVLAAAARCLVRGADRMSKWTSKRGPRSFRGRKGRGAKGIGFLTSGWRFVQIKEMVPEFVVPDLTGFKLKPYVSYLAPESEETPLTAAQLFSEAVAPAIEKDFKDGTFDPDNLEKYGFEPTQEGKLFQLYPRNFLR

SEQ ID NO: 26419 - protein, 184 aa, Homo sapiens
LTSRSARLGLPKCWDYRREPPRPALAGFSKVMACNCPNSELRRSTGGARPQLDREHLSILHRLRRPSGGAMPPHRTSSGARVPAQTACGSRGRSRAVSSGPTQEAPSSLQGHLRGPSLLLLRTHSGDAAGSLGTPGDRGQGRPSLLLLSSSGTTGEAVASWSPRLPEERYFRTARRGRTSAAKL

SEQ ID NO: 26420 - protein, 38 aa, Homo sapiens
VGVLKQQMEDPETGDCLIHASSSKSPRQLSHSEQGEQG

SEQ ID NO: 26421 - protein, 61 aa, Homo sapiens
LASSPAAGRTTAAPRNGFGGQRHGGGARVGADPLEAGRAGVHLPGAVSGPGGGAEPGLGHS

SEQ ID NO: 26422 - protein, 22 aa, Homo sapiens
LPIDFRLGQSTYCQGNLMWKGK

SEQ ID NO: 26423 - protein, 43 aa, Homo sapiens
LLCGFCLVVCFFFFFSECLAHCNPQTCGYLCCIGIISDLYIQQ

SEQ ID NO: 26424 - protein, 49 aa, Homo sapiens [sequence omitted]

SEQ ID NO: 26425 - protein, 13 aa, Homo sapiens
LFVRVFYVLISRT

SEQ ID NO: 26426 - protein, 122 aa, Homo sapiens
MAEGYLIANCIKHIPIPGRNITYFIPQLLRDQEVGIPQKQSLETAKTIKEHYSYVCPDLVKEFNKYDTDGSKWIKQYTRINAISKKEFSIGVVSERLLGFEIFFSSRVCQSRLYITYLRNCR

SEQ ID NO: 26427 - protein, 179 aa, Homo sapiens
VVHVKDANGNSFATRLSNIFVIGKGNKPWISLPRGKGIRLTIAEERDKRLAAKQSRVCEPLHYKNLESSPLHSRCPAKCPPPKVPSKYRMKCLHMIRPEERWSFQNQIRRTEPSSVPNSGAPPLCFPPPLPETPALPWLFVCCARPPSLPLRVLSPFPHPPPARPPEYRLLSGGGNYCE

SEQ ID NO: 26428 - protein, 131 aa, Homo sapiens
LRHRFFLAAVAACGGGLPTAALCSLRLSPAGSVNAAVAALCTQPRSPLLQSGSQSLSTIFYPRAAWIVVPSVRTPLLGPTTAASDISVSLFLWRFGLPISVVATLGVYGPLKNGRVREPQGAVRIQSRRGW

SEQ ID NO: 26429 - protein, 104 aa, Homo sapiens
VQQPAIHVQGQEPLTVSMLASAPQEQKQMLGEWLFPLIQAMHPTLAGKITGVLLEIDNSELLHMLKSPESLHSKVDEAVAVLQAHQAKETAQKAVNSATGVPTV

SEQ ID NO: 26430 - protein, 117 aa, Homo sapiens
MVNPTLFFNITIDGGLLGHISFKLFADKFPRHQKNFMLCTLERKDLVIRVPAFTDLFQGLCVRVVTSHCHNGTGGKSIYREKFDDKNFILKHTGPGILSMANAGHKQFPVFHLHCQD

SEQ ID NO: 26431 - protein, 137 aa, Homo sapiens
LRKLFIGELRFETTDESLRSHFERWGMLTDCAVMRDPNTKRSRGFGFVTYATVEEVDAATNARPHKVDGKVVEPRRTVSREDYQRSGAHLTVKKIFVGGIKENTEKHQLRDYFEQHGKMEVIEIMTEAVARKGALPL

SEQ ID NO: 26432 - protein, 59 aa, Homo sapiens
LGPGPLKVHLHWWLWWLWIVGRPSPSAGLHLGTIILPQPERASALCIIDRGCMFGKRTL

SEQ ID NO: 26433 - protein, 43 aa, Homo sapiens
LEPTAWVLVQPLSILTLFCLSCLLRITVLEEENSQHGQTTQRK

SEQ ID NO: 26434 - protein, 182 aa, Homo sapiens [sequence omitted]

SEQ ID NO: 26435 - protein, 41 aa, Homo sapiens
VRVLVPRSRREPRLRRATPSLALGAQHPADKRRDARTRRAR

SEQ ID NO: 26436 - protein, 105 aa, Homo sapiens
LDHTLCHYNLPESAPLIYNSFAQFLVKEKGYDKELLNVTPEDWNFCCKGLALDLEDRNFLKLADNGTVLRASHGTKMMTPEVLAETYGKKGWKHFLSDTGMACRS

SEQ ID NO: 26437 - protein, 65 aa, Homo sapiens
LRGRTPNLSSRREGGREGRSTDPRAEEPPGPGPGAWGAGPGPRAWGAGAAKAARPGPTRLSGPRC

SEQ ID NO: 26438 - protein, 46 aa, Homo sapiens
VAVLGVIVPLAGLGCSLSEALVISAYFLHGCRFHVCVPECLSRLPK

SEQ ID NO: 26439 - protein, 454 aa, Homo sapiens
LGKWRSMRCKHTRMHLAHLGNSRQLISLGPPRTREDGSRISQQVEQSRSQVQAIGEKVSLAQAKIEKIKGSKKAIKVFSSAKYPAPERLQEYGSIFTGAQDPGLQRRPRHRIQSKHRPLDERALQEKLKDFPVCVSTKPEPEDDAEEGLGGLPSNISSVSSLLLFNTTENLYKKYVFLDPLAGAVTKTHVMLGAETEEKLFDAPLSISKREQLEQQVPENYFYVPDLGQVPEIDVPSYLPDLPSIANDLMYSADLGPGIAPSAPGTIPELPTFHTEVAEPLKADLQDGVLTPPPPPPPPPPAPEVLASAPPLPPSTAAPVGQGARQDDGSSSASPSVQGAPREVVDPSGGWATLLESIRQAGGIGKAKLRSMKERKLEKKKQKEQEQVRATSQGGHLMSDLFNKLVMRRKGISGKGPGAGEGPGGAFARVSDSIPPVPPPQQPQAEEDEDDWES

SEQ ID NO: 26440 - protein, 44 aa, Homo sapiens
MSFLTLETGLNHLQIFPVHLSALPLPLGLWKGSRSALKPLKRRS

SEQ ID NO: 26441 - protein, 147 aa, Homo sapiens
LWLGLGRGRPAGLRRGKLREKSSTWLGAAGEGRRPPPVPAPTAGRQVGRPRAGGEFVPLGATALPEGASKSFKGNLRPEPGRLLHIPDRCARRLLLDASRDKELTPQQGGLLVHQAWHLIHLCRVPQMENARQLTQMQDPQQPQSRG

SEQ ID NO: 26442 - protein, 231 aa, Homo sapiens
LGGTLRTTCQGEFRSLSAREHRWGWLETTVERSLTGQDLKTSMPGRIQISVSPKTLAGVAGGRGPSLGQTWRPPYQGEFKSLSAREHRWGWLEAPGGRSLTGRDPKTSMPGRTQISVSPRTLAGVAGGPSWEVLHWVRPRDLHARENSNLSPRTLAGVAGGPGWEVPHWAGPQDCHARENSNLCQPQNTSGVGWRPQIKGPSLGRTSRTMCQGEFNSVSMRTQVGVARGPS

SEQ ID NO: 26443 - protein, 216 aa, Homo sapiens
LETTVERSLTGQDLKTSMPGRIQISVSPKTLAGVAGGRGPSLGQTWRPPYQGEFKSLSAREHRWGWLEAPGGRSLTGRDPKTSMPGRTQISVSPRTLAGVAGGPSWEVLHWVRPRDLHARENSNLSPRTLAGVAGGPGWEVPHWAGPQDCHARENSDLSQPENSRGGWLEATVESFLTGQDLKTSMPGRIQISVSPGTLAEVAGGPSWEVPHWARS

SEQ ID NO: 26444 - protein, 17 aa, Homo sapiens
MVSLDFTYKTQIQRQNY

SEQ ID NO: 26445 - protein, 15 aa, Homo sapiens
MCILGLGIYWTLTHR

SEQ ID NO: 26446 - protein, 135 aa, Homo sapiens
LGPVLTLLAACALLPTEATERRFSGLLDPLLPQGAGLRLVGEAFHCRLQGPRRVDKRTLVELHGFQAPAAQGAFLRGSGLSLASGRFTAPVSGIFQFSASLHVGEPDGAVPCAVTGLGLSFLGAPGIAGPGCGSC

SEQ ID NO: 26447 - protein, 36 aa, Homo sapiens
LSDEDSVLMGIYLPPGSQKMEEAVPCQRPPLPSQAL

SEQ ID NO: 26448 - protein, 36 aa, Homo sapiens
LAFGLMALGGIYLPPGSQKMEEAVPCQRPPLPSQAL

SEQ ID NO: 26449 - protein, 38 aa, Homo sapiens
VLSSEREEQFSGIYLPPGSQKMEEAVPCQRPPLPSQAL

SEQ ID NO: 26450 - protein, 201 aa, Homo sapiens
MCLLSSSAASDLAATSLTAHPCHPPLPRQPQPQLILSGSPSIGTVPPPAVGHTSLLPVNPPAISTTTSDLSAREDATPSASTGHLSVFPAFQVKIPAVPSEQTSQSFSEASHRVLPGGGPRCSRDFGAGVAGHLGLGIFGVGFGSPALLQSVVDENSCCLLYVVEDQLCDVEQAFRAEHLGQHQSGSGTGCRHCPQRPAAL

SEQ ID NO: 26451 - protein, 213 aa, Homo sapiens
LLKCAWPPECCLITSQIHTAASDLAATSLTAHPCHPPLPRQPQPQLILSGSPSIGTVPPPAVGHTSLLPVNPPAISTTTSDLSAREDATPSASTGHLSVFPAFQVKIPAVPSEQTSQSFSEASHRVLPGGGPRCSRDFGAGVAGHLGLGIFGVGFGSPALLQSVVDENSCCLLYVVEDQLCDVEQAFRAEHLGQHQSGSGTGCRHCPQRPAAL

SEQ ID NO: 26452 - protein, 210 aa, Homo sapiens
LRAILGFSALQTFPNSAASDLAATSLTAHPCHPPLPRQPQPQLILSGSPSIGTVPPPAVGHTSLLPVNPPAISTTTSDLSAREDATPSASTGHLSVFPAFQVKIPAVPSEQTSQSFSEASHRVLPGGGPRCSRDFGAGVAGHLGLGIFGVGFGSPALLQSVVDENSCCLLYVVEDQLCDVEQAFRAEHLGQHQSGSGTGCRHCPQRPAAL

SEQ ID NO: 26453 - protein, 74 aa, Homo sapiens [sequence omitted]

SEQ ID NO: 26454 - protein, 157 aa, Homo sapiens
LLLPWCRGPAGRMEQDPKPPRLRLWALIPWLPRKQRPRISQTSLPVPGPGSGPQRDSDEGVLKEISITHHVKAGSEKADPSHFELLKVLGQGSFGKVFLVRKVTRPDSGHLYAMKVLKKATLKVRDRVRTKMERDILADVNHPFVVKLHYGKASGPA

SEQ ID NO: 26455 - protein, 20 aa, Homo sapiens
MCILWTWAWLECSGVLKILL

SEQ ID NO: 26456 - protein, 57 aa, Homo sapiens
LGVKQLIVGVKMDSTEPPYSQKRHKEVIKKISTHIKKIDYNPYPLNSSICANFCLEL

SEQ ID NO: 26457 - protein, 53 aa, Homo sapiens
VGFFFSLFLWGRVGGIFFPSFFLPLLHLPFPPIQVVDGIEALVAVDVRAVWQP

SEQ ID NO: 26458 - protein, 40 aa, Homo sapiens
MVAKMCLFLMSLWGHCCFTIMLRCRERKKQQQSHINLSLT

SEQ ID NO: 26459 - protein, 35 aa, Homo sapiens
MLGCLLPGLCLPCLLVARRDVHSGRLQQAPELPGF

SEQ ID NO: 26460 - protein, 56 aa, Homo sapiens
LAFTFFLAYAGQTKCEILPSAELSKGSWGLAGDGCGICPGLEPSQDSAGKAAVLRC

SEQ ID NO: 26461 - protein, 88 aa, Homo sapiens [sequence omitted]

SEQ ID NO: 26462 - protein, 69 aa, Homo sapiens
VKCDSCHGKYMACCLLYHGDMVPKDVNAAITTIKTKPTIQFVDWHPIGFKVGINYQPPSEVPGGDLVKV

SEQ ID NO: 26463 - protein, 58 aa, Homo sapiens
LDACAVSLHGVRSRSSCGRRSCGGFPNPANMGSASFHGRYAPGVSQYLGSGWVRWAYH

SEQ ID NO: 26464 - protein, 119 aa, Homo sapiens
MLISVMLHSLWLVIHLDTWRPESFFDKVKKNRQNGMHTLCLLDIKVKEQSLENLINSYRGDTLCWLSQGWSRRPENCSRHFKANVHCGLGRTIAFLDHHRRQHTSNGDGDAKSVFHTRK

SEQ ID NO: 26465 - protein, 54 aa, Homo sapiens
LLPGLSLTMLSRVVLSAAATAAPSLKNAAFLGPGTLCTRNWAYLVRFIQRNICD

SEQ ID NO: 26466 - protein, 39 aa, Homo sapiens
LVIFVYLSTPNLSICLLFVYLSQVMHSDQTPPGNCRERA

SEQ ID NO: 26467 - protein, 64 aa, Homo sapiens
LWVGHPVRNPHPVFSPSLFFVQSHFLLPFSAINSNHMSARRPPNIETIPLVSSGPCLLLSERRN

SEQ ID NO: 26468 - protein, 28 aa, Homo sapiens
VEGVLQILAILTLFVCGDSSPGVGLICS

SEQ ID NO: 26469 - protein, 102 aa, Homo sapiens
LVCHRSMMCSSLEQALAVLVTTFHKYSCQEGDKFKLSKGEMKELLHKELPSFVGHSREPCAVRAFRVHLFNPVIGDLRNQSPEGKSDCPKITQHWRKWMRRG

SEQ ID NO: 26470 - protein, 28 aa, Homo sapiens
VLPLAVGRGYAAPVGEGGAMGGGGNSRL

SEQ ID NO: 26471 - protein, 330 aa, Homo sapiens
LLLVCGGAFLPSLHWALDLHGQEAPRPRLFANSNRLLAGPRQGGLGRKSSLLYLHCTQRPVRGVPDRTPSSLVKCPCSSLVSTPWIFPPQKYNADYDLSARQGADTLAFMSLLEEKLLPVLVHTFWIDTKNYVEVTRKWYAEAMPFPLNFFLPGRMQRQYMERLQLLTGEHRPEDEEELEKELYREARECLTLLSQRLGSQKFFFGDAPASLDAFVFSYLALLLQAKLPSGKLQVHLRGLHNLCAYCTHILSLYFPWDGAEVPPQRQTPAGPETEEEPYRRRNQILSVLAGLAAMVGYALLSGIVSIQRATPARAPGTRTLGMAEEDEEE

SEQ ID NO: 26472 - protein, 14 aa, Homo sapiens
VAGPTRPPGIPGLK

SEQ ID NO: 26473 - protein, 25 aa, Homo sapiens
VPMVARMGGTTAEPGTGGAGQCSAG

SEQ ID NO: 26474 - protein, 32 aa, Homo sapiens
MAIMLLCLLQLAAPLCSYSITIRFYLFWLNTP

SEQ ID NO: 26475 - protein, 31 aa, Homo sapiens
MLFWLFYKILLQFQLPFAKTRKKIRNFLLLH

SEQ ID NO: 26476 - protein, 55 aa, Homo sapiens
VSTLWKSGCATKEASTSVMRPTSKAACSKPNPAPSSAAASLRTRSLFSAMTLRKW

SEQ ID NO: 26477 - protein, 60 aa, Homo sapiens
VKTFQKLQFAVLTFSVDLRVLSLTPTAVTCPRTSDIAPGFILLHYLWHDQLYLKEKRHEI

SEQ ID NO: 26478 - protein, 9 aa, Homo sapiens
MYLLMFLCY

SEQ ID NO: 26479 - protein, 34 aa, Homo sapiens
VMMLLIRMMSMTTILHLSGTADGKGGAAEFPCSS

SEQ ID NO: 26480 - protein, 48 aa, Homo sapiens [sequence omitted]

SEQ ID NO: 26481 - protein, 61 aa, Homo sapiens
LWGWCYWWKTPELRTPCHLLVLSLALADSGISLNALVAATSSLLRYQPPPQSTGSGVLPGA

SEQ ID NO: 26482 - protein, 53 aa, Homo sapiens
MASGLSPLPPHQGQCPRLWSCSEGRMAEPSSPLQRRLQLARPCLDSLQWSLLS

SEQ ID NO: 26483 - protein, 19 aa, Homo sapiens
MELNFGRPEQHSCPGIAAR

SEQ ID NO: 26484 - protein, 197 aa, Homo sapiens
VDAGRGLCRVQAAGLRPCRGRPQVCPAAWRDGPALASQRVLPGQRVLPLGVQPWLMVPEPVPPRMGGGRAVLQRHFPGAPAGEGPQSLRGTPRDQKREWGGPPLCPACGGGHGVLPGAGVRPCAPGPPPGRGRRQEVPGLQGYRAHHPQLQTGQQLPQRLRPAAGRRGGLLRTHRGPTGGRRAPLRRAPGGDLGHRL

SEQ ID NO: 26485 - protein, 110 aa, Homo sapiens
LPQPLRAGGPRGAEPRAAGPPGRAERRGPEPLGLRLPAGHAAAGPWTPAVDRSGQRLGARVLPRDGADFFAKRKRSAPEKSSGDVPAPCPSPSAAPGVGSVEQTPRKRLR

SEQ ID NO: 26486 - protein, 87 aa, Homo sapiens
LTSPWRLSVSAEALGLALGLCIPESCCMPGIGFQACLSFSSLPGIAMRWEGEPSSPAEIPAAWQPAGGSWIPRGDTTDALWFHVIWI

SEQ ID NO: 26487 - protein, 187 aa, Homo sapiens
LGPWRIVSCWFCGWEERREGSAFFVGIPARMSAARESHPHGVKRSASPDDDLGSSNWEAADLGNEERKQKFLRLMGAGKKEHTGRLVIGDHKSTSHFRTGEEDKKINEELESQYQQSMDSKLSGRYRRHCGLGFSERRSFAMLPRLVSKLLGSSDLSAFQSAGTTGVSHHVRPGHIFNRREQQHAHK

SEQ ID NO: 26488 - protein, 23 aa, Homo sapiens
MDYLSARLFAKKIYNYQAETTSD

SEQ ID NO: 26489 - protein, 67 aa, Homo sapiens
MLAEGLILTVLTGWSLQSHWDVLQAPGSHDQLPISIGVGISLVYEARVSLNMLRIKAVFVQAAITKI

SEQ ID NO: 26490 - protein, 44 aa, Homo sapiens
LRLACGLLGSLASCPCLSVCLSVSVLVCCPPSWHAIVEGLARCI

SEQ ID NO: 26491 - protein, 285 aa, Homo sapiens
LPAATGRPPARLLRPPPLRCAALPAPRAREGAAEESPPAPGPRPPRPGPRHGALAVAAPRAAGLGRCGRPRRAAPAGTMSPLLRRLLLAALLQLAPAQAPVSQPDAPGHQRKVVSWIDVYTRATCQPREVVVPLTVELMGTVAKQLVPSCVTVQRCGGCCPDDGLECVPTGQHQVRMQILMIRYPSSQLGEMSLEEHSQCECRPKKKDSAVKPDRAATPHHRPQPRSVPGWDSAPGAPSPADITHPTPAPGPSAHAAPSTTSALTPGPAAAAADAAASSVAKGGA

SEQ ID NO: 26492 - protein, 29 aa, Homo sapiens
MLTLVLCASLIFFVIWHEKHHLDLSCDCQ

SEQ ID NO: 26493 - protein, 105 aa, Homo sapiens
LRMKPSLLCRPLSCFLMLLPWPLATLTSTTLWQCPPGEEPDLDPGQGTLCRPCPPGTFSAAWGSSPCQPHARCSLWRRLEAQVGMATRDTLCGDCWPGNQPCLPD

SEQ ID NO: 26494 - protein, 223 aa, Homo sapiens
LFLIVVPAVVLIMLLPSDVARLVLGYLQQENLISTCQTFILESSDLKEYAEHCTDEGFIPACLLSLFGKNLTTILNEYVAMKTKETSNNVPAIMSSLWKKLDHTLSQIRSMQSSPRFAGSQRGFSPNENWNCRNQTAEKACISNSSSQCRVAHFTLPFRTVYHSSFHRYTGYSTKWPNFRSIEVIFCSGQPLTVTRYCNHWRSFKCHSWCSGKESTCQFNVSR

SEQ ID NO: 26495 - protein, 48 aa, Homo sapiens
MAKQFSWWFFLLPFSLSMTIIQTNLSEHLYPIRGGSVILNALLGEQRN

SEQ ID NO: 26496 - protein, 50 aa, Homo sapiens
LANFFVFLVEMWFLHVGQAGLKILTSSHLLALTSQSAGPAEICFLRYFVS

SEQ ID NO: 26497 - protein, 30 aa, Homo sapiens
LAFLTTPLLCISFFQACSKFSSVRPFAGLV

SEQ ID NO: 26498 - protein, 38 aa, Homo sapiens
MGKSVLLGSIYYLLLSSHLCKSAISTKMCDRRSQRILL

SEQ ID NO: 26499 - protein, 28 aa, Homo sapiens
LLPSLFLGKSICRWLGSVELVHLSILHP

SEQ ID NO: 26500 - protein, 173 aa, Homo sapiens [sequence omitted]

SEQ ID NO: 26501 - protein, 124 aa, Homo sapiens
LAWRALRTSGTLLRVERLLLEDSDAHSTTSSASPAQSPCYSNQSDDGSDTEMASGSNRTPVFSFLDLTYWKRQKICCGIIYKGRFGEVLIDTHLFKPCCSNKKAAAEKPEEQGPEPLPISTQEW

SEQ ID NO: 26502 - protein, 249 aa, Homo sapiens
LAWRALRTSGTLLRVERLLLEDYCPEEKMFGFHKPKMYRSIEGCCICRAKSSSSRFTDSKRYEKDFQSCFGLHETRSGDICNACVLLVKRWKKLPAGSKKNWNHVVDARAGPSLKTTLKPKKVKTLSGNRIKSNQISKLQKEFKRHNSDAHSTTSSASPAQSPCYSNQSDDGSDTEMASGSNRTPVFSFLDLTYWKRQKICCGIIYKGRFGEVLIDTHLFKPCCSNKKAAAEKPEEQGPEPLPISTQEW

SEQ ID NO: 26503 - protein, 372 aa, Homo sapiens
LGTMRACISLVLAVLCGLAWAEDHKESEPLPQLEEETEEALASNLYSAPTSCQGRCYEAFDKHHQCHCNARCQEFGNCCKDFESLCSDHEVSHSSDAITKEEIQSISEKIYRADTNKAQKEDIVLNSQNCISPSETRNQVDRCPKPLFTYVNEKLFSKPTYAAFINLLNNYQRATGHGEHFSAQELAEQDAFLREIMKTAVMKELYSFLHHQNRYGSEQEFVDDLKNMWFGLYSRGNEEGDSSGFEHVFSGEVKKGKVTGFHNWIRFYLEEKEGLVDYYSHIYDGPWDSYPDVLAMQFNWDGYYKEVGSAFIGSSPEFEFALYSLCFIARPGKVCQLSLGGYPLAVRTYTWDKSTYGNGKKYIATAYIVSST

SEQ ID NO: 26504 - protein, 67 aa, Homo sapiens
LITSCFVFVTAWMRHFCQFFQDLSSSSRMEKSLKPRLMLEVTVEGVFKILLTQAPSWRWRVKGISLH

SEQ ID NO: 26505 - protein, 81 aa, Homo sapiens
LSREGDYELTESLAYILLFLDFFLIKRLLQCLSCDSGMDICPRLSCWGPSMSLQVPSWSPSPALEAWLRASWRRSFGSMLS

SEQ ID NO: 26506 - protein, 24 aa, Homo sapiens
MCPKCQLLLGVLLSGFEFKSHWQP

SEQ ID NO: 26507 - protein, 73 aa, Homo sapiens
LEMDRASLRNCSSPCNLARSVGRSGVTGRGQEAAMTLTLRGCRWRKHGREAPARPKLAQAGSVELRAGFLLSD

SEQ ID NO: 26508 - protein, 36 aa, Homo sapiens
VNMPACFLLSLLYTAHFTPGLSRWLCESRSRILSFP

SEQ ID NO: 26509 - protein, 83 aa, Homo sapiens [sequence omitted]

SEQ ID NO: 26510 - protein, 110 aa, Homo sapiens [sequence omitted]

SEQ ID NO: 26511 - protein, 114 aa, Homo sapiens
LAAASRGSRGPQLPVPGARARLPRGSQPRRAAPRMLMAGPPPAAHNAGQGRGRGTGEGAGAGPGAGGPGPGASPPAPRNADARAAGPPPAAAAAAAARSAAARPGLLHSTCCLH

SEQ ID NO: 26512 - protein, 72 aa, Homo sapiens
MLMTAQPMCHHLLIRWTFLWSLLSMVKGSMLVAPTSPPSLEAGTHFIHLTGTTVSAGVPEEMPATTLRREVF

SEQ ID NO: 26513 - protein, 67 aa, Homo sapiens
LEFLLTAPLFLLTETSLWEGAPPASLTNPLAGSTADSGAASGSWGDSPASGLPEEEERRVPQRLSLQ

SEQ ID NO: 26514 - protein, 51 aa, Homo sapiens
MKRNCERRRFPQAGTNELLGHVVRTRQRHTIKENAGLSWPLKSGLVSLGRL

SEQ ID NO: 26515 - protein, 39 aa, Homo sapiens
LLVVLVAALRRHTWHVEGGLYMAVFDLAIPAEQIIFHGG

SEQ ID NO: 26516 - protein, 20 aa, Homo sapiens
VQKQLLLSAPARLRSRPWRP

SEQ ID NO: 26517 - protein, 11 aa, Homo sapiens
MGGPLLKGGHT

SEQ ID NO: 26518 - protein, 58 aa, Homo sapiens
LQTLALLSEIAAAILVTMVLLKLCENLHFSLHDRFLSCLSWEPFCQFKCDCGINSKMI

SEQ ID NO: 26519 - protein, 260 aa, Homo sapiens [sequence omitted]

SEQ ID NO: 26520 - protein, 78 aa, Homo sapiens
VHFVVGPPGATRTVPAHKVGSGGPSRNACPVRPVRRVADTQPAGEPGSRRRFLLPVRLGCRQLRLLCHVLRRPGGSQI

SEQ ID NO: 26521 - protein, 25 aa, Homo sapiens
LGSVLELFFDTLTWASLCAFASGLE

SEQ ID NO: 26522 - protein, 18 aa, Homo sapiens
LKLTFGAFLLFSFQLKML

SEQ ID NO: 26523 - protein, 99 aa, Homo sapiens
LRKLFIGGLNFETTDESLRSHFKQWGTLTDCGNERSKHQVLLGLWVCHICPCGGSGCSHECKATQGGRKSCGNKESCLKRRFSKTRCPLNCEKDICWWH

SEQ ID NO: 26524 - protein, 26 aa, Homo sapiens
MMCVASCCSQALLPMLLLLACWELGN

SEQ ID NO: 26525 - protein, 49 aa, Homo sapiens
MEDLSLSLSLLFFFLVEMKGWVYGTSPELWGKCRECQSKAELSELGRRL

SEQ ID NO: 26526 - protein, 580 aa, Homo sapiens
LPGPAHRGPQPHPDPAARARGPGSTRLPAWCSRPSSPRAASRRTAGCWWDGGCRSRAAPWSWRSCTFPSSPSRSSSSWPRCGRPARWAWPCWAPGATAGRSPRRAWAASWRAWVLSSPMSPGCGCAGREAARSGAARPPTGKRPLPPVPLAGATTASTGGLAAVFDTVARSEVLFRSDRFDEGPVRLSHWQSEGVEASILAELARRASGPICLLLASLLSLVSAVSACRVFKLWPLSFLGSKLSTCEQLRHRLEHLTLIFSTRKAENPAQLMRKANTVASVLLDVALGLMLLSWLHGRSRIGHLADALVPVADHVAEELQHLLQWLMGAPAGLKMNRALDQVLGRFFLYHIHLWISYIHLMSPFVEHILWHVGLSACLGLTVALSLLSDIIALLTFHIYCFYVYGARLYCLKIHGLSSLWRLFRGKKWNVLRQRVDSCSYDLDQLFIGTLLFTILLFLLPTTALYYLVFTLLRLLVVAVQGLIHLLVDLINSLPLYSLGLRLCRPYRLAAGVKFRVLRHEAGRPLRLLMQINPLPYSRVVHTYRLPSCGCHPKHSWGALCRKLFLGELIYPWRQRGDKQD

SEQ ID NO: 26527 - protein, 71 aa, Homo sapiens [sequence omitted]

SEQ ID NO: 26528 - protein, 53 aa, Homo sapiens [sequence omitted]

SEQ ID NO: 26529 - protein, 58 aa, Homo sapiens
MSPLRPQNCLFGCELKADKDDHFKVDNDEKEHQLSLRMVSLGAGVKDESYIVEAEAVN

SEQ ID NO: 26530 - protein, 152 aa, Homo sapiens
LFFLVLCIHALLHPCPFTLPTHIPLDWPCGQSLECMGCWGPVGCTGPEPLAPSRLAWSQQVGDLSRACLSQLSPPIPPLSCLGQLERACLLAAWQGGVQGQVRSPVTARKKKKKKKKNRKKKPTKTNPPLGLSPFILLFSTQQTQSWLWRSL

SEQ ID NO: 26531 - protein, 23 aa, Homo sapiens
MSCAKCAQGCICKGASEKCSCCA

SEQ ID NO: 26532 - protein, 129 aa, Homo sapiens
VRVDPLDGPGRDDPERRRQRSGREPRWGPGARAPSGQHTLGPRPAAAPPQHAGGRARPAGGADPGCPDGGRGRDGDPGSQAGLARGLRGLAQLRGQRLRRERLQGAAAGGARRGQERPGAHLRRCGGRA

SEQ ID NO: 26533 - protein, 206 aa, Homo sapiens
LGDPERAHPQRSPPGVSNSSLLPPPIDPPARSSGLWTRTGLKRGFPGSRKGCRNGTAPSEDAKGARAKESGRARACLPLDPHPPMTAQSRSPTTPTFPGPSQRTPLTPCPVQTPRLGKALIHCWTDPGQPLGEQQRVRRQRTETSEPTMRLHRLRARLSAVACGLLLLLVRGQGEAPSEGRQGPGSDLPNAAEAEPDSAGGQAPGR

SEQ ID NO: 26534 - protein, 127 aa, Homo sapiens [sequence omitted]

SEQ ID NO: 26535 - protein, 101 aa, Homo sapiens
LRRYLKLSLLLLPLLPSALGLTQRAPNPTTQVSSLSVVPCFCSKLLSQHPGVWNQQRQSPPCLETLFGSTGWPGARPERGCMAFAKSLAFGEGSARVSWAE

SEQ ID NO: 26536 - protein, 298 aa, Homo sapiens
LSEPPSGQWLIMESRGPLATSRLLLLLLLLLLRHTRQGWALRPVLPTQSAHDPPAVHLSNGPGQEPIAVMTFDLTKITKTSSSFEVRTWDPEGVIFYGDTNPKDDWFMLGLRDGRPEIQLHNHWAQLTVGAGPRLDDGRWHQVEVKMEGDSVLLEVDGEEVLRLRQVSGPLTSKRHPIMRIALGGLLFPASNLRLPLVPALDGCLRRDSWLDKQAEISASAPTSLRSCDVESNPGIFLPPGTQAEFNLRGEDSSTSFCLNGLWAQGQRLDVDQALNRSHEIWTHSCPQSPGNGTDASH

SEQ ID NO: 26537 - protein, 386 aa, Homo sapiens
LIMESRGPLATSRLLLLLLLLLLRHTRQGWALRPVLPTQSAHDPPAVHLSNGPGQEPIAVMTFDLTKITKTSSSFEVRTWDPEGVIFYGDTNPKDDWFMLGLRDGRPEIQLHNHWAQLTVGAGPRLDDGRWHQVEVKMEGDSVLLEVDGEEVLRLRQVSGPLTSKRHPIMRIALGGLLFPASNLRLPAEISASAPTSLRSCDVESNPGIFLPPGTQAEFNLRDIPQPHAEPWAFSLDLGLKQAAGSGHLLALGTPENPSWLSLHLQDQKVVLSSGSGPGLDLPLVLGLPLQLKLSMSRVVLSQGSKMKALALPPLGLAPLLNLWAKPQGRLFLGALPGEDSSTSFCLNGLWAQGQRLDVDQALNRSHEIWTHSCPQSPGNGTDASH

SEQ ID NO: 26538 - protein, 34 aa, Homo sapiens
MSGLESARVLLCALGSFLLNSLLSTFRLNSSAPS

SEQ ID NO: 26539 - protein, 25 aa, Homo sapiens
LNILLLYLVAGLCHQLTNALVERKQ

SEQ ID NO: 26540 - protein, 239 aa, Homo sapiens
LLAGGEKATMQNLNDRLASYLDKVRALEEANTELEVKIRDWYQRQAPGPARDYSQYYRTIEELQNKILTATVDNANILLQIDNARLAADDFRTKFETEQALRLSVEADINGLRRVLDELTLARADLEMQIENLKEELAYLKKNHEEVRWLGQKVKDAEEWVAEPWGWAMAEAVGESRAGAPGLVTLEGFPVCRALILGVQCAGQTPLCTTLLLCTQGTSQGPAEAPSTYPASLMRVGDK

SEQ ID NO: 26541 - protein, 232 aa, Homo sapiens
VSPFAPPAPSASLPQTQTLPREASQRRGQKAATQSRHIPRLGRRHSPQTPWTPAVYEDARGTAWFRERAPKATCRPPAPGRAPSACRNTPLHPARDAELRENLVQRGLNARAPPRGWSLSRPHPPGDHRAASPAARRQKLEKKKKKKKKSSWGLGTRLLAPLNSPRLSPPSPPVMNPVKGDRPGSPRNIYSCDSHKMEKGLNFCFFKELVFCVCVYTASSHQPNCLAPLQLR

SEQ ID NO: 26542 - protein, 24 aa, Homo sapiens
LKTFTDTQMTEILLSLAGHGGSRL

SEQ ID NO: 26543 - protein, 73 aa, Homo sapiens
LGEELGVMLFSKLFFGSSGERDRARCGRAGRGHPAGDPAGGSGRAVQDEPPVPHPRRLLLPSPHVSPGLLQLQ

SEQ ID NO: 26544 - protein, 37 aa, Homo sapiens
LLLIYDQIKGIRCQWGQPAVIGQRGATARPKGLSQGK

SEQ ID NO: 26545 - protein, 59 aa, Homo sapiens
LYLLKEQEFPSISWTKTEAPGAYRKELEVPSAGWEASFIEVTSLDAGLAEVGENAASLE

SEQ ID NO: 26546 - protein, 107 aa, Homo sapiens
LGDLLLASRLGLMAWAPACVQAQGLSCLCLFPDPSSCREWCCPLGMYLQVETRTSSRLHLKRAPGIRSWSLLVGKALHVPPQNPRTGSLTFKKDENETKYFLFFLLP

SEQ ID NO: 26547 - protein, 93 aa, Homo sapiens
LHQKQLQNFLRKALKETRRNLSRRSSALPPAAGGCISDPGSSRRMLLANVCDAFRVMETHYPVGLRISTWMCMKLLFSMCVCKGKISTLLDSW

SEQ ID NO: 26548 - protein, 91 aa, Homo sapiens
LLPFSPKIQQSDVYCTPITYYLLFLHGSNHHSVATHPLPYLTNIFPGRWKRKCCSHCVTQCCCPSHGNMGTIKYLSSLLQAFPDFKINCDQ

SEQ ID NO: 26549 - protein, 201 aa, Homo sapiens
LPGCEHMMAIRELKVCLLGDTGVGKSSIVCRFVQDHFDHNISPTIGASFMTKTVPCGNELHKFLIWDTAGQERFHSLAPMYYRGSAAAVIVYDITKQDSFYTLKKWVKELKEHGPENIVMAIAGNKCDLSDIREVPLKDAKEYAESIGAIVVETSAKNAINIEELFQGISRQIPPLDPHENGNNGTIKVEKPTMQASRRCC

SEQ ID NO: 26550 - protein, 13 aa, Homo sapiens
LITAAIWFVFYSN

SEQ ID NO: 26551 - protein, 27 aa, Homo sapiens
MGWTFCFSFNSLFSFSFLLNLQHLASR

SEQ ID NO: 26552 - protein, 158 aa, Homo sapiens
VLPSLTHTRAVGEFWLPNLTPSRHLHTHQAHQGRGLAWGSWEGPSPGPRPPRGSLQPPPLTAAPWDLRGAPGVLRTPPTTSQCFHVSKSAFLSPSSIPAPGGWGRRGRGDYPFYSWGNRLREIAQPTSGGRQWRAWCPFSSSASVAPFGPLGPQRGRS

SEQ ID NO: 26553 - protein, 157 aa, Homo sapiens
VPGEECDGITSMSAESGPGTRLRNLPVMGDGLETSQMSTTQAQAQPQPANAASTNPPPPETSNPNKPKRQTNQLQYLLRVVLKTLWKHQFAWPFQQPVDAVKLNLPDYYKIIKTPMDMGTIKKRLENNYYWNAQECIQDFNTMFTNCYIYNKFRPQM

SEQ ID NO: 26554 - protein, 26 aa, Homo sapiens
MEASPSPRTLPGAIFAGSWGAGTPRT

SEQ ID NO: 26555 - protein, 20 aa, Homo sapiens
LSLAVAGVPGLSSLLCVLCS

SEQ ID NO: 26556 - protein, 79 aa, Homo sapiens
VAWELGEAQRMPPGESPHHQCITSNVPLERPPLCSVMFQKLLMKQHVLVACALACHDSPLTGPPVKSKGLPAAGFGGVC

SEQ ID NO: 26557 - protein, 150 aa, Homo sapiens [sequence omitted]

SEQ ID NO: 26558 - protein, 497 aa, Homo sapiens
VDSEKPRQLRTGERRLQTQREGGQGVGRRRTEEGTETQSKGGKEETLVGGRHSGERGGWAEMKFQGPLACLLLALCLGSGEAGPLQSGEESTGTNIGEALGHGLGDALSEGVGKAIGKEAGGAAGSKVSEALGQGTREAVGTGVRQVPGFGVADALGNRVGEAAHALGNTGHEIGRQAEDVIRHGADAVRGSWQGVPGHNGAWETSGGHGIFGSQGGLGGQGQGNPGGLGTPWVHGYPGNSAGSFGMNPQGAPWGQGGNGGPPNFGTNTQGAVAQPGYGSVRASNQNEGCTNPPPSGSGGGSSNSGGGSGSQSGSSGSGSNGDNNNGSSSGGSSSGSSSGGSSGGSSGGSSGNSGGSRGDSGSESSWGSSTGSSSGNHGGSGGGNGHKPGCEKPGNEARGSGESGIQGFRGQGVSSNMREISKEGNRLLGGSGDNYRGQGSSWGSGGGDAVGGVNTVNSETSPGMFNFDTFWKNFKSKLGFINWDAINKDQRSSRIP

SEQ ID NO: 26559 - protein, 28 aa, Homo sapiens
LPLPKGRKVLDDGDSNPKRREFRRQDPN

SEQ ID NO: 26560 - protein, 85 aa, Homo sapiens
MVYIHCPGKISVLCELQIVLPQSGRGNHLLWRTESYLSSSLETWLNHLQFFPRFAGRTTLDVFLLLKQSPSQFGSCLLSEYRIKR

SEQ ID NO: 26561 - protein, 131 aa, Homo sapiens
LRLTPAFRQTGGTGATELPLPGGPGPGASLIANLLCHLRQPPSLCSLLRDGDDSHPSHCLSPHREKCPVKGFIPNPQDGNGYISAAELRHVMTNLGEKLTDEEVDEMIREADIDGDGQVNYEEFVQMMTAK

SEQ ID NO: 26562 - protein, 34 aa, Homo sapiens
LSVSQIRLLRILLIIFRAHACSPGTLRGQRGRIA

SEQ ID NO: 26563 - protein, 147 aa, Homo sapiens
LVREEETQKRKRKAKESGMALPQGLLTFRDVAIEFSQEEWKCLDPAQRTLYRDVMLENYRNLVSLDFRSVTQAKVQWCHLGSLQPPLPRFKQFSCLSLPSSWDYRYLFQMHDEDILLNRARQYRSVPHRDIAKTSKSSHWRFLLPEN

SEQ ID NO: 26564 - protein, 54 aa, Homo sapiens
LCGIYALFVCLFLRKCMCALSRDDPPIRVVSTGICVWSVLPVDWSGISGIKMIK

SEQ ID NO: 26565 - protein, 47 aa, Homo sapiens
LVSRLPFLGALGVAVAVAEIGCTMSAFEKPQIIAHIQKGFNYTVFDY

SEQ ID NO: 26566 - protein, 249 aa, Homo sapiens
LGAVPSPSLLPVLPARSYNESCPPDPAEQGGPKTCCTLDDVPLISKCGSYPPESCLFSLIGNMGAFMVALICLLRYGQLLEQSRHSWVNTTALITGCTNAAGLLVVGNFQVDHARSLHYVGAGVAFPAGLLFVCLHCALSYQGATAPLDLAVAYLRSVLAVIAFITLVLSGVFFVHESSQLQHGAALCEWVCVIDILIFYGTFSYEFGAVSSDTLVAALQPTPGRACKSSGSSSTSTHLNCAPESIAMI

SEQ ID NO: 26567 - protein, 15 aa, Homo sapiens
VMAAGALCVVLLLGR

SEQ ID NO: 26568 - protein, 44 aa, Homo sapiens
LYLSFTPSFIVMLQDEEEWIKTLASNSIKRMKPSGRHAWIEILQ

SEQ ID NO: 26569 - protein, 9 aa, Homo sapiens
MMLPIPLKF

SEQ ID NO: 26570 - protein, 98 aa, Homo sapiens
LSLAEIQKLEEERERQLREEESSASFCFYATAKAPAEGVDESSSAAAATATAETLRLGECQQTFRYHEISSGDPAGRGQANAKAAAAAAATPATKQSS

SEQ ID NO: 26571 - protein, 119 aa, Homo sapiens
MHFPEPWAYPPWGACWFWGDHLSLHSGAVKLSNFRSQGRPLLKFHLSCSGPKGGGGLGHQRTAWDGSAGTERCAGLAGDGRGGALFLVLCGGCRRPVLLRTAFQPGIRHLPDGLDPVHV

SEQ ID NO: 26572 - protein, 221 aa, Homo sapiens
MIIIEIQKTTTCPSWDGHLTFLVARQLQPSVVWIEDTEKTFYKKVPNAEKMNEPKRLKKHLPQILKLLKPDDRILIVGTTRRPFDAELQSFCKVYQKIILVPRPDYASRYVLWKQIIERNGGVLTSALNVSCLAKVTDGFTQGHIVEVVKGVLTDQRIRRQIHKPLTAVEFITAITSMNPVYKEEEESFKNWYAKTPLGKKRALAITGGSTEKAKDKGKRK

SEQ ID NO: 26573 - protein, 20 aa, Homo sapiens
LWHLCLGLLLMVGSGDSALR

SEQ ID NO: 26574 - protein, 19 aa, Homo sapiens
MMEVPATGNHELSGLGTAH

SEQ ID NO: 26575 - protein, 76 aa, Homo sapiens [sequence omitted]

SEQ ID NO: 26576 - protein, 68 aa, Homo sapiens
MCVSPLILLLFAPSTLSTKSTSHFLRRVKESTMLAAQREGAYTRLGARPTQGSLLEHPRRAARQQPPP

SEQ ID NO: 26577 - protein, 7 aa, Homo sapiens
LQMGSVA

SEQ ID NO: 26578 - protein, 99 aa, Homo sapiens
VSPCELPCKEYDVARNTGVYTSSGLATASWRCGSRTAMLATTRPSPTATSQSGSCRGTRASSWPQRPRRWHSRHSKTPRAGWASDCRTRTAGSRSCSAR

SEQ ID NO: 26579 - protein, 528 aa, Homo sapiens
LAPKPLMSALLSLCFVLPLAAPGHGTQGWEPCTDLRPLDILAEVVPSDGATSGIRIVQVHGARGLQLSVAAPRTMSFPASRIFSQCDLFPEEFSIVVTLRVPNLPPKRNEYLLTVVAEESDLLLLGLRLSPAQPPCTEVEDAQFWFDASRKGLYLCVGNEWVSVLAAKERLDYVEEHQNLSTNSETLGIEVFRIPQVGLFVATANRKATSAVYKWTEEKFVSYQNIPTHQAQAWRHFTIGKKIFLAVANFEPDEKGQEFSVIYKWSHRKLKFTPYQSIATHSARDWEAFEVDGEHFLAVANHREGDNHNIDSVIYKWNPATRLFEANQTIATSGAYDWEFFSVGPYSFLVVANTFNGTSTKVHSHLYIRLLGSFQLFQSFPTFGAADWEVFQIGERIFLAVANSHSYDVEMQVQNDSYVINSVIYELNVTAQAFVKFQDILTCSALDWEFFSVGEDYFLVVANSFDGRTFSVNSIIYRWQGYEGFVAVHSLPTVGCRDWEAFSTTAGAYLIYSSAKEPLSRVLRLRTR

SEQ ID NO: 26580 - protein, 685 aa, Homo sapiens
LQAERSPGWSLAPKPLMSALLSLCFVLPLAAPGHGTQGWEPCTDLRPLDILAEVVPSDGATSGIRIVQVHGARGLQLSVAAPRTMSFPASRIFSQCDLFPEEFSIVVTLRVPNLPPKRNEYLLTVVAEESDLLLLGLRLSPAQLHFLFLREDTAGAWQTRVSFRSPALVDGRWHTLVLAVSAGVFSLTTDCGLPVDIMADVPFPATLSVKGARFFVGSRRRAKGLFMGLVRQLVLLPGSDATPRLCPSRNAPLAVLSIPRVLQALTGKPEDNEVLKYPYETNIRVTLGPQPPCTEVEDAQFWFDASRKGLYLCVGNEWVSVLAAKERLDYVEEHQNLSTNSETLGIEVFRIPQVGLFVATANRKATSAVYKWTEEKFVSYQNIPTHQAQAWRHFTIGKKIFLAVANFEPDEKGQEFSVIYKWSHRKLKFTPYQSIATHSARDWEAFEVDGEHFLAVANHREGDNHNIDSVIYKWNPATRLFEANQTIATSGAYDWEFFSVGPYSFLVVANTFNGTSTKVHSHLYIRLLGSFQLFQSFPTFGAADWEVFQIGERIFLAVANSHSYDVEMQVQNDSYVINSVIYELNVTAQAFVKFQDILTCSALDWEFFSVGEDYFLVVANSFDGRTFSVNSIIYRWQGYEGFVAVHSLPTVGCRDWEAFSTTAGAYLIYSSAKEPLSRVLRLRTR

SEQ ID NO: 26581 - protein, 58 aa, Homo sapiens
LSLPLLVLCLLIAECSPGPSDYLPCAIPSAYRPGTWIFARDDSYHLTTDEDTHSSGPL

SEQ ID NO: 26582 - protein, 109 aa, Homo sapiens
MLSRGWLLLVQVLPPTPRISARLCHGGQRPPRTKGPCLGVRVRAEGAGASRISLNTSWLGPRRLKNTGLGWSWHLLTRKGIAEIQPLQPPSVHRWLTFSPTICFLLLKG

SEQ ID NO: 26583 - protein, 55 aa, Homo sapiens
LGSFLFVFVYQFPEPRPVCELDISIPRLSTVSLGVSGCGRGSGHGSVWETWGGAV

SEQ ID NO: 26584 - protein, 102 aa, Homo sapiens
VMVCVVMAAVSLSPASARLNPRRIAAIPSWPAPGVCFRGTGDPAGTSVWPIFWKVERLVKSAWRTGFGPAVSQKVLRSQTWVPRLPASEAQQQASWEGEELP

SEQ ID NO: 26585 - protein, 108 aa, Homo sapiens
VMVCVVMAAVSLSPASARLNPRRIAAIPSWPAPGVCFRGTGDPAGTSVWPIFWKVERLVKSAWRTGFGPAGRPERGLSQKVLRSQTWVPRLPASEAQQQASWEGEELP

SEQ ID NO: 26586 - protein, 54 aa, Homo sapiens
LSGLLCVLGTLLCATADPVVHQPPDPHLCLLIQCGHQLGLCQQLPQPLCVHRAL

SEQ ID NO: 26587 - protein, 46 aa, Homo sapiens
LDLVAFPLRLPMSPRRRPGVTPRAARRRQGVGLGWAFDAGGGWCAC

SEQ ID NO: 26588 - protein, 85 aa, Homo sapiens
LPGEEEKPAGTTFLLPFSRGRTHVFREAAAKDLLDCSQGLNFMLPSFLSLWALGEGSHLQCWCVLLPPHIPHAQGPAFCRCASGC

SEQ ID NO: 26589 - protein, 34 aa, Homo sapiens
LAETKNLSCMENGRLCTVASLKVQNIHKRNLHTF

SEQ ID NO: 26590 - protein, 231 aa, Homo sapiens
LWTMSVIFFACVVRVRDGLPLSASTDFYHTQDFLEWRRRLKSLALRLAQYPGRGSAEGCDFSIHFSSFGDVACMAICSCQCPAAMAFCFLETLWWEFTASYDTTCIGLASRPYAFLEFDSIIQKVKWHFNYVSSSQMECSLEKIQEELKLQPPAVLTLEDTDVANGVMNGHTPMHLEPAPNFRMEPVTALGILSLILNIMCAALNLIRGVHLAEHSLQDPRSWFCWLDQTS

SEQ ID NO: 26591 - protein, 114 aa, Homo sapiens
VYALMVPLLSASTLGTLASDLESVQLCPTATQLGKRSPSVGWGSRRRKAEPGADAGGSGRAQHPQAPSPSDRGARGPGGRCPGDCAARAPPRPLPWARARPGCHGGSGGDRPAA

SEQ ID NO: 26592 - protein, 75 aa, Homo sapiens
MERQVRARPAVPVVPAARAGPDPGVSPAQVLLSEPEEAAALYRGLSRQPALSAACLGPEVTTQYGGQYRTVHTDC

SEQ ID NO: 26593 - protein, 101 aa, Homo sapiens
MWCLSSRYLEAVRRLKVEGHRFPRTIHMTFVPDEEVGGHQGMELFVQRPEFHALRAGFALDEGEQVGKPMSSQAGSRRLLVGTELLHPLNPLSLLRHSQSH

SEQ ID NO: 26594 - protein, 113 aa, Homo sapiens
LGRISFELFADKFPKTTENFHALSTGEKRFGCKGSCFHRIIPGFVCQGGDFTCHTGGTSIYREKFDCKNFILKHIGPGILSMANAGPNTSGSQFSCALPRLSGWMASMWPLAW

SEQ ID NO: 26595 - protein, 74 aa, Homo sapiens
LFEVIAFVLIPATFHYTRVLSHSPSLSCILNNVLNAYLDNKYILFYSIIEKGEEHCGHLIEAHKECMRALGFKI

SEQ ID NO: 26596 - protein, 25 aa, Homo sapiens
LKQANLYISEGLHPRIITEGFEVER

SEQ ID NO: 26597 - protein, 148 aa, Homo sapiens [sequence omitted]

SEQ ID NO: 26598 - protein, 184 aa, Homo sapiens
LEPRGPRRRRPVAQETAESGLPAARPAVSPEGPARLLPAAPRPRPRGPLGTRWPPRRLHPQAAARPSQEAPAPTGPGAWDSGLCWRRREGGRTGATGRSLRPRDRVRGGGSSSSDRPCAGREAEPGERRVPCLVPHCGRASSIPGQPRPRAPSRVSSGSRLPYPRGMPTARTHARAWRQQPPPA

SEQ ID NO: 26599 - protein, 27 aa, Homo sapiens
MYVLSIMCLILLLSHPEAPSFVWTAKN

SEQ ID NO: 26600 - protein, 101 aa, Homo sapiens
MACCGAGGRRGRYCCDWHPHPADVDGTKVQKLRVTLALQPNMQDSSNPRNDGIALQILKRVLTKSWLTLTSPLQPSSSLSPKPCHGGLWHLSQPLSSPALP

SEQ ID NO: 26601 - protein, 111 aa, Homo sapiens
LLSPMARATLSAAPSNPRLLRVALLLLLLVAASRRAAGAPLATELRCQCLQTLQGIHLKNIQSVKVKSPGPHCAQTEVIATLKNGQKACLNPASPMVKKIIEKMLKNGKSN

SEQ ID NO: 26602 - protein, 18 aa, Homo sapiens
MLKKKIIRHGLVLISMFA

SEQ ID NO: 26603 - protein, 17 aa, Homo sapiens
VCMDLGGGGGGGRGVRG

SEQ ID NO: 26604 - protein, 144 aa, Homo sapiens
LAGLLLVFPLLVALLGLGLVWEQTCFISTLPSTSGAVASTARGGRGAHPAQEQRSGGEETASLLTGPLCVTKFGKNMDLSQSFHVCSQLPAEKAKGSLPGKETGRKIKEFGELDLKCELKIKIKPGHIPVSKAKPTLSRGRLSI

SEQ ID NO: 26605 - protein, 60 aa, Homo sapiens
LVFFSRELLGGDINFFLFFFLGGSCSREGGGGGESEMCWRRASPPCSSGVPSIKPSLLED

SEQ ID NO: 26606 - protein, 41 aa, Homo sapiens
LTFRLSPRALAILWALRLCMDPRWGAAPTQTSGSSQARWLP

SEQ ID NO: 26607 - protein, 48 aa, Homo sapiens
LIFVNIRFQCWFCLMRLTLPNFKLFECVFFQGKYEITSKKYTNMLNNK

SEQ ID NO: 26608 - protein, 115 aa, Homo sapiens
LPGCSGSGLPLLLFLFLLSPPAFLPGRAACALASCGAAPPPCAPGVPAVRLAALRAGLTFCRRWRVAELLSDQEQTIFNRVLLRGAQVGASECSVLTQVVVAQGRADPYIWQSFH

SEQ ID NO: 26609 - protein, 194 aa, Homo sapiens
LLFVKNMSSLEISSSCFSLETKLPLSPPLVEDSAFEPSRKDMDEVEEKSKDVINFTAEKLSVDEVSQLVISPLCGAISLFVGTTRNNFEGKKVISLEYEAYLPMAENEVRKICSDIRQKWPVKHIAVFHRLGLVPVSEASIIIAVSSAHRAASLEAVSYAIDTLKAKVPIWKKEIYEESSTWKGNKECFWASNS

SEQ ID NO: 26610 - protein, 48 aa, Homo sapiens
LALGVGKGPAKWPQDRAFVRRNMGTLRCDAGFQPQRFGGGAVVELRWP

SEQ ID NO: 26611 - protein, 54 aa, Homo sapiens
MYHNSSQKRHWTFSSEEQLARLRADANRKFRCKAVANGKVRFSQRLPSCPVTKF

SEQ ID NO: 26612 - protein, 10 aa, Homo sapiens
VVKYVYMLIV

SEQ ID NO: 26613 - protein, 121 aa, Homo sapiens
LGLTHMPLRKRSGCSHACKAHKVDGRNTEPKRAASREDSQRPGAHLTVKKILAGGFKEDTEEHHLRDYFEQYGEIEVIEIMTDRSSGNKRGFAFVTFDDHDSVDKIVIQKYHPVGMATTLK

SEQ ID NO: 26614 - protein, 180 aa, Homo sapiens
LRPCVRLRPEASAARGFCCEPETMAKPAQGAKYRGSIHDFPGFDPNQDAEALYTAMKGFGSDKEAILDIITSRSNRQRQEVCQSYKSLYGKVTTATGGPMGCGWKNDFIHLCARSGYFLDMALQVSLWADTLPCSFSSHQLGVFQPLIHPQHLLYAGLVLGVRAALVNKMGEVSTLWTAR

SEQ ID NO: 26615 - protein, 17 aa, Homo sapiens
MAPVTVRVQVSLQYASP

SEQ ID NO: 26616 - protein, 57 aa, Homo sapiens
LPLESLRPLGAGRLPEGGLRLRGGFQRGGAKGWAFPRAGRPGGGAGPCVCCTVSVTL

SEQ ID NO: 26617 - protein, 25 aa, Homo sapiens
VEREPLPQDTSNIIHRALTWLEKKR

SEQ ID NO: 26618 - protein, 14 aa, Homo sapiens
MGTGHLGIVLKGRF

SEQ ID NO: 26619 - protein, 164 aa, Homo sapiens
LAYIITTILLLSTLTIAAASLLGFSPPVLPPFSASFSNCCLYPDPHHDDLYLNASSFLALINGERDHPNATVWRKNFLRVGHLVLIGGPDDGVITPWQSSFFGFYDANETVLEMEEQLPARPTHQSELLLLRLVCLKPPRRKKPACRVQRQSESWGPGLSCALS

SEQ ID NO: 26620 - protein, 34 aa, Homo sapiens
MGSRAELCTLLGGFSFLLLLIPGEGAKGGSLRER

SEQ ID NO: 26621 - protein, 188 aa, Homo sapiens
LTHLLPRLCHLLLSPASVVAVCTGLSPLLVLRWFPWPGGPAQGDGCYSLLGQPLEYNLSICPPLLHDQSTYTVHQGQSGLKHENQGKRQALKSAFSDMGTADVVLGQGPEVTDLPKGITCTEADKLFKQLAMSSAKTQLRGCLVGVEGTMVGLLRMATAWTLLPFTPSWLCSLTCWLLKMPPFISTTP

SEQ ID NO: 26622 - protein, 18 aa, Homo sapiens
LGEAENPVPGTGKIGMLL

SEQ ID NO: 26623 - protein, 25 aa, Homo sapiens
LLQARLFCRSFFYVSFFSTLCTMCP

SEQ ID NO: 26624 - protein, 29 aa, Homo sapiens [sequence omitted]

SEQ ID NO: 26625 - protein, 39 aa, Homo sapiens
LGGRRAWGKTLVFEAGALLYGAVLCCSPLILSEFKEVNV

SEQ ID NO: 26626 - protein, 94 aa, Homo sapiens
MHISAQGPLGQCKERKKPAVKVTLSDCKSGDFPSVSAFDGKRWRLWRRLQKTSGKTSCCFYGNRRLGRDRSNSRNKLEIEDLNNVVLKYSNFKE

SEQ ID NO: 26627 - protein, 40 aa, Homo sapiens
LERKQMREGGLASFLASLMLLSFRGPSRANPLGTKLGILQ

SEQ ID NO: 26628 - protein, 56 aa, Homo sapiens
LKAGSLAPDPVLLTPVLHQEQNPMKGLHSAWIAASRSIVYMQKCTVPGVKLLVFDF

SEQ ID NO: 26629 - protein, 86 aa, Homo sapiens
LAQAVGAGALRAGSEPGLPDVAAAVPARSGQGLPLRAGRCPWLRLQSREASGCRGTAAIRRGRKMAAASEELNGAGTPGGWGGPGG

SEQ ID NO: 26630 - protein, 25 aa, Homo sapiens
MTCLAIITVISCLLNSCAAVSFCGT

SEQ ID NO: 26631 - protein, 26 aa, Homo sapiens
LSHVEAFPFNRGPSSEPRPISAIFFS

SEQ ID NO: 26632 - protein, 106 aa, Homo sapiens
LLLQMSPVPLPSPQSAPRESARKGLVPEGLAAERGQVLVRPPGWASAPLFELVGAGGRDEGNSSGTQVPSNGRGWPGCSPHGAALESPRWRARARLPSLASKPGTS

SEQ ID NO: 26633 - protein, 35 aa, Homo sapiens
MYMCLFRPCGGAQKSIQHGCRGKTAHHAHGDPTDR

SEQ ID NO: 26634 - protein, 27 aa, Homo sapiens
MKLPARVFFTLGSRLPCGLAPRRVLSA

SEQ ID NO: 26635 - protein, 328 aa, Homo sapiens
MRMRVYSWKIISECLQLHLIRWIRQMKTFRNLIKCTGLLMLNALQLADHYTGGMKQKYTVNQCRWQSEDSTFYLGERTYYIAAVEVEWDYSPQREWEKELHHLQEQNVSNAFLDKGEFYIGSKYKKVVYRQYTDCTFRIPVERKAEEEHLGILGLQLHADVGDKVKIIFKNMTTRPYSIHAHGVQTESSTFIPALPGETLTYLWKIPERSGAGTEDSACIPWAYYSTVDQVKDLYSGLIGPLIVCRRHYLKVFNPRKKLEFTLLFLVFDENESWYLDDNIKTNSDHPKKVNKDDEEFIESNKMHAVNGRMFGNPQGLTMHMGDEANGR

SEQ ID NO: 26636 - protein, 135 aa, Homo sapiens
MSTATRRVCGNVEGEPETPWSLPSLAGSFLPERSPQGTLEEELSWSCRGPGTGRSGGGPQQPRIPEPAARPGRSCALPPPGARRSRGTFQELPRAEVPGLGVASSCQIPCSPGDPEKHRAIPDPGTFRRLAAIWE

SEQ ID NO: 26637 - protein, 16 aa, Homo sapiens
VFLGVLLSLWIEPVKP

SEQ ID NO: 26638 - protein, 140 aa, Homo sapiens
LPLSPPRWPPAARPQSHCSRSRALPPSQQGNPARCQAILSARGFHEPQGWGHSSYPCPAALSSAAGRTSQKPWLLGRFQAFCPAPTPEPWCWWATSVCSLSRCWLRVHRSALSTGGPALQTTLTSLQPTPCQPHRFYFCT

SEQ ID NO: 26639 - protein, 168 aa, Homo sapiens
VDAHPPLSLMGFLGCWCVSFQEVVTFGDVAVHFSREEWQCLDPGQRALYREVMLENHSSVAGLAGFLVFKPELISRLEQGEEPWVLDLQGAEGTEAPRTSKTGFLGRPTMGQEPRHPHAPPATPVPGLPKHCSQRLTLPPPGLSSSPLGHFLVHDQDRRRGTSAIWMV

SEQ ID NO: 26640 - protein, 191 aa, Homo sapiens
LRRLCGSWWRRWLAWTRVEATGQQPQRRRPRPRQQARRDAPRHPPPPAGPVAGPASAARIPAPPHLLAASRASDPRSRPRNMTRDFKPGDLIFAKMKGYPHWPARVDEVPDGAVKPPTNKLPIFFFGTHETAFLGPKDIFPYSENKEKYGKPNKRKGFNEGLWEIDNNPKVKFSSQQRQGFVMLARLISNS

SEQ ID NO: 26641 - protein, 109 aa, Homo sapiens
LFLVMMMGSARVAELLLLHGAEPNCADPATLTRPVHDAAREGFLDTLVVLHRAGARLDVRDAWGRLPVDLAEELGHRDVARYLRAAAGGTRGSNHARIDAAEGPSDIPD

SEQ ID NO: 26642 - protein, 78 aa, Homo sapiens [sequence omitted]

SEQ ID NO: 26643 - protein, 68 aa, Homo sapiens
MATGTDQVVGLGLVAVSLIIFTYYTAWVILLVCHSPRPLLTFPEPWHRQSNYYIGSRHGAGFIACLIS

SEQ ID NO: 26644 - protein, 10 aa, Homo sapiens
MAAPCRLEGL

SEQ ID NO: 26645 - protein, 134 aa, Homo sapiens
LAVSPAGPLPRAFLLGQCVLGLCCSCYLLNPYVEISAKAGPAFFGQSGPHLCPGHQGCNSMWMSPNPSVEAGTVMGMWGMKPRQGMALKAIGAPIRDPLSLIHGAGANLRARPRAGSQGCRRVKTHHPDPCGAP

SEQ ID NO: 26646 - protein, 243 aa, Homo sapiens
LRQRKRVRVAQGGGGAAGGGGRGPPGQNVTMDEGGTPLLPDSLVYQIFLSLGPADVLAAGLVCRQWQAVSRDEFLWREQFYRYYQVARDVPRHPAAMSWYEEFQRLYDTVPCVEVQTLREHTDQVLHLSFSHSGYQFASCSKDCTVKIWSNDLTISLLHSADMRPYNWSYTQFSQFNKDDSLLLASGVFLGPHNSSSGEIAVISLGEHGRRVDPAPAPRRQPVQPRPPHRLLRAAVPRAEQAL

SEQ ID NO: 26647 - protein, 136 aa, Homo sapiens [sequence omitted]

SEQ ID NO: 26648 - protein, 43 aa, Homo sapiens
MTPFLLLVELGFVAVSEPPKDKLPRHPDISPGRLEGKWPFGGC

SEQ ID NO: 26649 - protein, 59 aa, Homo sapiens
MPLLVIYCSLLAYRNTTDASEMTMMVFWCQENSNAWESTTTIISCDPTELQSEGSNDKK

SEQ ID NO: 26650 - protein, 25 aa, Homo sapiens
MYNNGWILFLPVQLFMHVTELILSV

SEQ ID NO: 26651 - protein, 19 aa, Homo sapiens
LTCLAPAALSCFLPIVLAP

SEQ ID NO: 26652 - protein, 127 aa, Homo sapiens [sequence omitted]

SEQ ID NO: 26653 - protein, 100 aa, Homo sapiens
VVLVVLLVRGVLLPGALDGIIYYLKPDWSKLGSPQPWAATTASTTTATMGPASLLASWSSPSWASWLQSRACTSPRWQSQGDLCGPLLCPLLCHRSLHGD

SEQ ID NO: 26654 - protein, 243 aa, Homo sapiens
LAYLETEARGAPAATGAAGLVATFLLPHPAVTGRPRGLREDGGARRPSPGLGFLAPRLRGSTCPGPVETCGTRGATAEGPKAGGLLCPRTGLGAPAAAVTRGLIPGPGADAGELAADEAKEEPCPPSWGTSTLVPLQTAMLSWIPPVMGSSLLHQASQDRVHLSGYPAPLCLQHGCSARSLCWETLGGLKLENHTARCQGVLQGGAASTRVSTSSSRSGLSPNTQPLRPVAGRTHTLKDFSGG

SEQ ID NO: 26655 - protein, 99 aa, Homo sapiens
MLLLLLGSALVPGTKEPHDSGLAMMLGSAVSSSFPLSGSGGCKPRFKASAGVVSSEASPRGLQMAAFFLHPHVVPPLHSSILNVSLCVQLSAPPHPFFF

SEQ ID NO: 26656 - protein, 48 aa, Homo sapiens
MTQSPGGRAVARRPDDARRLLGAVRLPRAVDSRQSCLHERRKITLFKY

SEQ ID NO: 26657 - protein, 27 aa, Homo sapiens
VTVFLLLRSRAVRPMPRIPRPDVACFR

SEQ ID NO: 26658 - protein, 158 aa, Homo sapiens
MATGESHSPDLSEVSPEDSGRAGLGRGTPDRAVAGTTAGEPRRGPEDHWSLPSSLERASPARKTLQSTERACSCFSRFGQSAYPQKMTPRATGRLINKWHEPYCSDERGCGEPRCRTTATFRTTSLRPQPLLEATCSSGLMGGAASFLPAGPLSWAGG

SEQ ID NO: 26659 - protein, 163 aa, Homo sapiens
VRWAGPRRARGGDGASLFVSARSKMAAAALTGAPGGRRARWQRRRRARPRPGEQRAGMPGRRRAARRPWSGWAWEAGGNGEGTVAARPGDGDRRPAPPSRRGEAGSASGSAGPGRWGGVLRARLFSPSNRDHPWPFPPFLINKPSRPGLTVPAPSCLGDRSVV

SEQ ID NO: 26660 - protein, 64 aa, Homo sapiens
MLVTPGVPSPAPIGRLHRRRTLSAIRRARLPRGGSVRRFLPYLRLILNSPRASRVHILLNGHSS

SEQ ID NO: 26661 - protein, 113 aa, Homo sapiens
LAQVQRPCPGLTSSLWGPSWQAALFPGGPCRSCWSLELPRGTVHLDQPLMWGRPSESTLRRLILPQTYRDQTSRCSCGQEFTQKTRLNSPVFSFGNGMEVKTKCCSTIYQDEG

SEQ ID NO: 26662 - protein, 76 aa, Homo sapiens
LMRLLFSKIRVALILPLTGMHLNNYTSLVMDAALKNKDAQAELSLSVHHCCLPLPQTRADFHPFGSGRVSSVLLIQ

SEQ ID NO: 26663 - protein, 78 aa, Homo sapiens
LVQKKQVQLHKKCFPNFTDGKTRMVKQLVTEPGLEPATPDSKLLAPSTRGLEKSGTGKCKDPNPAQRPSRCSGPGAEP

SEQ ID NO: 26664 - protein, 39 aa, Homo sapiens
MCKNHMSLSPLGKNGDQAGVDALKGKSLSLGPGNDCSEM

SEQ ID NO: 26665 - protein, 34 aa, Homo sapiens
LNFCGRGTKNPVFNGTKEKPCNNFGAQRGDLRSG

SEQ ID NO: 26666 - protein, 55 aa, Homo sapiens
LNFCGRGTKNPVFNGTKEKPCNNFGAQRGDLRSGKMKQSSQGHRMAAATPSFMGI

SEQ ID NO: 26667 - protein, 75 aa, Homo sapiens
LRKSLLIDPNKSEMCGRARWPTPVIPALCEAGASGSPGVRSSRPAWPTWRNPVSIKNTNISRAWWRAPVIPATRL

SEQ ID NO: 26668 - protein, 69 aa, Homo sapiens
LTEVTGFIFFFFFLTGSHHVVQAAVQWHLAHKQPLPPGLETGVSLCHTGLSGTPGIKRTSHLCLPKCCD

SEQ ID NO: 26669 - protein, 73 aa, Homo sapiens
VGSWAVLCPCLLLPVSRSACLLRRGGFGPEAQAGTEMDRPRVGWGPGRVWTVLTVSGAPEARWVPGGVRFPED

SEQ ID NO: 26670 - protein, 92 aa, Homo sapiens
LDLLRIPSNSYLERRRSALRILALTFNFRVLYIEGRLHECVRSWRKTAEREREIRDPRVKSWRNFTVHHPKEESMMEAEVNLERTGRCHPSA

SEQ ID NO: 26671 - protein, 26 aa, Homo sapiens
LTLSTLEFRVAIECQLWRWGAYQIYK

SEQ ID NO: 26672 - protein, 84 aa, Homo sapiens
LTSQEGSLGSEFISSYSLYQNTINPSTLGQFTRSVLGSSTVSKSSVSASESIAEDLEEPSYKRERLTSFTVRETRIMKSFVETD

SEQ ID NO: 26673 - protein, 57 aa, Homo sapiens
LGFILVLAYFKVKFSFYSGKGLKFLGRGRKSLGSLLIHGAVQNCLNKLCATELNLKV

SEQ ID NO: 26674 - protein, 12 aa, Homo sapiens
MLLPCQSVRIKS

SEQ ID NO: 26675 - protein, 126 aa, Homo sapiens
LSTVEKGFGYKGSCFHRIISEFMCQGGDFPCHNGTDGKFIYGEKFDDENFILKHTGPGILSIANARPNSNGSQFFICTAKTEWLDGKHVVFGKVKEGMNIVEAMDRSGSRNGKTNKKIIIADCGQL

SEQ ID NO: 26676 - protein, 24 aa, Homo sapiens
VPLFPCMCLFLLVCKMSERKRRAR

SEQ ID NO: 26677 - protein, 169 aa, Homo sapiens
LLSELEKCKENFRDLTEKFLTSKATAYSLANHLQKYKCEECKDLIESVLEEELQFQERELTKLPRPAARLRIHDPLIQAQAEELTHLRQKIQEGRGVCYLFTQHVKNTVKSFEGLLRNTGIAYYQRQRFCEQMVQGSQLTEILVRKLATENHNGKKMKTGKSHWLPDQN

SEQ ID NO: 26678 - protein, 136 aa, Homo sapiens [sequence omitted]

SEQ ID NO: 26679 - protein, 57 aa, Homo sapiens
LHRVAMMGHRPVLVLSQNTKRESGRKVQSGNINAAKVTNLLSVYGSLPPAIFPGIWS

SEQ ID NO: 26680 - protein, 112 aa, Homo sapiens [sequence omitted]

SEQ ID NO: 26681 - protein, 51 aa, Homo sapiens
LCRGLGSMSLCTAGHTQGRSSIWYAATRTRTENNVYSPQLQHFQRPHVSFF

SEQ ID NO: 26682 - protein, 35 aa, Homo sapiens
LAALILVRARLLLLGWVCIIPITPSGKRSQPPFKP

SEQ ID NO: 26683 - protein, 15 aa, Homo sapiens
MMIGRSNHLFVIYLS

SEQ ID NO: 26684 - protein, 44 aa, Homo sapiens
LFYFENTAIGMFLHDPIKNNVMPFQCNFSYLVYFVSVILALFVL

SEQ ID NO: 26685 - protein, 14 aa, Homo sapiens
VIFLIFLLPKIVHH

SEQ ID NO: 26686 - protein, 49 aa, Homo sapiens
LPRREGAGLSHGAGGLGHGLHRHRGQHAAGKDVPEGLGRLPPGCWASTT

SEQ ID NO: 26687 - protein, 13 aa, Homo sapiens
LYPWKTLHILFAL

SEQ ID NO: 26688 - protein, 271 aa, Homo sapiens
MKLPRSRETTSPSPRTLLIFGACCAANTRRRRRRRRRQRRRRPPRGPLAWRGFIWSTASARLRTTTTTTTITTTTTTTGPSRRSRVTTPLTTTGRSPIWAAFPRAAAATPSPAPTRTTRPTTRILAPVCPAPAILCPQRKRRRRERRRRRKRRRRGAAGPRIPVKSARRRRTRPPSRTPAPAPAKCQCRASDSGAPASASLPACRRRPTSCTIWPPPPLQPNPLLSRMPADFPTSRVVSKRSRRRSGICRAGPPKHLRCTARPAWGVVSLR

SEQ ID NO: 26689 - protein, 36 aa, Homo sapiens
MMIIPHLLRDKDQRSTTATSPRTRQCWGMENEGVQL

SEQ ID NO: 26690 - protein, 38 aa, Homo sapiens
LRPAGRFYSAAGSLALLGYMQQATPQASSNNFLVQSCL

SEQ ID NO: 26691 - protein, 34 aa, Homo sapiens
VSSSPALTPWFLPWLPLVSTLAQPTPVCPSPSCF

SEQ ID NO: 26692 - protein, 61 aa, Homo sapiens
LFALVLCHVTFWRLFGTSEGGLCHLDLGGYLSPLTTQMIFGRWLNVNNNVLEEKLFFRGSW

SEQ ID NO: 26693 - protein, 24 aa, Homo sapiens
MRALLARLLLCVLVVSDSKRTVTV

SEQ ID NO: 26694 - protein, 71 aa, Homo sapiens
MSVCMLVCQLRNVCVCVHAHACMYLFPVPSGSGCHFRLSALSPATSVPQPEREMRCSWTPHCIWAAGPELV

SEQ ID NO: 26695 - protein, 153 aa, Homo sapiens
VEKVLDRRVVNGKVEYFLKWKGFTDADNTWESEENLHCPELIEAFLNSQKAGKEKVGTKRKSLSDSESDDSKSKKKREAADKPRGFARGRDPERVIGATDGSGELMFLMKWKDSDEADSVLASKEANMKYLQIIIAFYEERLTWHACPEDEAQ

SEQ ID NO: 26696 - protein, 166 aa, Homo sapiens
LMVELCVVFQSKNAWTVIGKGDKNIKAFCIDYRARVLAPEGNGPKCMLSISADIETVGETLKKIIPTLEEYHHYKGSNFDCELRLLTHQSLAGGIIEVKDAKIKELQGNTQTTIKLFRECCPHSTDGVVLTGERLWSCRVHKIILDLISESPTEDVHRLIIPIFMM

SEQ ID NO: 26697 - protein, 23 aa, Homo sapiens
LLGFLFFFFPLTTFAMSSGRSCL

SEQ ID NO: 26698 - protein, 68 aa, Homo sapiens
LPSAADKVNNSPKTSQRGSDDQPSQWPRKVNGLLSLALSACELHLGPKLTDCAEATLSRRSLLVLLTS

SEQ ID NO: 26699 - protein, 105 aa, Homo sapiens [sequence omitted]

SEQ ID NO: 26700 - protein, 53 aa, Homo sapiens
LLLLVNRSPGDFQVWASAEGEELVTAPGGLAAVTLMWTPQCRWWFTSASQFIY

SEQ ID NO: 26701 - protein, 73 aa, Homo sapiens
LHQQGGDGFLFPALQLCVGGAHGLRTQLPGEQLLAPRRLPPLQSPDPGHLQAGPQMPSLWSELPQAVQGSPVS

SEQ ID NO: 26702 - protein, 42 aa, Homo sapiens
MFPRLSKRKTTIFLLRLFLGLAGEAGVRGWNCVHKNCGYFNI

SEQ ID NO: 26703 - protein, 16 aa, Homo sapiens
LDCPALCALGDSRIFK

SEQ ID NO: 26704 - protein, 24 aa, Homo sapiens
LQYWACRLPSLSLSLLACEVGVVT

SEQ ID NO: 26705 - protein, 13 aa, Homo sapiens
LEKAHSLTMTRSV

SEQ ID NO: 26706 - protein, 37 aa, Homo sapiens
MLPCLVVLLAALLSLRLGSDAHGSPVVEVEEAEIDRN

SEQ ID NO: 26707 - protein, 25 aa, Homo sapiens
LFCLLFVVCFFATNFSIHSALLDKS

SEQ ID NO: 26708 - protein, 107 aa, Homo sapiens
LRINAGFLQVERVPVCKCPVVMDCLVGPRAIGEVSILVQEAAGSLRAIKECCEFGFSSKRSGLRLGLVVRDHVKRFEWLSLRSRCGKLILLVSSRGHGNYLECDLPS

SEQ ID NO: 26709 - protein, 20 aa, Homo sapiens
LALLLAGFSSLAALLDSAER

SEQ ID NO: 26710 - protein, 43 aa, Homo sapiens
VTFLSGQLSGALVSFLLCHKLGLTGDLASLGGPWSPGPVEARA

SEQ ID NO: 26711 - protein, 223 aa, Homo sapiens
MPPKKDVPVKKPAGPSISKPAAKPAAAGAPPAKTKAEPAVPQAPQKTQEPPVDLSKVVIEFNKDQLEEFKEAFELFDRVGDGKILYSQCGDVMRALGQNPTNAEVLKVLGNPKSDELKSRRVDFETFLPMLQAVAKNRGQGTYEDYLEGFRVFDKEGNGKVMGAELRHVLTTLGEAGKGDQNSFRVERGMGWARKTGQISRASRRLTVLQVVGRRLRRSELWG

SEQ ID NO: 26712 - protein, 9 aa, Homo sapiens
LNVNTLAAL

SEQ ID NO: 26713 - protein, 35 aa, Homo sapiens
LDIDANMTMLGMSLAGLGIAGALTQVAGEMTPQKE

SEQ ID NO: 26714 - protein, 30 aa, Homo sapiens
VDPGDGRGTCAVHQPAMPPPRHHTRTAPSP

SEQ ID NO: 26715 - protein, 27 aa, Homo sapiens
LGPRDLETLSFPTPQRHLPSLLFPLSI

SEQ ID NO: 26716 - protein, 216 aa, Homo sapiens
LSLVSLGRWGTSPMPRCTYQLEQNPGFLPDGPGVHARAHCQDLSGPYGHEFATSESLGGRVGKTRAPQSGARSRMERAGPAGEEGGAREGRLLPRAPGAWVLRACAERAALEVGAASADTGVRGCGARGPAPLLASAGGGRARDGTWGVRTKGSGAALPSRPASRAAPRPEASSPPLPLEKARGGLSGPQGGRGGNGAAPGAPLRRRGREGRGAGG

SEQ ID NO: 26717 - protein, 26 aa, Homo sapiens
LKSRAVPTASHFLVFIFSLLLSDLTQ

SEQ ID NO: 26718 - protein, 133 aa, Homo sapiens
LTSGATGTCGSGSSGGVKKKRGETAGPALRVARLRLKLCCCSGAAPPLLSPTTPTRSDGACSLARERVGSSSGGGGGGGGGGSSSFSSAEAAVARGAAKEAEALMLVRPRSLREEKFQKNCLNLTRISMNQEN

SEQ ID NO: 26719 - protein, 13 aa, Homo sapiens
MIAMVIVISLIQT

SEQ ID NO: 26720 - protein, 10 aa, Homo sapiens
MHVPRGQVRL

SEQ ID NO: 26721 - protein, 110 aa, Homo sapiens
LKTMKYICLMMKFGPMILIVGCGECTSWKENSQPPCQEAVVLALMESCTFLEDMMTKDTAIDFILLIYEQEMKPTFGRKSPTLKGNHLHHVINFPAGYIKTGRADILGMA

SEQ ID NO: 26722 - protein, 69 aa, Homo sapiens
LAKWFQATRLVWHGPVFCLLLRRVAAGTVGRAASGTAQVPARRSRAAGNHCGKSSQLFQTSETIIDFVQ

SEQ ID NO: 26723 - protein, 45 aa, Homo sapiens
LARRCSGDPSPGCRRRRRGDPLPGCRRRRLGRPGTCPPAAAPDFK

SEQ ID NO: 26724 - protein, 78 aa, Homo sapiens
LRRRRRRPGARDSDAARRRPRQGQREPRSPPQLPPRRGRAGEHGGGSAALGGGRSGGHSSARSVLSGGGRGRRGLSPR

SEQ ID NO: 26725 - protein, 87 aa, Homo sapiens
MATPDDIKIAKQRWSSSAPQTSRSMPEDLMEKSQRSAASWARDKHQPAVENAGPRCPEGAATACGGLAQQGPRSSLSSAPKREAQCG

SEQ ID NO: 26726 - protein, 109 aa, Homo sapiens
VTVGMGQKDSYVGNEVQSKRGILTLKYPIKQDIVTTWDDMEKIWHHTFYNELCVAAKEHPMLLTKVPLSPKANHKKMTQIMLEIFDRPAMYVAIQAVLSLYTSGLPLTS

SEQ ID NO: 26727 - protein, 16 aa, Homo sapiens
LCYLTLLLLVMLQTGK

SEQ ID NO: 26728 - protein, 56 aa, Homo sapiens
LGRGLHRRPRGAGSARPCFLRPGRQPHVAGLEGRRGRGGQGFLRGHWLPGLSRVCS

SEQ ID NO: 26729 - protein, 52 aa, Homo sapiens
LTFLLGVGVRRDSPLTPQRLLREEETVDMSPPCSQAYARRPDRAVSGPWTLL

SEQ ID NO: 26730 - protein, 45 aa, Homo sapiens
LALLLSRYLREPASFFPPLPVRLSSSPSSLPGLPLLPPLAPSPEG

SEQ ID NO: 26731 - protein, 72 aa, Homo sapiens
LVGWPLCQARPLAGTGVTARQMTSYSGARWGTVLGVPPIPVVYPCLEAGRGSLQVVHKLLSCPQGGSLDHSS

SEQ ID NO: 26732 - protein, 130 aa, Homo sapiens
LGPTLTLVFLSAAAVPAPVGRVQAATEGGLALPSTVTEGLAGHGHRTGDGWRQRGVLGVGVRVAVLGEKGRLLLPVARSLPSHPCPLSLSHPVPDPPRKGWGSRPPGTSQYPERTAQAPSQRAPALPHSA

SEQ ID NO: 26733 - protein, 39 aa, Homo sapiens
VYALFWFLFSNQMPVWEEMNVFSLLDLHCWIFFLKCNLE

SEQ ID NO: 26734 - protein, 10 aa, Homo sapiens
LSMSTVPIRS

SEQ ID NO: 26735 - protein, 9 aa, Homo sapiens
LLPSVLAQL

SEQ ID NO: 26736 - protein, 97 aa, Homo sapiens
LSRKAAAGCGAPPRRPGGPSSRSIYRLRSPALPRLEMDPNCSCTTGVSCACTGSCTCKECKCTSCKKSCCSCCPVGCAKCAHGCVCKGTLENCSCCA

SEQ ID NO: 26737 - protein, 61 aa, Homo sapiens
LKKGGRGTLTHQPRRLLPANKNPSSATHVLNVSIVCLMPQRSPGSRSVTQAGVQWCDLGSS

SEQ ID NO: 26738 - protein, 83 aa, Homo sapiens
VVSWVPSLAILWGVVTGRTLRCLSTLPPLPQAERDLVAGGGDTSAEPRSAAPGHWQADPVSLWATSGGAEQCRRQEKAVPDAG

SEQ ID NO: 26739 - protein, 61 aa, Homo sapiens
VSRSGAGWRGRSSRAARSPRPPDSRLAPLPVPFTPKFCSLRADWLMPLQPQPKLCLKDRVT

SEQ ID NO: 26740 - protein, 158 aa, Homo sapiens
MSLSLVFCGSVIGIPSEIISPKKVAELHHLLNVHDLVGAMHVPEDAVVSSADVALALASAASQNGVQIYDRTSVLHVMVKKGQVTGVETDKGQIECQYFVNCAGQLLWMLMEEFIFGTGRVASCLGALRRTRNQFSLRARTSWRFRIYRKTGITLSLC

SEQ ID NO: 26741 - protein, 38 aa, Homo sapiens
MTRDAIVTVPGSWALSLAYTVLLAAGHCPTGIQLQSLS

SEQ ID NO: 26742 - protein, 76 aa, Homo sapiens
MICWPLVGLAWSTCSLQPRPTGDLTLPSPGTMNAACELLGRLQAEVLECVSLVELTSLKGREKLAPVPFFSLLQYE

SEQ ID NO: 26743 - protein, 27 aa, Homo sapiens
VSRDPMVLKTGVSCISSLSACCHPCKM

SEQ ID NO: 26744 - protein, 61 aa, Homo sapiens
LPHLLARGCFIPQFLPMHLPRTGHFVPYLRHLFPKSRWHLHTAPVHTASAQEDEFWPLTAP

SEQ ID NO: 26745 - protein, 411 aa, Homo sapiens
LLILQTSPLSKAPQPLILLLLYWSWVGVVSVTAASRETEAGIQVSSEEPGPRNVSPHSRLQDETNLRLEAENNLAAYRQVREVEGRGRGGRKGLMATHPNTAPKLSPPEQCAAPHCPRRRGKARLRNGEKEPGAPVALYSSPLLPLQEADEATLARLDLERKIESLEEEIRFLRKIHEEEVRELQEQLARQQVHVELDVAKPDLTAALKEIRTQYEAMASSNMHEAEEWYRSKFADLTDAAARNAELLRQAKHEANDYRRQLQSLTCDLESLRGTNESLERQMREQEERHVREAASYQEALARLEEEGQSLKDEMARHLQEYQDLLNVKLALDIEIATYRKLLEGEENRITIPVQTFSNLQIRGQYSRASWEGHWSPAPSSRACRLLQTGTEDQGKGIQLSLGAFVTLQRS

SEQ ID NO: 26746 - protein, 79 aa, Homo sapiens
MMMTWSSDPPRGPSPLTTSSTSVPQPLSAHLPGPAAHGASLIPMIPLRLGQRPERERRLALGAGAPLAPHRDAFCLPVY

SEQ ID NO: 26747 - protein, 37 aa, Homo sapiens
LVSEGHRARIPLSQGPAAAPATLPSLPCPGSCCCHPV

SEQ ID NO: 26748 - protein, 86 aa, Homo sapiens
VVPVPAGTGLGLVRPWGLRLVFLCLDLHIYCIAGRDPQACPPCQDSSGSVWVPHSAPISPMSPAGAGSHPSLLAAAPSRPGIGSAR

SEQ ID NO: 26749 - protein, 36 aa, Homo sapiens
VLCLFCSVLLSALERRFLIKSPWCVCVPVCGGTSST

SEQ ID NO: 26750 - protein, 154 aa, Homo sapiens
LGASLKDEVLKIMPVQKQTRAGQRTRFKAFVAIGDYNCHVGLRVKCSKEVATAIRGAIILAKLSIVPVRRGYWGNKIGKPHTVPCKVTGHCGSVLVGFIPTPRGTGTVSAPVPKKLLMMAGMDVCYTSARGCTATLGNCAKAIFDLTALRPTAT

SEQ ID NO: 26751 - protein, 61 aa, Homo sapiens
MTARLGWMSPLLTWSALTPPGQWGECLPTAGACGSPGFTHSLLFNVGTSWRMSLRIWMKCH

SEQ ID NO: 26752 - protein, 88 aa, Homo sapiens
LWPVSEPRSFSWLSMSHRVDGRLSVHPLKASGLLPPSGSWGHPCRSDGVDACSFFGQIPKSGVAGSSGNSVKSCQAFPTWLFHLTSQP

SEQ ID NO: 26753 - protein, 15 aa, Homo sapiens
LLRARMLIMLVAWLL

SEQ ID NO: 26754 - protein, 13 aa, Homo sapiens
LCLCVFVLFIESI

SEQ ID NO: 26755 - protein, 27 aa, Homo sapiens
VVVISVAAKSCGSLGLRSPFVELREPP

SEQ ID NO: 26756 - protein, 128 aa, Homo sapiens
VTAALVPQPARAMCHPEASRPFSPWYPPPRSCLPKPSSCCCSHNKCHHQGPSSCQCRLSRAGDWGTCSHHLSNSGGSQASQGSDDDRNEKWDDSSTLVDELRTPGRGMYLVFDGSVDLHYHCSAKCKS

SEQ ID NO: 26757 - protein, 21 aa, Homo sapiens
MKTRRKLSVIMLCGVWIHLTD

SEQ ID NO: 26758 - protein, 29 aa, Homo sapiens
LGSVVPRGRRPLPAHQRRGAPAGTDTAHL

SEQ ID NO: 26759 - protein, 156 aa, Homo sapiens [sequence omitted]

SEQ ID NO: 26760 - protein, 75 aa, Homo sapiens
LPPCFPHPTTRPLSSDVDECRERGPALCGSQRCENSPGSYRCVRDCDPGYHAGPEGTCDEFTKHLLYASVWKRCG

SEQ ID NO: 26761 - protein, 115 aa, Homo sapiens
LPPCFPHPTTRPLSSDVDECRERGPALCGSQRCENSPGSYRCVRDCDPGYHAGPEGTCDDVDECQEYGPEICGAQRCENTPGSYRCTPACDPGYQPTPGGGCQGGCPSGIGCERV

SEQ ID NO: 26762 - protein, 31 aa, Homo sapiens
LASLVLGRSTLFQFLSYSHLVVLGEVVLPFC

SEQ ID NO: 26763 - protein, 12 aa, Homo sapiens
LATGPSCPTLRC

SEQ ID NO: 26764 - protein, 13 aa, Homo sapiens
MWILFGAYVTQPL

SEQ ID NO: 26765 - protein, 36 aa, Homo sapiens
MHTLHDIRKFIVERNLTNVRNVAKHFQGVQALLLIL

SEQ ID NO: 26766 - protein, 158 aa, Homo sapiens
VPRTRTSSPSLSLPLIHLVSVLLPFSVPEAGRSRGTHGKSRSCPRRVRPSRSGGGRSRSSLIGGVSKWHLRKEPKHGLELNPRRGPRARSGNLRKEPKAGTVRIVGSGRLLGQGRRRRSEQVRGRSQRLGRIELLEEPELAEGTGRSGTRGHTETSER

SEQ ID NO: 26767 - protein, 165 aa, Homo sapiens
MTFLLLRSICLHGCLGLATVVESMTLPCCHTWVGKVNKRVTGEARKPLGWVGQGSPFEIVWGMRRPGRDLSVLFLPMLPQVSRGAGHRGSSGTEDEEQAGADMAKARSSPRGTFLSIFPPHTWTRLAGCQTSLHPPGRGEPEPVGSGEGLRGTASGPPPAQPCMY

SEQ ID NO: 26768 - protein, 77 aa, Homo sapiens
LGWARGVSSPRGAAPAAAAAASSFILVHHRRHRHQDVQPSGLPRSQSRRELVHSLRTAAECTARRLAFTSTVYKKTC

SEQ ID NO: 26769 - protein, 36 aa, Homo sapiens
VTETQSIPKWAVTEVVDHTVKLKCEGKAGTYWKLKI

SEQ ID NO: 26770 - protein, 65 aa, Homo sapiens
LGRVSHAKLGGESAGLTPSSSGRRRQVGTGRVAHHRRGGRRSSLIVPGAVTTMRPFLLFLLHLSL

SEQ ID NO: 26771 - protein, 33 aa, Homo sapiens
VLHFWTLHFNLRRQYVSKNWYLFHHTSFRPVKE

SEQ ID NO: 26772 - protein, 97 aa, Homo sapiens
LVIITAWACEQEGESRLNLVQPNVNIFKFIIPNVVKYSTNCNLLIVSNPVDILTYVAWKISGFPKNCIIGSGCNLDSARFRYLMGEGLGVHPLSCHG

SEQ ID NO: 26773 - protein, 23 aa, Homo sapiens
LLSVAWIAKTQCMAESSRPSIRS

SEQ ID NO: 26774 - protein, 42 aa, Homo sapiens
LRSTRFSHEGQSGRECGCVLGQVAWIAKTQCMAESSRPSIRS

SEQ ID NO: 26775 - protein, 12 aa, Homo sapiens
MARFLFTSLYWI

SEQ ID NO: 26776 - protein, 59 aa, Homo sapiens
LRWLPAASTSLAALATLADCCAAGAMSVSEIFVELQGFLAAEQDIRELSQIGRKDFIWM

SEQ ID NO: 26777 - protein, 15 aa, Homo sapiens
VCVCLSLLIAYFSTC

SEQ ID NO: 26778 - protein, 121 aa, Homo sapiens
LDQDPVGAGPGGPFLCGLPAEREGRGGGIQRRHLQVGLKGQPAIIDGELYNEVKAEESSWLIEDGKVVTVHLEKIKKMEWWSRLVSSDPEINTKKINPENSKLSDLDSETHIMVEKTIYDQ

SEQ ID NO: 26779 - protein, 62 aa, Homo sapiens
VFPLTDGLKEEKLNRGRRIQGKRPGPYLAGRILSHNTREIARLGRKDCFAGSPRSETWSSSD

SEQ ID NO: 26780 - protein, 18 aa, Homo sapiens
LPPRDSAGELRGGGRFVW

SEQ ID NO: 26781 - protein, 88 aa, Homo sapiens
LAIHPLLLVKWFLILAWEGTQKLLLTLPTKDRFSQWPTLLLGMVELLILLLWMNWDLANIWSLMESRFQVCWCWIIVKTTTTGWLPRV

SEQ ID NO: 26782 - protein, 76 aa, Homo sapiens
LKELMGLRKGGACDQGPKATAFQILGSKWHLLELWPRKENVYLFSNFADTRILPVIEKKALSNYLQVVYLFCKEYV

SEQ ID NO: 26783 - protein, 132 aa, Homo sapiens
LSHPHAPSAGLWLLLCMSLRWESCLPACQFPPQGRAPLPARVWEAVQAVLAALGKPRDSHNTPGTVGLGGTTGNSGLECVCLFLGYECVSSPRGLLSSHIVWFGVNDGGRHLLIDGRCPPFRESPSMGGCRA

SEQ ID NO: 26784 - protein, 72 aa, Homo sapiens
LWLALVRSVVFFPGVFLLISFLPGPSGARDRHHLPERGCPRCQALGSRLSGWPGGRRGDVGGPDVCLERPRS

SEQ ID NO: 26785 - protein, 74 aa, Homo sapiens [sequence omitted]

SEQ ID NO: 26786 - protein, 15 aa, Homo sapiens
MLLGSDFCQCDYVPK

SEQ ID NO: 26787 - protein, 32 aa, Homo sapiens
VTSTLDSEVVQTRQRGAVAIILPPGASSFLRI

SEQ ID NO: 26788 - protein, 17 aa, Homo sapiens
LMPLQKLLLWFLLLWSP

SEQ ID NO: 26789 - protein, 104 aa, Homo sapiens
LHRSTTPPPPAALLRPPRPPAAPAAAARAGVRRAGARRGPGRALPAAATAVPPPSARRRRRCPAPEHAGPARASRPSQGVRCTMRNLGPSFYTMMRRVVLFVLN

SEQ ID NO: 26790 - protein, 59 aa, Homo sapiens [sequence omitted]

SEQ ID NO: 26791 - protein, 70 aa, Homo sapiens
LVLSPARLGLSTLTPLSRLEGRFLVVVAFMLSKNFFSPENSSWQPCVCHPLVTCGSMYFSAPTAYCCFSH

SEQ ID NO: 26792 - protein, 10 aa, Homo sapiens
VAAAAMLLWL

SEQ ID NO: 26793 - protein, 50 aa, Homo sapiens
VKMAGPELLLDSNICLWVVLPIVITLRRHDPPLRVHPAGERQEAHPGTSI

SEQ ID NO: 26794 - protein, 25 aa, Homo sapiens
LRPRFLTKLVLLRVFLHDLTAVDSR

SEQ ID NO: 26795 - protein, 52 aa, Homo sapiens
MNGFFDFLLRINLCFSFCFSTLHSSFHPFQPTGLKNQELGMLNSCSGSHEVA

SEQ ID NO: 26796 - protein, 15 aa, Homo sapiens
MAQLCIDLVLFILHF

SEQ ID NO: 26797 - protein, 97 aa, Homo sapiens
MLCGLLTLLRGQSGSRAPYRNSEGRVAARPTCLSSTCPLALVIISCRITTRDHPGSHGFALVFQVRFSPFLGLKKFCSGEQFPTCQRSLLTNTSPCF

SEQ ID NO: 26798 - protein, 24 aa, Homo sapiens
LPAARTSVVEELVLMVVVVTAMGP

SEQ ID NO: 26799 - protein, 107 aa, Homo sapiens
LIMEKLALKCWIMKEKKSQETEVTSTLEQQKICLVLESCLKKNSDEEGSQEKGGDDSQQKFIAHVPVPSQQEIEEALVRRKKMELLQKYASETLQAQSEEARRLLGY

SEQ ID NO: 26800 - protein, 33 aa, Homo sapiens
LILAAGSRLLASALLLDQLTKALLSGHQNWKAF

SEQ ID NO: 26801 - protein, 225 aa, Homo sapiens
LLPQGYGRTYLSCTSAHTSTSDGTAMITRAGLPCQDLEFVQFHPTGTYGAGCLITEGCRGEGGILINSQGERFMERYAPIAKDLASRDVVSRWMTLEIREGRGCGPEKDHVYLQLHHLPPEQLAMPLPGISETAMIFAGVDVTKEPIPVLPTVHYNMDGIPTSYEGQVLRHGNGQDQIVPSLYACGEAACASAHGVNRLGANSLLDLVVWSGMCPEHRRVVQAWR

SEQ ID NO: 26802 - protein, 30 aa, Homo sapiens
LIKCVSWLIGMSVILLRQDVLRIPGTVGLW

SEQ ID NO: 26803 - protein, 28 aa, Homo sapiens
MNKIWSIFVSLCLISPEFGNYFAMVSMN

SEQ ID NO: 26804 - protein, 157 aa, Homo sapiens
VILHLKEDQTEYLEEMQVKEVVEKHSQFLGYPITLYLEKEREKEISDGKAEEEKGEKEEENKDDEEKPKIEDVGSDEEDDSGKDKKKKTKKIKEKYIDQEELNKTKPIWTRNTEDITQEEYGEFYKSLTNDWKDHLAVRYFSVEGQLEFRALLFIPP

SEQ ID NO: 26805 - protein, 11 aa, Homo sapiens
MCFWVLLWLAD

SEQ ID NO: 26806 - protein, 7 aa, Homo sapiens
MSLVLLL

SEQ ID NO: 26807 - protein, 54 aa, Homo sapiens
MVLISEVGGSKNLTRKAQVTEALERDSASGHPAEISNPWLTEEVWICLKGHCKN

SEQ ID NO: 26808 - protein, 45 aa, Homo sapiens
MVLISEVGGSKNLTRKAQVTEALERDSASGHPAEISNPWLTEEVW

SEQ ID NO: 26809 - protein, 166 aa, Homo sapiens
MHGGSSGWCRHLHDWAVWCWLFSAYLVAEKLVVITKHNDDEQYAWESSAGGSFTVHADHGEPIGRGTKVILHLKEDQTEYLEERRVKEVVKKHSQFIGYPITLYLEKEQDKEISDDEAEEEKGEKEEEDKDDEEKPKIKDVGSDEEDDSSKDKKKKTKKIKEKYID

SEQ ID NO: 26810 - protein, 37 aa, Homo sapiens
VECHGTIRRQMDSVTKVSERIGPRCESQPGFKVLTSC

SEQ ID NO: 26811 - protein, 63 aa, Homo sapiens
VNVLVIVTMLGCKILTEIAHLLDTTQEEPMARVVEILCIWSKFSMLGSYSFIRCIFFHKMHIM

SEQ ID NO: 26812 - protein, 120 aa, Homo sapiens
MKGGILPPFLCLCLVLLSLFPSDHFGNLKKLWSLPYMTTKPMILRNSHCGATKSTACWTVLRFTGGESRTGMGMKDMYQAVIWWKNLQIIWKPMSGTIRVSAETKLKNFFWTQAKKEPSW

SEQ ID NO: 26813 - protein, 20 aa, Homo sapiens
LFSTSAQCIRDLCPSQHYFL

SEQ ID NO: 26814 - protein, 41 aa, Homo sapiens
VKMVTIFLMCISIARLSNLILVKFLKKDSLLKTEKAQSWTL

SEQ ID NO: 26815 - protein, 44 aa, Homo sapiens
MWPFFFSFYLLSGNWVWVNPRSICRRPSTVGGIGCRAGKALPTR

SEQ ID NO: 26816 - protein, 204 aa, Homo sapiens [sequence omitted]

SEQ ID NO: 26817 - protein, 136 aa, Homo sapiens
LGFYPAEITLTWQRDGEDQTQDMELVETRPTGDGTFQKWAVVVVPSGEEQRYTCHVQHKGLPKPLILRWEPSPQPTIPIVGIIAGLVLLGAVVTGAVVTAVMWRKKSSDRKGGSYSQAASSQSAQGSDVSLTACKV

SEQ ID NO: 26818 - protein, 107 aa, Homo sapiens
VGFLQLATGLVLCGRFTALGKGLAWGTSSKDPRIAAGQQSPLEKKILNLGGVHTTAARQLIMQKYQEECEILCREQAVSLDYWLAKAESYYNKIIVEMMKEETGNEI

SEQ ID NO: 26819 - protein, 39 aa, Homo sapiens
LVLMFFCLFRSLSRDRRRERSLSRERNHKPSRSFSRSRR

SEQ ID NO: 26820 - protein, 67 aa, Homo sapiens
VLGLSGYRKASLRCSLLRIILFFSRCLRKCTMERRRWRLLPFRQKLPNSCPSSSIPSIPTRRFSFGS

SEQ ID NO: 26821 - protein, 119 aa, Homo sapiens
VPQGTPFQAANSSPPPPQAKHTPAPVRSCHPGCSKDSGKDLRLPGLPTRQPDCAASPDSVGPSDSARQSASSNLISHLLSPITSILFPPVSPSPPQFPPCPSFPPSSPSPGHFANLWLL

SEQ ID NO: 26822 - protein, 71 aa, Homo sapiens
LHVAARYNHLSIIRLLLTAFCSVHEKNQAGDTALHVAAALNHKKVAKILLEAGADTTIVNNLPDCSEHNLA

SEQ ID NO: 26823 - protein, 227 aa, Homo sapiens
MSSTQFNKDPSYGLSAEIKNRLLCKYDPQKEVELRSWIEGLTSLSIGPDFQKGLKDGISLWTLMNKLQPGSVLKINRSMQNWHQLENLSNFIKAMVSYGMNTVDLFDANDLFESGNMTQLQVSLLALVSKARTKGLQSGVDIGLKYSEKQEPNFDDATMKAGQCTIGLQMGTNKCTSQSGMTAYSTRRHLYDPKNHILPPMDNLTISLQMGTNKCASQVGMTAPGPG

SEQ ID NO: 26824 - protein, 341 aa, Homo sapiens
LRGMSAVPSPPLMLSACMLAMASCPAAPTLSSTSSEERRQGQGMPSGGQVPKGQHMWHRLSVHVKTNETACNQTAVIKPLTKSYQGSGKSLTFSDTSTKTLYNVEEEEDAQPIRFSPPGSPSMVVHRRVPSAATTPPLPSHLTAEETPLFLAEPALPKGLPPPLQQQQQPPPQQKSLMDQLQGVVSNFSTAIPDFHAVLAGPGGPGNGLRSLYPPPPPPQHLQMLPLQLSTFGEELVSPPADDDDDSERFKLLQEYVYEHEREGNTEEDELEEEEEDLQAASKLTPDDSPALTPPSPFRDSVASGSSVPSSPVSESVLCTPPNVSYASVILRDYKQSSSTL

SEQ ID NO: 26825 - protein, 375 aa, Homo sapiens
VPSPPLMLSACMLAMASCPAAPTLSSTSSEERRQGQGMPRRGSQNSRPPANVRRHMCSFENPHTAVNVSNGKSVSWSEPGGGQVPKGQHMWHRLSVHVKTNETACNQTAVIKPLTKSYQGSGKSLTFSDTSTKTLYNVEEEEDAQPIRFSPPGSPSMVVHRRVPSAATTPPLPSHLTAEETPLFLAEPALPKGLPPPLQQQQQPPPQQKSLMDQLQGVVSNFSTAIPDFHAVLAGPGGPGNGLRSLYPPPPPPQHLQMLPLQLSTFGEELVSPPADDDDDSERFKLLQEYVYEHEREGNTEEDELEEEEEDLQAASKLTPDDSPALTPPSPFRDSVASGSSVPSSPVSESVLCTPPNVSYASVILRDYKQSSSTL

SEQ ID NO: 26826 - protein, 181 aa, Homo sapiens
LSLRLFHLLLTSAAWVPDESQVTLNSAICVLSTVLIMEFPDLGKHCSEKTCKQLDFLPVKCDACKQDFCKDHFPYAAHKCPFAFQKDVHVPVCPLCNTPIPVKKGQIPDVVVGDHIDRDCDSHPGKKKEKIFTYRCSKEGCKKKEMLQMVCAQCHGNFCIQHRHPLDHSCRHGSRPTIKAG

SEQ ID NO: 26827 - protein, 98 aa, Homo sapiens
MGSHCGHNGSRSSEHAQVIGRLLRPSDRGDSLGKPWPVDGSLGCLRTAPEVRESRAHPEDREQFLSLPPPRQLFSSNSVYRRGLFFKLGFLDVQMELW

SEQ ID NO: 26828 - protein, 12 aa, Homo sapiens
LLFLTFLLIQVT

SEQ ID NO: 26829 - protein, 67 aa, Homo sapiens
LVLLTLHLLSWTPSPPQPLFLSPLTQWRLSDASFSLLCQSRSEEGEEGLGVRGQAMAKGPAAPHLSL

SEQ ID NO: 26830 - protein, 171 aa, Homo sapiens
LQRVLQVWPSLFCVLLLLEAQPLWRCDLVIGRFTAKTPGSPGSLEMGPLTFMDVAIEFSLEEWQCLDTAQRNVYRHVMLENYRNLVFLDLITCLEQGKEPWNMKRHEMVVAKHSAVAFTFDLSGLNILSFQSILPFVSALYVMGNRNQCLQKHLEARNKDLCVLVLPKTFG

SEQ ID NO: 26831 - protein, 130 aa, Homo sapiens
LVGSRASPTALICVVSSQGNPGNDGPPGRDGQPGHKGERGYPGNIGPVGAAGAPGPHGPVGPAGKHGNRGETGPSGPVGPAGAVGPRGPSGPQGIRGDKGEPGEKGPRGLPGLKGHNGLQGLPGIAVSKL

SEQ ID NO: 26832 - protein, 76 aa, Homo sapiens
LGLLGPGRVFWMGLGCSLVAGPPRSGPACWGFEEVECRVEVLFTRVLGTVPGTLRQAPRPAGPAGGARCVCTFQSS

SEQ ID NO: 26833 - protein, 14 aa, Homo sapiens
MLLYSPTLLMYLFS

SEQ ID NO: 26834 - protein, 51 aa, Homo sapiens
LLLMVAPYLSRGVKMEPPPSQPTLLRLCPKWYLHSQRVYLYFLKNVSKTFV

SEQ ID NO: 26835 - protein, 43 aa, Homo sapiens
LVPSVNSRVSFDFVTAPLGLRLIRFGQRTSERFHCSSVDRGSR

SEQ ID NO: 26836 - protein, 109 aa, Homo sapiens [sequence omitted]

SEQ ID NO: 26837 - protein, 89 aa, Homo sapiens
VTLARSLQSRPVAMSADVTSSLAAFGEGWGVRELSDHSSPRPLLGLARQSPQSGPPSDWGLLPTPPSFWSDAAARGLRGLFGTNRALPW

SEQ ID NO: 26838 - protein, 19 aa, Homo sapiens
LLFLFPIMCISSLARFPFK

SEQ ID NO: 26839 - protein, 43 aa, Homo sapiens
LILFFILEVTAPPEDNPVEDSQVIVEEVSIFPVEEQQEVPPDT

SEQ ID NO: 26840 - protein, 63 aa, Homo sapiens
LLWGICLFSLFFLTSISMYVQRLKNNLERVHPSNSSSLEISASLRLRLYSTSSDYTTTINLLL

SEQ ID NO: 26841 - protein, 552 aa, Homo sapiens
VGTLQEGTPSPPGPPNPAPARSPGRVGPRAPLAMAAPSRLLIRGGRVVNDDFSEVADVLVEDGVVRALGHDLLPPGGAPAGLRVLDAAGKLVLPGGIDTHTHMQFPFMGSRSIDDFHQGTKAALSGGTTMIIDFAIPQKGGSLIEAFETWRSWADPKVCCDYSLHVAVTWWSDQVKEEMKILVQDKGVNSFKMFMAYKDLYMVTDLELYEAFSRCKEIGAIAQVHAENGDLIAEGAKKMLALGITGPEGHELCRPEAVEAEATLRAITIASAVNCPLYIVHVMSKSAAKVIADARRDGKVVYGEPIAASLGTDGTHYWNKEWHHAAHHVMGPPLRPDPSTPDFLMNLLANDDLTTTGTDNCTFNTCQKALGKDDFTKIPNGVNGVEDRMSVIWEKGVHSGKMDENRFVAVTSTNAAKIFNLYPRKGRIAVGSDADIVIWDPKGTRTISAKTHHQAVNFNIFEGMVCHGVPLVTISRGKVVYEAGVFSVTAGDGKFIPRKPFAEYIYKRIKQRDRTCTPTPVERAPYKGEVATLKSRVTKEDATAGTRKQAHP

SEQ ID NO: 26842 - protein, 245 aa, Homo sapiens
LGVPRHSRLLRVPYPATQPPHWAGLGLEGVIKVHMCLEVEFVAVFFSVHVGHPYPYLCCHPQHGHPATTAIQPVAPPFAGQPRRHCRPVLALPTFRRPKILLWPARASEGPPPCRAGGWGDVFSEELQGRCWGLPGHLPLLPQDSRVQRSRLAPHTRLSAHCAASTFTDGACARPHRPISGAHVIRAPAALAVDLVGDRRGHAESRPRPLFRAAVSGRLRRTLGEERLGAVDDEHLVAALVAELL

SEQ ID NO: 26843 - protein, 73 aa, Homo sapiens
LTSYPFDTVCRCMMMQSELKATDIMYTGTLDCWRKIARDEGDKAFFKGAWSNVLRGMGGAFVLVLCDEIKKYT

SEQ ID NO: 26844 - protein, 54 aa, Homo sapiens
MSSSCSGLSRVLVAVATALVSASSPCPQAWGPPGVQYGQPGRSVKLCCPGVTAG

SEQ ID NO: 26845 - protein, 17 aa, Homo sapiens
MEFFYALFFQLCTQQMF

SEQ ID NO: 26846 - protein, 11 aa, Homo sapiens
LCALLRSLLMA

SEQ ID NO: 26847 - protein, 46 aa, Homo sapiens
VFRAVKHLNLTFLAVQALLKEPPDLLQGKAVLKVSPFQGLKQSCVK

SEQ ID NO: 26848 - protein, 57 aa, Homo sapiens [sequence omitted]

SEQ ID NO: 26849 - protein, 11 aa, Homo sapiens
MMAFLLTWMKM

SEQ ID NO: 26850 - protein, 72 aa, Homo sapiens [sequence omitted]

SEQ ID NO: 26851 - protein, 88 aa, Homo sapiens
VMDSSDGITHTMPIYEGYTLPHAILPLDLAGQDLTDYFMKILKEGGYSFTTTAEREIMLDIKEKLCYITLDFEQEMATAASSSSLEKS

SEQ ID NO: 26852 - protein, 8 aa, Homo sapiens
LMILKLIL

SEQ ID NO: 26853 - protein, 19 aa, Homo sapiens
MPVKQQRWLVILLIMVVEC

SEQ ID NO: 26854 - protein, 11 aa, Homo sapiens
LFLVFVFCGTC

SEQ ID NO: 26855 - protein, 32 aa, Homo sapiens
LPGIKQIQIFWLLAMGTLDLKSKKEDWLAAGQ

SEQ ID NO: 26856 - protein, 15 aa, Homo sapiens
MDADDLMKILILFLV

SEQ ID NO: 26857 - protein, 43 aa, Homo sapiens
LRFSFGGSVRRRRGRHLEFLQTPDFPVNHEESREETRSGDNST

SEQ ID NO: 26858 - protein, 72 aa, Homo sapiens
LESMDLAIFRLLVTRAALNSGKVDIVAINDPFIDLNFMPYMFQYNSTHGKFHGTPKAENGKLVINGNSITIF

SEQ ID NO: 26859 - protein, 28 aa, Homo sapiens
VRLLLPGELAKHAVSEGTKAVTKYASSK

SEQ ID NO: 26860 - protein, 66 aa, Homo sapiens
MSHRARPRASFGSSFRLSGARRVQLCEGSPPSAGRPRCRGQRCGEHETRGLNCFLPILIPVTTIRI

SEQ ID NO: 26861 - protein, 611 aa, Homo sapiens
MRLYIRQVTLEQDSRMKFLKLLGYSKDELQKKVATWLKSDVGLGESPQPKGNDLNSDRQQAFCSQASKHTTKEASASSAFFDELVPQNMTPWEIPITKDIDGLLSQALLLGELGPAVELCLKEERFADAIILAQAGGTDLLKQTQERYLAKKKTKISSLLACVVQKNWKDVVCTCSLKNWREALALLLTYSGTEKFPELCDMLGTRMEQEGSRALTSEARLCYVCSGSVERLVECWAKCHQALSPMALQDLMEKVMVLNRSLEQLRGPHGVSPGPATTYRVTQYANLLAAQGSLATAMSFLPRDCAQPPVQQLRDRLFHAQGSAVLGQQSPPFPFPRIVVGATLHSKETSSYRLGSQPSHQVPTPSPRPRVFTPQSSPAMPLAPSHPSPYQGPRTQNISDYRAPGPQAIQPLPLSPGVRPGPQDSWKEAPAPRGNLQRNKLPETFMPPAPITAPVMSLTPELQGILPSQPPVSSVSHAPPGVPGELSLQLQHLPPEKMERKELPPEHQSLKSSFEALLQRCSLSATDLKTKRKLEEAAQRLEYLYEKLCEGTLSPHVVAGLHEVARCVDAGSFEQGLAVHAQVAGCSSFSEVSSFMPILKAVLIIAHKLLV

SEQ ID NO: 26862 - protein, 612 aa, Homo sapiens
MRLYIRQVTLEQDSRMKFLKLLGYSKDELQKKVATWLKSDVGLGESPQPKGNDLNSDRQQAFCSQASKHTTKEASASSAFFDELVPQNMTPWEIPITKDIDGLLSQALLLGELGPAVELCLKEERFADAIILAQAGGTDLLKQTQERYLAKKKTKISSLLACVVQKNWKDVVCTCSLKNWREALALLLTYSGTEKFPELCDMLGTRMEQEGSRALTSEARLCYVCSGSVERLVECWAKCHQALSPMALQDLMEKVMVLNRSLEQLRGPHGVSPGPATTYRVTQYANLLAAQGSLATAMSFLPRDCAQPPVQQLRDRLFHAQGSAVLGQQSPPFPFPRIVVGATLHSKETSSYRLGSQPSHQVPTPSPRPRVFTPQSSPAMPLAPSHPSPYQGPRTQNISDYRAPGPQAIQPLPLSPGVRPGPQDSWKEAPAPRGNLQRNKLPETFMPPAPITAPVMSLTPELQGILPSQPPVSSVSHAPPGVPGELSLQQLQHLPPEKMERKELPPEHQSLKSSFEALLQRCSLSATDLKTKRKLEEAAQRLEYLYEKLCEGTLSPHVVAGLHEVARCVDAGSFEQGLAVHAQVAGCSSFSEVSSFMPILKAVLIIAHKLLV

SEQ ID NO: 26863 - protein, 234 aa, Homo sapiens
LNGSRPGEAWGRFRPAAVGWCLAAGTIIKGGRRSISFSVGASSVVGSGGSSDKGKLSLQDVAELIRARACQRVVVMVGAGISTPSGIPDFRSPGSGLYSNLQQYDLPYPEAIFELPFFFHNPKPFFTLAKELYPGNYKPNVTHYFLRLLHDKGLLLRLYTQNIDGLERGVLPSPEVVLLALRAHLGGGSNTSLWLEFQCRASLPQSWLKLMEPLPLPPAQSAKDPSQGRTFGLT

SEQ ID NO: 26864 - protein, 108 aa, Homo sapiens
LLVIDNTSGMCKASFTDDDAPWAVFPSIVGCPRHQGMTVGMGQKDFYVGGEAQSERGILTLKYPIEHGIISSWDDMEKIWHHTFYNELREHPVLLTEASRAPKPIERR

SEQ ID NO: 26865 - protein, 46 aa, Homo sapiens
VASAAGAWPAGGQRRWRRLPLDPEFAVQAASSRRAVSVSVLYQRLG

SEQ ID NO: 26866 - protein, 101 aa, Homo sapiens
LRSSLASPTSAQTFLTPWLVGVVESAGATRWAPTPPDPSHADLLPLLTSVATSPGRAGLGTRSECGNHCRSPKAPAPPGAAGRGNALSDGEAERGLWDPVP

SEQ ID NO: 26867 - protein, 128 aa, Homo sapiens
LPCLVVLLAALLSLRLGSDAHGTELPSPPSVWFEAEFFHHILHWTPIPNQSESTCYEVALLRYGIESWNSISNCSQTLSYDLTAVTLDLYHSNGYRARVRAVDGSRHSNWTVTNTRFSVDEGAFPPLT

SEQ ID NO: 26868 - protein, 28 aa, Homo sapiens
LLHRNLRLKECPPSGTSSVTTALHRKSF

SEQ ID NO: 26869 - protein, 283 aa, Homo sapiens
LKLEAELGNMQELVEDFKKKYHDEINKHTEMENEFVLIEKDVDEAYKNKVELESHLEGLTDEINFLRQLHEEEIWELQSLISDTSVVLSIDSSHSLDMDNIITEVKAQYKEIANCSWAKADSMYQIKYEDLQMLARKHGDNLRCTKTDISEMNQNVSWLQAEIKGLKGQRASLEATITDAEKRRELAIKDANTKLLELEAALQWAKQDMAQQLRVYQELMNVKLALDIKTATYKKLLEGEESWQESRMQNMSIYSKTTSGYAGGLSSAYGGLTSPPPQLWPEL

SEQ ID NO: 26870 - protein, 65 aa, Homo sapiens
LQQPRRPLARGSQGDPEHSRWLAARQPQKTGKFAAGARRCRAATRRSPWTGPTRTPAGTTAARAG

SEQ ID NO: 26871 - protein, 101 aa, Homo sapiens [sequence omitted]

SEQ ID NO: 26872 - protein, 24 aa, Homo sapiens
LPVSEIIGRDLSGFPAPPGEEPPA

SEQ ID NO: 26873 - protein, 9 aa, Homo sapiens
LRFGSGREA

SEQ ID NO: 26874 - protein, 76 aa, Homo sapiens
VKIIARFYSSLLEIWMTVVFSLFRNERSFICNYKEHWFTVRKLGKQWFNLNSLLTGPELISDTYLALFLAQLQQEG

SEQ ID NO: 26875 - protein, 37 aa, Homo sapiens
LWHFASGLPSLLVTLLPLVVTDSWEDPPCPSLRFSKT

SEQ ID NO: 26876 - protein, 26 aa, Homo sapiens
LRQDSETLILVTLTLGPWWELRLCGN

SEQ ID NO: 26877 - protein, 155 aa, Homo sapiens
MGPWHVPRRQSRTPSVSMSQLHHSPCSVPSPSTLVMTQTFTSSPMSSLMVPEGGESVLSAAYLFVKSLNSASYLYEVMERPRHGRLAWHGTQDKTTMVTSFTNGGLLRGWLVYQHDDSETTEDDIPFVATRQGESSGDVAWEEVRGVFRVAISRE

SEQ ID NO: 26878 - protein, 122 aa, Homo sapiens
LREEAAASGARRRRRRGSRSFILTPRFCPSPASPVTRTSGRSCELRRALPRRKLGRPAASRAARAGLVFPRLGRFGLCPLSLQFSPLPASPGLKMEADDADSPPRRASGSRLRRALGRCCRR

SEQ ID NO: 26879 - protein, 51 aa, Homo sapiens
VGLPHRSPVGWTDRSSDLWLLGGTGLRWALASPASSKPPPWNMRDRSPSGI

SEQ ID NO: 26880 - protein, 26 aa, Homo sapiens
MPHCAEIVASSVILIRESRNPYSRCR

SEQ ID NO: 26881 - protein, 106 aa, Homo sapiens
LGLGMWYRLLAAAGSRAVARPLALLWRCGGPGGGRTAKTSARALGKARQWLWPVRMCGVALQKKLGKLIWPPVPVLPGDPRSEADSAGKTDVIFLVAVFKTTQRDW

SEQ ID NO: 26882 - protein, 231 aa, Homo sapiens [sequence omitted]

SEQ ID NO: 26883 - protein, 19 aa, Homo sapiens
VSASTPAVIVSFLRSPQPC

SEQ ID NO: 26884 - protein, 97 aa, Homo sapiens
VTALGFSRGGFLILVLARGGGCCVAPPIVSFCVFSHSRSLFCRRFPPATPTPRRGLRVSCSVCRPGWSAVARSRLLATSASRAQASLPPKPSRVAGA

SEQ ID NO: 26885 - protein, 27 aa, Homo sapiens
MLSMNEALRSALHVLINCLMLVSILEK

SEQ ID NO: 26886 - protein, 14 aa, Homo sapiens
LGGFSSCLPLVLWL

SEQ ID NO: 26887 - protein, 76 aa, Homo sapiens
LRARLPVRSGRTRGVLRERIRGERDRARCGRAGRGHPAGDPAGGSGRAVQDEPPVPHPRRLLLPSPHVSPGLLQLQ

SEQ ID NO: 26888 - protein, 40 aa, Homo sapiens
LVVRWAVLVFRSSTAALPRAAEAARRSEKWPKTSALGRRS

SEQ ID NO: 26889 - protein, 17 aa, Homo sapiens
LFPLGINVSGLSVLGFL

SEQ ID NO: 26890 - protein, 81 aa, Homo sapiens
LAGVVRECAGSGDMGSVVSHNRSLWTERRESMGRMMNHLGVLWREMVQTQSLQMPGRTASPRMGRMRPSTASAANRTSTAS

SEQ ID NO: 26891 - protein, 18 aa, Homo sapiens
MDISKHIEAYNEKSNIPQ

SEQ ID NO: 26892 - protein, 274 aa, Homo sapiens
MMASAAAAEAEKGSPVVVGLLVVGNIIILLSGLSLFAETIWVTADQYRVYPLMGVSGKDDVFAGAWIAIFCGFSFFMVASFGVGAALCRRRSMVLTYLVLMLIVYIFECASCITSYTHRDYMVSNPSLITKQMLTFYSADTDQGQELTRLWDRVMIEQECCGTSGPMDWVNFTSAFRAATPEVVFPWPPLCCRRTGNFIPLNEEGCRLGHMDYLFTKAGVQWHNLSSLQRLPPGFKGFSHLSFQSSWDYRAASNTSATPSTATRGVSRGLGLPS

SEQ ID NO: 26893 - protein, 90 aa, Homo sapiens
LTAPTLALLLLPKISCLLTSTHPRTQGSRAHFPRAWRLDPGEFLHPLQDPHSSPLWSLDHRWRWPELTCWLWGHSSCWPRMRRGTREYKG

SEQ ID NO: 26894 - protein, 66 aa, Homo sapiens
LLPRGVGVGVAEPAPFGTLPGRPDSLILQELRRQDEWRGEPSQQAHAGAGRTGRRALDVPAPSVRG

SEQ ID NO: 26895 - protein, 112 aa, Homo sapiens
VNMEPPDAPAQARGAPRLLLLAVLLAAHPDAQAEVRLSVPPLVEVMRGKSVILDCTPTGTHDHYMLEWFLVSAWGWGAWSQGTAGQQRFILSSVPKACRDPPSHTPCYRWGH

SEQ ID NO: 26896 - protein, 243 aa, Homo sapiens
VNVGKPSAAKTHLFNTRESTLEKGLMSAVNVGKPLAANPYLLSTRESTLEKCLMSVAYVGKFLIIALTLLYIKEYTLEQGLTSAVNVGKPIVTNLHLFSMRVSILEKGHMSAANVENTLVTNTDSLNIGVFILEQGLMSASHVGSSLAKALTLLHIKEFIMVKSLMCAVNVEKPLATNMYLFSIIEFTLEKGHISAVNVGRPSGRGLPSSATGKFTLEKGLRMGDNSVSLFNIITDIREKLQA

SEQ ID NO: 26897 - protein, 216 aa, Homo sapiens
LSPQSLREGEGVDLPVPRPAVLVQAGRGTVSGHWSCFQPREQLEGGSGTAPAASPAQCPAWPLVKGVSVPFPELSPVTSRKRETSGTRSQLQTAAQEADASDVPQDGLLLHGPFARKPKRIRTAFSPSQLLRLERAFEKNHYVVGAERKQLAGSLSLSETQVKVWFQNRRTKYKRQKLEEEGPESEQKKKGSHHINRWRIATKQANGEDIDVTSND

SEQ ID NO: 26898 - protein, 37 aa, Homo sapiens
VLMWCALGFWGRAWGSRGPWAAQPGEPQPQGWSCSGN

SEQ ID NO: 26899 - protein, 24 aa, Homo sapiens
LQPICCMNCGCCVPNDKATKKFII

SEQ ID NO: 26900 - protein, 98 aa, Homo sapiens
LLQQVSMKAPEILSYLREENSSEIKSCAHAGEFAAKNFGRCWEEKGKLRKSLDLVAWCSFSWLHPASRAVTAPKSLITVMSPSLRWPPGSKSPLFWCT

SEQ ID NO: 26901 - protein, 32 aa, Homo sapiens
LLEVAQVVSPYTSCPSAIISRAPFHCQISGWG

SEQ ID NO: 26902 - protein, 82 aa, Homo sapiens [sequence omitted]

SEQ ID NO: 26903 - protein, 41 aa, Homo sapiens [sequence omitted]

SEQ ID NO: 26904 - protein, 35 aa, Homo sapiens
LAPEPPARRTAAHERLRALAEPRGFPDAAQRHGER

SEQ ID NO: 26905 - protein, 46 aa, Homo sapiens
LAPEPPARRTAAHERLRALAEPRGFPDAAQRHGERWTCPEGQGSES

SEQ ID NO: 26906 - protein, 56 aa, Homo sapiens
LAPEPPARRTAAHERLRALAEPRGFPDAAQRHGERAGHRRLWAPTWLAGRALEAPK

SEQ ID NO: 26907 - protein, 16 aa, Homo sapiens
VIAVALFPAALLFCLS

SEQ ID NO: 26908 - protein, 122 aa, Homo sapiens
LEHAEIRCSPESRGCGPGAARTRTRGEDGAATGVRDPSPAPWPTHGGHCQPAPQCRRARGFHASLPHPAGWQYFSQSDLAGRPGEEGEYEAAQGCARQRLLLRPHWAARGLPDPSLTDKCAI

SEQ ID NO: 26909 - protein, 51 aa, Homo sapiens
LRTPASAGEGLEAGRGRGSRHPCRALLRVPRRSEPTGKKEGPASVTSARPR

SEQ ID NO: 26910 - protein, 146 aa, Homo sapiens
VGGQRSLVNKWTTFLKARLVCSVPGVEGDTHFDQLRECGSGYGVGEGGSGADSGSPRRSGAVRPTPARPLPRRGCVSVVLAGPPDPAALCRLLHVQQHLPGLCGVRVQHERRAPGLLGTLCTQGGAHAPVGVIPGSRPLPAARHGS

SEQ ID NO: 26911 - protein, 289 aa, Homo sapiens
MGSPSPKTWLSRSSRRSTARSRAKRRSWQPLHRRTHPQWTLPTSACPACPATKLGTRYKIATRKAYGQALAKLGHASDRIIALDGDTKNSTFSEIFKKEHPDRFIECYIAEQNMVSIAVGCATRNRTVPFCSTFAAFFTRAFDQIRMAAISESNINLCGSHCGVSIGEDGPSQMALEDLAMFRSVPTSTVFYPSDGVATEKAVELAANTKGICFIRTSRPENAIIYNNNEDFQVGQAKKRSTSACWTPSPSSPWTENSFSTALVPPRAGSSPWRTIIMKVALVRLCPVQ

SEQ ID NO: 26912 - protein, 32 aa, Homo sapiens
MCVYSKKIMFVFIFSLSSLFSNWVIHCCTSVN

SEQ ID NO: 26913 - protein, 22 aa, Homo sapiens
LAPALWTLSRSGAETAAARELF

SEQ ID NO: 26914 - protein, 39 aa, Homo sapiens [sequence omitted]

SEQ ID NO: 26915 - protein, 297 aa, Homo sapiens
LRPQGHDSGEREPFSQTPGLMQPFSIPVQITLQGSRRRQGRTAFPASGKKRETDYSDGDPLDVHKRLPSSAGEDRAVMLGFAMMGFSVLMFFLLGTTILKPFMLSIQREESTCTAIHTDIMDDWLDCAFTCGVHCHGQGKYPCLQVFVNLSHPGQKALLHYNEEAVQINPKCFYTPKCHQDRNDLLNSALDIKEFFDHKNGTPFSCFYSPASQSEDVILIKKYDQMAIFHCLFWPSLTLLGGALIVGMVRLTQHLSLLCEKYSTVVRDEVGGKVPYIEQHQFKLCIMRRSKGRAEKS

SEQ ID NO: 26916 - protein, 114 aa, Homo sapiens
LRPRAALLALLASLLAAPPVAPAEAPHLVHVDAARALWPLRRFWRSTGFCPPLPHSQADQYVLSWDQQLNLAYVGAVPHRGIKQGVHWTGPELQLHPPGRVPGPSQGEPAPPRV

SEQ ID NO: 26917 - protein, 318 aa, Homo sapiens
LCWAWTISTGPGAPSCCVCGPRTRRLSCTLSRTGSRRSSPASSNPRTRTACVGMPWSRRPPMGTSARPSRATSYVQCQGIPQGSILSTLLCSLCYGDMENKLFAGIRRDGLLLRLVDDFLLVTPHLTHAKTFLSYARTSIRASLTFNRGFKAGRNMRRKLFGVLRLKCHSLFLDLQVNSLQTVCTNIYKILLLQAYRFHACVLQLPFHQQVWKNPTFFLRVISDTASLCYSILKAKNAGMSLGAKGAAGPLPSEAVQWLCHQAFLLKLTRHRVTYVPLLGSLRTAQTQLSRKLPGTTLTALEAAANPALPSDFKTILD

SEQ ID NO: 26918 - protein, 77 aa, Homo sapiens
LMSISLSSLILLPIWINMAQIQQGGPDEKEKTTALKDLLSRIDLDELMKKDEPPLDFPDTLEGFEYAFNENHHEVCI

SEQ ID NO: 26919 - protein, 70 aa, Homo sapiens
LRPGQDRARRPRRVLGASACLAAALAACHSVLARSPHRAEAAGWGGSGASTRFPAAGKPLDAPRGRATSG

SEQ ID NO: 26920 - protein, 81 aa, Homo sapiens
LPPLLSLPLKMDSAPHTHFCVTVIDGLYFFIITWTLVVFILAKCLVLICVFWGEGGSELADSVAKPGWGLGWGVVYFVVRT

SEQ ID NO: 26921 - protein, 59 aa, Homo sapiens
MYHGARHFAWSSGYFRFRRGAFLSLFHCKAAAGEVVVLVSLSHPVPSSSLQRHTLSPPP

SEQ ID NO: 26922 - protein, 14 aa, Homo sapiens
LSFGELTGICLCFL

SEQ ID NO: 26923 - protein, 61 aa, Homo sapiens
MEFTSIFTTMEKAGAHLEGGAKTVIISAPSADAPMFVMGVNHEKYDNSSRLSAMPPAPPAA

SEQ ID NO: 26924 - protein, 137 aa, Homo sapiens
LQMKEEDVLAAGTHLGGTNLDFQMEQYICKRTSDGIYIINLKRTWEKLLLAAHAIAAIENPADVSVISSRNIGQRAVLKFAAATGATPIAGRFTPGTFTNQIQAAFWEPRLLVVTDPRADHQPLTEASYVNLPTIAL

SEQ ID NO: 26925 - protein, 87 aa, Homo sapiens
MQLVKQRLETVTEVIRSCAAKVNKNLSFTSPPAVSSQQSKLKQSNMLTAQEILHQFGFTQTGEPLSYFDNSFKCSDACCVDEYHLFL

SEQ ID NO: 26926 - protein, 19 aa, Homo sapiens
MFYKLLFLTFSHTLMIPAR

SEQ ID NO: 26927 - protein, 99 aa, Homo sapiens
LLWSPVGRGAAILVARGVSRIRRVSLPSRWRGLCPCSVTAALGKRSAPKTDVTITNDGATILKLLEVEHPAAKVLCELADLQDKEVGDGTTSVACPRES

SEQ ID NO: 26928 - protein, 113 aa, Homo sapiens
MTYFLSFFLSCLLWPSDSCPRRPQPPPGPAAPGRAAPLGGRLRARGDGGPGRLEEAGGLRGGGAPRSWLAEHERPRSQALQVQMQREPGSRDDKIQPESVEVTPQWRDSSPCV

SEQ ID NO: 26929 - protein, 76 aa, Homo sapiens
LEEAGGLRGGGAPRSWLAEHERPRRRENLRGTRGTPRTQLAHNRIPSTASPDATGAWLKGRQDPAGKCRSHTPMAG

SEQ ID NO: 26930 - protein, 88 aa, Homo sapiens
LPPCPQAMWPPLLLLLLLLPAAPVPTAKAAPHPDANTQEGLQNLLQGVGAGGDGELRADSHLAPGSGCIDGAVVATRPESRGGRPAVP

SEQ ID NO: 26931 - protein, 12 aa, Homo sapiens
VEDITNMLLLLF

SEQ ID NO: 26932 - protein, 100 aa, Homo sapiens
MRRSEQPGSHLSAGSRAVLAGKRDAPANETLLARKAALDLPPGQRVWRPLAAAPSDQNRLRCEPRASAAARSNWRCQRRPAAALDLAGLREFRPVHFPEA

SEQ ID NO: 26933 - protein, 69 aa, Homo sapiens
LLLTIVDTPGFGDAVDNSNCWQPVINYIDSKFEDYLNAESQVNRCQMPGNRVHCCLYFIAPSGHGPLHN

SEQ ID NO: 26934 - protein, 35 aa, Homo sapiens
LQGLAGGRSGPILKRYLATTYFHLRPFLPGGETLD

SEQ ID NO: 26935 - protein, 13 aa, Homo sapiens
LISKGVYPLLVIV

SEQ ID NO: 26936 - protein, 15 aa, Homo sapiens
MQIRMLTLQIMWVLA

SEQ ID NO: 26937 - protein, 37 aa, Homo sapiens
LIAGLLIVVSAAGSGLKQAFAGHRRRQFGGNGRGSTA

SEQ ID NO: 26938 - protein, 50 aa, Homo sapiens
MRVAGWAPCAFCTPRCPRRYWAEISDTIISGTFHQWREGTTKSEVFYPGG

SEQ ID NO: 26939 - protein, 220 aa, Homo sapiens
MKIKSLEEICLFSLPINESEIIDFFLGASLKDEILKVTPVQKQTRAGQSTRFKAFVAIGDYNGHVGLGVKCSKEVATTIRKAIILAKLSIVPVHRGYWGNKIGKPHTVPCKVTGRCGSVLVCLIPAPRGTGIVSAPVPKKLLMMAGIDDCYTSARGCNATLGNFAKATFDAISKTYSYLTPDLWKIVFTKSPCQEFTDQLVKTHTRVSVQRTQAPAVATT

SEQ ID NO: 26940 - protein, 20 aa, Homo sapiens
MSSLPLFSSDIYRQLLYKIE

SEQ ID NO: 26941 - protein, 11 aa, Homo sapiens
MRSIRGAIIAN

SEQ ID NO: 26942 - protein, 36 aa, Homo sapiens
MIWPTVICQILMMIQKSVWKKIRGRGRRSLTYQAAP

SEQ ID NO: 26943 - protein, 66 aa, Homo sapiens
LSQRKRRRDGTREPGRVRARHLLTLRLSPVSRRPVPCRPAVLRPPRHHGCVCRAPGVGGGCFGERV

SEQ ID NO: 26944 - protein, 75 aa, Homo sapiens
MMDKANNKKLAAIEALNDGELQKAIDLFTDAIKLNPHLALLYAKRASVFVKLQKPNTAIRDCDRAIEINPDSAQP

SEQ ID NO: 26945 - protein, 118 aa, Homo sapiens
LGSRPPPSAAPPHPGEVRRRLCRCGRSSSAPIPGKPGTGTFENNCSGIRVRVRALRLRQDRVKWSGRAEGAKVRVLVPRSRREPRLRRATPSLALGAQHPADKRRDARTRRARSLSNF

SEQ ID NO: 26946 - protein, 102 aa, Homo sapiens
VMLRKARRFLFRSPPSVTPWKREAKAQDWANLGGLFGRKTGQAVGFSYTDAHKNKASPGEKDTLMEYLENLQKYIPGTKMIFSGIKKKTERAEFIAYLKKSY

SEQ ID NO: 26947 - protein, 514 aa, Homo sapiens
VVAPVSAEMLSKVLPVLLGILLILQSRVEGPQTESKNEASSRDVVYGPQPQPLENQLLSEETKSTETETGSRVGKLPEASRILNTILSNYDHKLRPGIGEKPTVVTVEISVNSLGPLSILDMEYTIDIIFSQTWYDERLCYNDTFESLVLNGNVVSQLWIPDTFFRNSKRTHEHEITMPNQMVRIYKDGKVLYTIRMTIDAGCSLHMLRFPMDSHSCPLSFSSFSYPENEMIYKWENFKLEINEKNSWKLFQFDFTGVSNKTEIITTPVGDFMVMTIFFNVSRRFGYVAFQNYVPSSVTTMLSWVSFWIKTESAPARTSLGITSVLTMTTLGTFSRKNFPRVSYITALDFYIAICFVFCFCALLEFAVLNFLIYNQTKAHASPKLRHPRINSRAHARTRARSRACARQHQEAFVCQIVTTEGSDGEERPSCSAQQPPSPGSPEGPRSLCSKLACCEWCKRFKKYFCMVPDCEGSTWQQGRLCIHVYRLDNYSRVVFPVTFFFFNVLYWLVCLNL

SEQ ID NO: 26948 - protein, 115 aa, Homo sapiens
LGSPPPHLLLLLPRALRARRASSSKATGPASPRPPAPRPGAQAGTTRPAWGRRHPQQKAPAWTAWRRKALPSPPAAEGLGSIGRGPGRVRPRRQRLQGDLFRAGTLTRRTRVSRG

SEQ ID NO: 26949 - protein, 61 aa, Homo sapiens
LLSCFLCFFLPSSTLTEGSEEREAKAETEIQGKFMFSVSEEKMPGHKSVRLENAALKSWQC

SEQ ID NO: 26950 - protein, 34 aa, Homo sapiens [sequence omitted]

SEQ ID NO: 26951 - protein, 51 aa, Homo sapiens
LGMLGLQGRRSSLALGAWFPLRSSLRTVRLSLVGLPLRAITSHSQGPLEPY

SEQ ID NO: 26952 - protein, 47 aa, Homo sapiens
MLAFIPVLTKKINPRSTEAAIKYFLTQATASIILLIAILFNNILSGQ

SEQ ID NO: 26953 - protein, 15 aa, Homo sapiens
LELLQSTGARTRAAP

SEQ ID NO: 26954 - protein, 125 aa, Homo sapiens
MADFDDRVSDEEKVRIAAKFITHAPPGEFNEVFNDVRLLLNNDNLLREGAAQFMLKLSMGNRLLLHVLKATSFSLKTSGMVVGDQSGSSPSHHLQPRWLACLRFRFTIMKMAMFSWLVIKMYRIH

SEQ ID NO: 26955 - protein, 103 aa, Homo sapiens
LMDVSHEKYDNRFKIISNDSCTTNCLAPLSKVIHDNFGIVEGLVIMVHTITASQKTLDSPSGKLWHDDHRSLQNIIPASTGAAKAVGEVILAQMQGPYKSPME

SEQ ID NO: 26956 - protein, 40 aa, Homo sapiens
LVVLSLSVTGVLLLALEKVKRESVFLYGNLGKQQYATVQN

SEQ ID NO: 26957 - protein, 53 aa, Homo sapiens [sequence omitted]

SEQ ID NO: 26958 - protein, 9 aa, Homo sapiens
VFHFLLLVP

SEQ ID NO: 26959 - protein, 148 aa, Homo sapiens
LRSGTVRGLRSCVRALARAGSVLAREAEAGGGGGACAVGLGRRFAGEEAAGGGGGGGGDGGEAAESDRAAVGAAAAGPGLARPQGGSGAAAAGGAGRRDARGRGRRRRGRARRGLQGGASACGRVGRRPGRGRGGGRRGGGGGRGGAA

SEQ ID NO: 26960 - protein, 11 aa, Homo sapiens
VVLFWNFFQVI

SEQ ID NO: 26961 - protein, 45 aa, Homo sapiens
LFSFFFWKQGLTLLTLSPKLECSGTVTAHCSLHFLDSSDLLTSAF

SEQ ID NO: 26962 - protein, 42 aa, Homo sapiens
LGIWPALGALGALAQWKLVPEEHGGHANDGVSLCHPCWSTVA

SEQ ID NO: 26963 - protein, 251 aa, Homo sapiens
LPSGRDTPIPTRAGHDHTGRTAGQTHPLTSPIRTPPHGSTSYPHEGTAPTPSRRHKLTSLSPTRHGDPSSTRPLSIVSTLGLLWVYPLGVRGRGGPQRYGLLGAWTCPLVPPRGGKKTRSCPSSTIPGREPIPRLAPGATPRQREGLVHGRASPGTWGQYGNPTPSMLISLPSEGGKGSEGQDPCCSWGWGFPTLSVKGTVSSGNQDVPYTYPWVEAKESGGNQEPGSLPLLSWEGEGMEQERAKRAAGAL

SEQ ID NO: 26964 - protein, 38 aa, Homo sapiens
MKTIEDSIAKPWPFLSVVRPMPRIKEGYAFGYSRHTPF

SEQ ID NO: 26965 - protein, 29 aa, Homo sapiens
LATRRHSRSRSASAQGLRSQGRKQGKMSP

SEQ ID NO: 26966 - protein, 36 aa, Homo sapiens
MSKSESPKEPEQLRKLLFGGLSFETTDESLRSHSEQ

SEQ ID NO: 26967 - protein, 13 aa, Homo sapiens
MKQLHEPSIWKCL

SEQ ID NO: 26968 - protein, 14 aa, Homo sapiens
MVSGDGRPKSRIRL

SEQ ID NO: 26969 - protein, 45 aa, Homo sapiens [sequence omitted]

SEQ ID NO: 26970 - protein, 65 aa, Homo sapiens
LGLRRRLRRGGCRWAGCLASLCAAWALSRDGRAGPGGRLSPAGDRRAGGSGTCRPGARVPVLGAE

SEQ ID NO: 26971 - protein, 10 aa, Homo sapiens
LSLAWVLYIG

SEQ ID NO: 26972 - protein, 85 aa, Homo sapiens
LPILIPGRESAEFLPLGPSGALADQPLLWSGDSHRGYQKAIHRGHPSQHRGRPGYGAAANHLPPAGDGTMHLPKPAGQPQLPRRC

SEQ ID NO: 26973 - protein, 72 aa, Homo sapiens
MLQGLELVRALNAAKTLSEEERRPGRKSIRGTTLTSLLLPPVSHQCSHWLKPTRSHRQTFQVVLPRLGKTLM

SEQ ID NO: 26974 - protein, 15 aa, Homo sapiens
LHRAAAILCLSLWSD

SEQ ID NO: 26975 - protein, 158 aa, Homo sapiens
LHLVLRRRGGMQIFVKTLTGKTITLEVEPSDTIENVKAKIQDKEGIPPDQQRLIFAGKQLEDGRSLSDYNIQKESTLHLVLRLRGGMQIFVKTLTGKTITLEVEPSDTIENVKAKIQDKEGIPPISRGSSLQASSWKMAVLFLTTTSRRSRPCTWSCV

SEQ ID NO: 26976 - protein, 9 aa, Homo sapiens
LTALFLAFV

SEQ ID NO: 26977 - protein, 9 aa, Homo sapiens
LPAVSQIHS

SEQ ID NO: 26978 - protein, 49 aa, Homo sapiens
LLLFNSKSPWTGCWGKKVLAVSPGSARGKKFGTIKLKTFFSQFGRSPSS

SEQ ID NO: 26979 - protein, 40 aa, Homo sapiens
MVCRALAAAFLLLEAAKGGSGESTWSFQRWGSGCSRPKPS

SEQ ID NO: 26980 - protein, 171 aa, Homo sapiens
MSCPVPACCALLLVLGLCRARPRNALLLLADDGGFESGAYNNSAIATPHLDALARRSLLFRNAFTSVSSCSPSRASLLTGLPQHQNGMYGLHQDVHHFNSFDKVRSLPLLLSQAGVRTGLSSSTSPSTTPTAVGTPSPSTEPSVRSLATERAAWVVSQTGPPRPTTHWTCW

SEQ ID NO: 26981 - protein, 47 aa, Homo sapiens
LGACPAAAAGSAALRGRQARAPGPLTAPSRGPPEAKARGPPRWPSRW

SEQ ID NO: 26982 - protein, 249 aa, Homo sapiens
VRLTIPCPQAEDAALEGGGLGLSALQLRAVHLDVSRGPASQPPPRTCAGPPAPPASNPGRPDCPPGPVPCTPAGGPGCDGAARADALGWAAPRSAPSGGAPAAARACAVGGAALRAARAGGARERAGPGLRVRRDGAVPLLRRRLRGCRARLRPRAATTAPAAAPAAGAGARAALLPPDGLRGRGVLPGRAQPLPHGARAVGARVRLRVTLPHSAGAAATPPASTAPLAGPAKDCACVEHAGAAPGLSR

SEQ ID NO: 26983 - protein, 128 aa, Homo sapiens
LGPAAATNTAQDCGLLACTPQLPPRHQPLMAQEDLWGEAGGTHVVGSVQHVASAWLCLQLRVLGLGTHPPACGTNFSLCVQQAPQPPLLSFSSPMQPRPGPLRTPRRRCRAACPSRSPLLHLSPFIAV

SEQ ID NO: 26984 - protein, 163 aa, Homo sapiens
LALVLKPAVSQTLLPKGNRCCSHAQPVWGSGPLASARAGTHPGHRVLSPREMSSQGWRPTFQVGAGTSQTVESAMSQGMQRMHLETLQQVDKWPLCGPLACSELLQLTVRSLEGWRKEVLGSIKGAGTSQGGEIHPRSSSGGERAHVKPCSAPQALVVGLGPG

SEQ ID NO: 26985 - protein, 53 aa, Homo sapiens
LAVVRGTDPLGPPAARARAAPPNGEEDVRPAFQAAPDRGFRSGEDLRPFSFFG

SEQ ID NO: 26986 - protein, 63 aa, Homo sapiens
LATDKNDPHLCDFIETHYLNEQVKAIKELGDHVTNMHEMGAPESGVAEYLFDKHTLGDSDNES

SEQ ID NO: 26987 - protein, 58 aa, Homo sapiens
VSRHHAGRLGWICAQRQGLRAPAGGPGQRLGSSAAAGLSWLWSRLDDVTGSLGSLTWP

SEQ ID NO: 26988 - protein, 25 aa, Homo sapiens
MRAKWRKKRMRRLKHKRKKMRQRSK

SEQ ID NO: 26989 - protein, 96 aa, Homo sapiens
MGAMAKPDCIITCDGKNLTIKTESTLKTTQFSCTLGEKFEETTAVGRKTQTVCSFTDGALVPHQEWDGKENTITRKLKDAISGGLCHEQCHLYSDL

SEQ ID NO: 26990 - protein, 58 aa, Homo sapiens
MYYSTAKSVEREIMKNCFFFVMAVTKAVIPTAIDPRLQQSQMETGFVQLALLRQVVKL

SEQ ID NO: 26991 - protein, 45 aa, Homo sapiens
LQLRLLAPAPVLFLPALRTRLEGDARSARPARHGLPGIRRRVWKF

SEQ ID NO: 26992 - protein, 15 aa, Homo sapiens
MAAEDPGSGRPEGRS

SEQ ID NO: 26993 - protein, 83 aa, Homo sapiens
LLGGRNGSFRLGVLSWPLFLLPLTTQPCFRCVGPSCPLELPANACSPKIFNSSWLHLGRDGGIDAPLSAEGPVAASVFSPLLG

SEQ ID NO: 26994 - protein, 9 aa, Homo sapiens
VVLPLLVVL

SEQ ID NO: 26995 - protein, 14 aa, Homo sapiens
LHQIPEKASLDTSR

SEQ ID NO: 26996 - protein, 15 aa, Homo sapiens
VPQALGISPERNRRS

SEQ ID NO: 26997 - protein, 28 aa, Homo sapiens
LVVQSPARRRRQGCCWPGYKHSSSATCS

SEQ ID NO: 26998 - protein, 151 aa, Homo sapiens
LQAVAFPVVTLFLFPTRELGRNALAALSPQAGSRCSKRPRPLRMYVVFTAKVLPSACPRKEDSKPILRPAQPLYTPTPPQTRGGNSRTISGGICTSQTQTNVSDPEGSSRAEWDRPDSGCALQPYILHEQRYSLYFPPRQQFPVPMWIPRA

SEQ ID NO: 26999 - protein, 46 aa, Homo sapiens
LVVGAEWVGRGRAGPWAVWGPGGGRAGGRRDGLHRERRGQGGGRAL

SEQ ID NO: 27000 - protein, 22 aa, Homo sapiens
LFIILRVCCERHNLSSLNIADT

SEQ ID NO: 27001 - protein, 13 aa, Homo sapiens
LGNFLSRRLFLLV

SEQ ID NO: 27002 - protein, 97 aa, Homo sapiens
LVSPLSLSMWRWKVEKDTVSILKLLRFSERGRHLNRQVGFSVLSALGIWREMGLLSLCTQEGHALKTVFVDQRRLYSTGGIQMSLRGREETWQADYI

SEQ ID NO: 27003 - protein, 106 aa, Homo sapiens
LIKQIPRILGPVLNKAGNCPSLLTHKENMVAKVDEMKSVINFHMKKVLCLAVAVGHVKRTDNELVCNSHLPVNFLVTLLKKNWQKNWQNVRALYIESTIGKPQCLY

SEQ ID NO: 27004 - protein, 42 aa, Homo sapiens
VLAAAAAAEGGRLCPGLCLPSSAAVPCCSISSKSPAYSKRSV

SEQ ID NO: 27005 - protein, 16 aa, Homo sapiens
MLPPPPLPFFALVTPV

SEQ ID NO: 27006 - protein, 23 aa, Homo sapiens
VYYFTLVVFWPHSLWTTKDFAAI

SEQ ID NO: 27007 - protein, 14 aa, Homo sapiens
LAHIFRRRIPAVDF

SEQ ID NO: 27008 - protein, 34 aa, Homo sapiens
LAVFVIIRNLSDYLSFFFPFLLELLAVEEHHAYL

SEQ ID NO: 27009 - protein, 42 aa, Homo sapiens
LRQLPCVRLRCTAALCATEMQDFLTPPLCVLGDSGFSFCKGL

SEQ ID NO: 27010 - protein, 30 aa, Homo sapiens
LQVTSSVCLFWIAMIPISRCLVQQDRPLSC

SEQ ID NO: 27011 - protein, 27 aa, Homo sapiens
LVLLELYKTQLCATGHLQILGLCFMVH

SEQ ID NO: 27012 - protein, 51 aa, Homo sapiens
LVSTSEKEGVRSKAHGHVPLPVMWQDVPHPGEVHDSQLFPLQGAAVQVCAA

SEQ ID NO: 27013 - protein, 165 aa, Homo sapiens
VPPIVGRRCHMCTEAKKHCWYFEGLYPTYYICRSYEDCCGSRCCVRALSIQRLWYFWFLLMMGVLFCCGAGFFIRRRMYPPPLIEEPAFNVSYTRQPPNPGPGAQQPGPPYYTDPGGPGMNPVGNSMAMAFQVPPNSPQGSVACPPPPAYCNTPPPPYEQVVKAK

SEQ ID NO: 27014 - protein, 75 aa, Homo sapiens
VGVGALPPLRAGTAGRARSGAASGCQTEQWCTEAKKHCWYFEGLYPTYYICRSYEDCCGSRCCVRALSIQRLWYF

SEQ ID NO: 27015 - protein, 14 aa, Homo sapiens
LPPQVEEKERSAAD

SEQ ID NO: 27016 - protein, 22 aa, Homo sapiens
LFFLTIGFIFFLNILEQSTGRG

SEQ ID NO: 27017 - protein, 13 aa, Homo sapiens
MFGFCLFFTKMVI

SEQ ID NO: 27018 - protein, 15 aa, Homo sapiens
VRGVLAFLLFNTGRR

SEQ ID NO: 27019 - protein, 170 aa, Homo sapiens
LDHFNFERFGNKTFPQRFLVSDRFWVRGEGPIFFYTGNEGDVWAFANNSAFVAELAAERGALLVFAEHRYYGKSLPFGAQSTQRGHTELLTVEQALADFAELLRALRRDLGAQDAPAIAFGGRTLRARVPNAPRVCGKRSDRSRTCSYREPTTRSAGSSAPASRCQTRRT

SEQ ID NO: 27020 - protein, 55 aa, Homo sapiens
LQALAALPGFLLPLLAVLTHDTRSESKQKSWGTEGGAQLKEEPLTKAHLKAQEKV

SEQ ID NO: 27021 - protein, 25 aa, Homo sapiens
VAARILKFVNIFWLLILHPWQLCRR

SEQ ID NO: 27022 - protein, 58 aa, Homo sapiens
MSAASLLKPARPQTHQEEQTTPDAPPLRAVTLTAKVCGFNPEVSETTNLPEGRNSRHI

SEQ ID NO: 27023 - protein, 67 aa, Homo sapiens
LNLLSFSSLFFFLMYILRTGVLRGVAGGFGLDEFPPKCRRSQARAQKQRMGKSMQHSVYLILTRGNH

SEQ ID NO: 27024 - protein, 49 aa, Homo sapiens
LLVFAFLLRFYPVGRCHWGPWPHRHGGGVAASPGAHGAEQAAQVCPEQT

SEQ ID NO: 27025 - protein, 19 aa, Homo sapiens
VTIRRFIRLNSFQMISLLL

SEQ ID NO: 27026 - protein, 58 aa, Homo sapiens
LGRNHISVMNVGKPSVKNQLSLNIRGLTQGRSRMSVMHVGRPLVRGQCSPNIREFTQG

SEQ ID NO: 27027 - protein, 125 aa, Homo sapiens
LDGSNVSKKNGARCSSLTGTASARSTSPPTAAQPTTAQARCVPPAPCETDFPVSREWGRPPSQFSLRPPLLARSLPSPQASSCAAQLPKRLSPLETVGRTVVASATRGKRLLPSLNWTPRAPESA

SEQ ID NO: 27028 - protein, 1141 aa, Homo sapiens
LGRAQSEPPARLKLRAASGERRAARGDPGAAGTPRMSLRAGGKTRRWPGPEQAARGGRSGGEQSPRRGEARRRCTHAHGAMGRHVATSCHVAWLLVLISGCWGQVNRLPFFTNHFFDTYLLISEDTPVGSSVTQLLAQDMDNDPLVFGVSGEEASRFFAVEPDTGVVWLRQPLDRETKSEFTVEFSVSDHQGVITRKVNIQVGDVNDNAPTFHNQPYSVRIPENTPVGTPIFIVNATDPDLGAGGSVLYSFQPPSQFFAIDSARGIVTVIRELDYETTQAYQLTVNATDQDKTRPLSTLANLAIIITDVQDMDPIFINLPYSTNIYEHSPPGTTVRIITAIDQDKGRPRGIGYTIVSGNTNSIFALDYISGVLTLNGLLDRENPLYSHGFILTVKGTELNDDRTPSDATVTTTFNILVIDINDNAPEFNSSEYSVAITELAQVGFALPLFIQVVDKDENLGLNSMFEVYLVGNNSHHFIISPTSVQGKADIRIRVAIPLDYETVDRYDFDLFANESVPDHVGYAKVKITLINENDNRPIFSQPLYNISLYENVTVGTSVLTVLATDNDAGTFGEVSYFFSDDPDRFSLDKDTGLIMLIARLDYELIQRFTLTIIARDGGGEETTGRVRINVLDVNDNVPTFQKDAYVGALRENEPSVTQLVRLRATDEDSPPNNQITYSIVSASAFGSYFDISLYEGYGVISVSRPLDYEQISNGLIYLTVMAMDAGNPPLNSTVPVTIEVFDENDNPPTFSKPAYFVSVVENIMAGATVLFLNATDLDRSREYGQESIIYSLEGSTQFRINARSGEITTTSLLDRETKSEYILIVRAVDGGVGHNQKTGIATVNITLLDINDNHPTWKDAPYYINLVEMTPPDSDVTTVVAVDPDLGENGTLVYSIQPPNKFYSLNSTTGKIRTTHAMLDRENPDPHEAELMRKIVVSVTDCGRPPLKATSSATVFVNLLDLNDNDPTFQNLPFVAEVLEGIPAGVSIYQVVAIDLDEGLNGLVSYRMPVGMPRMDFLINSSSGVVVTTTELDRERIAEYQLRVVASDAGTPTKSSTSTLTIHVLDVNDETPTFFPAVYNVSVSEDVPREFRVVWLNCTDNDVGLNAELSYFITGAAPASAHLCRPPGALPPPLPDGQPD

SEQ ID NO: 27029 - protein, 268 aa, Homo sapiens
LVIYSRSFLEYNSWHVLSSVNICCSKLVKCRLQKGKVTIAEFIWLATRSQMEATEPQDMVVYDQSTRDASVLAADRFLSILLSKLDSCFDSVAILTGGFATFSSCFPSLCQGKPAALLPMSLSQPCLPVPSVSLTLILPHLYLGSQKDVLNKDLTTQNGISYVLNASNSCPKPDFICESRFMRVPINDNYCEKLLPWLDKSMEFICKGKLSSCQVIVHCLVGISHSATIAIAYIMKTMGISSDDTYRFMKDRRQSISPNFNFLGQLLE

SEQ ID NO: 27030 - protein, 102 aa, Homo sapiens
LGIWTLLPLVLTSVARLSSKSVNAQVTDINSKGLELRKTVTTVETQNLEGLHHDGQFCHKPCPPDVNMESSRNAHSPATPSAKRKDPDLTWGGFVFFFCQFH

SEQ ID NO: 27031 - protein, 30 aa, Homo sapiens
LVIAGCPRQNLSSTLNLPTEPSKSPCKFNC

SEQ ID NO: 27032 - protein, 112 aa, Homo sapiens
LCVLWVLGVTFSLGSRESPADGFCPGLKQPESYGKGRAWLARGIFQVLKRQAYGACDPSRRTKWDLKIHSTSAHGGPGPAPARGHTADWAAGMPGLCWRPLWLAFTSVCLQE

SEQ ID NO: 27033 - protein, 81 aa, Homo sapiens
LRAAALDPTRRERPRDAEQEEEVQRAVPAGADQEDHADGRRDWEGGGGGACHHLYPAGGGPGRGAWGREAAGRPLLPRSSP

SEQ ID NO: 27034 - protein, 32 aa, Homo sapiens
LEQPEALQQKREKTTTTLSSPVRSLASPPPWQ

SEQ ID NO: 27035 - protein, 26 aa, Homo sapiens
LRFFLVFCILFITMQETISSQEDFYL

SEQ ID NO: 27036 - protein, 17 aa, Homo sapiens
MRRLLGHTSARGVAPHP

SEQ ID NO: 27037 - protein, 70 aa, Homo sapiens
LEVNKYGSCLGEKKNVLQPVSKLQTTECINETLYMDTRAFKTALPACRAFAVLQRFTGVIALKPRNNFTR

SEQ ID NO: 27038 - protein, 76 aa, Homo sapiens
LEVNKYGSCLGEKKNVLQPVSKLQTTECINETLYMDTRAFKTALPACRAFAVLQRFTGVIALKPRNNFTSDSTRKE

SEQ ID NO: 27039 - protein, 73 aa, Homo sapiens
LEVNKYGSCLGEKKNVLQPVSKLQTTECINETLYMDTRAFKTALPACRAFAVLQRFTGVIALKPRNNFTRSGV

SEQ ID NO: 27040 - protein, 56 aa, Homo sapiens
LFFYSEIFLIFSYIFGFVRNLTIKHDGQQRYQQDRSSLHELPCIHWESQHSCGQEI

SEQ ID NO: 27041 - protein, 54 aa, Homo sapiens
MYSEIFLIFSYIFGFVRNLTIKHDGQQRYQQDRSSLHELPCIHWESQHSCGQEI

SEQ ID NO: 27042 - protein, 110 aa, Homo sapiens
MYSEIFLIFSYTIFLLFPLKSHPAFPVHYPSQTTSCSNMDAQPGAAAARMTWSQGGLRNRCTPFLGDVFGFVRNLTIKHDGQQRYQQDRSSLHELPCIHWESQHSCGQEI

SEQ ID NO: 27043 - protein, 18 aa, Homo sapiens
LLGLRCCWIYMWRYLASS

SEQ ID NO: 27044 - protein, 89 aa, Homo sapiens
LPAPEVEREGGASPFLLPGEVPASRGGSGPSPFSFSLRIDVLLLTREEAAAAAAAAEDGVAESVNSAPLLGGGDGSAYNGKTSLQRETY

SEQ ID NO: 27045 - protein, 137 aa, Homo sapiens
LPAPEVEREGGASPFLLPGEVPASRGGSGPSPFSFSLRIDVLLLTREEAAAAAAAAEDGVAESVNSAPLLGGGDGSPCPVADSEVLSAAETRRADSWEVVLFAAGLVYCSLPGAPVLTDPILQRGRPWSGSSHHPLI

SEQ ID NO: 27046 - protein, 60 aa, Homo sapiens
LSDPSRDAGCARGTPEPKPGAGGQLCPGGTASFLISPDSFLLPGAADNVHHGQCRFPCGI

SEQ ID NO: 27047 - protein, 112 aa, Homo sapiens
LGLGMWYRLLAAAGSRAVARPLALLWRCGGPGGGRTAKTSARALGKARQWLWPVRMCGVALQKKLGKLIWPPVPVLPGDPRSEADSAGKTDVIFLVAVFKTTQRYLSFIHHH

SEQ ID NO: 27048 - protein, 105 aa, Homo sapiens
LGLGMWYRLLAAAGSRAVARPLALLWRCGGPGGGRTAKTSARALGKARQWLWPVRMCGVALQKKLGKLIWPPVPVLPGDPRSEADSAGKTDVIFLVAVFKTTQRV

SEQ ID NO: 27049 - protein, 57 aa, Homo sapiens
LLLLTRRCSCWLVPQGLERSEETWEPAARGSTLGSESPFPALRLLPPHLFSALQLKG

SEQ ID NO: 27050 - protein, 20 aa, Homo sapiens
MAPVRVGNPAAEAAAPVPSG

SEQ ID NO: 27051 - protein, 16 aa, Homo sapiens
LGVHYVLVHFCLLQVW

SEQ ID NO: 27052 - protein, 130 aa, Homo sapiens
LRCLQNLGQKLPSCRRRRRRRRRRRARAQPIPAERPRAPPSAGTAAAGPRRALRRARSAGAAACRADPRGQHASRERPRLLSGAAAGSVSGFIPPAGRLGAQGREPPPGAQQHHGHGAVPVSQLPEGHAV

SEQ ID NO: 27053 - protein, 19 aa, Homo sapiens
MVVLEASLRGRPEATVPPR

SEQ ID NO: 27054 - protein, 21 aa, Homo sapiens
MDPGFRGQRKQPTAALPLARE

SEQ ID NO: 27055 - protein, 36 aa, Homo sapiens
MDYNVSFRETYYYQCDSTGESMVMMMRRRMMMMRHL

SEQ ID NO: 27056 - protein, 51 aa, Homo sapiens [sequence omitted]

SEQ ID NO: 27057 - protein, 314 aa, Homo sapiens
LWLRLVLALALVRPRAVGWAPVRAPIYVSSWAVQVSQGNREVERLARKFGFVNLGPIFPDGQYFHLRHRGVVQQSLTPHWGHRLHLKKNPKVQWFQQQTLQRRVKRSVVVPTDPWFSKQWYMNSEAQPDLSILQAWSQGLSGQGIVVSVLDDGIEKDHPDLWANYDPLASYDFNDYDPDPQPRYTPSKENRRTDAGRYHHRCHRGPVAEPAAAAHPHLQRQLGSRGRRPHGGRPRHPHPRGLPAWCDQASTRFPWAAPPSRAACPGTAKPAPPPSPPPTAAAWPPTPRSSPRTCITGAQTSTRAPRPQPHWRPA

SEQ ID NO: 27058 - protein, 200 aa, Homo sapiens
LVGRRRAGTGMALLLCLVCLTAALAHGCLHCHSNFSKKFSFYRHHVNFKSWWVGDIPVSGALLTDWSDDTMKELHLAIPAKITREKLDQVATAVYQMMDQLYQGKMYFPGYFPNELRNIFREQVHLIQNAIIESRIDCQHRCGKQGSVQAEGRAGGSSGPWRLRGALAALVRVSGIFQYETISCNNCTDSHVACFGYNCE

SEQ ID NO: 27059 - protein, 36 aa, Homo sapiens
LDGPPTVGRTDSASRVGHGHLQHQEPGSAGAEEAPE

SEQ ID NO: 27060 - protein, 10 aa, Homo sapiens
LDSACPRPHL

SEQ ID NO: 27061 - protein, 168 aa, Homo sapiens
LTIVILLCYLIVGLIHPFLFVPINHPPPLPHVHTPTPNLLFFSSPRNTTPYLPTSEGHRERVLSLSQALATEASQWHRMMTGGNLDSQGDPLPGVPLPPSDPTRQETPPPRSPPVANSGSTGFSRRGSGRGGGPTPWGPAWDAGIAPPVLPQDEGAWPLRVTLLQSSF

SEQ ID NO: 27062 - protein, 42 aa, Homo sapiens
LFELGEEGGKLILFQSAPHLALWRLRTTGRVTLITAMLQDPH

SEQ ID NO: 27063 - protein, 106 aa, Homo sapiens
LCAADVGGSGERSGAAGASPGPQRQQLGPPPRPADRRTQEGGRGDPPPAGRSHELQRGEPTPAHHPPGVQGGDDTDRRPTRWHQGLSQRGGPHRPPGHHRGPWATS

SEQ ID NO: 27064 - protein, 102 aa, Homo sapiens
LCAADVGGSGERSGAAGASPGPQRQQLGPPPRPADRRTQEGGRGDPPPAGRSHELQRGEPTPAHHPPGVQGGDDTDRRPTRWHQGLSQRGGPHRPPGHHRGP

SEQ ID NO: 27065 - protein, 21 aa, Homo sapiens
MTIIGFRMLLSSSDASFLLAV

SEQ ID NO: 27066 - protein, 34 aa, Homo sapiens
LAGARRPRRLLDAFVVGLGFLSVWLEVEPRVEEG

SEQ ID NO: 27067 - protein, 73 aa, Homo sapiens
LQLRLLAPAPVLFLPALRTRLEGDARSARPARHGLPGIRRREADCQAMKKWKSHVKGPMWRRTGAPGQQVWKF

SEQ ID NO: 27068 - protein, 37 aa, Homo sapiens
LSWSEGWLFRLSFLPACTPPTASEEGAAPGCVHFLGT

SEQ ID NO: 27069 - protein, 311 aa, Homo sapiens
LARPGLHYACKPGVRVPAVPRVAAWGRAGVGRRAAGRLPHLPLPRLLLHGQRDLLPTQALPRGARQGALLAALPAPHPAAQPADAAAQRRPPLLHAGLSRPQERGRGRRQRRGPTERGRARRLLGRQGQLRGRNQALDYEPGPLGIPRGRAHPPPQPLTHTRTPRDHKATAAVTAAQRPGWAEEETPMPLRGKWRPGHQRPRCLDLLGVEWGRKMSAGKALQPHSSRLSAPPFLHFCRGLPLPFSPFPLGFIHFLASFLCLHFSSCLHSSLSLSLSLLFLSFFLPLPAFPFSVPWVCVSASPSYPLPDCTP

SEQ ID NO: 27070 - protein, 80 aa, Homo sapiens
LAGGQAGKDSSASPLQLVSFRSPSQGGDWRRDGPDRAPAGRRRHLLPRRLPGLHVPPRTPEAECPDPKEALLWLGLGSRL

SEQ ID NO: 27071 - protein, 22 aa, Homo sapiens
LNVPLAGKLSSFSPRCTEPKWA

SEQ ID NO: 27072 - protein, 33 aa, Homo sapiens
LEGVEWHGLELNQENRAQEEETRRITQKVLRSS

SEQ ID NO: 27073 - protein, 261 aa, Homo sapiens
VRAPPPPLLLLLFLLLLLVPLPPPASRRDRCECECVCEGACARAIVRASVRVCASVCLSVRGLGGGRFGLSWRRSRRRRPGPGASRCAGSERAPFCEIYKILLGKKPPAAAAARRPASPTPPSAPGRPCGPAAWNRGPGTAVFAGEGAVASPAPGAAGTASRGETEQAAARPGAGAPGAERGCRGGAGCGGRGGSAAREPEAETHRRKRRERPAIVPEERLQHANLHLFGLHRHFHSMLLAFRWLDRCPIHISTVTVASQT

SEQ ID NO: 27074 - protein, 64 aa, Homo sapiens
LDNMEAALPGPPWPLLLALCGCPAPAAGTCTGQIGVRRPGSSRWGWTTAPRRSLWTWTFTGPID

SEQ ID NO: 27075 - protein, 96 aa, Homo sapiens
LKDTIAKALPFWNEEIVPQIKEGKQVLIAAHGNSPPGIVKHLEGLSEEAIMELNLPTGIPVVYELDKNLKPIQFLGDEETMRKAMEAVAAQGKAKK

SEQ ID NO: 27076 - protein, 173 aa, Homo sapiens
LSWWGLGVERGSGRGVEVGVGVQPADAALPSQSAARRAGTCCANCQTTTTTLWRRNANGDPVCNACGLYYKLHNVNRPLTMKKEGIQTRNRKMSNKSKKSKKGAECFEELSKCMQEKSSPFSAAALAGHMAPVGHLPPFSHSGHILPTPTPIHPSSSLSFGHPHPSSMVTAMG

SEQ ID NO: 27077 - protein, 173 aa, Homo sapiens
LMTKANREMTQIMFEVFNTLAMYMAIQAVLSLYTSGRTTGIAMDSGDGVAHTVPIYEGYTLPHAILHLDLAGWDLTDYFMKILMECSYRFTTMAEQEIVCDIKEKLCNIALDFEHKMATGASSSSLEKSYEVPDGQVITIGNEWFWYRRHCFSLPGHGILWHPRDHLQLHHEV

SEQ ID NO: 27078 - protein, 52 aa, Homo sapiens
MKACTEDSKLLVQTRCFLGRLVVPLGKPQCKIVFQCWHILEFCTFMECNNTV

SEQ ID NO: 27079 - protein, 66 aa, Homo sapiens
VRADAGRLRVCAGRERRPPSRFRAGCAPSTGDCLRLGGGCVVGKAIKEEIAKPCLFFCFQSSSQQI

SEQ ID NO: 27080 - protein, 98 aa, Homo sapiens
VQIAPPRPQISRLRRVQLLPNNFSAGPEAPGRRSAACGPLTGRQDGLQHCSAGPLLPTAPASTAAPGAFPTQCHSLVGAGEERKAPSTRTPGWPWPWC

SEQ ID NO: 27081 - protein, 67 aa, Homo sapiens [sequence omitted]

SEQ ID NO: 27082 - protein, 13 aa, Homo sapiens
LSELRFVLVLCTL

SEQ ID NO: 27083 - protein, 38 aa, Homo sapiens
LTGYHLVIFCIMSILLEMDLLKRNRKREKAQGDQSQSY

SEQ ID NO: 27084 - protein, 181 aa, Homo sapiens
VPGPAGSLPSSAFRSPTPGRLPGGPGATQPLARPTLCADPGCKRSPGLWSRRSCEGDQPRPLRGHRGGREGKGLWVSTLFGLRTDGVYSMQGVINSNSPFRSFIPYMLNDNLVPNAGMLKLREGRCLASTAATPRVSLLFPGLQCSGTISAHRNLRLPSSSDSPASASPVSGITVKLKQAQ

SEQ ID NO: 27085 - protein, 55 aa, Homo sapiens
LAHRLWHVLGEVPAGPNILNELPAQCPIARGRLPRERMERSIPRSTCLIRIRASP

SEQ ID NO: 27086 - protein, 297 aa, Homo sapiens
VAETCQMLMPKKNRIAIYELLFKEGVMVAKKDVHMPKHPELADKNVPNLHVMKAMQSLKSRGYVKEQFAWRHFYWYLTNEGIQYLRDYLHLPPEIVPATLRRSRPETGRPRPKGLEGERPARLTRGEADRDTYRRSAVPPGADKKAEAGAGSATEFQFVLLVSSSRHPDRWIVPGGGMEPEEEPSVAAVREVCEEAGVKGTLGRLVGIFENQERKHRTYVYVLIVTEVLEDWEDSVNIGRKREWFKIEDAIKVLQYHKPVQASYFETLRQGYSANNGTPVVATTYSVSAQSSMSGIR

SEQ ID NO: 27087 - protein, 22 aa, Homo sapiens
MFTMGVNHEKYDNSLKIISNAT

SEQ ID NO: 27088 - protein, 66 aa, Homo sapiens
MVPGARGGGALARAAGRGLLALLLAVSAPLRLQAEELASQVQALGFSGQSWDYFGSLCPVLLDPFN

SEQ ID NO: 27089 - protein, 156 aa, Homo sapiens [sequence omitted]

SEQ ID NO: 27090 - protein, 87 aa, Homo sapiens [sequence omitted]

SEQ ID NO: 27091 - protein, 148 aa, Homo sapiens
LAAASQPCKNSNAGRRGQHPRRPAGSCVQRLTMRNTSKELQGATHRYAPCDWYYHVPVKRSEKAVDAPPASQIPGLSNLGDSHSENLPGTRRYWIKETDSEYVKLAKQGGRPGEPPPALFSVAASRAVRGAFVPNFFHIKILLQSLYV

SEQ ID NO: 27092 - protein, 14 aa, Homo sapiens
LVTALPSAPRSASA

SEQ ID NO: 27093 - protein, 22 aa, Homo sapiens
LLPPSYALRGGSSGSPEEGATE

SEQ ID NO: 27094 - protein, 83 aa, Homo sapiens
LRRMAVSGVEKTRGWLGLALLAALGDPRATPLSPGPGTSCWGGSGGPRPGYSLRVPRSPASRPSFQRPESFHCLSLPRATYVQ

SEQ ID NO: 27095 - protein, 62 aa, Homo sapiens [sequence omitted]

SEQ ID NO: 27096 - protein, 153 aa, Homo sapiens
LCGVSGGRRATCTSPAAASGKARRGGGPGEEQRKAVRLDLFAQDWRRARGSPRGVRSESPRPRLPARAAEAGGWSAAPAHSPRAPDVSAQVLEAAGPGAPTNVALRAGARTDGSGSRSSCGRRVAGAPGGARVRGQRAPRFCLAFRLNFPRRD

SEQ ID NO: 27097 - protein, 23 aa, Homo sapiens
LERALAGLFISLFGQLLCFCRIR

SEQ ID NO: 27098 - protein, 64 aa, Homo sapiens [sequence omitted]

SEQ ID NO: 27099 - protein, 63 aa, Homo sapiens
MALAALMFWGVCLGPSWCVTRVQSWPPRRQHGGSWRPSGPSCRVSCSVSRRSCWPGGRLRRNS

SEQ ID NO: 27100 - protein, 151 aa, Homo sapiens
LTTAPRWKRRCMPASGCTRRASSWSLASPTMLAGKWPRSVPSARAMAGSCPLCTSFWKEHHFEAIALVEKALQAAYGASAPSVTSAALRWMYHHSQLQGAHGDAVILGMSSLEQLEQNLAATEEGPLEPAVVDAFNQAWHLVAHECPNYFR

SEQ ID NO: 27101 - protein, 163 aa, Homo sapiens [sequence omitted]

SEQ ID NO: 27102 - protein, 175 aa, Homo sapiens
LPQCFKPFFVFLLFLLFLRPAGRGRGGAQDDSPGSAWLPASFCKCFFFLHLGPSRGWKEKRGWERMESMTASGAPGGSGEEGVEGQWLRGFLLQPSAGLRVGVTGGGGGFLPHCSGLQCFLGILTVCGFSVTNLESCICSHDSANNEYLLCVEAAGQPVITGKEARRAVWPGSPI

SEQ ID NO: 27103 - protein, 67 aa, Homo sapiens
MTYSLFCFTFWMNGFISSVLMNSSYPGWGEEFSLSKHPQGTEVKAITYSAMQVYNEENPEVFVIIDI

SEQ ID NO: 27104 - protein, 337 aa, Homo sapiens
VLGTWVLAAAASGMTLLASSWCPRPMPWHWAWGCQPTWRPWQCSSAAAGAWARPCFSTCSTWLWLMSSSRSRCSCGSPTTWAWPGGRLPRGRGHLLRVHLCGGGLRRAHQRVPLRLRTRSRAQGGCPPGPVPTAPRARCLRLRLAGGPGPSLPGAPLGKLGAGLRHGGLRGRLPAGARGQREPGAGAQGALWPGPGPCNRRRAPARGQDHGPGVPAGLRPQSGAQPPAAGALGGWGGRQRRPVSRRLHARHPAHPQPGAAEPQQLPGPTHLLLLRAPLPPGLLLGTELPPGEGGAQGAWGLLGLLLESLLASPPVSPPCHPPSGIQGGESSLERPRF

SEQ ID NO: 27105 - protein, 28 aa, Homo sapiens
LSLPYLFLCPCLISPVLFLQTSRVKMGD

SEQ ID NO: 27106 - protein, 329 aa, Homo sapiens
MAYIHFTTEGEVTFKSILFVPTSDPRGLFDEYGSKKSDYIKLYVLCVFITDEFHDMMPKYLNFVKGVVDSDDLPLNVSLETLQQHKLLKVIRKKLVCKTLDKIKKIAGEKYNDNFWKEFGTNIKLGVIEDHSNQTCLAKLLMFQSSHHPTDITTLDQYVERMKGKQDKIYFMAGSSRKEAESPPSVERLLKKGCEVIYLTEPVDEHCIQAFPKFDGKRFQNVVKEGMKFDKSEKTKESHEAVEKEFEPLLNWMKDKALKDKIEKAVVSQHLTESLCALVASQYGRSGNTERIMKAQAYQTSKDSSANYYASQKKTFEINPRHPLIRDML

SEQ ID NO: 27107 - protein, 13 aa, Homo sapiens
MPSLLPKVKQETS

SEQ ID NO: 27108 - protein, 58 aa, Homo sapiens
LATVFRLCLLHLLSLLGQRTSPPSTAQSAKGTALEDLTRRSLPSQLRGHRLRSPLPKA

SEQ ID NO: 27109 - protein, 17 aa, Homo sapiens
LSYLLKVHVLLMLTLID

SEQ ID NO: 27110 - protein, 613 aa, Homo sapiens
LLFLNYQRKTSAKQQAMHPPKTPSGALHRKRKMAAWPFSRLWKVSDPILFQMTLIAALLPAVLGNCGPPPTLSFAAPMDITLTETRFKTGTTLKYTCLPGYVRSHSTQTLTCNSDGEWVYNTFCIYKRCRHPGELRNGQVEIKTDLSFGSQIEFSCSEGFFLIGSTTSRCEVQDRGVGWSHPLPQCEIVKCKPPPDIRNGRHSGEENFYAYGFSVTYSCDPRFSLLGHASISCTVENETIGVWRPSPPTCEKITCRKPDVSHGEMVSGFGPIYNYKDTIVFKCQKGFVLRGSSVIHCDADSKWNPSPPACEPNSCINLPDIPHASWETYPRPTKEDVYVVGTVLRYRCHPGYKPTTDEPTTVICQKNLRWTPYQGCEALCCPEPKLNNGEITQHRKSRPANHCVYFYGDEISFSCHETSRFSAICQGDGTWSPRTPSCGDICNFPPKIAHGHYKQSSSYSFFKEEIIYECDKGYILVGQAKLSCSYSHWSAPAPQCKALCRKPELVNGRLSVDKDQYVEPENVTIQCDSGYGVVGPQSITCSGNRTWYPEVPKCEWETPEGCEQVLTGKRLMQCLPNPEDVKMALEVYKLSLEIEQLELQRDSARQSTLDKEL

SEQ ID NO: 27111 - protein, 44 aa, Homo sapiens
VELTIPQTSKPLQNPRRNRIQKDLLLLWISSKVLLWSSFKTRIP

SEQ ID NO: 27112 - protein, 87 aa, Homo sapiens
MKYKPTSSFLLSKMKQRLETLSEKESNDNSGGYPPPQMHPRDKPFTYRYSQSHIETPTWTQGMLLQRLNDMQQVKVYTLYTRPGKRS

SEQ ID NO: 27113 - protein, 73 aa, Homo sapiens
MKDLAGELALVDVMEDKLKGEMMDLHHGSLFLRTPKIVSGKDYTVTVNSKLVTITAEAHRKREKAILIWSSVM

SEQ ID NO: 27114 - protein, 41 aa, Homo sapiens
VPPPSDKQAASRHHVPSPHVRGTRRHLGQELQLVLQGAVHL

SEQ ID NO: 27115 - protein, 44 aa, Homo sapiens
VGPLPAPGCWAAAPLLSGGRARRLHLLASVISDEVRYVNPFAAG

SEQ ID NO: 27116 - protein, 45 aa, Homo sapiens
VGPLPAPGCWAAAPLLSGGRARRLHLLASVISDEVRYVNPFAADK

SEQ ID NO: 27117 - protein, 51 aa, Homo sapiens
VGPLPAPGCWAAAPLLSGGRARRLHLLASVISDEVRYVNPFAAGSSNCRDR

SEQ ID NO: 27118 - protein, 18 aa, Homo sapiens
VKIKEFYFSGLILFTASS

SEQ ID NO: 27119 - protein, 154 aa, Homo sapiens [sequence omitted]

SEQ ID NO: 27120 - protein, 9 aa, Homo sapiens
LFILLLEKR

SEQ ID NO: 27121 - protein, 69 aa, Homo sapiens
LCLLPGVLPSPEVVLLALRAHLGGGSNTSLWLEFQCRASLPQSWLKLMEPLPLPPAQSAKDPSQGRTFG

SEQ ID NO: 27122 - protein, 149 aa, Homo sapiens
LGCISFKLFADKFPKTEENFHAPSTGEKRFGYKASCFHRNIPGFMCQGSDFTRHNGTGGKSIYGEKFEDENFILKHTGPGVLPMANAGPNTNGSQFFICTAKTEWLDGKHVVFGKVKEGVNIVEAMEHFGSRNGKTSKKIISIADCGQL

SEQ ID NO: 27123 - protein, 40 aa, Homo sapiens
MDGRKPKLLLLGYRHIKERTGRQTFLEMAFIQELSRLPCH

SEQ ID NO: 27124 - protein, 183 aa, Homo sapiens
LGGGLELAISCQYRIATKDGKTILGAPEVLLGILPGAGGTQRLPKMVGVPAVFDMMLTSRNIHADSAKKMGLVDQLVEPLGPGIKPPEEWTIEYLEAVAITFAKGLADKKISPKRDKGLVEKLTAYTMTIPFVRQQVYKKVEEKVQKETKGLYPAPLKIIDVVKTGIERGIDAGYLSESQKFG

SEQ ID NO: 27125 - protein, 79 aa, Homo sapiens
LDVLPSVPKAEAQIATKSLDKEYLSTGGLAEFCKASAELALGENSEVLKSGRFVIVQTISGTGALRIGASFLQRFFKFS

SEQ ID NO: 27126 - protein, 267 aa, Homo sapiens
MNLGVSAYRDHNGKPYSIHKAEAQIAAKNLDEDYLSIGRLAEFCKASAEVALGENSEVSKSGRFVTVQTISGTSALRIRASFLQRFLKFSQDVFLPKPTWGSRTPIFRDTGMQLQGYRYYDRKTCGFDFTDTVEDISKTPEQSLLLLHACSHNPTGVDPGPKQQKEIATVVKKTKISLHSSTWPTKALPVAMVTRMPGLCATLPIIRHCRCQSYTKNMVLHSEGVAGFTMVCKDADEAKRVESHLKILMCPMYSNPPLNGTRLLLPF

SEQ ID NO: 27127 - protein, 49 aa, Homo sapiens
LNKIWSMFVSLYLISPESGNYLYLLSVYCVPGTISMCIEKPWKAIQQYI

SEQ ID NO: 27128 - protein, 57 aa, Homo sapiens
LLWSSTNRLLALRSATMLLLHRAVVLRLQQACSPSAPASPSLVITPAPRDGESWGPY

SEQ ID NO: 27129 - protein, 97 aa, Homo sapiens
LALLLGALLGTAWARRSQDLHCGACRALVDELEWEIAQVDPKKTIQMGSFRINPDGSQSVVENCTMRCRARWFMPVVPALWEAEAGGLPEVGSLRPA

SEQ ID NO: 27130 - protein, 101 aa, Homo sapiens
VEEAEPWEGMRSKAWEKDEWKSWVDPILLTPYPLPCPLLSFSPLPPACRALVDELEWEIAQVDPKKTIQMGSFRINPDGSQSVVEVTVTVPPNKVAHSGFG

SEQ ID NO: 27131 - protein, 106 aa, Homo sapiens
VVFLKQLASGLLLVTGPLVLNRVPLRRTHQKFVIATSTKIDISNVKIPKHLTDAYFKKKKLRKPRHQEGEIFDTEKEVSFYLSSPVLALALLPGSEKKQVAQKEEK

SEQ ID NO: 27132 - protein, 18 aa, Homo sapiens
LIVMCGTQITLFLSAVPF

SEQ ID NO: 27133 - protein, 32 aa, Homo sapiens
LACFIYLFFGLFSLVFPPSPLGQNAGGRSVDN

SEQ ID NO: 27134 - protein, 533 aa, Homo sapiens
LSLLLVLLGLGGRRLRAEPGDGAQTWARFSRPPAPEAAGLFQGTFPDGFLWAVGSAAYQTEGGWQQHGKGASIWDTFTHHPLAPPGDSRNASLPLGAPSPLQPATGDVASDSYNNVFRDTEALRELGVTHYRFSISWARVLPNGSAGVPNREGLRYYRRLLERLRELGVQPVVTLYHWDLPQRLQDAYGGWANRALADHFRDYAELCFRHFGGQVKYWITIDNPYVVAWHGYATGRLAPGIRGSPRLGYLVAHNLLLAHAKVWHLYNTSFRPTQGGQVSIALSSHWINPRRMTDHSIKECQKSLDFVLGWFAKPVFIDGDYPESMKNNLSSILPDFTESEKKFIKGTADFFALCFGPTLSFQLLDPHMKFRQLESPNLRQLLSWIDLEFNHPQIFIVENGWFVSGTTKRDDAKYMYYLKKFIMETLKAIKLDGVDVIGYTAWSLMDGFEWHRGYSIRRGLFYVDFLSQDKMLLPKSSALFYQKLIEKNGFPPLPENQPLEGTFPCDFAWGVVDNYIQVSQLTKPISSLTKPYH

SEQ ID NO: 27135 - protein, 240 aa, Homo sapiens
MDPRKVNELRAFVKMCKKDPSILHTQEMRFLREWVESMGGTATQKAKSEENTKEEKPDSKVEEDLKADEPSSEESDLEIDKEGVIEPDTDAPQEMGDENAEITEEVMDQANDKKVAAIEALNDGELQKAIDLFTDAIKLNPRLAILYAKRASVFVKLQKPNAAIRDCDRAIEINPDSAQPYKRRGKAHRLLGHWEEAAHDLALACKFDYDEDASAMLKEVQPRAQKIAEHQRKYERKREE

SEQ ID NO: 27136 - protein, 118 aa, Homo sapiens
LATPQPLPRCHGRIVPPWPAVSDPRPGAHPHLPLRSPPRGCQWRSPALSLRQVSHPRRRRAGATAVGPASRAARLLGGQPAGAPRFRLHLPFSASLASDRAISICHSQNFLSLLAPLC

SEQ ID NO: 27137 - protein, 58 aa, Homo sapiens
LRFLEKELCHEKWKTPEKLFQRQESSRQAGLGKILPARPAECMTHNQHPRNVYRGINE

SEQ ID NO: 27138 - protein, 67 aa, Homo sapiens
LNPQRGPGSTMLSEKELCHEKWKTPEKLFQRQESSRQAGLGKILPARPAECMTHNQHPRNVYRGINE

SEQ ID NO: 27139 - protein, 65 aa, Homo sapiens
VDAVPLLVVRRRRRRRRRHSAQRALAAAAAAAASEVPPPSQPPRWCSHPRSLCSSSLRSHHGILL

SEQ ID NO: 27140 - protein, 111 aa, Homo sapiens
LEAEEAGFPLQVILTPPEAPNPKLEEPNVEPGLRRPLPPEVEVEGPEEELEFAGERGFVPETAKAEPEVPPQEGVPAWLPRSLWTPQGRRAATRLPALRSPSRRRAGSPGT

SEQ ID NO: 27141 - protein, 119 aa, Homo sapiens
LTLIPFSPKLFAEEQAEGPNRLLYKDGFSTILHLLLGSPHPAATALHAELCQAGSSQGLSLCQFQNFSLHDPLYGKLFSTYLRPPHTSRGTSQTPNASSPGNPTALANGTVQAPKQKGD

SEQ ID NO: 27142 - protein, 56 aa, Homo sapiens
VCRYVRALKELSLPDGAGGCGARTAADRGSPAPWPGGGSCSSSGGCWARNISYLIM

SEQ ID NO: 27143 - protein, 108 aa, Homo sapiens
LISTVWQFRSLARTEGSHLVPLCLRVCIVASICVCVSVLSLFGVFFFFFVFCHCLPGSCPRSPSSVSLSLPRALGVLWKAAQYWRGQNDLPALSPCTGFQEVRNWKES

SEQ ID NO: 27144 - protein, 24 aa, Homo sapiens
LLLLLLLLRAWVWPMSCNTHPESV

SEQ ID NO: 27145 - protein, 184 aa, Homo sapiens
MVRYSLDPENPTKSGKSRGSNLRVHFKNTRETAQAIKGMHIRKATKYLKDVTLQKQCVPFRHYNGGVGRCAQAKQWGWTQGRWPKKSAEFLLHMLKNAESNAELKGLDVDSLVIEHIQVNKAPKMHRRTYRAHGRINPYMSSPCHIEMILTEKEQIVPKPEEEVAQKKKISQKKLKKQKLMARE

SEQ ID NO: 27146 - protein, 138 aa, Homo sapiens
LHSSCTRRGSGSLRLCSVARVGQRRSSPGHTVFSSERSLLVRPRSHPEPKGEHYVTGSPTPENQRTSAAMSKPHSEAGTAFIQTQQLHAAMADTFLEHMCRLDIDSPPITARNTGIICTIVPCGDHQECAHSHGKLCF

SEQ ID NO: 27147 - protein, 220 aa, Homo sapiens
MLQLAGVSNSTCGGVRNVSVETRNVKPQGKDSKAEENGSHSFMHSMDPQLERQMETTQNLVDSYMAIVNKTVWDLMVGAKPKTTMHIMIYNVHAPPHGDQGVHLLGAAVQPALAWEREDTHGGVGRVGTAARRDAASQSCCPTCTRLGTRRHSWRSRQSRHSGATRLAWEEIDTPGGVGRAGTAARRDSRGNEKTLLEESAEQADQGVHLLGAAVQPALA

SEQ ID NO: 27148 - protein, 223 aa, Homo sapiens
LRPRPALRGRRRAPHRLLQWSVSRGCGSWFLWKDSKAEENGSHSFMHSMDPQLERQMETTQNLVDSYMAIVNKTVWDLMVGAKPKTTMHIMIYNVHAPPHGDQGVHLLGAAVQPALAWEREDTHGGVGRVGTAARRDAASQSCCPTCTRLGTRRHSWRSRQSRHSGATRLAWEEIDTPGGVGRAGTAARRDSRGNEKTLLEESAEQADQGVHLLGAAVQPALA

SEQ ID NO: 27149 - protein, 213 aa, Homo sapiens
VRSPLLDIFIRVEGDKACPMVTPPPPVAWRPHLRPDLFCLVVPRLLCCCAPQGPPASRASLLHMAPAQPSPSLLKVVPQPDTLPPPAGLSSRACYPPPSPASTATRCVHDAPGHLPTSVAPEPARRKGYPLGKAQPPARSSLSPHPGQWTLLPASSSESWGHTSTCAALGGHPSQPHPAPEQLCPQRAPGHSSDQPGTAHPACKPGRVLGTDE

SEQ ID NO: 27150 - protein, 31 aa, Homo sapiens
LETRRSWPLGKPRSECNRKTPGGPSMVEPDR

SEQ ID NO: 27151 - protein, 12 aa, Homo sapiens
LHCLILDLFLVL

SEQ ID NO: 27152 - protein, 57 aa, Homo sapiens
VIIPLLQRTKQCLLCADTVLCNGDSVNKTEKVPVLMALTFWWRKTDKNQGNKHDNFR

SEQ ID NO: 27153 - protein, 63 aa, Homo sapiens
LFELIIILIHLFNTFIKCLLCADTVLCNGDSVNKTEKVPVLMALTFWWRKTDKNQGNKHDNFR

SEQ ID NO: 27154 - protein, 99 aa, Homo sapiens
LAPCPGGPPVSGSGLSFLEKRKREPTAVGGAATAAAAAAAAAAAAAAIGQTSPVPAQEKHHGSQRDLNGCVLVKPGPCTPPAPGAGDKTLWLRSGNLAL

SEQ ID NO: 27155 - protein, 46 aa, Homo sapiens
VVPLAGTNGETTTQGENCLILCPTNPTRAGLGAGRSGNHMPLPTVL

SEQ ID NO: 27156 - protein, 80 aa, Homo sapiens
LGGWGALQAGEPCQPSRAGCGREGATMGCTLSAEERAALERSKAIEKNLKEDGISAAKDVKLLLLGAGESGKSTIVKQMK

SEQ ID NO: 27157 - protein, 110 aa, Homo sapiens
LGGWGALQAGEPCQPSRAGCGREGATMGCTLSAEERAALERSKAIEKNLKEDGISAAKDVKLLLLGAGESGKSTIVKQMKYPLSFYSVPSTILSVVTEQDTQNLCPPGVF

SEQ ID NO: 27158 - protein, 146 aa, Homo sapiens
MPTGIKAVDSLVPIGRGQHELIIGDRRTGKTSIAIDTIINQKHFNDRSEEKKKLYCIYVAIGRKRSTVAQLVKRLTDADAVKYTTVVSAMASDAALLQYLAPYSDCSMGEYFRDDGKYTLIIYDDLSKQAVAYCQMSLLLHRPPWS

SEQ ID NO: 27159 - protein, 31 aa, Homo sapiens
MGNGQPRIGHESLKFKATSLKWFEKLEANMG

SEQ ID NO: 27160 - protein, 37 aa, Homo sapiens
VAVIAWLGISGLAVLLSQIGNRGLSCWEVVAEAVARY

SEQ ID NO: 27161 - protein, 27 aa, Homo sapiens
LASTLPFGYKEGIEDSVALGAGERHSP

SEQ ID NO: 27162 - protein, 27 aa, Homo sapiens
LNFLIFSFCFLNRDSMELVMEWAGLLG

SEQ ID NO: 27163 - protein, 209 aa, Homo sapiens
VWRRGGRILFPTSFSSPVLPSAFLVLVELGFLSSPVPQHCQKSVYVPLGGAAPSLLGRQGKNRCPHRGLCHVPSLWWLRRKAGKLPQPCRYVWHLLARALKGSAVCFLYWDQSKNPSTFPLQLGEALLPSQSREAAYQTQPKTLFTWVGRWSREVQSGMVRTWAIATKMGTSWVGRSLPLLTELGLGRVIAPTIAMGGGGTGSASSLSK

SEQ ID NO: 27164 - protein, 52 aa, Homo sapiens
VLDEPLELKIILSSKENRRILGEKTLENVHSFIHITSSVLNNGSISFLLLWP

SEQ ID NO: 27165 - protein, 30 aa, Homo sapiens
VLKHQIDIMLFWAFAVFFPAACNVSESTFF

SEQ ID NO: 27166 - protein, 276 aa, Homo sapiens
LPEQRPYTHRGMGLPGLFCLAVLAASSFSKAREEEITPVVSIAYKVLEVFPKGRWVLITCCAPQPPPPITYSLCGTKNIKVAKKVVKTHEPASFNLNVTLKSSPDLLTYFCWASSTSGAHVDSARLQMHWELWSKPVSELRANFTLQDRGAGPRVEMICQASSGSPPITNSLIGKDGQVHLQQRPCHRQPANFSFLPSQTSDWFWCQAANNANVQHSALTVVPPGGDQKMEDWQGPLESPILALPLYRSTRRLSEEEFGGFRIGNGEVRGRKAAAM

SEQ ID NO: 27167 - protein, 33 aa, Homo sapiens
LQLIVMTTVEDGLPLHLKSGCSLIIIKHGHART

SEQ ID NO: 27168 - protein, 41 aa, Homo sapiens
LGFLRIDISVKQKSGNRSGNPPNFYSLSPRLLIHWEVSNQL

SEQ ID NO: 27169 - protein, 92 aa, Homo sapiens
MAYRGQGQKVQKVMVQPISLIFRYLQNRSRIQVWLYEQVNMRIEGCIIGFDEYMNLVLDDAEEIHSKTKSRKQLGRIMLKGGNITLLQSVSN

SEQ ID NO: 27170 - protein, 148 aa, Homo sapiens [sequence omitted]

SEQ ID NO: 27171 - protein, 44 aa, Homo sapiens
VCFLWYILETWLHTPLHLLLQTAFRSCVPSFWNLIKVRSSLYSV

SEQ ID NO: 27172 - protein, 52 aa, Homo sapiens
MGPTPGLCSCKLTPYPNHLFFSPQSRDLDPAPLSRRFMIGRTEKSCGHLVFP

SEQ ID NO: 27173 - protein, 123 aa, Homo sapiens [sequence omitted]

SEQ ID NO: 27174 - protein, 389 aa, Homo sapiens
LLLLMSKGQVEYQPRGKGNPGRKKMKTIENFLRRSISFMGGSNGLKLSPIPNPRPVVFGRNHQFMQQEMFTCHHCGKQLRSLAGMKYHVMANHNSLPILKAGDEIDEPSERERLRTVLKRLGKLRCMRESCSSSFTSIMGYLYHVRKCGKGAAELEKMTLKCHHCGKPYRSKAGLAYHLRSEHGPISFFPESGQPECLKEMNLESKSGGRVQRRSAKIAVYHLQELASAELAKEWPKRKVLQDLVPDDRKLKYTRPGLPTFSQEVLHKWKTDIKKYHRIQCPNQGCEAVYSSVSGLKAHLGSCTLGNFVAGKYKCLLCQKEFVSESGVKYHINSVHAEDWFVVNPTTTKSFEKLMKIKQRQQEEEKRRQQHRSRRGSQDTCMPKALHRM

SEQ ID NO: 27175 - protein, 15 aa, Homo sapiens
MKMDSIPVLQVRKED

SEQ ID NO: 27176 - protein, 76 aa, Homo sapiens
LFLAPRRFRDLLVGLLFPLILFSLSGAEIVGAGGFILGRGRSITPPLRFSFSLFGRDLISPLLCAPTPRTHRPVLE

SEQ ID NO: 27177 - protein, 139 aa, Homo sapiens [sequence omitted]

SEQ ID NO: 27178 - protein, 204 aa, Homo sapiens [sequence omitted]

SEQ ID NO: 27179 - protein, 44 aa, Homo sapiens
LVTILCYLVHFLHSNRRALLRLLLPYPPVTLPRLANAERVGSCL

SEQ ID NO: 27180 - protein, 87 aa, Homo sapiens
LMVALNLILVPCCAAWCDPRRIHSQDDVLRSSAADTGSAMQRREAWAGWRRSQPFSVGLPSAERLENQPGKLSWRSLVGEGHRICDL

SEQ ID NO: 27181 - protein, 7 aa, Homo sapiens
LNLIYRV

SEQ ID NO: 27182 - protein, 14 aa, Homo sapiens
MHASKSTERPLKQT

SEQ ID NO: 27183 - protein, 40 aa, Homo sapiens
LATVFLLICDSLLLLCSFTSCVSREMKERPANSLQPVDSK

SEQ ID NO: 27184 - protein, 424 aa, Homo sapiens
LAMYPNPLIYCTCWDPWNLGPRKLIKTPQLPRKNSTGSSKLTPLVPAPKNHNYLQPTKPVVSPKMKIHSARQEETNKSFYEVINVSPGYQLVRNREQISVTLGDEMFDRKKRWESEIPDKGRFSRTNIISDLEEQISELTAIIEQMNRDHQSAQKLLSSEMDLRCAEMKQNFENKNRELKEAHEAELSELENNYKAALKAEKLAAQEKLEEMGKEYKYLKNMFRTYQDSIYDEMEEKWSKQKAKWKKDEKFERENILLQQKKKMTKKFEMESGEEDKKINESCSAVFENFIQEKEELLKQHQSDTLQLEELRKTKEVMQEELHAQALILESLNTNLYYTQLELQKEKAIVGNLEKMLQTKFAETEEKYKHTIQILTEENIHLKQKIISKNEEICEGCSGRLASITVSKDDSDTVQDGSKKGQES

SEQ ID NO: 27185 - protein, 38 aa, Homo sapiens
LLTLALADLFFSLTLPILAASKMNGWIFGTICARWSSS

SEQ ID NO: 27186 - protein, 33 aa, Homo sapiens
MFFSRAFGWCVALPTFTFWTSSLRNALSDHAEV

SEQ ID NO: 27187 - protein, 68 aa, Homo sapiens
MCVHMSVSVWEMLPGSGKLFLPILWFPGSVALVGQGWFDLFSPSGGLEAGGSPECLPLQWLLVACCWA

SEQ ID NO: 27188 - protein, 33 aa, Homo sapiens
VHAAGRAPSPPGQPGARESVLRPHRDFRLQRRP

SEQ ID NO: 27189 - protein, 106 aa, Homo sapiens
LLFLQQSAMTAFALSMLSAHHLLPLPLQWLTLETKTKTPQPFSSTSQISTDKDKGLNPQLLKMDPGHMGWSDTPAQLSAGEEAQKRFRGLKDILLPCPYEQAISAP

SEQ ID NO: 27190 - protein, 49 aa, Homo sapiens
VRMWFSCFSLWLSVCYTVLKVCFPQFNSFSKACAERARATCGRDLSENQ

SEQ ID NO: 27191 - protein, 98 aa, Homo sapiens
LTASHRPTTRKSGWCSCSLKVVRLKPTRKFAYLGRLAHEVGWKYQAVTATLEEKRKEKAKIHYRKKKQLMRLRKQAEKNMEKKIDKYTEVLKTHRLLV

SEQ ID NO: 27192 - protein, 127 aa, Homo sapiens
VQPVWASGERQERRDSEFPQVRPTWWWVRAQLHALGEVRGERCGGAPSLRLSAGRRPAPRDDATELMTDPKLITWSPVCRNDVAWNFFEKFLVGPDGVPVCRYSCRFQTIDIEPDIEALLSQGPRCA

SEQ ID NO: 27193 - protein, 140 aa, Homo sapiens
VNTRHFPARSALYGTVTGLFRSGSSQTFSGPAWPWGHQRVSSRSWPAEFCCCFHAACDLRFLLFSPRPHAGVRRRLLRALASLPLPHTLLMKVSTHAVSTEQPPSAGSSWKAICLSGRHSAALTVLVTCVPFWSHSCPVS

SEQ ID NO: 27194 - protein, 21 aa, Homo sapiens
LLNFSLSALCDEKIQEAIVGM

SEQ ID NO: 27195 - protein, 14 aa, Homo sapiens
MTWRKKSVGLFALL

SEQ ID NO: 27196 - protein, 53 aa, Homo sapiens
LKVGEFILFMVMLFYQDFIADGPRKNFLLLCSLQQDRDIRQPQKPLPDLIWDY

SEQ ID NO: 27197 - protein, 208 aa, Homo sapiens
LYEAVREVLHRNQRKRRKFLETVELQISLKNYDPQKDKCFSGTVRLKSTPRPKLCVCVLGDQQHCDEAKAVDIPHMDIEALKKLKKNKKLVKKLAKKYDAFLASESLIKQIPRILGPGLNKAGKFPSLLTHNENMVAKVGEVKSTIKFQMKKVLCLAVAVGHVKMTADELVYNIHLAVNFLVSLLKKNWQNVRALYIESTMGKPQRLY

SEQ ID NO: 27198 - protein, 40 aa, Homo sapiens
LFLPVMEGKVPVAALRSDQLKKKLPTSQQSLQRSPSLDLP

SEQ ID NO: 27199 - protein, 23 aa, Homo sapiens
MLMLLSFHRLLSLVPLELQPSSR

SEQ ID NO: 27200 - protein, 26 aa, Homo sapiens
LLLCSLGMLLCLCIWSLFGATVDRHL

SEQ ID NO: 27201 - protein, 91 aa, Homo sapiens
VLGWCSSASSSLRPRGLAHREGERRISPLGCRLRVRLLMKSLASSEISSNASSSKSQVAEVTLAKVSLSLSPMKGERPLTLERQEQDSRCG

SEQ ID NO: 27202 - protein, 89 aa, Homo sapiens
VARGGRNDKAILKAGRAHHKYKAKRNCWPRVRGVAMNLVEHPFGGGNHQHIGKPSTIRRDAPADRKVGLIAVRQTGRLRGAKTVQEKEN

SEQ ID NO: 27203 - protein, 15 aa, Homo sapiens
LDNKALVVCSSTYLK

SEQ ID NO: 27204 - protein, 47 aa, Homo sapiens
LEETPALESALRRPPLRDRGVSHCWLLPVFAESHIKKIPNSHFSTII

SEQ ID NO: 27205 - protein, 27 aa, Homo sapiens
VHVLPTVVALSPLLLLSWPPRDGGHPV

SEQ ID NO: 27206 - protein, 14 aa, Homo sapiens
LNVISKLKMLWIVY

SEQ ID NO: 27207 - protein, 10 aa, Homo sapiens
MKILSLLLYT

SEQ ID NO: 27208 - protein, 164 aa, Homo sapiens
VGYSGSWSGPAVQSRGSEACWAWQRGTRPRRRPRPHSDSLLPSLDTGSRSKQRINNWKESKHKVIMASASARGNQDKDAHFPPPSKQSLLFCPKSKLHIHRAEISKIMRECQEESFWKRALPFSLVSMLVTQGLVYQGYLAANSRFGSLPKVARTASLPVRNAK

SEQ ID NO: 27209 - protein, 110 aa, Homo sapiens
VLSGQARGRSKRRKHKGPEGSRGDRWGTREAGAGRRCSHGGARPAGLGNEGLGLGGDPDHTDTGSRSKQRINNWKESKHKVIMASASARGNQDKDAHFPPPSKQLCLFLL

SEQ ID NO: 27210 - protein, 142 aa, Homo sapiens
VVQWVSSLDSNAVSPASVSVFPTLGIMHHNKQATENAKAEVRRILGLLDAHLKTRTLRLADIVVFCTLLWLYKQVLEPSSCQAFPNTNCWFLTCINRPQFRAVLGKVKLSVNMTRFDAKKLAEGQPEKDTPWKGKGSRENKQ

SEQ ID NO: 27211 - protein, 36 aa, Homo sapiens
VLLFGMFKRAKLYNDLMSMEQMEYSALPGVIKILKE

SEQ ID NO: 27212 - protein, 277 aa, Homo sapiens
LEKQIQWSQFKGYFIFKLEKVMDDFRTSAPEPRGPPNPNVEYIPFDEMKERILRIVTGFNSIPFTIQRLCELLTDPRRNYTGTDKFLRGVEKDVMVVSCVYPSSEKNNSNSLNRMNGVMFPGNSPSYPERSNVNGPGTPRPRNRPKVSLSAPMTTNGSPDSTDSKEVNLQQNEEKNHSDSSTSESEVCSVSPLKNKHPDEDAVEAEGHEVKRLMFDKKGEVRETAIQATCSEISSVMVEETEASPSSQDKDKESRCTRQESFMTSREMIPERKNQEK

SEQ ID NO: 27213 - protein, 59 aa, Homo sapiens
MAMMPVLNGVPAAGWMDGSYTLPFESRDLTPDCVLFLRIRTQPLEVKTTVGWIELESCL

SEQ ID NO: 27214 - protein, 32 aa, Homo sapiens
LEDSADTLRGSYQAQAAKTSWHIPGESSAASI

SEQ ID NO: 27215 - protein, 56 aa, Homo sapiens
MSLIFGDISKTAGEKNGLRGSGVGREIGSETSASKPREKLKLWFSVSSTVIFEMRY

SEQ ID NO: 27216 - protein, 87 aa, Homo sapiens
LKEKIDRGSGKKLEDGPKFLKSGDAAIVDMVPGKPIVESFSDYPPLGHFAVRDMRQTVAVGVIKAVDKKAAGGGKVTKSAQTAQKAK

SEQ ID NO: 27217 - protein, 38 aa, Homo sapiens
VKLLLTFWRACALCRQKRTKTQQEKAEAKTHPVSALLK

SEQ ID NO: 27218 - protein, 78 aa, Homo sapiens
LRGCSLEQRSFISVRLLSYLSACRHPMEDSMDMDMSPLRPQNYLFGCELKADKDYHFKVDNDENEHQLSLRTVLKLSK

SEQ ID NO: 27219 - protein, 60 aa, Homo sapiens
LILFLSSPFRGLLYLVCFKEVDLLMYEEWDAFDLKTKDRCQWAALALVCTAVAAVDASVL

SEQ ID NO: 27220 - protein, 98 aa, Homo sapiens
LHHHLGFVLFCFLVKKGGENPAHPSPPFFKRVMKTEGSGVTNLADGRCFGGTPGLRDSTQANSRLGLFFPPSFPLAPSAAGGGDVEGRRPASVTGARK

SEQ ID NO: 27221 - protein, 109 aa, Homo sapiens
MAAQGQPQVQFKLVLVGDGGTGKTTFVKHHLTGEFEKKYVATLGVEVHPLVFHTNRGPVKFNVWDTAGLEKFSGLRDGYYIQAQSTIIVFDVTSRVTYKNVPNWHRDLV

SEQ ID NO: 27222 - protein, 94 aa, Homo sapiens
VATSGPWGWARSFCFWLASSLLHLRELLLSPTVFVITSRCCPGMDLCSQGFLLRYIWMVSPSCAMTGRNAGQSPRDSGQKMSWEIRHGTERPGT

SEQ ID NO: 27223 - protein, 31 aa, Homo sapiens
LALSTSHRPPLSNKAWWAAKKGCIDNVAVWC

SEQ ID NO: 27224 - protein, 171 aa, Homo sapiens
VAETCQMLMPKKNRIAIYELLFKEGVMVAKKDVHMPKHPELADKNVPNLHVMKAMQSLKSRGYVKEQFAWRHFYWYLTNEGIQYLRDYLHLPPEIVPATLRRSRPETGRPRPKGLEGERPARLTRGEADRDTYRRSAVPPGADKKAEAGAGSATEFQFRGGFGRGRGQPPQ

SEQ ID NO: 27225 - protein, 97 aa, Homo sapiens
VAKKDVHMPKHPELADKNVPNLHVMKAMQSLKSRGYVKEQFAWRHFYWYLTNEGIQYLRDYLHLPPEIVPATLRRSRPETGRPRPKGMVPTQIPSAI

SEQ ID NO: 27226 - protein, 123 aa, Homo sapiens
LPGPPCALWLGGGGRGLRDRRSSVFPGVPNWRGWGTLFFTAARRDYGCPRLPPSDSAQASGRCGQWARVRRAFPAGAGRLLRRWEELRRAGTGVGEGAGWERRREPGGCTDKKAPNGWRAFSC

SEQ ID NO: 27227 - protein, 48 aa, Homo sapiens
LMFLMKWKDSDEADLVLAKEASMKCPQIVIAFYEERLTWHSCPEDEAQ

SEQ ID NO: 27228 - protein, 60 aa, Homo sapiens
VRRCSSQSCFSSSGSSHYSARTSPVRVRPRRSLSSRSAAGNRAEATESAMEVTGLKSMSY

SEQ ID NO: 27229 - protein, 19 aa, Homo sapiens
LLLLLLLNRLLFMLYPYVT

SEQ ID NO: 27230 - protein, 142 aa, Homo sapiens
LEPDPAPETRPADAVPLLRRGRSWRKERGGRPVNRPGEAVLSRLPGATLSPDPACRCRATAMNSGAMRIHSKGHFQGGIQVKNEKNRPSLKSLKTDNRPEKSKCKPLWGKVFYLDLPSVTISEKLQKDIKDLGGVSENRTLA

SEQ ID NO: 27231 - protein, 108 aa, Homo sapiens
VSPAPYRRCSHHCLSRDPPLLPRTDPARTTARMGRTQGSGLQGPREWEGERGPRRPGRHPTRYPWVPQGCAVANSKPALTVQALGSCDEGLGRKWARGDPGGCRWMCR

SEQ ID NO: 27232 - protein, 40 aa, Homo sapiens
MLIAVLLLPLRRRWRRPWDPRKPACWRSWSSRTKQGVRER

SEQ ID NO: 27233 - protein, 164 aa, Homo sapiens
MAPGRSAAQPASMQALGGLGSQISMSCSTSFWGGLGSGGLATEMAGGLAEMGGIQNEKETMQSLNDHLDYLDRVRNLETENWRLESKIQEYLEKRPHVRDWGHYFKTIKELRAQIFANTVDNVHIILQIDNARLAADDFRVKYETRAGHAPVCGEQHPWALQGH

SEQ ID NO: 27234 - protein, 48 aa, Homo sapiens
LRLPSIPLRGCRALAEWRQLEGWPEPDFVALRAGRWPRRRLTEIVVPC

SEQ ID NO: 27235 - protein, 93 aa, Homo sapiens
VFPLLSGWRRPKRCWARSPFLSLRRPLPALSRCTVSPTQDCPGPDMARGQQKIQSQQKNAKKQAGQKKKQGHDQKAAAKAALIYTCTVCRVNS

SEQ ID NO: 27236 - protein, 29 aa, Homo sapiens
LPEMAAINTMLKLTRRIEFHRFLRFIGGS

SEQ ID NO: 27237 - protein, 122 aa, Homo sapiens [sequence omitted]

SEQ ID NO: 27238 - protein, 35 aa, Homo sapiens
MERTKLKCCMAKATKGRIHNLHSWSYHLYCTVVIY

SEQ ID NO: 27239 - protein, 132 aa, Homo sapiens
LLCSLPGLAASCRSPGAASCGGPGLLAGRRRPEKLVVRALSARNQPASEGAARRRDHGLGEPLLLPGTFGPAVRAGAARGLPAPRVSDARLHQPLGSQNRRGLPGGQPYRQQVRIHQHRTDRGPEGLLPLLP

SEQ ID NO: 27240 - protein, 118 aa, Homo sapiens
LMNMLSTPLAPTTGTATCSWSASTCTTTRPAVAGTCPALCSWIWSRAPWTLCARGPSGRSSGQTTSSSVSCGRGLGCGSLARAAQNPGTLQGHPVGTVAPGPLNTLLSAESSRSICLS

SEQ ID NO: 27241 - protein, 21 aa, Homo sapiens
MADPRVRQIKIKTGVVKRLVK

SEQ ID NO: 27242 - protein, 228 aa, Homo sapiens [sequence omitted]

SEQ ID NO: 27243 - protein, 9 aa, Homo sapiens
MQSLHLLKG

SEQ ID NO: 27244 - protein, 48 aa, Homo sapiens
VSLGACSGNPLPSKGPWIHLAFLRRKLKHQMVKRTVQDSLAILTKEES

SEQ ID NO: 27245 - protein, 34 aa, Homo sapiens
LLLRPWRQLTLEAAGRRNVSPKDAPLQDWRKRKK

SEQ ID NO: 27246 - protein, 70 aa, Homo sapiens
MKLLAAFLCLSPTLLEFSQNNMLRTLIRLELPKGLAPGANTLLLKQTFRSGKSEREHGHDSLHFKNHLES

SEQ ID NO: 27247 - protein, 73 aa, Homo sapiens
VVLHGVVCLLSLGPLCPHHETMPRLVCWKEVRGTRKRATFSQGHSRPVVPCHFTNWPQHKVHGWSWKPLSSAN

SEQ ID NO: 27248 - protein, 66 aa, Homo sapiens
LTWITSWPPPCPAAPLGPAPTSPSRMLAPKQHLWSRGTHPRTSPERAGMGRSDPDHSPRPRQGAGI

SEQ ID NO: 27249 - protein, 250 aa, Homo sapiens
LWGFGIREGTSAATPFLPAPMKGRGLGQASRIVGSPCSAASRSGRSRPAGNKCGSRGGARWSSKPRGPGGAAAGSESQSPPRGVPRPSRRPLAHPLPCESVSPCAWPACFGPSGLPQRWPKGRLPSAEQVTNHFGGHGIDTAALEIRDKGPERGESRLRSESGSRENPPSPLPAALESQKPNSAQLSVWRARPGLQAQIHVPTPEHTQTPPESETASGRLRSSGLRGGTGAGAASRGNRTVVTGNVPRTE

SEQ ID NO: 27250 - protein, 200 aa, Homo sapiens
VSSRLVRTGWRLSWGFPARNVLGSAPGCGCWVGGEGRVSSPWGDRKVGGPSNSRHWNKGAGPSCPPGPSLAAGLPGRRAGSWAPVLWTRAALRAGTATFSTVAPSPPQEREPPLPDMSRSSRNIWTSKGHQEVAQQKRPRACFLYRWLAANIPKETCQARSASSRLSFHRFGRPRQGDHLPQKFETSLGNIVRPLSLQKT

SEQ ID NO: 27251 - protein, 31 aa, Homo sapiens
LSLPQRLALVQGLSGGGRFHPACVLLVRLAE

SEQ ID NO: 27252 - protein, 24 aa, Homo sapiens
LRSLLRFLAWILALRGGGRRDGEK

SEQ ID NO: 27253 - protein, 26 aa, Homo sapiens
LPLALLLQKISTLHLHNVFETKSSRF

SEQ ID NO: 27254 - protein, 124 aa, Homo sapiens
LSHPLCSLSLSFCVYIFPFATHKSLAPDSLVPVSVSRTFAVSRGDSLAGSPVNRSPSRCSGLNRSESPNRERSDFGGSNTQLYSSSNNLYMPDYSVHILSDVQFVKVTPPGRLSSPSQWAVLAG

SEQ ID NO: 27255 - protein, 131 aa, Homo sapiens
VVWLWRRSIRRLCGGAVEARRTGCKQPGPGRQQLHPQRGSQDAPLCWGYCRGGAGGCRAHSPAHQGRAPFRTHRCPVRRTDPPEETEAARGGTGSCHILAPQGFLTPPNPAPAQPGTTGHDREARRCPATV

SEQ ID NO: 27256 - protein, 69 aa, Homo sapiens
LLVLSSSSLAGHRDFWTGNCTILFSQQGGSRDCPPRKSGGLGIWWVCSLAVAWGSVCVSGVGSGNVLRI

SEQ ID NO: 27257 - protein, 63 aa, Homo sapiens
LLVLSSSSLAGHRDFWTGNCTILFSQQGGSRDCPPRKSGGLGIWEDQVEKGAEARKEPSSRRV

SEQ ID NO: 27258 - protein, 44 aa, Homo sapiens
LLGADPRARPARRQVAGHRAPRLRHQPLGTAAPRGQPPHRPPRR

SEQ ID NO: 27259 - protein, 34 aa, Homo sapiens
LPISYSKQIQILFWPGGRADAPSFLKPPWLIDPF

SEQ ID NO: 27260 - protein, 68 aa, Homo sapiens
MLLEQPPRSRPRRHLLFLRRSFLRRCRACGAEGPGRARRAPPRRLASLAAFRPQWSAGRPLLRPGRGL

SEQ ID NO: 27261 - protein, 29 aa, Homo sapiens
LTYIFGKVEAFGTEVLPGETKLLNGTLQQ

SEQ ID NO: 27262 - protein, 24 aa, Homo sapiens
MFFTIIVMLIFTESKRKLEMIGSL

SEQ ID NO: 27263 - protein, 91 aa, Homo sapiens
LEPGAPGPRELACQRGGGKLVPALPGSAPAPAPLLFKRLPPASAVARFAALPPSPPSIPPRLRSVPGHPAAPAQVPWPHCTALACGLTGMG

SEQ ID NO: 27264 - protein, 17 aa, Homo sapiens
MIIFQMMNLVTLILEVD

SEQ ID NO: 27265 - protein, 67 aa, Homo sapiens
LAQRTQRGPKTGAGGRAPSAGHRAPSGGGTRGPAPSSAPARRGLQPGPAQRRPAGMRSGGRRRPRPG

SEQ ID NO: 27266 - protein, 47 aa, Homo sapiens
VCFAVGLAAILATGAGGEGSDGTDGDRGLPGQPPPGPVARGKESPVF

SEQ ID NO: 27267 - protein, 43 aa, Homo sapiens
LEMDRITPFAVHRFVLLLLCPAAAAAAARGGGEFQDSIKEAKT

SEQ ID NO: 27268 - protein, 97 aa, Homo sapiens
MSFTAWNAGGSVQARQVPTGTKSECSIRMSSPTSQLSTLKSLLVSCVNSHLMDATLLLFLQTRHLLKSMSTRAARQQRTYCRDTKEKSCPMAMTSGQ

SEQ ID NO: 27269 - protein, 30 aa, Homo sapiens
LAALCGALLCAPSLLVALDPAQIFPPLGNF

SEQ ID NO: 27270 - protein, 150 aa, Homo sapiens
LRVREPRAPAARVAIFFPLRLSVCCWLCPSAAPPLGSPPPARLGPEPLPLAGAQSRSAPARLAWAAVPGPLSGGPSVRRRGPGTQSAAQRRGAGYRSLGFSRVCFAPWELHQSWRLASCKEVVTYPVVKLGKTRALASGKHVPSETDKSK

SEQ ID NO: 27271 - protein, 104 aa, Homo sapiens
LGISLTCACLLALGRPGSAHSPFPDTRCQEDSDCGTSVPPTLTKTFLYNELYVYNTRKDTWTKVDIPSPPPRRCAHQINRRSFGSEWTSDGGLEETIDPVWWLP

SEQ ID NO: 27272 - protein, 92 aa, Homo sapiens
LPGRAPAAGAATAAAPGARVRRPPPGHPARGGGSSEPAPDPSRFRLTLPGKLVPLRRAAPGAPPRRGRPQGPSTLKHRVSPRAPAGVARPQE

SEQ ID NO: 27273 - protein, 95 aa, Homo sapiens
LSPLASRRSVPPCPPSPATAAAAFRRPFPPRKRNRIVCPLSRTSTLSKFACNGTVIEHPEYGEVIQLQGDQRKNICQFLVEIGLAKDDQLKVHGF

SEQ ID NO: 27274 - protein, 50 aa, Homo sapiens
LDTMGTRLLPALFLVLLVLGFGEGISLQLLGVSKDSRPEPVREDIPARCR

SEQ ID NO: 27275 - protein, 372 aa, Homo sapiens
MNKRRLLYPSGWLHGPSDMQGLLFSTLLLAGLAQFCCRVQGTGPLDTTPEGRPGEVSDAPQRKQFCHWPCKCPQQKPRCPPGVSLVRDGCGCCKICAKQPGEICNEADLCDPHKGLYCDYSVDRPRYETGVCAYLVAVGCEFNQVHYHNGQVFQPNPLFSCLCVSGAIGCTPLFIPKLAGSHCSGAKGGKKSDQSNCSLEPLLQQLSTSYKTMPAYRNLPLIWKKKCLVQATKWTPCSRTCGMGISNRVTNENSNCEMRKEKRLCYIQPCDSNILKTIKIPKGKTCQPTFQLSKAEKFVFSGCSSTQSYKPTFCGICLDKRCCIPNKSKMITIQFDCPNEGSFKWKMLWITSCVCQRNCREPGDIFSELKIL

SEQ ID NO: 27276 - protein, 15 aa, Homo sapiens
LDLIFLLILNRFVCL

SEQ ID NO: 27277 - protein, 705 aa, Homo sapiens
LAMCVFLHLLSYIKDTSFIPGPDCELHPRGMAATGPCSEAPVQGCDAGELQQLGLCGVSDVQRSWSKFCNFPLTGYHVSKPDVIFKLEQGEEPWIVEEFSNQNYPDIDDALEKNKEIQDKHLTQTVFFSNKTLITERENVFGKTLNLGMNSVPSRKMPYKCNPGGNSLKTNSEVIVAKKSKENRKIPDGYSGFGKHEKSHLGMKKYRYNPMRKASNQNENLILHQNIQILKQPFDYNKCGKTFFKRAILITQKGRQTERKPNECNECRKTFSKRSTLIVHQRIHTGEKPYVCSDCRKTFRVKTSLTRHRRIHTGERPYECSECRKTFIDKSALIVHQKIHGGEKSYECNECGKTFFRKSALAEHFRSHTGEKPYECKECGNAFSKKSYLVVHQRTHRGEKPNECKECGKTFFCQSALTAHQRIHTGEKPYECSECEKTFFCQSALNVHRRSHTGEKPYECSQCGKFLCTKSALIAHQITHRGKKSYECNECGKFFCHKSTLTIHQRTHTGEKHGVFNKCGRISIVKSNCSQCKRMNTKENLYECSEHGHAVSKNSHLIVHQRTIWERPYECNECGRTYCRKSALTHHQRTHTGQRPYECNECGKTFCQKFSFVEHQRTHTGEKPYECNECGKSFCHKSAFRVHRRIHTGEKPYECNQCGKTYRRLWTLTEHQKIHTGEKPYECNKCEKTFRHKSNFLLHQKSHKE

SEQ ID NO: 27278 - protein, 32 aa, Homo sapiens
VLLSGSLLAYSFSRAPVPSGLLADHESRVDGH

SEQ ID NO: 27279 - protein, 79 aa, Homo sapiens
LYLSGPVLVMISLLTEAVPQKQTCNRRNRSQCHPSAVVTSKKVSRHGQMSPGGQNHPQLRTTALNYGVSLCHPGWSTVA

SEQ ID NO: 27280 - protein, 31 aa, Homo sapiens
LWLLNFTVTSYSVFRVNLIYKLCHNGWKDLC

SEQ ID NO: 27281 - protein, 111 aa, Homo sapiens
VFKTGCVEITANNQSKRITRSYVPFTLEGEYLIGDAATNQLTSNPKNTVFDAKWLIGRTWNDLSMQQDIKFLRFKVVEKKTKPYVQVDIGGGQTKTFAPEEISAMVLTKMQ

SEQ ID NO: 27282 - protein, 69 aa, Homo sapiens
LVFDFFWTLVSTISEMPSSLLGAAMPASTSAAALQEALENAGRLIDRQLQEDRMYPDLSELLMVSAPSE

SEQ ID NO: 27283 - protein, 38 aa, Homo sapiens
LFFRVGGAAPRGPSPGLPARRPLAALRAQPKAVSLPAQ

SEQ ID NO: 27284 - protein, 37 aa, Homo sapiens
LQAAGAGDREAAASHRTAVPERRKQQPGAPHAGGRTQ

SEQ ID NO: 27285 - protein, 122 aa, Homo sapiens
VRGAGRRPCARRPLHPCPERSRRGRGTEANRVRSQYPRQQHQLLPSTDSREGDPQYLTPSRRWEQAPAMERDTAASPHDPSCMTPKPPPDSASDSMQNLGSGDLPQPREEASSSGDRLRTGV

SEQ ID NO: 27286 - protein, 123 aa, Homo sapiens
VPCPALTPKTTFWSRPRRRPRRRGTRCPCCHRRDVLNFLRSGDLPPRERVRAVYKEAQYYAIGPLLEQLENMQPLKGEKVRQAFLGLMPYYKDHLERIVEIARLRAVQRKARFAKLKWLAGRR

SEQ ID NO: 27287 - protein, 83 aa, Homo sapiens
LPGPSGPAGEVGKPGERGLHGEFGLPGPAGPRGERGPPGESGAAGPTGPIGSRGPSGPPGPDGNKVKSYVFYIAGLAQSAWNK

SEQ ID NO: 27288 - protein, 23 aa, Homo sapiens
LKKMMRIKIMLTLLAHRLLLTQT

SEQ ID NO: 27289 - protein, 83 aa, Homo sapiens
LLKVSLWVIAPSLFNGSLPASILVLWERPAFWCCSQEWSLTALWKPHRRKTLICPRSCLTPPLDRPSPRFYTVLPARRHDEAM

SEQ ID NO: 27290 - protein, 191 aa, Homo sapiens
LRPPTQTRDSIRASAVGLLGTLVRRGRGGLRLGLRGPLRKLVLQSLVPLLLRLHDPSRDAAEVSSPRHHPTPMPSNTHHSHRASPPTITGQGLTHPKDLSGRCDGRPGYYCSSLEQNQSSLLPWALLPLTRCPCSPSSHPTFCLSTSWTPDPAHFPYPRAQSGPWPAVTTPFAGACWRSWSPWPTMTAPRP

SEQ ID NO: 27291 - protein, 46 aa, Homo sapiens
LMKRLAARCFAGLLILSPLTVISDSRPADSGHRRRQFGGNGRGSTA

SEQ ID NO: 27292 - protein, 114 aa, Homo sapiens [sequence omitted]

SEQ ID NO: 27293 - protein, 63 aa, Homo sapiens
LTRNNMIKYLTSLRVGRKKGPNWNVEEARGGIKATLSSPQCSLMLQMRCALPKRRFLDQCSKS

SEQ ID NO: 27294 - protein, 88 aa, Homo sapiens [sequence omitted]

SEQ ID NO: 27295 - protein, 87 aa, Homo sapiens
LEETAASQPLTGSQKAPGRAAWRELTTRQSGSPGTCAGACGRSRAQGAGLREGATERAGRRTCASGVESERRGGGHAGRGCRRRRRR

SEQ ID NO: 27296 - protein, 108 aa, Homo sapiens
LRPPPANRRRRAARAVLGAGERGSGGRRGKEAAAAAAAGARARPGAARPPAPRCSAAPFLHPPPGRAGASALRAAAATYPAPGPVPDLGMANLRPVAAPASAGPRSCC

SEQ ID NO: 27297 - protein, 55 aa, Homo sapiens
VPSNSCQPVVSQPGECAHRGPGSRWLQLTKQPRAPRRSESSLLLRTVPPLCGSHG

SEQ ID NO: 27298 - protein, 22 aa, Homo sapiens
LPVLGWVLDLLLLLAFGALCHA

SEQ ID NO: 27299 - protein, 37 aa, Homo sapiens
LGWIKPLWWGLCCALQDGEQRPSHVTPTVMPDVARCP

SEQ ID NO: 27300 - protein, 66 aa, Homo sapiens
MAASWNCLRWRSRALLWTAALLCSPAAAKSVLSIADGDEIERWCWVLRRFHVVVSAGGRPGTREKT

SEQ ID NO: 27301 - protein, 11 aa, Homo sapiens
LLLEEGHRAYK

SEQ ID NO: 27302 - protein, 76 aa, Homo sapiens
LLLLWNHLLLLQLLLLQDSDVSLRSAVRSAGELPTVPQGAGAGDTAEPGNESGHRRGHHDSSAAWSPCWFTVLGSY

SEQ ID NO: 27303 - protein, 13 aa, Homo sapiens
MLSISSMIPLVIF

SEQ ID NO: 27304 - protein, 55 aa, Homo sapiens
LARPVLGLLLLLTTTTTTGAASAVPGVSSCSGHTAPGDCSSSNQNLGLTGTLAPK

SEQ ID NO: 27305 - protein, 81 aa, Homo sapiens
LGPPPPPPPPPLLQPLSRSPPPPPGPAGAGRAQPGKLATLFKGLGESQHTSQLELVPAAPRRTGGLVPMPPLESYSPPTLP

SEQ ID NO: 27306 - protein, 14 aa, Homo sapiens
MEMVCMLLWKISLS

SEQ ID NO: 27307 - protein, 42 aa, Homo sapiens [sequence omitted]

SEQ ID NO: 27308 - protein, 108 aa, Homo sapiens
LVINTSLRSMRPSSALCSVIKGCWVEIPFLKGGLGERYGAKSSRLLAHITLSLASDSQLCTCVAPLVSAMLTVEKAAVCLQVCLVWGHRYHQNGCSDNMPRDFLMAFI

SEQ ID NO: 27309 - protein, 9 aa, Homo sapiens
VPLPGPGRD

SEQ ID NO: 27310 - protein, 141 aa, Homo sapiens
LLPSMTPSLTSTTWSTCSCMILHMANSMAPSRLRTGRLSSMETPSPIFQDQDPSKIKWGDAGAEYVVEFTGVFTTMEKAGAHLQGGAKRVNISVLSVDAPMFVMGVNHEKYDNSLKIVSNASCITNCLAPQPRSSMTTLVS

SEQ ID NO: 27311 - protein, 52 aa, Homo sapiens
LPMPQRPAAGGAGAGAWGGGGGPERSPRPPRGARPAAVPAARAPGMQPRLRR

SEQ ID NO: 27312 - protein, 105 aa, Homo sapiens
LPRGPTAPRRGPQRSICRGTDAAACGRRVGLPPRPGAAAEPRSGPGAARPGRTPAAGPGPAAGTPGVRASPAGSRHADQDPDPDRGRDSGARACTWHPRPLWTYR

SEQ ID NO: 27313 - protein, 218 aa, Homo sapiens
LSLAAAGAAGLAFTALCPLLAEAQPLWPCDLQVLRDPQLRRQVPRKPRNGRPEVWSVSSQGSKWIPGAERKLLVYSYFEKETLTFRDVAIEFSLEEWECLNPAQQNLYMNVMLENYKNLVFLGIAVSKQDPITSLEQEKEPWNMKICEMVDESPGQVWCLTPVIPALWEARAGGLLEPRSLRPAWSTWKIPVSTKKKKKSQLGMGMVVHACNPSYSRG

SEQ ID NO: 27314 - protein, 51 aa, Homo sapiens
LSLDPLQKALLPSKRKNISYLQTVLREQSSFSRVGEDDSLATRADCDKIFH

SEQ ID NO: 27315 - protein, 96 aa, Homo sapiens
LEQSQWNVTIAQVGIFVCFVHCCTPSPQHSACPGQVPSKHLGSNASVLPAAPANRPPTQALPSASTATTAAHLCWHRSLFPGLPEIPSPHSARGSY

SEQ ID NO: 27316 - protein, 74 aa, Homo sapiens
LGCLGGGHLGIVGTGSTPRRKKGPSTGPALGHVPRKQVCPESAEGSPHTTQQALVLLLPHGTSPASSRSGSRVV

SEQ ID NO: 27317 - protein, 99 aa, Homo sapiens
LSRPFLCFRLFLLTASFRQYLFSFLVPSVPGAGKGRIVCRDWSKYPVGGKPGLPRLAGSDVTIAATARWNGRWVQVPAWPGPGCGTNASVPHSPTELGS

SEQ ID NO: 27318 - protein, 8 aa, Homo sapiens
MIICTFKC

SEQ ID NO: 27319 - protein, 70 aa, Homo sapiens
LTNLCFLQTDENFILKHDRAFLLSMANRGKHTNGSQFFIKSVTPCAPKYHKACSTPGWGACSLWTGYFWF

SEQ ID NO: 27320 - protein, 58 aa, Homo sapiens
LQTVPIPPRVARRDLEFAMLRAVSTWRFRLDPSCSGARLGGPRSLSFLASLGCGTKTI

SEQ ID NO: 27321 - protein, 30 aa, Homo sapiens
LIMFTLQKFRLQKKMYRYFSQQLVSYSYRM

SEQ ID NO: 27322 - protein, 41 aa, Homo sapiens
LVLAGAASLSIPGQRQGRQRFICKEAPSSTSSLLLLPKLTQ

SEQ ID NO: 27323 - protein, 99 aa, Homo sapiens
MRPTMEFHSVLCGVTPTLLVMWLSPQMASLPSQAPGMEPCASGISQRKGTTTRRFVGHTKDVLSVAFSSDNRQIVSGSRDKTIKLWNTLGVCKYTVQVK

SEQ ID NO: 27324 - protein, 13 aa, Homo sapiens
MGILINYLMSLFS

SEQ ID NO: 27325 - protein, 80 aa, Homo sapiens
MMQHGLCGYIGKFEIIDDHRAGKIVVNLTGGLNKCGVISLRFDVQLKDLEKWQNNLLPSCQFGFIALTTSAGIMDHKEAR

SEQ ID NO: 27326 - protein, 110 aa, Homo sapiens
LPPLGPERGEPATAALLRRPPPSPPGAAGLQLALEGGQARGRGAEPRRGAGRGALMDLAACASACVLPAAAAAPGPCRVRTNPERFRGDRLERPPRGLASPPSSQRLGTR

SEQ ID NO: 27327 - protein, 15 aa, Homo sapiens
LLSFLGFGLQWTSIA

SEQ ID NO: 27328 - protein, 232 aa, Homo sapiens
LLLLLSACLAVSAGPVPTPPDNIQVQENFNISRIYGKWYNLAIGSTCPWLKKIMDRMTVSTLVLGEGATEAEISMTSTRWRKGVCEETSGAYEKTDTDGKFLYHKSKWNITMESYVVHTNYDEYAIFLTKKFSRHHGPTITAKLYGRAPQLRETLLQDFRVVAQGVGIPEDSIFTMADRVNGLEQATQAGPFMKWTKARQVPSTMLTKDTNPGLGWPLGLVLLFTPLSCSVT

SEQ ID NO: 27329 - protein, 18 aa, Homo sapiens
VNILAHIFLCLLFLQIQR

SEQ ID NO: 27330 - protein, 67 aa, Homo sapiens
MLPNGFRKFLVHDINELEVLMMCNKSYCAKIAHNVSSKNCKAIVERAAQLAIRVNNLNAILRSKENE

SEQ ID NO: 27331 - protein, 54 aa, Homo sapiens
MVSGRAVALLHLIASGLTSIQTNTASSKPPIWGYHFYSNFLHIPTPLMSQPNLP

SEQ ID NO: 27332 - protein, 52 aa, Homo sapiens
MKSKSVQFLLLCKFPLLRFDLLFWTMKVCKSLFFCDPTYYLAEWTIKSTVLV

SEQ ID NO: 27333 - protein, 29 aa, Homo sapiens
LERPVPRDTGTHLQRAYRSGEQNKANLER

SEQ ID NO: 27334 - protein, 66 aa, Homo sapiens
LERKDLVIRVPAFTELFQGLCVRLDGKHVVFGKVKEGMNIVEAMGHFGSGNGKTSKEITIADCGQL

SEQ ID NO: 27335 - protein, 17 aa, Homo sapiens
LGVPVARADGARLGRIL

SEQ ID NO: 27336 - protein, 21 aa, Homo sapiens
LPIFLLFTIVNSLKTFSRLLQ

SEQ ID NO: 27337 - protein, 114 aa, Homo sapiens
VGARGPRRAGGQPRGDRARDSAESGGRSPRARRVSAASPTPVAWPQDPPPSRLGRPVPGRARAPRASAFLVRLLCWIAAPAGHQEYKAKTPAGPSVLHGLQGDTDNRTTLPCAK

SEQ ID NO: 27338 - protein, 43 aa, Homo sapiens
LLPASKAWSRYSTTNSTDLETLHLSYYCRRWLTFSLPYALSFW

SEQ ID NO: 27339 - protein, 36 aa, Homo sapiens
LHRTVPPAVPGITFLSGGQNEEEASINLNAINKCSL

SEQ ID NO: 27340 - protein, 137 aa, Homo sapiens
LRRRRSGSPGWRAPRTGMLLGLAAMELKVWVDGIQRVVCGVSEQTTCQEVVIALAQAIDWPLCACAAASGEGAAVAATRVSSGRPGHLRTVCQRCPVCPEAHRAQPSWEALLRQLSTPGTLPNSCQPPCKATGCAGL

SEQ ID NO: 27341 - protein, 18 aa, Homo sapiens
LTVLSGYLLCLHFMVNGI

SEQ ID NO: 27342 - protein, 116 aa, Homo sapiens
LVFCSLVLGVSSRSFFSFLGEAFDGARDMWRAYSDMREANYIGSDKYFHARGNYDAAKRGPGGAWAAEVITDARENIQRFFGHGAEDSLADQAANEWGRSGKDPNHFRPAGLPEKY

SEQ ID NO: 27343 - protein, 228 aa, Homo sapiens
MHQSVESDIHKLRRVIDDTNVTRLQLETEIEALKEELLFMKKNHEEEVKGLQAQTASSGLTVEPDAPRSQDLTKIMADILAQYDKLAQKNLEELDKYSSQQIEESTTVVTTQSTEVGAAEMTLMELRCTVQSLEIDLDSMRNLKASLENSLREVEAHYALQMEQLNRILLHLESELAQTWAEGQRQAKEYEALLNIKVKLEVEVTTTTTCWKTARTSILVMPWTSATP

SEQ ID NO: 27344 - protein, 18 aa, Homo sapiens
LGPDAHVEEQLPAAQTER

SEQ ID NO: 27345 - protein, 32 aa, Homo sapiens
LGFWFFLIIYKIIHYEVAVVCKGEALKFERLF

SEQ ID NO: 27346 - protein, 17 aa, Homo sapiens
MPYLSFSFFSLRILFLI

SEQ ID NO: 27347 - protein, 69 aa, Homo sapiens
LGFEHLGETRKAVLVGDPKCGCFAHQGGESAPDRAPRMHGQGPVLGLWGTDSPGGAARAFPSPEPHLEC

SEQ ID NO: 27348 - protein, 11 aa, Homo sapiens
MCYLQLLFSAM

SEQ ID NO: 27349 - protein, 97 aa, Homo sapiens [sequence omitted]

SEQ ID NO: 27350 - protein, 12 aa, Homo sapiens
MFLLALILSWQR

SEQ ID NO: 27351 - protein, 91 aa, Homo sapiens
VSYSCLVASKECATSLTLLPRLECSGAISAYFSLRLPVSSEFSSLNFTSSWDYSHFLSSLLQSNPHNFHEESGVVSFYNKKTELRISPINC

SEQ ID NO: 27352 - protein, 69 aa, Homo sapiens
LWLMGRPASLARGMSVWMAAAGLSAVITSWTRPSRRTSVCGVGVTARPATPSQAPLTLMTSAEATTRSS

SEQ ID NO: 27353 - protein, 55 aa, Homo sapiens
LFFSPQMLIGLAGYLSGYDVLCIPWLLAGPLCLPHCTGSVQVPLGSTAHSCPPHL

SEQ ID NO: 27354 - protein, 50 aa, Homo sapiens
LKCDEPILSNRSGDHRGKFKVASPRKKYALGVPVAGTCYQAEWDDYVPKL

SEQ ID NO: 27355 - protein, 36 aa, Homo sapiens
LGLGLASLLLSLQTAYHETSSCDRTHSKNLLCFKIV

SEQ ID NO: 27356 - protein, 303 aa, Homo sapiens
VTRKSYKVSTSGPQAFNSLSYTSGPGACISSSSFSRMGSSSFRGGLGAGYGGASGGITTITVNQSLLSPLNLEVDPNIQAVRTQEEKQIKTLNNKFFSFIDKVRFLEQQNKMLETKWSLVQQQKMARSNMDNMFESYINNLKWQLETLGQEKLKLEAELGNMHGLVEDFRNKYEVEISKCTEMENEFVLIKEYVDEAYMNKMELESSLKELTAKISFLRQLYEEEIGSCSPRSRIHLWCCSWTTAASWTWTASSLRSRCSTRRLPTAARLRLRACTRSSIRSCRRWVRSMGMTCGVQRLRSPR

SEQ ID NO: 27357 - protein, 71 aa, Homo sapiens
MCQGGDFTCHNGTGGKSIYGEKFDDENFILKHTGPGILSMANAGSNINGSQFFICTAKTEWWMASMWSLAR

SEQ ID NO: 27358 - protein, 143 aa, Homo sapiens
LASQGPLLGLLSSLYSVSCQRVCHALVSCAYMMQLDVVLGLQWEPPKMHCNCSICLPGKKCTVTRSSGQALGQALGPSLQVHWVLAWHVWAPPRWRGGGRVAPWPRSQPPSSLYSHSLDTQHRRLGCLCRCYPEPLSYCLVFL

SEQ ID NO: 27359 - protein, 11 aa, Homo sapiens
LIFFQIPLLGI

SEQ ID NO: 27360 - protein, 34 aa, Homo sapiens
LPPLMPDLGSPQRDPRDHKMCMVEEELVQLTLCW

SEQ ID NO: 27361 - protein, 57 aa, Homo sapiens
LLCFRPTAFCPLFLTSFLNCSCGLFLRDTLACRSQFTCSPLLTIGESAHCSLETWRW

SEQ ID NO: 27362 - protein, 38 aa, Homo sapiens
LWILLVPAFRFFKTLTGLHRGFFSITVSSPCQMWQDHH

SEQ ID NO: 27363 - protein, 76 aa, Homo sapiens
LLPPNPCPLETCCEGPSQRSPAPVRFPSWFSAFGIIFLCPYCPRSLFNKPKTLVPRPDPWADVQTNLTPEATGWCL

SEQ ID NO: 27364 - protein, 40 aa, Homo sapiens
MIAFLFVRFVYIFRIRKKSHKPMMVSYPCLKIWTEGNNLF

SEQ ID NO: 27365 - protein, 62 aa, Homo sapiens
LCLLFCLLLMARMGSCFVVQAGLVLLESRNPSTSASESSGITGIIHPAWPRIFNALLRQLFL

SEQ ID NO: 27366 - protein, 173 aa, Homo sapiens
LRAQIFANTVDNACIVLQIDNARLAVDDFRVKYETELAMHQSVKSDIHGLRKVINDTNVTWLQLETEIEALKEELLFMKKNHEEEVKGLQAQTARSGLTVEVDAPKSQDFAKIMADIWAQYDKLGRTERSWTSTGLSRLRRAPQWSQRRLPRLELLRRHDTHGAETYSPVLGD

SEQ ID NO: 27367 - protein, 79 aa, Homo sapiens
VTSAPPWSSALGLGLPAGLLGGPGASERAAGGSRSGLSLGAQRLRSEIPGSIPYFLAFLEDGHGPLSLFRGPESLNREF

SEQ ID NO: 27368 - protein, 74 aa, Homo sapiens
LKTLTGKTTTLEAEPSDMVENVKAKIQGKERIPPDQQRQALEDGRTLSDYNIQKESPLHLVLRIRGGAKERKKS

SEQ ID NO: 27369 - protein, 188 aa, Homo sapiens [sequence omitted]

SEQ ID NO: 27370 - protein, 207 aa, Homo sapiens
VGGRFPRLPVTLCRRSPAPGMGAAAVGPRAGFRERVGERGGPRPLGPRAPAGGGWWPRLHPRPSACSRWNRSTTAPPPTRGTKGGGGGGAPPRVTFPRTAHAPSPHHRGTVRPPTRVRGRGVGAPKVEEAARTGWTSSYPGKLGQFPPAPASSLGLAVARDERGSFPFRLGVPGQATPWGTQQFRASASFSFDTQEPTSPAHFSPRT

SEQ ID NO: 27371 - protein, 41 aa, Homo sapiens
MAMVTWVAALLPGNCHCLLFCPFAPFVELFCQTPLRQITRY

SEQ ID NO: 27372 - protein, 22 aa, Homo sapiens
LERTLPVFQATFMSLLLRFSVL

SEQ ID NO: 27373 - protein, 13 aa, Homo sapiens
MKLKNHLLLCLWI

SEQ ID NO: 27374 - protein, 16 aa, Homo sapiens
LFPVRLYIVLLSPCGL

SEQ ID NO: 27375 - protein, 61 aa, Homo sapiens
MIPQMARVTGVSGLSAASPAGTATRNGPGLVATRALQQNRGPVTVQTAQELKTLLGQLPPK

SEQ ID NO: 27376 - protein, 91 aa, Homo sapiens [sequence omitted]

SEQ ID NO: 27377 - protein, 38 aa, Homo sapiens
VAWAALRLLLYGCTLALPDGMLYPRESPSWQRKQLDGL

SEQ ID NO: 27378 - protein, 64 aa, Homo sapiens
MFTPIFLTFFLRWSLALLPRLECNGTFSAHCNLRLLGSSNSAASASRVPGITGMCHHARLILYF

SEQ ID NO: 27379 - protein, 19 aa, Homo sapiens
MVPTSWKGEFSTLLLSSGE

SEQ ID NO: 27380 - protein, 116 aa, Homo sapiens
LMLCALQTVNGAEAGKESRGAHAGEDYKVQIDEYDHSKPIQGQQKKPFEVHWRKHTLSYVDVGTGKVSVELVLTTAQHPHGPAQVCGLALLMVNAEEQARFKSTPDRFEAPLKKAL

SEQ ID NO: 27381 - protein, 17 aa, Homo sapiens
LFSAMTTLTFVGAMCVH

SEQ ID NO: 27382 - protein, 94 aa, Homo sapiens
LLRKKNISFKILLLIDKAPGHPRALMEMCKEIDAVFLHACIYSAARGSKAIPFPGTYPKEMKSPLCKDICTPMFIAALFTVAKDLGVKIYWNIF

SEQ ID NO: 27383 - protein, 22 aa, Homo sapiens
MDGLFKMMSLEELQTLARKNQS

SEQ ID NO: 27384 - protein, 142 aa, Homo sapiens
LALAPAFVKKQEAKKVVNPLFEKRPKNFGIGQDIQPKRDLTCFVKWPRYIRLQWQRSILYKQLKVPPAINQFTQALEGQTATQLLKLAHKYRPETKQEKKRRLLAQAELWAKGTSPLRDHLSFEQELTPSPPLWITRKLRWW

SEQ ID NO: 27385 - protein, 17 aa, Homo sapiens
LVPISSSKLLIQQQFMN

SEQ ID NO: 27386 - protein, 286 aa, Homo sapiens
MPGARSGGSGGDGSNSGSYSGDASGAVTVWEVVSLLGKLLGTVVALKVVLYLLRVCLAMAWKSGGASHSELIHNLRKNGIIKTDKVFEVMLATDRSHYAKCNPYMDSPQSIGFQATISAPHMHAYALELLFDQLHEGAKALDVGSGSGILTACFARMVGCTGKVIGIDHIKELVDDSVNNVRKDDPTLLSSGRVQLVVGDGRMGYAEEAPYDAIHVGAAAPVVPQALIDQLKPGGRLILPVGPAGGNQMLEQYDKLQDGSIKMKPLMGVIYVPLTDKEKQWSRDEL

SEQ ID NO: 27387 - protein, 44 aa, Homo sapiens
LPHFFLPGILHPSLLLLSCTGEQTCILDENKPTLETATQDIQKR

SEQ ID NO: 27388 - protein, 175 aa, Homo sapiens [sequence omitted]

SEQ ID NO: 27389 - protein, 188 aa, Homo sapiens
MQGHTRWIGVVEPKRAVSREDSQRPGAHLTVKKIFVGGIKEDTEEHHLRDYFEQRGKTEVIEITTDRGSGKKRGLAFVTFDGHDSVDKTVIQKHHTVNGHNCEVRKALSKQEMANTSSSERGRSGSGNFGGGREGDFGRNDNFGHGGNFSGCGAFGGNHGGGGYGGSRDGYNGFGTDGSNFGGWWKLQ

SEQ ID NO: 27390 - protein, 96 aa, Homo sapiens
LGFRARSLGKSWLTALAVGVGVGAGAGALCVFAWGALGLAQSSACSPCLVPPGRQQTQALHGPLCHFVDMHSSFCHLVGGRGLTKGHPDFVFVDTQ

SEQ ID NO: 27391 - protein, 91 aa, Homo sapiens
MFRWVRSFFLLVGSWLTSGVKLHPFVLDTKVLQVPTHPRSPAGFTFHWHWLDFAAPILDTPATQKELVPDNQEEKGKPERDRDPPSLPTTR

SEQ ID NO: 27392 - protein, 181 aa, Homo sapiens
MKVSPAASPTAAHSLRGQRSGDLSAPGAPSVSGSGCPRPRGRRDPSWRVAMSPRTFVGRDSAHSIEIPRAPGSAQKLFEVTAASLWGETSFFFFFFFLRRSLTCCPGWSATARSRLTATPPAGFKRFSCLSLPSSWDYRRPPPRPANFCIFSGDEVSPCWPGWSRTLDLVIRPPRPPKVLG

SEQ ID NO: 27393 - protein, 185 aa, Homo sapiens
LLSLSRSPTSSRPLQVAAGCSHRHTGNPLMASVLCMIMSASRKQKPGGTGVRSRERKPCPSDPGRVPQAPPLATRPLHHPGPAPACPPGAVCSLTAEEEEGARGLAPQRLALVAPNPQSHHHAHHADTHRQHHARHSHRQRGWGERAHQPPRAPPQSLRVRPQPEALPSPAPNPAPQKLSRSPAV

SEQ ID NO: 27394 - protein, 13 aa, Homo sapiens
MTMKRILSILACI

SEQ ID NO: 27395 - protein, 98 aa, Homo sapiens
LTLCASWVRRCLALLRLMHGALHPLSCTHCPSLPSEMNPVRQLEMQKSPVFCVAHAGSCRLELFLFSHLGSTPSCSKYLNYLWQQLGGVNSNVFVGCS

SEQ ID NO: 27396 - protein, 269 aa, Homo sapiens
LPARLLRGVLAVWVSLSALGPGSFCRRRVPSLAQLGHSEAAPSPDDVRWSRVPDRCPEERDRAWPPPPPPSLPPSFRRNMANNSPALTGNSQPQHQAAAAAAQQQQQCGGGGATKPAVSGKQGNVLPLWGNEKTMNLNPMILTNILSSPYFKVQLYELKTYHEVVDEIYFKVTHVEPWEKGSRKTAGQTGMCGGVRGVGTGGIVSTAFCLLYKLFTLKLTRKQVMGLITHTDSPYIRALGFMYIRYTQPPTDLWDWFESFLDDEEFFTL

SEQ ID NO: 27397 - protein, 47 aa, Homo sapiens
LPPRLMHKAKELPRSLRYRVTLSSGEKGESERRVLCILPPCLSPSCL

SEQ ID NO: 27398 - protein, 51 aa, Homo sapiens
LQIFSSVLQTSLLFLLMEFLVESGSQTHLFWSRISKVLSRASEALESGNPS

SEQ ID NO: 27399 - protein, 65 aa, Homo sapiens
LYSDLPGSSHTPSGLWSCWPSKPGKHVLPECCAAVSEQHSTSSGLLSEKGLPARGAWRRPSPRAH

SEQ ID NO: 27400 - protein, 263 aa, Homo sapiens [sequence omitted]

SEQ ID NO: 27401 - protein, 316 aa, Homo sapiens
MGRWLCFSESYQASEKDKFTEGRDRQRKMLAKRKPPAMGQDPPATSEQKQWKSRTNGAENKTLTLAEYHEQEEIFKLRLGHLKKEEAEIQAELERLERVRNLRIGELKRIHNEDNSQFKDHPMLNDRYLLLHLLDRGGFSKVYKAFELIEQRYVAVKIHQLNKNWRDEKKENYHKHACREYWIHKELDHPRIIKLYDYFSLDTDSFCTVLEYCEGNDLNFYLKRHKLMSEKEAWSIIMQTVNALKYLNKIKPPIIHYDLKPGNILLVNGTVCGERKITELGLSKIMDDDSYNSVGGMELTSQGAGTYCNLTPEFCG

SEQ ID NO: 27402 - protein, 13 aa, Homo sapiens
MAVLFIWSILLVM

SEQ ID NO: 27403 - protein, 88 aa, Homo sapiens
MKFNPFVNLDRSKNRKRHFHAPLHVHRKIMSSPLSKELRQKYNVRSTPIRKDDEVQVVQGHYKGQQIGKVVQVYRKKDVIYTEQVQRE

SEQ ID NO: 27404 - protein, 95 aa, Homo sapiens
LVLMAAATAAAALAAADPPPAMPQAAGAGGPTTRRDFYWLRSFLAGEEEEFTSNRTWQSDKYLQVSVSVKMFQKKRRLLQTEPGSWINTLKCLSP

SEQ ID NO: 27405 - protein, 20 aa, Homo sapiens
LIKVAGFVLLLMKMIEQLNG

SEQ ID NO: 27406 - protein, 12 aa, Homo sapiens
MEMLPIMWRLSS

SEQ ID NO: 27407 - protein, 106 aa, Homo sapiens
MIFTFTFPFSLLFCLTCTVATEMHFRNRRFRPAPSAALVPVALDFPGPFPVGGPCRPHQGGVGVTWQKGPRSGDVVPRIWNLSHPSCSWTEFFPFIRRNPLAVSSR

SEQ ID NO: 27408 - protein, 10 aa, Homo sapiens
MFWSTTFFLL

SEQ ID NO: 27409 - protein, 51 aa, Homo sapiens
LMGGFFLLFLTFYLGVGVPFSGCLRNCPDLPWFGQMTPPLGLASQRSCLHY

SEQ ID NO: 27410 - protein, 41 aa, Homo sapiens [sequence omitted]

SEQ ID NO: 27411 - protein, 80 aa, Homo sapiens
LCVWPFLLLLFPGSTVWLFVSLPAKVLPSPTTPRSSPLANSCLQTWCCRQWSHQEEGNGRFTGVNPLAFPRRSSGQTPSF

SEQ ID NO: 27412 - protein, 72 aa, Homo sapiens [sequence omitted]

SEQ ID NO: 27413 - protein, 151 aa, Homo sapiens
VCRIFYDMRVRKCSTPEEIKKRTKAVIFLSQCRQKVHHVEGKEILVGDVGVTISEPFKHFVGMLPEKDCCYALYDASFETKESRRIDVFLWASELAPLKSKMIYTSSKDAIKKKFQGIKHEWQTNGPEDLNRACTAEKLGGSFFFFFEMES

SEQ ID NO: 27414 - protein, 117 aa, Homo sapiens
VCEDARPACGSRSRRRRKEAAPGIPTPSPSSPSPTSSRPAARASSKAPARLSRPRAREEPPDPGAGVCLSGRGAVCDSENRAKKGNSKFSHRQSSTRSRATFLFLPCPPAGGKELSV

SEQ ID NO: 27415 - protein, 61 aa, Homo sapiens
LFTFLGRSLLLVLSALKNRNSSVQVRGRKERPCEDLYLSHCTSLSLPCSLHELFCSSNSIL

SEQ ID NO: 27416 - protein, 28 aa, Homo sapiens
MLILILFTGLIELQAMRRRLKPTFLRVC

SEQ ID NO: 27417 - protein, 27 aa, Homo sapiens
LLHILVLFTSVNQMKLQMLGCLIQEQD

SEQ ID NO: 27418 - protein, 38 aa, Homo sapiens
LLIYEQEMKPTFGRKSPTLKGNHLHHVINFPAGYIKTD

SEQ ID NO: 27419 - protein, 101 aa, Homo sapiens
LVPSSRSVSEGTAALGCLVKDYFPEPVTVSWNSGALTRSVHTFPAVLQSSGLYSLSSVVTVPSSSLGTQTYTCNVDHKPSNTKVDKTVDPEASARPTHAHN

SEQ ID NO: 27420 - protein, 80 aa, Homo sapiens
MESWLSWVFLAAILKGVQCEVQLVESGGGLVQPGGSLRLSCAASGFTFSDYYMSWVRQAPGKGLEWVGFIRNKANGGTTE

SEQ ID NO: 27421 - protein, 99 aa, Homo sapiens
VVSVLAKGNKEMKLFDGSYFGEICLLTRGHRMASVRANTYCRLLSLSVDNFNEVLEEYPMMRRAFETVAIDRLDRIGKKNSILLHKVQHDLNSGVFNNQ

SEQ ID NO: 27422 - protein, 39 aa, Homo sapiens
VMLSLSAMSHPPSDSRVSRAGLQGRRCPCTQEVRTDHLP

SEQ ID NO: 27423 - protein, 16 aa, Homo sapiens
LGLQVVTSKSDSVGGK

SEQ ID NO: 27424 - protein, 53 aa, Homo sapiens
VSGSALGLSRRMGLNRELLQDGPLTAPAPNLGRVCSWPLTSSSCGRRSRSASR

SEQ ID NO: 27425 - protein, 262 aa, Homo sapiens
LKKLFIGGLSFETTNESLRSHSEQWGTLADCVVMRDPNTKHSRGFGFATYATEEEVDAATNARPHKVDGRVVEPKRAVSREDSQRPDAHLTMEKIFVGGINEDTEEYHLSDYFEQYGKTEVIEIMTDQGSGKKRGFAFVTFDDHDSVDKTVIQKYHTVNGHNCEIRKGLSKQEMVSASSSQRGQSTSGNFGGGRGGGFGRNDNFGCEGNFSGHGGFGGSCGGGGYRAVGMAIMDLVMMEAILEVEATMILAITTISLQFLDP

SEQ ID NO: 27426 - protein, 184 aa, Homo sapiens
LRGRREGVTRRPGPPRGRRGMGQKKTMGTERSRGGKRGPQPGAERPEEPGATFSKKPPEGARAPRCLSRPTAPKSGACLARRRPPGSPCSIRDAPFHTGDDRFLARENFPNVLQPLPRMFAVQQAADFESQCPRRWDSRKRPSEGLPSAGWGRWRGRPIHLGLWVSGSVRRKVSGSHVSRSLHL

SEQ ID NO: 27427 - protein, 40 aa, Homo sapiens
LYTTLPTRLGSPSEGSQHLPPVPDLACSLLQHLPGAAHLH

SEQ ID NO: 27428 - protein, 21 aa, Homo sapiens
MFGFLSLLFMSCICILSATEE

SEQ ID NO: 27429 - protein, 273 aa, Homo sapiens
VGLGSWAVWAGLGWAGRHMEAGGATGALGVGCKLPGAFCFPGSSVAMDMFQKVEKIGEGTYGVVYKAKNRETGQLVALKKIRLDLEMEGVPSTAIREISLLKELKHPNIVRLLDVVHNERKLYLVFEFLSQDLKKYMDSTPGSELPLHLIKSYLFQLLQGVSFCHSHRVIHRDLKPQNLLINELGAIKLADFGLARAFGVPLRTYTHEVVTLWYRAPEILLGSKFYTTAVDIWSIGCIFAEMVERGAHMATGCHRQGPTGVGWGPLMLPFEAD

SEQ ID NO: 27430 - protein, 106 aa, Homo sapiens
LGGAAKLSAHVAWPPGDGRGLNSVGAGLEGARETAAAPASLSAALQPPAPPRSSLALRRPHRRPRPHQSSHGGGGDCRHVREAARVGELAGVLGQPHRRCGHGHGR

SEQ ID NO: 27431 - protein, 358 aa, Homo sapiens
LAGLLFQLLVAVCFFSYLRVSRDDATGSPRPGLMAVEPVTGAPNGSRCQDSMATPAHPTLLILLWTWPFNTPVALPRCSEMVPGAADCNITADSSVYPQADAVIVHHWDIMYNPSANLPPPTRPQGQRWIWFSMESPSNCRHLEALDGYFNLTMSYRSDSDIFTPYGWLEPWSGQPAHPPLNLSAKTELVAWAVSNWKPDSARVRYYQSLQAHLKVDVYGRSHKPLPKGTMMETLSRYKFYLAFENSLHPDYITEKLWRNALEAWAVPVVLGPSRSNYERFLPPDAFIHVDDFQSPKDLARYLQELDKDHARYLSYFHWRETLRPRSFSWALAFCKACWKLQQESRYQTVRSIAAWFT

SEQ ID NO: 27432 - protein, 32 aa, Homo sapiens
MRWWMNPQVYVLIFLKTFGQSRAWKILFKKYY

SEQ ID NO: 27433 - protein, 33 aa, Homo sapiens
VVGIEVPAADEGGAAVAQDGLGMKRCSLLRDLL

SEQ ID NO: 27434 - protein, 66 aa, Homo sapiens
LKPHVGQSLLRPLPLTCRKWEMGTNLRGPGFGEPPKTGTNQTCLSFADGPYPYTLKLCFSTAQHAS

SEQ ID NO: 27435 - protein, 67 aa, Homo sapiens
LRRPERRRWRRRPRRILLIAVLQAATTNRLELACEETGEAWLDQDLPPCEQASSSPNNRCHHAQKRP

SEQ ID NO: 27436 - protein, 57 aa, Homo sapiens
VKASVPGEEAAPCIGLRPPRELRRQDEWRGEPSQQAHAGAGRTGRRALDVPAPSVRG

SEQ ID NO: 27437 - protein, 58 aa, Homo sapiens
LLQQNILLCAVSGFLWCSWEVSCPTVHSTGNLFRQQSPDMCSRVEDAEGIGIRQPRVP

SEQ ID NO: 27438 - protein, 28 aa, Homo sapiens
MEGKLRMIIFPGCSLTWTVIFVIYEKDF

SEQ ID NO: 27439 - protein, 67 aa, Homo sapiens
LGLTPARLLAPSPEKGFRRSIHTNGNVTGTDSDDKIKDHQARSCSRQLCFQKKLPTFRISTYSELFI

SEQ ID NO: 27440 - protein, 159 aa, Homo sapiens
VKSRYEQIDVFGKMTQKAAASVEHLAIRCHWSQRPAVTGDVLQVYSGSEGTAIIFCETQRSVTEIAMNPHIKQNAQCLHGDIAQSQREFTLKDFREGSFKVLVATNVAACGLDIPEVDLVIHGSPPQDVESISIVLDAQVELDRQGFVYVFINQEKEVN

SEQ ID NO: 27441 - protein, 67 aa, Homo sapiens
LAPFVKGRGRRREKRLSRSPLREVGILFAEHWAEALPLAGGEGGGRMSALLHHTAQTSEDFGLSSYH

SEQ ID NO: 27442 - protein, 74 aa, Homo sapiens
MRLPAQLLGLLMLWVPGSSAEIVMTQTPLSLSITPGEQASMSCRSSQSLLHSDGYTYLYWFLQKARPVSTAPDL

SEQ ID NO: 27443 - protein, 105 aa, Homo sapiens
LGALRMHLTPQLCPDPGHSSWRGPPLQTGEQRLPEAEGGARGPAAGMEAELRLDIRPCHPCPLTAGLCTGHHHLQPGGGGPAGRVHSPQVQRHPEAARHPGPPGP

SEQ ID NO: 27444 - protein, 89 aa, Homo sapiens
LSDMSGPVPSRARVYTDVNTHRPREYWDYESHVVEWGNQDDYQLVRKLGRGKYSEVFEAINITNNEKVVVKILKVSTRDNFRGIWNIDF

SEQ ID NO: 27445 - protein, 88 aa, Homo sapiens
LSPCAEATGEQDGQAHTVPCKVTGRCGSVLVHLIPAPRGTGIVSAPVPKKLLMMAGIDDCHTSARGCTATLATSPRPPLTPSLRPTAT

SEQ ID NO: 27446 - protein, 64 aa, Homo sapiens
LSVVNAGPNTNGSQFVICTAKTEWLDGKHVVFGKVKEERRHEDRGGHGALWVQEWQDQQEDHHC

SEQ ID NO: 27447 - protein, 24 aa, Homo sapiens
LVVGVLPRGAEGHYCSSQPLPGPH

SEQ ID NO: 27448 - protein, 79 aa, Homo sapiens
LPPPPRDLLALGPLRGVTYAEEFHGAGARTGCGGLYGRQSPAERLARVSVMLESGLPATSPGLGHQPSPPGDLLGPAEK

SEQ ID NO: 27449 - protein, 293 aa, Homo sapiens [sequence omitted]

SEQ ID NO: 27450 - protein, 60 aa, Homo sapiens
VRTRFLPMNLLCIAPMFYSALMTSGRKMCCAMSPSLWRDSGSALTGPCWRHAAVTSTQES

SEQ ID NO: 27451 - protein, 75 aa, Homo sapiens
MLSSLSGSSWSASREIGSTNRALLPWLLEQRHKHNKACCPLEGVRPSPQQVRLDFGGHKPLSWVLKNFAFAHPSC

SEQ ID NO: 27452 - protein, 8 aa, Homo sapiens
LAPGLASR

SEQ ID NO: 27453 - protein, 75 aa, Homo sapiens
LYQGDACLMFFFLLFLGGLLACCCAAEQYAVLSGAKQLPRKPAKLPTGGTRLIPARRVQPSSGPDVPEFWRYRWQ

SEQ ID NO: 27454 - protein, 73 aa, Homo sapiens
VDEETFSIFAPTPGAMHEARDFIAEIRKDDQEQQLEFGAVCTATITESRDTGVMVKLYPNMILVLLYNTQLDQ

SEQ ID NO: 27455 - protein, 156 aa, Homo sapiens
LLPSLRWEASLRCWFMCRIFKESPRSMVETTCRPEFTPSSCRLGLWAGWWITRMGFTRFSLLCYGQAKLKYPYLWSTPVKGSEFFSAYRKINQTGSISRVSSVQEEFLKLLSATCVFLGICPCVTLQTSTLGSPGSASNQRSSLAAAELPISKVDT

SEQ ID NO: 27456 - protein, 30 aa, Homo sapiens
VKGIHLCLSTMALMIHCWGEETRKVTGCHL

SEQ ID NO: 27457 - protein, 80 aa, Homo sapiens
VPPLLLLLFWLSLSDMRARSKAPSHSAYRACTLPGVTQVAKVACGVATVSEAVAETDAEAGRRSPSRKGSRDEGRVDVER

SEQ ID NO: 27458 - protein, 84 aa, Homo sapiens [sequence omitted]

SEQ ID NO: 27459 - protein, 56 aa, Homo sapiens
LMCHDAAPIDSNKIVSNLSSNMIARDQVSQLVKFCIWDSCLFFRLCFSENLFLMIN

SEQ ID NO: 27460 - protein, 151 aa, Homo sapiens
LALRAWGARGGRGVGPAQRPGALGPEQRCPPPCVRGKDRAAPPPALSAAAASAWAGREGLGGLTDRVSLLLPRLEDNDVISGHHNLRLPDSSDSHASASRVAQITGMCHHARLILYFQSRRGFPMLVRLVLNSRPQVICSPRPPKVLGLQA

SEQ ID NO: 27461 - protein, 72 aa, Homo sapiens
LRSSATCWVALLPLAPGLLGSPLSPEFAGGRHFPPSTCGPGSCRPWLASSMPRPLWPTTSTLSTCCGPHPGS

SEQ ID NO: 27462 - protein, 9 aa, Homo sapiens
LLGFSVMMV

SEQ ID NO: 27463 - protein, 20 aa, Homo sapiens
MTMKDQLVARLNKPGASTPR

SEQ ID NO: 27464 - protein, 533 aa, Homo sapiens
LEDVSKAPAYTYPATPSSHPTSLPPHSLLSTPGITRKEETPDNVVEKKDLELDKEAPSTFQALFSDMPPRYPFQALPPHYGRPYPFLGQPTVAADADGLAPDVLLPADGTKRLTLSPEDKLILLSPSKIPEPLREDPEEEPLAEQEAKVEVEDVDERPAELPPLELPLPLPAMETMATPSPAGGCRGGPLEAQALSATGQGCTEPSECPDFAEGPEACVDSPGRTEPCTAALDLGVQLTPETLVEAKEEPVEVPVAVPAAEAAPEEGLAQAALSEPQPSLEMSDCDVPAGEGECPRLEPREAVPVPGSTCYLEEASSEQFLPGLEDPLAGMEVAMELPQARPLPSPGATGVQALEKQEAAESLVLEQSFLHGITLLSEIAELELERRSKKVGGAERALVARPSLESLLAAGSHMLREVLDGPVVGPAQEPAAPTGAEAHNKYSWMRKKEERMYPMKSSVEDMDVLELDFRMWRAEVQHQYKEKQHELVKLQRRRDSEDRHEESHGSLARRPWKQTHAPESPVARPQEGEELQQ

SEQ ID NO: 27465 - protein, 415 aa, Homo sapiens
LTDPSKLDSGKEPHISLIPNKQDRTLTIVDTGIGMTKADLINNLGTITKSETKVFMEVLQAGADISMIGQFSVGFYSAYSVAEKVTVITKHNNDEQYAWESSLRGSFTEYREFYKSLTINWEDYLAVKHFSVEGQLEFRAFLFVPRLAPFELLETRKKKNKIKLSARRDLIMDNCEELIPEYLNFIRGVVDSEDLPLNIFRETKDQVANSTIVQRLWKHGLEVIYTIEPIDEYCVQQLKEFEGKTLVSVTKEDLELPEDEEEKKKQEEGKQKTKQKKNQSLRTSAKSTYGWTANMERIMKAQALRDNSTTGYMAAKKHLEINPDHSFIDTLRQKAETDKNDKSVKDLVILLYETALLSSDFGLEGPQTHANRIYRMNKLGLGTDEDDPTADDTSAAVTEEMPPLEGDDDTSRMEK

SEQ ID NO: 27466 - protein, 69 aa, Homo sapiens
VRTGDTARRPRPRFLLPPPSPPPPPPLIGADAAAAPSFPRAVAAESVFSPPPPPPPQERRASGASVTEG

SEQ ID NO: 27467 - protein, 24 aa, Homo sapiens
MPLSLLLVTLLGPSIVLFLNQLSK

SEQ ID NO: 27468 - protein, 134 aa, Homo sapiens
LVKPEVWTLKQKCILVITWIQHLIPKIDDGNEFGVAIQEKVLERVNAVKIKVEAFQTTISKYFSERGDPVAKASEETHVMDYRALVLEPDEAAYGELRAMVLDLRAFYAELYHIISSNLEKIVNPKGEEKPSMY

SEQ ID NO: 27469 - protein, 125 aa, Homo sapiens
LPNPRLPWVRRTRLPSSRKLFLPTQLGRRWQEVRAATSPPPAPRALPEVGAELAIKFVGAPLPSCRRVSPREGRPTPGRAAGQGEGQGRVVAPETRCGARRGLAPASESAEVAQPGRREPPAAAS

SEQ ID NO: 27470 - protein, 22 aa, Homo sapiens
MGCQKLTFLCCHGLMMLLLDKV

SEQ ID NO: 27471 - protein, 119 aa, Homo sapiens
MRRKEKRLLQAVALVLAALVLLPNVGLWALYRERQPDGTPGGSGAAVAPAAGQLASPPQPGHCCSTETRIIPTAQEQRGLRCTASAFVEWAFSASSTPPATQCMPNNGWKNGHGLLPPD

SEQ ID NO: 27472 - protein, 82 aa, Homo sapiens
LLFPPCPSAIFWEKETKGSKTGVWGKVSASPHSPCPTPFTPQPRETLLLPGKTIERCFILFFSDLSILEKMGKKEEKRQNRP

SEQ ID NO: 27473 - protein, 102 aa, Homo sapiens
LPRRPSCVLRRLPLPEGLGRERLIARGPREADAVGRTTKREAPEGAGLPPDPGVGRGAHCSAGRELLKDPDRHPPPPPPPAQFGRPRSGTKESTCGRAAKGL

SEQ ID NO: 27474 - protein, 57 aa, Homo sapiens
MRVMAPRALLLLLSGGLALTETWACSHSMRYFDTAVSRPGRGVLGPGDTEVQAPGTG

SEQ ID NO: 27475 - protein, 195 aa, Homo sapiens
LGSAAFKKPGLYPSGPSLRTLWYSREIPRWMLMPKKNRIAIYELLFKEGVMVAKKDVHMPKHPELADKNVPNLHVMKAMQSLKSRGYVKEQFAWRHFYWYLTNEGIQYLRDYLHLPPEIVPATLRRSRPETGRPRPKGLEGERPARLTRGEADRDTYRRSAVPPGADKKAEAGAGSATEFQFRGGFGRGRGQPPQ

SEQ ID NO: 27476 - protein, 111 aa, Homo sapiens
LGLFYLPFLWFCGWTFTTKADSMGDQQLYKTNHVAHGSENLFYQQPPLGVHSGLSPLMATNTPTPRPARSGPRSLPAVSYTSWTLSPRCLPTKTCEFRSTIWPRCCTLSQQ

SEQ ID NO: 27477 - protein, 141 aa, Homo sapiens
LRAQSPSPAPVPKGSSEGSRTGANSHPRLRPPRRGRAGAVPSRPCPPRPPAAPGLPPRSPHPRGCPIPAQSPRALRPRAGRRRRGPSPASSRSRAARCCRRSSPSTRGARSPTTSTAGQREVEAESWAERPERLELLTPTA

SEQ ID NO: 27478 - protein, 55 aa, Homo sapiens
LFCFIFVFLYLLGLFCLNPSTAGRLINHTENVEGFMGEGVEMWVFETKVYKQMNC

SEQ ID NO: 27479 - protein, 29 aa, Homo sapiens
VRSSWKPRLFSGFLRMSLPAIHLTSFRNL

SEQ ID NO: 27480 - protein, 34 aa, Homo sapiens
LIFKLLFYDLFLMIEPELVETTLIISRSLQETGA

SEQ ID NO: 27481 - protein, 62 aa, Homo sapiens
MFVFTSTTYLTISFALLFFSQVSIYEVDKQDCRKFCTTGIDGAMTIWDFKTLESSIQGLRIM

SEQ ID NO: 27482 - protein, 136 aa, Homo sapiens
LGAFRELRPAALGEARWPTSWVVGTRPRGQGPPGGGRRGCGSYLPRRRRLCGAELRRTSQLGQWLRRLPAPPLRHKRSRRVAAFLLGTHLGKGLIHLDSRLALNSASCTVILKYFCGREHGGVTVVPVMTQNPRST

SEQ ID NO: 27483 - protein, 282 aa, Homo sapiens
LVVGPAGAEGLGVPPAAVRQHAAGAVRTRPRPAPRTAARFPPHSPAAAPGPQRRGQAQGRAQVRGGGRARTRTGTHAHARGRARRGLGRPHSLGNPGADFRVVGGGGRPHALPGQVTLVPGPPPSVAAWARRGPSGGPGGGGGRKHRSAHRSVRERSPLGAQLESQEPGFEPGCLLRCERGASPTEGPAPSARCPPRAARVCRRWQEAASQPALWHTVTLSSPLVGRPAKGGVKAEKKLLASLEWLMPNRFSQLQRLTLIHWKSQVHPVLKVRAPGCPAHQL

SEQ ID NO: 27484 - protein, 86 aa, Homo sapiens [sequence omitted]

SEQ ID NO: 27485 - protein, 100 aa, Homo sapiens
LPKVTKDMECMDGALLVNTMFFKPHWNEKFHHKMVENRGFMVTRFYTVGVMVMHQTGLYNYYDNEKEKLQIVEMPLAHKLSSLIILMPHHVEPLEALKSW

SEQ ID NO: 27486 - protein, 66 aa, Homo sapiens
VATAQTRLRSFSHASLRFSSATMSDKPDMAEIEKFDKSKLKKTEMQEKNPLPSKETIEQEKQASES

SEQ ID NO: 27487 - protein, 47 aa, Homo sapiens
LMSLHHPPSPLLQRGNNKGTEDSCIWEKSCQIQKFAIMYFYVFMPCD

SEQ ID NO: 27488 - protein, 38 aa, Homo sapiens
LEACLHKNRFALQFWGRQELVGWVKNEPTHDGVLILGF

SEQ ID NO: 27489 - protein, 18 aa, Homo sapiens
LSLTSWALASALLLVMWC

SEQ ID NO: 27490 - protein, 66 aa, Homo sapiens
LGLCSISLLLPVLWSRGTTASCPGIATRVSWTGSMGAWTPVLQAMGAPTVLPSSLGSSGCWKVWWS

SEQ ID NO: 27491 - protein, 169 aa, Homo sapiens
MEEMMITAAAVLGVKQNPNSCPALGSMAQNCRPLFVSCLGQKTQPSVKIRGSHRNHLPTWPLLLVSQAPAFLCSPLLHCFLLMKSGEVLGGETNETAVYPVRALWFLLRDSPHLPQPRERKEGLESCLENHLIKTPDNTGTLDEHRKLCLCENSNSVLLEPRARAGRDT

SEQ ID NO: 27492 - protein, 9 aa, Homo sapiens
LLGIILVTG

SEQ ID NO: 27493 - protein, 182 aa, Homo sapiens
VHAGTGRAGSAGFQASPAPELGCRTPAKSPNAPDLRGHREAARLGTSPGKPRQSPPPGPPSCSCHQAPGPRRVSPARDPGSWAVPRPTGQRHLLHLKRKEDQFAGLRTGPARSPPAQNERADSPWTHEATAPRGENGGLIPPALGEDDSLGGGQGSECYPEERSSPGTRKWAVFWITAAIHL

SEQ ID NO: 27494 - protein, 18 aa, Homo sapiens
LLWFWKRTWTLLWIFSVS

SEQ ID NO: 27495 - protein, 158 aa, Homo sapiens
MKRLPLLVVFSTLLNCSYTQNCTKTPCLPNAKCEIRNGIEACYCNMGFSGNGVTICEDDNECGNLTQSCGENANCTNTEGSYYCMCVPGFRSSSNQDRFITNDGTVCIDIDECSESVACDDHSICENVNGGYNCSCKEGYQTSTGKSQFTHNDGAYCQ

SEQ ID NO: 27496 - protein, 212 aa, Homo sapiens
MDAPRHVVNFGPGPAKLPHSVLLEIKKELLDYKGVGISVLEMSHRPSDFAKIINDTENLVRELLAVPDSCKVIFVQGSGSGQFGAVPLNLIGLKAGRCADYVVTGTWSAKAAEEAKKFGTINIIHPKLGSYTKIPDPSTWNLNPDASYVYYCANEVVHGVEFDFIPYVKGAVLVCDMSSNFLSKPVDVQVWCDFCWCPDECWLCWGHCGDCL

SEQ ID NO: 27497 - protein, 11 aa, Homo sapiens
LCFLFGSIGVL

SEQ ID NO: 27498 - protein, 47 aa, Homo sapiens
LQRLLRSPLRQFFFVCLLCFPWQTAGERAAHGEAERSGFRVLPKLGE

SEQ ID NO: 27499 - protein, 37 aa, Homo sapiens
MKWLSTDLFSKVAMICMTAASPRESSRRGLPNRCCGI

SEQ ID NO: 27500 - protein, 71 aa, Homo sapiens
LLRQGRGGQRAAEAAVANMAQSRDGGNPFAEPSELDNPFQVTCASRPLLGGQVDSSRFCRVGLTCIPICDI

SEQ ID NO: 27501 - protein, 20 aa, Homo sapiens
LEVSKWIIILMAFFRVYSSH

SEQ ID NO: 27502 - protein, 15 aa, Homo sapiens
LVVCGNVLFFILLAH

SEQ ID NO: 27503 - protein, 74 aa, Homo sapiens
LRRGGGGGCDRADRAETFAPGDRAPPPLGPGRVDAAGSGGAVHLRRRTGRGAGDAVRAAVPDAQALARTSQAVI

SEQ ID NO: 27504 - protein, 42 aa, Homo sapiens
LFPVVEVICQQFYCFSSSVYRISLPLPNFSSLNLRGKHFISL

SEQ ID NO: 27505 - protein, 54 aa, Homo sapiens
LASTAVGVVNFKDVPVDLIVIGRTGWTVDALKSQKRRCVRIQNQWKLLLEPPQP

SEQ ID NO: 27506 - protein, 163 aa, Homo sapiens
LFQSGKLHPGKTSDDRGGHSLPAHPVSTLSVLSLASRPQPWPSLYCTVRTGFYASRGWEVVYGRRTASHQPRWEARRNLFKSCDSESSPSRPFSGRPRTVCASSLMRNDVSGAAVAAHEECKAAKSGLSRRPLRPRLRRGGDEGGARRRGDVTAARGVGGASL

SEQ ID NO: 27507 - protein, 92 aa, Homo sapiens
LPLASVFFLRPSLALWLRLECSGVITAHCSLSLLSPQPLGSWDHQRAPPLPATFFCIFSRDVGLAMLARLLPNSGAQAIRPPGPPKVLRLQA

SEQ ID NO: 27508 - protein, 100 aa, Homo sapiens
VWKSLQSERKLNCSHQSPHRPEALCLYPVQEEFPHQGELYSAWQNPHRRDTLSVRPVWKKLHPERESGCAPAKLLTEAHPLTTFLKRSSLYELRVQNPLR

SEQ ID NO: 27509 - protein, 45 aa, Homo sapiens
MRDGGGRGPEPLSAPVSSRGGSALGEPAGLRRRQRRRFSPPLRLF

SEQ ID NO: 27510 - protein, 120 aa, Homo sapiens
LGVGAPALTTAPAPTPAAPSVCSADPGRRGTGGDPLSRCLQRHLLRAGLPVVGAWSLSRDLHLLRGQGPPGLPVLLPALLREVIAAQRGPLAPMGAPLLPCSVPLISREEALQDPRNPSP

SEQ ID NO: 27511 - protein, 22 aa, Homo sapiens
LVITVIFLTTLFYRSLSENDTC

SEQ ID NO: 27512 - protein, 7 aa, Homo sapiens
LWFLLWF

SEQ ID NO: 27513 - protein, 19 aa, Homo sapiens
LGLQDKERDKFLLGILMAL

SEQ ID NO: 27514 - protein, 282 aa, Homo sapiens
LRKTSDMESRMWPALLLSHLLPLWPLLLLPLPPPAQGSSSSPRTPPAPARPPCARGGPSAPRHVCVWERAPPPSRSPRVPRSRRQVLPGTAPPATPSGFEEGPPSSQYPWAIVWGPTVSREDGGDPNSANPGFLDYGFAAPHGLATPHPNSDSMRGDGDGLILGEAPATLRPFLFGGRGEGVDPQLYVTITISIIIVLVATGIIFKFCWDRSQKRRRPSGQQGALRQEESQQPLTDLSPAGVTVLGAFGDSPTPTPDHEEPRGGPRPGMPHPKGAPAFQLNR

SEQ ID NO: 27515 - protein, 69 aa, Homo sapiens
LAGELFLVHPSLHLYLCPADNVKDWSKVVLAYEPVWAIGTGKTATPQQLLVLGPGSTREAPRMAEVQRL

SEQ ID NO: 27516 - protein, 17 aa, Homo sapiens
VSPRPEGLPGRAAVGPL

SEQ ID NO: 27517 - protein, 86 aa, Homo sapiens
LLLLGTLWLGARMEIQVLDDLEVMAPVSDLGSLLLQVLPDFALQPPVLGLQAPHSVQVEEVLASLKFGSLDRAQWLTPVISALWEA

SEQ ID NO: 27518 - protein, 21 aa, Homo sapiens
LLLLGTLWLGARMEIQPSGPR

SEQ ID NO: 27519 - protein, 23 aa, Homo sapiens
MKCGPVAPHCRFSSFLPPFRKLN

SEQ ID NO: 27520 - protein, 67 aa, Homo sapiens
MAIVSQFKRSYPDSIWDLECTQGSGCAWRLEMEEASKVMPFRLPSNSTATVKRVAFPQRTCQTGGKL

SEQ ID NO: 27521 - protein, 87 aa, Homo sapiens
LCKVRKIFVGTKGISRLVTHDARTIHYPDPLIKVNDIIQIDLETGKITDFTKFDTGNLCMVTGSANLGRIGVITTERGTVDLLTWFT

SEQ ID NO: 27522 - protein, 43 aa, Homo sapiens
LRRVKPDKAASPGMGARGGRPAGGDDSIAPGCSSVRLGEGKIF

SEQ ID NO: 27523 - protein, 16 aa, Homo sapiens
LLFFILASSCLPNLFR

SEQ ID NO: 27524 - protein, 146 aa, Homo sapiens
VEEQHLQTRDIINVSNRYFNPSGEPLELDSRFWELRDSIVQCQLLMLRVLRFQVSFQHPHKYLLHYLLSLKKWLNRHSWQRIPVAVTAWALLRDSYHGGLCLRFQDQHITVAVLYLALQVCGVEVPAEVEAEKPWWQVFGDDLTNH

SEQ ID NO: 27525 - protein, 214 aa, Homo sapiens [sequence omitted]

SEQ ID NO: 27526 - protein, 47 aa, Homo sapiens
LIAGHHFIYMGAFCSILCSKPQESGQLALKTLYGFGEPETIKLQMIM

SEQ ID NO: 27527 - protein, 13 aa, Homo sapiens
LRSRILPVGRCTT

SEQ ID NO: 27528 - protein, 29 aa, Homo sapiens
VLRTTPMKPLVLLVALLLWPSSVPAYPTP

SEQ ID NO: 27529 - protein, 505 aa, Homo sapiens
LSTHRLGLAAVLCVASASAAWEQSAVGRAVSCCRPRGWPFRTLWAVSAALWSGRGPILASKTPSLPWSTQLGAWWKDPTAGGVTQEASPGAWHWGRQWEVSRTTSSTCLIPRPRSPLHVRLWGGTSDLVRGPGAPPPALLQSKAQWQTPCPAQGGVPALPRTLQPLGPLHRGPGWGRTALPPGASGRAGPKCSSATAPAPGGRRAGPDPSARGPHQLPAAVLTGSSALPALQAGGWREVPCPPARGRQAPPPPDADKPTALQPRGAHLPPPQLWLPPQALLGRPVPQAVPWGAHLPLEAERGQAGLRELLARLAPPHGHSQPSALPGWHQLSWRMSCALWTLLCAPEHGRPCYHTLGLEVIGSEQMWGWPARLAALHHWHCLPWDPLPTCCGHHGGEHSNPRCPEHCPMPTLCTQVQRVRPPQQPQVEGWSPWGLPSGSALAVGVEGPCQDEPPSPRHPLAPSAEQHPASGGLKQSLTPVPSGPGPSLPEPHGVYLRMFPGEVAL

SEQ ID NO: 27530 - protein, 13 aa, Homo sapiens
LRPLRKRGGVGVG

SEQ ID NO: 27531 - protein, 47 aa, Homo sapiens
LLSGGVGGAPSRGAVPAESCGLWQGRGHHGMYSERRGESRPRAEQGD

SEQ ID NO: 27532 - protein, 70 aa, Homo sapiens
LSFLLAGDSCTCAGSCKCKECKCTSCKKSKWDPLFPLPLPCPPACPLSTILRGIKAVWGCPIARKLLPPQ

SEQ ID NO: 27533 - protein, 44 aa, Homo sapiens
VSLVLISAASCLPPGCCSCCPVGCAKCAQGCICKGASDKCSCCA

SEQ ID NO: 27534 - protein, 11 aa, Homo sapiens
MAAFKVWILAP

SEQ ID NO: 27535 - protein, 40 aa, Homo sapiens
MKRAAMALHSPQYIFGDFSPDEFNQFFVTPRSSVESCWRM

SEQ ID NO: 27536 - protein, 102 aa, Homo sapiens
VTAAALLSTRRKARQAKARRIAPRPASGPIRPIVRCPTVRYHTKVRAGRGFSLEELRVSTGSAAVSGRPRSPLCWPQSRDDILRNRCTALMKAHLNPFPSDC

SEQ ID NO: 27537 - protein, 11 aa, Homo sapiens
VGAGGMSTSLH

SEQ ID NO: 27538 - protein, 128 aa, Homo sapiens
VAGRDRAPTDGCWAAAPPPRTLPSALPAPQDRASSLLSLLPPEGPQPLPAEPGCCHRLPLRLLCESMKRQIVSRAFYGCECGARRAVAGWGRAALGPSLLLPTAAHRRAGTLPPPVHGADPPVGAGAP

SEQ ID NO: 27539 - protein, 25 aa, Homo sapiens
VVTFWLFARLLLCGVFHPRYGGHRG

SEQ ID NO: 27540 - protein, 29 aa, Homo sapiens
LALPAALLQPRVHVGGAGGAAAAEAKGVL

SEQ ID NO: 27541 - protein, 8 aa, Homo sapiens
MDALAVMM

SEQ ID NO: 27542 - protein, 14 aa, Homo sapiens
LLAVWRLRGSQVVR

SEQ ID NO: 27543 - protein, 51 aa, Homo sapiens
LLWMVCLTLSCTKWNFLLYHDHHRSGEHAQLLLCVCSGIPHSVPSYSSLYL

SEQ ID NO: 27544 - protein, 15 aa, Homo sapiens
LFIYVMEDTKRYTVA

SEQ ID NO: 27545 - protein, 56 aa, Homo sapiens
LGGGGMRKDENEKKTSPHPKFPSRGLRTFRRKGSSLRAAEAGRRVHANCHLIRSYQ

SEQ ID NO: 27546 - protein, 74 aa, Homo sapiens
VSWPPPAAARKKGSTASLTARALDSLLGKNLPLPPVRDALSGISFDLPEAFLCRSRRHCTMAYLVLLRFADRAF

SEQ ID NO: 27547 - protein, 21 aa, Homo sapiens
MARALCRLPRRGLWLLLGRIA

SEQ ID NO: 27548 - protein, 9 aa, Homo sapiens
LAAGLLREL

SEQ ID NO: 27549 - protein, 7 aa, Homo sapiens
VWLWLAA

SEQ ID NO: 27550 - protein, 20 aa, Homo sapiens
LDFEETLVLIPVLISQQWKI

SEQ ID NO: 27551 - protein, 29 aa, Homo sapiens
LAMALHVPKAPGFAQMLKEGAKVRAEGKE

SEQ ID NO: 27552 - protein, 22 aa, Homo sapiens
LLHLLTLMVVEMDFFLVCLCVG

SEQ ID NO: 27553 - protein, 83 aa, Homo sapiens
MATKAVCVLKGDGPVQGIINFEQKARAGTEACLRGRSHPLVPPRTFARSGSPARPRGRPGPAPGPGPCRPVGAFAPSGAVPKC

SEQ ID NO: 27554 - protein, 32 aa, Homo sapiens
MKTVAGALLSLVMGQPSEGRVEGSKQENEQPT

SEQ ID NO: 27555 - protein, 49 aa, Homo sapiens [sequence omitted]

SEQ ID NO: 27556 - protein, 55 aa, Homo sapiens
LAAVAVLSLLLTGTRSGWRPASSCRHLGRDGGAGPAAVPLRHRDQPGAGPGSSNI

SEQ ID NO: 27557 - protein, 33 aa, Homo sapiens
LKYQALALALALALELRRSLGLSLAARSLDTFS

SEQ ID NO: 27558 - protein, 53 aa, Homo sapiens
LYGWWFLVLWGQVPPAIVQAAVCKPKKHEDTGRLLGDSPAPPHPGAAALRQPD

SEQ ID NO: 27559 - protein, 28 aa, Homo sapiens
LPPGPVRSLVGMCRLSSLQLLPNPTDFR

SEQ ID NO: 27560 - protein, 77 aa, Homo sapiens
LLLGLALPALAASLGCYPALSPDLLSGNLSAIHIDRLDCAVFPVCLSKRSPSKTIPGLPRHCHVHCKSSCDSSCRCL

SEQ ID NO: 27561 - protein, 37 aa, Homo sapiens
LLFQSSQHSKQAPPPLAAPGMGPTPYRRSPGPLHPVG

SEQ ID NO: 27562 - protein, 30 aa, Homo sapiens
LHISTVALMSMLTASMLDRQSFYCWIVQDI

SEQ ID NO: 27563 - protein, 11 aa, Homo sapiens
LKLVFIFLVSS

SEQ ID NO: 27564 - protein, 258 aa, Homo sapiens
VPPGPNGHIRHVARSWPIRFESHFFPLTPPSGAVVRSDRSKMATVEPETTPTPNPPTTEEEKTESNQEVANPEHYIKHPLQNRWALWFFKNDKSKTWQANLRLISKFDTVEDFWALYNHIQLSSNLMPGCDYSLFKDGIEPMWEDEKNKRGGRWLITLNKQQRRSDLDRFWLETLLCLIGESFDDYSDDVCGAVVNVRAKGDKIAIWTTECENREAVTHIGRVYKERLGLPPKIVIGYQSHADTATKSGSTTKNRFVV

SEQ ID NO: 27565 - protein, 16 aa, Homo sapiens
LELRAKTFLTFLLLNI

SEQ ID NO: 27566 - protein, 117 aa, Homo sapiens
LFGSTSAVATGKLSGQCCCGCEKPVIRRRSGAGRWTRWCENLAALGPGKRGHQANASDFARQMHVFFGRHSKMQPAVSPGSEKQVEVSAINPPFREKRVAATDRLAVGWNFLWWPSD

SEQ ID NO: 27567 - protein, 24 aa, Homo sapiens
LGLHFLWFCFKSHFLLGKLLPNTR

SEQ ID NO: 27568 - protein, 122 aa, Homo sapiens
MRRTGAPAQADSRGRGRARGGCPGGEATLSQPPPRGGTRGQEPQMKETIMNQEKLAKLQAQVRIGGKGTARRKKKVVHRTATADDKKLQFSLKKLGVNNISGIEEASIKFCYFKKQDLAGKS

SEQ ID NO: 27569 - protein, 41 aa, Homo sapiens
LPLGLGPKRRSAPACRSPGSTFTFGPGGARPAAVVVAAAQG

SEQ ID NO: 27570 - protein, 18 aa, Homo sapiens
LVHISLGLRLLFVLGQCD

SEQ ID NO: 27571 - protein, 40 aa, Homo sapiens
VLGEQNVLLLERLPFPFCALGETEDPEGFAKQGGNGSERT

SEQ ID NO: 27572 - protein, 44 aa, Homo sapiens
VLGEQNVLLLERLPFPFCALGETEDPEGFAKQVCEVGTIVPIFT

SEQ ID NO: 27573 - protein, 41 aa, Homo sapiens
VLGEQNVLLLERLPFPFCALGETEDPEGFAKQGGPVGRPLR

SEQ ID NO: 27574 - protein, 205 aa, Homo sapiens
VGGGRRSREGAGRARFRPAGRGLSVLSPCSSTALPAKREQPPSLTRNGPLSCGQRLRKSLSSMTRVVGGLVALRGAHPYIAALYWGHSFCAGSLIAPCWVLTAAHCLQDRRVPARPEPPQGPRLLRLPAQLPRCTRTRALPSPAPPFFPRPSGAPGEEAGTRDWGSGAGGFPRTLVARSESAASPLPPPQARTRGSDGGARPGTP

SEQ ID NO: 27575 - protein, 16 aa, Homo sapiens
LRRKGWLWICCLLRSL

SEQ ID NO: 27576 - protein, 26 aa, Homo sapiens
LTVFILWALILQWEYQGMVFHTGTQR

SEQ ID NO: 27577 - protein, 31 aa, Homo sapiens
LTVFILWALILQWEYQGILFLQMVFHTGTQR

SEQ ID NO: 27578 - protein, 11 aa, Homo sapiens
MAATLALSFWY

SEQ ID NO: 27579 - protein, 57 aa, Homo sapiens
LPGAPEEAAAAAPTPPRPPLLEVPLCEGRGPCREGEGAPPPLRREPPPLLLPLPGRQ

SEQ ID NO: 27580 - protein, 17 aa, Homo sapiens
MLPTILIWKEKSFSRSS

SEQ ID NO: 27581 - protein, 30 aa, Homo sapiens
LPGSPLRQSPVPGVGRFPEELGPPQTLTRT

SEQ ID NO: 27582 - protein, 13 aa, Homo sapiens
LFLETTMVILTLL

SEQ ID NO: 27583 - protein, 91 aa, Homo sapiens
MPLWEAPAAGAAQPRCCPCGEAGSARHSAGRPGSGSGHHEDPGESAGEAPPRPWANGPSFLDVDPPTGTSLGSWPWSQTSALLEAEGTHEA

SEQ ID NO: 27584 - protein, 30 aa, Homo sapiens
LRHVPGRRRNTRSHRRSPAQFSEFRGASNQ

SEQ ID NO: 27585 - protein, 31 aa, Homo sapiens
LRHVPGRRSRNTRSHRRSPAQFSEFRGASNQ

SEQ ID NO: 27586 - protein, 113 aa, Homo sapiens [sequence omitted]

SEQ ID NO: 27587 - protein, 71 aa, Homo sapiens
LVPTSSRVRLLRGRQEHGHPGGGPRRQPAAGGPQTTADARLPVGGAARDLEARAGGGGGGGGAGGAELDGR

SEQ ID NO: 27588 - protein, 80 aa, Homo sapiens
VLGGPPDPRGASCATCRRSRLHPQSRRLALHSLQSGRGPSRVACSWATAQQGGRHPPGSTRPLPHQAKAASCWRSPRCQL

SEQ ID NO: 27589 - protein, 123 aa, Homo sapiens
VSPAREGALVQAGSRCGGVPSVGRNAPAEGMLRLEGVSLTAGIPGLAGVSHWGGFPGGEVSGGGAAPAKHGCSARRMCLAGGGVPIGRVALMGEVLQLWRCQPGGRSGWGVCPLWLPRSRCHS

SEQ ID NO: 27590 - protein, 8 aa, Homo sapiens
VVFQVDGG

SEQ ID NO: 27591 - protein, 67 aa, Homo sapiens
LYPPKCHRFLPMQEMSRPINKKFLSLAENGWPHEATTTGGKEGCSTPRLIGKPNQIWDLYSVAEAGR

SEQ ID NO: 27592 - protein, 41 aa, Homo sapiens
LKSVWLSGLGLHLTVTGMLLQALEESETNFKGPLFFLLPAC

SEQ ID NO: 27593 - protein, 44 aa, Homo sapiens
MAAMASLGALALLLLSSLSRCSGNAGASLHLLSTGRGQRPFLSS

SEQ ID NO: 27594 - protein, 26 aa, Homo sapiens
LRTASTLFLGICLLWSRPRAFSDVLC

SEQ ID NO: 27595 - protein, 28 aa, Homo sapiens
LDAYCVPALLFLFAGIQLCYHKDSEGPC

SEQ ID NO: 27596 - protein, 32 aa, Homo sapiens
LRYFIFLAFLEITTSCGSVSGNFTDLSPPSHK

SEQ ID NO: 27597 - protein, 41 aa, Homo sapiens
LWEPPLCLARDCQWEALHRPRGGQLVPGCSPLHPGAWHHAL

SEQ ID NO: 27598 - protein, 149 aa, Homo sapiens
MCCLCVLWVLGVTFSLGDGIQNSSAGAPLLHLLPGSYWASSSSSLYLYSTGSRESPADGFCPGLKQPESYGKGRAWLARGIFQVLKRQAYGACDPSRRTKWDLKIHSTSAHGGPGPAPARGHTADWAAGMPGLCWRPLWLAFTSVCLQE

SEQ ID NO: 27599 - protein, 164 aa, Homo sapiens
VGSPTRPSGPPPPAPCPSQPTRPSRARRGGSSTATGRCQPAPDGHRGAGLRRHADGHRADAGERRGPGAWRRPAAPLLLPGAGRAGRGRASRGRQPGVSLPGGRLGARPAEPLPWSLRLPAATPGGRLPRRGRVLPAARGRRGLPAGRGLRRPGPARRALPGAA

SEQ ID NO: 27600 - protein, 80 aa, Homo sapiens
MEPEHPEMRGEEPSTTKWSGGGGTRSTTGSSSFRKSFQTVTQTTARRERPAITSGSCARPTSACRRPSKRPSGCRWTTSS

SEQ ID NO: 27601 - protein, 13 aa, Homo sapiens
LVVGGYLFVLIGR

SEQ ID NO: 27602 - protein, 106 aa, Homo sapiens
LQHRLGHPRSRRGTRAQAKEGPSPEDAGPRALPCLWGQGLRLPLQRAQLRRLQGLLPAQCGPWWGQALCLPGWRNLPDGRFHAAQVPAVPAAQVQGGRDEGAVRPF

SEQ ID NO: 27603 - protein, 53 aa, Homo sapiens
LADPSAGLRREPWGMERSEYLGRGARCIAEPGRGREGGGLLSRDHASGRRCGA

SEQ ID NO: 27604 - protein, 111 aa, Homo sapiens [sequence omitted]

SEQ ID NO: 27605 - protein, 71 aa, Homo sapiens
LARAPVVTVEEAPALRCPEEPSRARFLFGWFLPARGQNTRARGGRARSPPQSPAPGAVRLFPEQTGRGASR

SEQ ID NO: 27606 - protein, 215 aa, Homo sapiens [sequence omitted]

SEQ ID NO: 27607 - protein, 14 aa, Homo sapiens
LEVLLMQKESCWKK

SEQ ID NO: 27608 - protein, 112 aa, Homo sapiens
VGTVFARIVCPHISGRATGTLASCRLPSRAASGSLNLGTAAEACRPRRLYCVRSRRRRSGSGRRHFLSSTLALGPGPHGSGRRQLLLRTALGVRSPDEEVLESPGLFRRRTA

SEQ ID NO: 27609 - protein, 126 aa, Homo sapiens
LATVRTICSHVQNMIKGVTLGFHYKMRSVYAHFPINVVIQENGSLVEIRNFLGKKYIRRVWMRAGVVCSVSQAQKDELILEGNDIELVSNSAALIQQATTVKKKDIREFLDGIYVSEKGTGQQADE

SEQ ID NO: 27610 - protein, 64 aa, Homo sapiens
LAGLAGLRVTLSGRARKPQGPDGSQIRGLRINPRRPRAARCCVPVWVWVCLRRRLGASVEVLSA

SEQ ID NO: 27611 - protein, 204 aa, Homo sapiens [sequence omitted]

SEQ ID NO: 27612 - protein, 122 aa, Homo sapiens
LIGCRSHDAVVQCDIKQWPFMVVNDAGRPKVQGGDSGETKSFYPEDEMSSMVLTKMKDIAEADLGKTVTDAVVTVPADFNDSQRQATKDAGTIAGLNVLRIIDETTAGAIAYGLDRERLELK

SEQ ID NO: 27613 - protein, 166 aa, Homo sapiens
LELEMNSELKAQLRELNITAAKEIEVGGGRKAIIILVPVTQLKSFQKIQIRLVSELEKKFSGKHVVFIAQRRILPKPTRKSCTKNKQKRPRSSTVTAVHDAILEDLVFPSEIVGKKIRVKLDGSRLIKVHLDKAQQNNVEHKVETFSGVYKKLMGKDVNCEFPEFQ

SEQ ID NO: 27614 - protein, 219 aa, Homo sapiens [sequence omitted]

SEQ ID NO: 27615 - protein, 41 aa, Homo sapiens
VSMWKKRSSFTYLFLFVSLPGHSLFQRLNSLCNGVWVHLSL

SEQ ID NO: 27616 - protein, 49 aa, Homo sapiens
MRKFTILKGSMLFSISLYLISDLKLLMQFMNLRKKNVNGNQMKKMRFRN

SEQ ID NO: 27617 - protein, 197 aa, Homo sapiens
LGVEPHAPPRGWALPRRCGSSSLLPSSAPSVGRSLLPASPPRLALWDRAPDPPAPPEDPETAPAMEEDQELERKISGLKTSMAEGERKTALEMVQAAGTDRHCVTFVLHEEDHTLGNSLRYMIMKNPEVEFCGYTTTHPSESKINLRIQTRGTLPAVEPFQRGLNELMNVCQHVLDKFEASIKDYKDQKASRNESTF

SEQ ID NO: 27618 - protein, 41 aa, Homo sapiens
LPVTCVLLAGVGGAGILALLGGRAQPEEEEPRTPRRRERSS

SEQ ID NO: 27619 - protein, 83 aa, Homo sapiens
VVRQARLLQLLLLLDLPLKQGVSALKMTCSSLLHRCFFSSLLFLHGRCLQLLYHLFQPYHLFYLSHRQQGYASGELLLSRGGK

SEQ ID NO: 27620 - protein, 76 aa, Homo sapiens
LPLKQGVSALKMTCSSLLHRCFFSSLLFLHGRCLQLLYHLFQPYHLFYLSHRQQGYASGELLLSRGEHWKTKKELE

SEQ ID NO: 27621 - protein, 92 aa, Homo sapiens
LGLGMWYRLLAAAGSRAVARPLALLWRCGGPGGGRTAKTSARALGKARQKKLGKLIWPPVPVLPGDPRSEADSAGKTDVIFLVAVFKTTQRV

SEQ ID NO: 27622 - protein, 129 aa, Homo sapiens
LRESETLSASIRRADPAGAAAAMDDREDLVYQAKLAEQAERYDEMVESMKKVAGMDVELTVEERNLLSVAYKNVIGARRASWRIISSIEQKEENKGGEDKLKMIREYRQMVKSRIKKRCRTWKTKISET

SEQ ID NO: 27623 - protein, 112 aa, Homo sapiens
VQKNVAAGIGAWSGHPRLPRDREVALVRSQPGHPAARAGGRLWPRPDPALLRARAGPGSPRLHQAPRGQHQVLRGHHRRPVSPVSQRYAAGAHPGAGGVAGTLAGAGLPLHP

SEQ ID NO: 27624 - protein, 187 aa, Homo sapiens
LKREDTRKQVKIILLLFCIQQASYYGTAVMGQAYLPELGTQEVSPKVLQGPQQAWTEEVWTAWPCPEPLCIITAVPNLHPTLSLPIPGPGALLLCSRDSWSSLRQHTVLLWRRPSPTHAGMLQPVPEQVVAGGCWQRRDNGPAPGGKCWLQGTESSPCHSPCYPLGNLKGISKNSGSATLLSFLWNM

SEQ ID NO: 27625 - protein, 217 aa, Homo sapiens
LQTAIHQCMVSLATRTEHSWIKNLLRKRTRKSPDPAEQPGGAPAQPHGREALQVQPVRPRVHPGQQAEAPHEDAHAQIVPHDGQVRRRSLHRQLPGTRHQRLGGQRQQRAQVRGGQVQERERPQPDPGERGRGGRGGRRGRGRRGGRGGGGADGEREGGLRLRAEPGGGAPPREQLAGRGRGRGRREPRPARRHAGHGAQLHAALQRGLPPGPGREA

SEQ ID NO: 27626 - protein, 38 aa, Homo sapiens
LILLQMASILLLEVRTADGDKGTKVYVFRISNPGTHHF

SEQ ID NO: 27627 - protein, 75 aa, Homo sapiens
LWVSAARAAGGVAAARQPSFAKAVGAPRPAGTRHAPSPQAPGTRLPRRHDAQEEGQLRRRRRQGRAQEEIGAVVS

SEQ ID NO: 27628 - protein, 82 aa, Homo sapiens
VLKQVHSDTGISSKAMGIMNSFVNDIFEHVAGEASRLAHYNKRSTITSREIQTAERLLLPEEVAKHAVSEGTKAITKYTSAK

SEQ ID NO: 27629 - protein, 33 aa, Homo sapiens
LLSVVLQFSRLFKVSGWACEVTDLKMFPFSCEF

SEQ ID NO: 27630 - protein, 140 aa, Homo sapiens
LRLALGDAEQLGHGAGGRRGPELGGEEVGGTPQAEAIPVPSAAAAAVAAPAAAAPATAAAPAASALPGCSRHGRRRSRRRRGLLLLLQPGPPSGGQAAGERQEARRRAAEAASRAPRRAGGGEASGLLAAPAAAGRRWRC

SEQ ID NO: 27631 - protein, 133 aa, Homo sapiens
LGLFVSAVLRLSSVSLGPSLPRRALAGRLVARGGGGLGAGRDERRLHELRERRAGGGARLQLPAAGGRGGRCLLLRLPRPQVLLRRPAQLLPLRAQLHVVAQHWRSHRPVRSSSGSSRLHCYRLCALLPVHQL

SEQ ID NO: 27632 - protein, 13 aa, Homo sapiens
VREDAKGGFDHRG

SEQ ID NO: 27633 - protein, 55 aa, Homo sapiens
LVLLWLPVLVRDLCPALQPSPHSLLIPLPPLLTSCSPWSRWFSRGAPAPLPRPQS

SEQ ID NO: 27634 - protein, 39 aa, Homo sapiens
LVCVAFSMGLCWMRVLLTQVYTSISGQQKRRMTQAWCIK

SEQ ID NO: 27635 - protein, 133 aa, Homo sapiens
MGPWSRVRVAKCQMLVTCFFILVTAAGPLCGHHGDSYLLRGPLCCHPPSVPGEEPVPGCAPMGLLCGVEPGGPPDSGSRAERCSHREGGPGPHGRGLPVLLPGVLRTGAGGVLETPQPHPGGGRHAGHLRPGI

SEQ ID NO: 27636 - protein, 62 aa, Homo sapiens
VGEGGSGSPSPAPEFSLTLLSPGARALPRVAVEEGLPGDPVAEREDHDHIPPEAVHRAGAAV

SEQ ID NO: 27637 - protein, 156 aa, Homo sapiens
LARRHWVGWGGSGGGGRRWRRPRGPGLSRRGPGGREAGGGGGGGARGPGGGGSRVLRRAPPRSGRRRRRRLRSRMAASALYACTKCTQRYPFEELSQGQQLCKVRGLREAGGMGVLGRSRRGPGSRCTAAPLRRRLRGLGVWSPRLPTRGPLFLGA

SEQ ID NO: 27638 - protein, 27 aa, Homo sapiens
LVLLLAGLLWLSAVRRLKRTCGGRTRA

SEQ ID NO: 27639 - protein, 27 aa, Homo sapiens
MSGPSSGEGGAGGRRRRRRRRRRSLSL

SEQ ID NO: 27640 - protein, 34 aa, Homo sapiens
LVQSGPEVKKPGASLKVSCKASGYTFTSYAISWV

SEQ ID NO: 27641 - protein, 48 aa, Homo sapiens
LKELVLLLLRVLHVAPIKDEAENTESFSAVKSNPNTTHCQSKEEIFRG

SEQ ID NO: 27642 - protein, 44 aa, Homo sapiens
LRESLPLPESRDTSSTSCVGATPHRDPGRVPPTGRLQPFHPRKH

SEQ ID NO: 27643 - protein, 63 aa, Homo sapiens
LAEGEMGWVGGGAGDGGEDGVPELAAGVPADPTGQPRLHHCLRPHHRRRAVGIDHTFSVVLQS

SEQ ID NO: 27644 - protein, 59 aa, Homo sapiens
LGRCASQVPGSGIRGHGLEWPRPELRSCAQTWNSGNVASLTGALSLGDCRARETRPLQS

SEQ ID NO: 27645 - protein, 170 aa, Homo sapiens
VGEPGCAQRCQWLGRPAPAHVAARIWPARNVGAGRTGDWWLWTAPCRKRSPPATPTVHLLHRVHPSWRLSPSPGLPSGLRCPATVQFWLRASTSTARSVCPSGGSSSTSHSRGSTSGFPTASVSGCPGHEQAPDSSARLPLWSVWPGFLFSSPAGLRPTLCLQSYGQAEQ

SEQ ID NO: 27646 - protein, 91 aa, Homo sapiens
LGSSCWAGCGSPAGLPPAAQRVLCLALLYLCRFWLRASTSTARSVCPSGGSSSTSHSRGSTSGFPTASVSGCPGHEQAPDSSARLPLWSVW

SEQ ID NO: 27647 - protein, 42 aa, Homo sapiens
VDRRRLGDQLRPGLRVAAPVHALRLRVLVPACLQGLPSRQLL

SEQ ID NO: 27648 - protein, 114 aa, Homo sapiens
VVLLQLHGDPGPDPAQRRQLRFLPPHPAALRRVHVLPDRAPRSPGQGRDPHRRHGRVRQSGHLPEPPGPRQRRGGRRGGGERGRAAAGHLTGGWRRVTRAGPGDPGAAGQAGAD

SEQ ID NO: 27649 - protein, 155 aa, Homo sapiens
LSARRASADWRSEWGRGGAQGSVPRPLRAWACSRRACLEEELGPCVAAESDGAGISGHRVLTFTKKAPQHVPTTRRLTLRGFSLLPKSRGGPVSRSPAGVRKRPSYLPVLPSGVWGHFLGAFQVVGAGAGPESLGARPQGPHMPQRPPPVPAQRP

SEQ ID NO: 27650 - protein, 88 aa, Homo sapiens
LTFFAALARILSISSRRCPTVTSLAAGWGFHCSHVTPLAGGLSPSHPHSYTAFRGHFGQVLVDSPWERVPESLVRLHVEQRHQNMGLQ

SEQ ID NO: 27651 - protein, 100 aa, Homo sapiens
VGLATRLANPPRPARPPRLRTPEVPTRTSDAPRPSATPPGADPLNSAGPGARGPHDPRAPARTPRAPAPARVPDAAPAPTHRAPQQGPEPPAAGRGGAPR

SEQ ID NO: 27652 - protein, 90 aa, Homo sapiens
LRAPGHRELIASALPLLLPSLAFSGPPVSGTEEGQRSKDRRGRPCQHRAEAEVLSRGPSAPGGVGPPGPCRGEPEELPEAAPVGVSAFPA

SEQ ID NO: 27653 - protein, 74 aa, Homo sapiens
LSGVRRVGWSLWLECLSGLGITSGAVLHWAIQHGPRGRRGSGSDVCGAAGGPASGNNNNNNDGGGLRASVSRAD

SEQ ID NO: 27654 - protein, 99 aa, Homo sapiens
LMTERDATSLSKGKFQELLVGIVVENDAGRGEINELKQVEGEASCSSRKGKLIFFYEWNIKLGWKGIVKESGVKHKGLIEIPNLSEENEVDDTENLQRE

SEQ ID NO: 27655 - protein, 137 aa, Homo sapiens
LVEFCPDGSSGRGVMVASAKMGRAGTMAVAAEVAGAGRLAVEEAWGALRAPQQQTDSCYSKSSSTLTALQIFQHSSQHPPLPPSLQAELGSQGGIVYVHAGGGGGQCPGLESPLVLSASLPAASRAVPRSEQPALPL

SEQ ID NO: 27656 - protein, 341 aa, Homo sapiens
VPILPIKSPKVTVQETPLVKAKEGTLPSFAAYSRPHFLKSLVSLHPLCHSHKTTISKDYFQALFLIPKPAVFSCPQLPGQAASTALFTGPSLLAGLEGDNREKEGDSPRRGLRVTSHPPNAKSGSGPAEGRNFPPSAPHRLPRASPRARASSQAASWGARHGLTSDRLAPAAGLAAPRRQAEPVPGVAAGSDLEPGRDSGAEVPGAAVQPDVGLLVALPAARRRRQSHLPPIPLPKQAQGGRGAGHPAVLGQEVGGHLRPHPERLPPRERGLLFLLGPEQLHHVLQPLRAGLPASEAHHDASAATTNTGAHHRVAAPVPAPRGVPASGGGRSAHEGAGLRL

SEQ ID NO: 27657 - protein, 19 aa, Homo sapiens
MYQACFRRHGSKGLPESLC

SEQ ID NO: 27658 - protein, 112 aa, Homo sapiens [sequence omitted]

SEQ ID NO: 27659 - protein, 111 aa, Homo sapiens
LQAVAFPVVTLFLFPTRELGRNALAALSPQAGSRCSKRPRPLRMYVVFTAKVLPSACPRKEDSKPILRPAQPLYTPTPPQTRLEFLLGSRLKLRKCSSPLKPTRNQSFSKL

SEQ ID NO: 27660 - protein, 29 aa, Homo sapiens
LEMKVKRSRATWTELPGRRRREQDAAARN

SEQ ID NO: 27661 - protein, 108 aa, Homo sapiens
LAVATASSPRGPPRTRGATSVATSSGASCAKACSARASLQIASSPATTAAARSSAWTVAGPGTWAGNPRWSGTRTWTSLWSGRHLTFLKLRLSRRSRSTMPRSTATSS

SEQ ID NO: 27662 - protein, 104 aa, Homo sapiens
LAVATASSPRGPPRTRGATSVATSSGASCAKACSARIASSPATTAAARSSAWTVAGPGTWAGNPRWSGTRTWTSLWSGRHLTFLKLRLSRRSRSTMPRSTATSS

SEQ ID NO: 27663 - protein, 59 aa, Homo sapiens
LQQLPAHRRRLPALLLRRVLLCPPCLSAAAVAGGGGRRPDAQLQPGVQNYLPGRPSTTP

SEQ ID NO: 27664 - protein, 30 aa, Homo sapiens
MRRESILLESILGSSISNLTLQRTCTPRIP

SEQ ID NO: 27665 - protein, 93 aa, Homo sapiens
MPGRDGGRQLAPECGRRRCSPQPSGSGMAGASALLPTDPPEAETESPRAPSSLPSKSRCSHCRRHDAETKEAESSPATDTAAAPAARAGRDWR

SEQ ID NO: 27666 - protein, 156 aa, Homo sapiens
LPIVRTWRLNEQHYGALAGLNKAETAAKHSEAQVKICRCSYDVPPPPMEPYHPFYSNISKDHRYADLTENHLPSCESLKDTIARALPFWNEEVFPQIKEGKWVLTAAHGNSLWGTDKHLKGLSEEAIMELNLPTGILIVYELDKNLKPIKPSPRSS

SEQ ID NO: 27667 - protein, 109 aa, Homo sapiens
LRSFLVVVQWLMQVPLTPLWELGLGRVVENADALAIAIVLNNQWSLVPNRGILYFLPVSMKLGGDRVSCQFLTATSHQWLHSVSLTQHMAQECLPSVSVSTAAIPRCWS

SEQ ID NO: 27668 - protein, 68 aa, Homo sapiens
LQVWPSLFCVLLLLEAQPLWRCDLVIGRFTAKTPGSPGSLEMARKTGKITGSSTYWIFNKIFFLSQKH

SEQ ID NO: 27669 - protein, 22 aa, Homo sapiens
MVQFLAFNCLALFFERHTTVLS

SEQ ID NO: 27670 - protein, 124 aa, Homo sapiens
LGPPTSPTPRHRKAVHSGSTRALRGGRCVFISRVRRLRETKPLVQGHAAGEWERPAWNPAPSSRGARVPPSVPPPPPVGEGGGRESARRCRLGSRLGATTNPVNDLGLNLTPSLLWACVSPPVK

SEQ ID NO: 27671 - protein, 112 aa, Homo sapiens
MLHKVKMMRRRRKKQKRRESVELHYLVTGAVWLMSIQKMLNLNRRSTDLWLQNRNLDSYKILLLWYRMMMQLKELSLPVHQIWMISTQQKKTPSKIQITLEEMPIKHRKILE

SEQ ID NO: 27672 - protein, 127 aa, Homo sapiens
LKMKGDHYHYLAEVAAGDDKKGTVDQSQQAHQEAFEISKKEMQPTYPIRLGLALNFSVFYYDVLNSPEKACSLAKTAFDEAIAELDTLSEESSKDSTLIMQLLRDNLTLWTSDTRGDKAEAGEGGEN

SEQ ID NO: 27673 - protein, 99 aa, Homo sapiens
LSFRLKRRERPAAVSAHSSQHSHQRTPRGLLFGPSQSLFQMLLEKKKRKAGQPVSQPRCHLGLSAEMQARSAKPNPVGARPWVQASASRHILSLFSVSE

SEQ ID NO: 27674 - protein, 113 aa, Homo sapiens
LVFSAEGTAVPGFAVSFRLKRRERPAAVSAHSSQHSHQRTPRGLLFGPSQSLFQMLLEKKKRKAGQPVSQPRCHLGLSAEMQARSAKPNPVGARPWVQASASRHILSLFSVSE

SEQ ID NO: 27675 - protein, 42 aa, Homo sapiens
VESSWPALHVPLLPLWAMLWPSIWYSTPLTDPAASCHGDSLG

SEQ ID NO: 27676 - protein, 109 aa, Homo sapiens
LAPGGAGGSDHDRFVQQAAGLVQGPILEGGDGAHAGRASVLGQDHLRQRDRVRTVQRGHDPHRGFQHAQNHQRECDYQALGHWGTAAFPQHVGALLPRSERHRVHGGCC

SEQ ID NO: 27677 - protein, 96 aa, Homo sapiens
LLAGLPVFPATGDTARARLTTSRRGREGQERDLPIPRGRTLGRLPAPPTRRPRAPLAPSSLPRPSPAVREAGVGSRLSGNRAVSEEAVGDRFPLQA

SEQ ID NO: 27678 - protein, 32 aa, Homo sapiens
LVKPTKMLGTWVLIPFLTHTMGFLGPCPARKH

SEQ ID NO: 27679 - protein, 33 aa, Homo sapiens
LGRGSLIPLVLVKKKSIPSGWLGFFRGNRDSQT

SEQ ID NO: 27680 - protein, 32 aa, Homo sapiens
LAMPKCGSCSASGSSQIMCLLWSRASMLLPKM

SEQ ID NO: 27681 - protein, 14 aa, Homo sapiens
LAAHLDRFCSWRRL

SEQ ID NO: 27682 - protein, 33 aa, Homo sapiens
LKMLLFVMKLLVLRKNFLKQKKKEDHHRPTWLS

SEQ ID NO: 27683 - protein, 27 aa, Homo sapiens
VPRLGLPDREAVSRADGAGQKRAAAAG

SEQ ID NO: 27684 - protein, 109 aa, Homo sapiens
LPGAARGRTRRAAFTQRSVPPLGFGWALHLRASGTPWQRQRCLRIPQTPLAALLPMARVKRVAASLCPQQRYTWSAQDTLIGCLCPQALGFWPPPHILRLTVLFLSLPI

SEQ ID NO: 27685 - protein, 135 aa, Homo sapiens [sequence omitted]

SEQ ID NO: 27686 - protein, 21 aa, Homo sapiens
VLGQILFSLAVTAAGLCKGAL

SEQ ID NO: 27687 - protein, 40 aa, Homo sapiens
MQFFLLLNKTRSQQFPSKQSIIQRTWKTVWVNLVKDKDPS

SEQ ID NO: 27688 - protein, 73 aa, Homo sapiens
VMAATAAERAVLVRRAGQRAGRRGGGAGRDRRVCPAGGGVPLAAARRGARCVEAAAGHPQGGLSALHSAGLRH

SEQ ID NO: 27689 - protein, 362 aa, Homo sapiens
VAAVSFSAAHEGLLQPEACSAFCFSTGQGLAALSEQGWCLCGAAQPSSASFACLSLCSGPLPPPAPTCRSPTLLQHVFPASPGAALVGPHGPLASGQLAAFHIAAPLPVTATCWDFGDGSPEVDAAGPAASHRYVLPGRYHVTAVLALGTGSALLGTDVQVEAAPAALKLVCPSSVQSDESLDLSIQNRGGSGLEAAYSIVALGEEPARAVHPLCPSDTEIFSGNGHCYRLVVEKAAWLQAQEQCRAWAGATLAMVDSPAVQRFLVSRVTRSLDMWIGFSTVQGVEVGPAPQGEAFSLESCQNWLPGEPHPATAEHCVRLGPTGWCNTDLCSAPHSYVCELRPGGPVQDAENLLVGAPSGDL

SEQ ID NO: 27690 - protein, 22 aa, Homo sapiens
VSSRPSLCSRTRTPAMITVARS

SEQ ID NO: 27691 - protein, 175 aa, Homo sapiens
LPGAQARPSERRLLRETDPFCVYGAENAAAGHQGQLEVPLLWDSSEAGLTTEPAAGGHAVHGHAAAAHAPEAQVPASPEDGQPRGQRLPQRPAQHSGTDHGRAEPAPPAVHRCLPRLPRVPSARPGQLPAAGRRHTARRQGPAAGVQTALRGNCRCGDEPPVPLHREAVALLLEL

SEQ ID NO: 27692 - protein, 177 aa, Homo sapiens
LPSLMTPLRDYGRDWAAGAADAARAQLGARLGPFRAEPPAGRGRGAAWLPEHGRGGDAEPRTGARAAPPPLRIRSLGRGHPRLPRDREVALVRSQPGHPAARAGGRLWPRPDPALLRARAGPGSPRLHQAPRGQHQVLRGHHRRPVSPVSQRYAAGAHPGAGGVAGTLAGAGLPLHP

SEQ ID NO: 27693 - protein, 20 aa, Homo sapiens
LVAPADKCHTGSRARPCAPG

SEQ ID NO: 27694 - protein, 72 aa, Homo sapiens
LSVCLSLSLSLSLSLSLSLSLDHRNFREEPGPVCCGVHCPISGPLHQLHLTLQHVYEGGLHSLLLHHGLVDL

SEQ ID NO: 27695 - protein, 55 aa, Homo sapiens
LILCPEKKVFCLSNKSRKFTIEVYACERTGQTNGFYRGLRGHVLYSWTCCQGRQC

SEQ ID NO: 27696 - protein, 44 aa, Homo sapiens
MTGSPCRQQIIWNRMHKDIKWLPGSPTFCRRMPSLCSAPCASCP

SEQ ID NO: 27697 - protein, 107 aa, Homo sapiens
LAEPLATQGRRRGGEPRGRRGGRAGIPASWELPGPSSRPSASRSCWRADAPCLPLTRWRPRKRYSRGRALVGRPGPGCLSAPALPGSFRVPVFPARLLISTMRTFGS

SEQ ID NO: 27698 - protein, 220 aa, Homo sapiens
LHLSLPGCSSCRCKANFGKSFLGETWALRCPAPRFPILGAFPENVAKKLSRRAEENACSRRVKTNHRLPCSFSSWRLESPGRPHTARRLGWFATQPPGRGCSLGLGIRPGSGLGPRSCAQVLPCPPATEPGPGAAAPGGHAGEPRLQRPERLIAADPSRAHPPPQPPTLAAGAARSIYASGAPRGRARSRHESLLGALPVSLLLPASGQRRGGPHSRGAL

SEQ ID NO: 27699 - protein, 26 aa, Homo sapiens
MGRLGNLSRTIFDQTTKYFLRTCKYY

SEQ ID NO: 27700 - protein, 115 aa, Homo sapiens
LPPPGPTVVFAGAAVALGLGRGGGRGEEKAAAEAGERRKEAAARRAQQLRRRPGSWECRCGALVGADPAGPGRGKESPARPWRTTRNWTTNGSRISRTKAATWRTTSPLKKTPPA

SEQ ID NO: 27701 - protein, 39 aa, Homo sapiens
MHISTSQLLIINTTCWLLVDCWELEQFFRLVLHSLEKKV

SEQ ID NO: 27702 - protein, 193 aa, Homo sapiens
LRRRQSFCLVPWGVGRDPQGVGRGVPAAATHAGAGSGGGAERSRPGPSPCRRLGHPPGAVASCPGVYEPGPQPSSATTPRPGGRGPRCEAAAGAAERTGPTPPSFPHLPPPLSPLRGSSPLASRRPPGSLAGLREEFLEPPSPAPVPRAAGPGGTRGAGRSLHPEETLQKQNPESPKPDCPGRSGPGRAEAAA

SEQ ID NO: 27703 - protein, 9 aa, Homo sapiens
LLVVSMFAG

SEQ ID NO: 27704 - protein, 43 aa, Homo sapiens
VCASKCFYSGAWYGGSHLYFQLLRRPRLKHEDRLSSGIKDQPG

SEQ ID NO: 27705 - protein, 12 aa, Homo sapiens
MLLLILRHLVLL

SEQ ID NO: 27706 - protein, 9 aa, Homo sapiens
MYLRQRELC

SEQ ID NO: 27707 - protein, 17 aa, Homo sapiens
VLLLPISDIMDRMDSRF

SEQ ID NO: 27708 - protein, 53 aa, Homo sapiens
LVGPHGLHKEGRKEGVEEDSGTLEAVCHSGPAGGHGCPHSRHLADRGPSAPDH

SEQ ID NO: 27709 - protein, 56 aa, Homo sapiens
LSLCCAEGTALGLGERVPECETRLPRSQPLPVPPGTATSWSPTQPWLKNNRRSNCS

SEQ ID NO: 27710 - protein, 57 aa, Homo sapiens
LCGAHGLGSFRQRSWECPSKCCPKKSAFSAKREHYSMDECNWFDHHCPTRAILDCSS

SEQ ID NO: 27711 - protein, 88 aa, Homo sapiens
MSWKIFMTWIYSNLAWRVNWSADLRQQLSPVVVWQCLCSLLGRPLNSRCCPKNFYPGPVFSTPHLSLRSVLFSLLKKVTKINLKVSFL

SEQ ID NO: 27712 - protein, 26 aa, Homo sapiens
LALGGVGLGVPAVRSGRECGRTWSST

SEQ ID NO: 27713 - protein, 54 aa, Homo sapiens
LAARAMPGRSCVALVLLAAAVSCAVAQHAPPRTAENQPILLQDQRTEVQFHGTP

SEQ ID NO: 27714 - protein, 91 aa, Homo sapiens
LVGAGGARGGGGLRPPRLLAHVDLAVACRAAPLRKLDGSGRDRALPASAGRLLLRCARLGWDSAGEGSCTLSHQAQCSRAAQRISFLVLRA

SEQ ID NO: 27715 - protein, 13 aa, Homo sapiens
LFVHLIRLLFWKI

SEQ ID NO: 27716 - protein, 46 aa, Homo sapiens
LHHMYLIRESHASGSSSVTSSCSLPSESPTLRQWRPCSCLPHPRPR

SEQ ID NO: 27717 - protein, 35 aa, Homo sapiens
LALALPLVLIGVVSHKEALLPAWLPPLTLPPGSVL

SEQ ID NO: 27718 - protein, 32 aa, Homo sapiens
LHKEMGKVSSISSRWPEWLEVPCLSECFCTCS

SEQ ID NO: 27719 - protein, 52 aa, Homo sapiens
MQSPRIQGQRRAQPSQLEAHGAEARSRCVTLAGVQWLLTGMIIAYCSLELLD

SEQ ID NO: 27720 - protein, 69 aa, Homo sapiens
VCYIALDFEQEMATATSSSSLEKSYELPDGQVRSSPSATSGSGVCRCCSSLPSWAWNPAASTRPPSTPS

SEQ ID NO: 27721 - protein, 59 aa, Homo sapiens
LRRFWRGCPFLASALRLEAKLVLCLLSIAAKACCCHSGVSLSLSLFHAALSTPSWDGQL

SEQ ID NO: 27722 - protein, 56 aa, Homo sapiens
LRPHFCALAPPLLLSLAVSRVLPGGPRQRPETPRLYVEDAWTNLLKIRGFTNSQHQ

SEQ ID NO: 27723 - protein, 17 aa, Homo sapiens
LHQPLPLPSDVSYRVSQ

SEQ ID NO: 27724 - protein, 81 aa, Homo sapiens
LAGGRLPFPVSLWPPEPGGSSGEVCGRHGGSSGRAPAGPRGRGAAAAATRLLPGLPRASGPGESPARVLLQLLHQQPEVPA

SEQ ID NO: 27725 - protein, 47 aa, Homo sapiens
VHPSPRVRCLGPLALELTSAVNGEKSGNLTGCGQESQLLKADITRIL

SEQ ID NO: 27726 - protein, 119 aa, Homo sapiens
LTEALLNPKANCEKMTQIMFETFNTPAIYVPSMLCCCCMPLVVPLALRWTPVMGSPTLPNYKGYTLPSAILCLDLAGWDLTDYFTKILTERGYSFTTTAQQEIMRDIKKKLRYIALDFK

SEQ ID NO: 27727 - protein, 96 aa, Homo sapiens
LHVSPKEHPVLLTEAPLNPKASHEKMTQIMSETFNSPSMYIAIQALLSLHVASSFSLKKRFQLPDSQVITISNERSPLSHGTFPAFLPGHGILWHP

SEQ ID NO: 27728 - protein, 106 aa, Homo sapiens
LLLLLSGALVLTQTWAGFHSLRYFHTTMSRPGRADPRFLSVGDVDDTQCVRLDSDATSPRMEPRAPWMEQEGPEYWEEETGTAKAKAQFYRVNLRTLSGYYNQSEA

SEQ ID NO: 27729 - protein, 108 aa, Homo sapiens
LLLLLSGALVLTQTWAGFHSLRYFHTTMSRPGRADPRFLSVGDVDDTQCVRLDSDATSPRMEPRAPWMEQEGPEYWEEETGTAKAKAQFYRVNLRTLSGYYNQSEACE

SEQ ID NO: 27730 - protein, 144 aa, Homo sapiens
LLLLLSGALVLTQTWAGFHSLRYFHTTMSRPGRADPRFLSVGDVDDTQCVRLDSDATSPRMEPRAPWMEQEGPEYWEEETGTAKAKAQFYRVNLRTLSGYYNQSEAWAASHTESWTGLYRHNLVPAWMKPSEEWVPSFRMWCMY

SEQ ID NO: 27731 - protein, 89 aa, Homo sapiens
MRSWTGAARPAFLLKLSLCVTGSWARCFSAAALGGCQWLGAPGLSPPPEENKEPGQREAKGRVCSSCSFLLWFYPRHLFRGHSLLCCEE

SEQ ID NO: 27732 - protein, 110 aa, Homo sapiens
VLPESSYRCSPPPLPVFLPSAAALGGCQWLGAPGLSPPPEENKEPGQREAKGRVCSSCSFLLWFYPRHLFRGHSLKGTEATLQISQISSTVCCYSELDFLFFCLHRLFCF

SEQ ID NO: 27733 - protein, 19 aa, Homo sapiens
MYYLNLLLMCNNTLALELL

SEQ ID NO: 27734 - protein, 104 aa, Homo sapiens
VLFQSSFLGMESCGIQETTFNSIMKCDVHICKDLYANTVLSGGTTMYPGIADRMQKAITTLGPSTMEIKIIAPPESRYSMWISGSILALLSTFQQMWISKQEYN

SEQ ID NO: 27735 - protein, 112 aa, Homo sapiens
MSKSYLPQSEWKQNKRSQYSRSSDGDEDDEEEEENEAGPPEGYEEEEEEEEEEDEDEDEDEDEAGSELGEGEEEVGLSYLMKEEIQKKEVFEGRRGNEMLKTMERKKMTRSF

SEQ ID NO: 27736 - protein, 92 aa, Homo sapiens
LHLPVLSLVPLLTASCDATSQNALEKSCSSPNVMVYRAGHVAGSCLCSRVSRKEHLSVYLVSWFVLSSYQLFHPDSNYFPLQRRTPDRENQI

SEQ ID NO: 27737 - protein, 31 aa, Homo sapiens
LLFSSTQRYRDTHAFFPPKIVTTLCECFIIF

SEQ ID NO: 27738 - protein, 18 aa, Homo sapiens
LLLVTFLSMDDLLGTQNS

SEQ ID NO: 27739 - protein, 104 aa, Homo sapiens
LDPFPSVLTAAPQTLAAKMVKQIESKVAFQEGLEAAGDKFVMVDFSATWYGPCKKIKLFFHSLSEKYSNMVFFEVHVADCQDVASECEVKCMPTFHSLRRDKSG

SEQ ID NO: 27740 - protein, 22 aa, Homo sapiens
LLMAAAAAAAVLVVLGGRSRIL

SEQ ID NO: 27741 - protein, 96 aa, Homo sapiens
VGSQQDQMPLSSLALLQMFIWCDCIMPSESTVCCPGWPRTLGSSDSSASASQVAGTTDAITTTLGSVPVQQKPLGLFDLFKCPLWKVCEWPCKKTL

SEQ ID NO: 27742 - protein, 820 aa, Homo sapiens
LVHLRMFRLGLLVCFYNDLELLDATVAQVLLYQMIKCSHLRGFQAGVQKLKAELLDIAMENQTLNETLGSLSDAVVGLTYSQLESLSPEAVHGAISTLNQVSGWAKSQVIILSAKYLAHEKVLSFYNVSQMGALLAGVSTQAFCSMKRKDISQVLRSAVSQYVSDLSPAQQQGILSKMVQAEDTAPGIVEIQGAFFKEVSLFDLRRQPGFNSTVLKDKELGRSQALFLYELLLKTTRRPEELLSAGQLVKGVTCSHIDAMSTDFFLAHFQDFQNNFALLSPYQVNCLAWKYWEVSRLSMPPFLLAALPARYLASVPASQCVPFLISLGKSWLDSLVLDSHKKTSVLRKVQQCLDDSIADEYTVDIMGNLLCHLPAAIIDRGISPRAWATALHGLRDCPDLNPEQKAAVRLKLLGQYGLPQHWTAETTKDLGPFLVLFSGDELSSIATKFPEILLQAASKMARTLPTKEFLWAVFQSVRNSSDKIPSYDPMPGCHGVVAPSSDDIFKLAEANACWALEDLRCMEEDTFIRTVELLGAVQGFSRPQLMTLKEKAIQVWDMPSYWREHHIVSLGRIALALNESELEQLDLSSIDTVASLSWQTEWTPGQAESILQGYLDDSGYSIQDLKSFHLVGLGATLCAINITEIPLIKISEFRVVVARIGTLLCSTHVLAEFKRKAEVVFGDPTEWTSSVLQELGTIAAGLTKAELRMLDKDLMPYFQPSAIKCLPDEIFKELSAEQIASLGPENAAAVTHAQRRRLSPLQLQSLQQALDGAKTHSWQDAPASAGPTRTSSSRSPAGALQSWGLWLGCPLLVLMAKLLW

SEQ ID NO: 27743 - protein, 44 aa, Homo sapiens
MCRVCLHFLLPSGFFWVVLQPPIPRPGLFRVPPIPLSLPPSLNS

SEQ ID NO: 27744 - protein, 17 aa, Homo sapiens
LLPLLSAVRREPVTRRR

SEQ ID NO: 27745 - protein, 97 aa, Homo sapiens
LPLPPDQGDARRPATLSQVPAKTRPRLRRCPARPSQPPDFPSCPQRPGPRPRAAMLGARAWLGRVLLLPRAGAGLAASRRSACSPTSRLNSLRSLIP

SEQ ID NO: 27746 - protein, 106 aa, Homo sapiens
VWKAMGLWCCLPLQGLHGIELPSEKDAECVGPSGRVQPAEFHSQCARGLPSSPAPHAGGPGKPPAGPSEPLWNPGLLAHSSPGPQCKRTRWGISEASALLPLRLSD

SEQ ID NO: 27747 - protein, 17 aa, Homo sapiens
LVLRYSNCCLLLVTVLL

SEQ ID NO: 27748 - protein, 71 aa, Homo sapiens
LLRPPAPSAGLRAPCPAPGQQPCWSWGRPPLPAPGVRGRQDHAAERVPDLHAAHRRRVQNWTAVHDQQTQP

SEQ ID NO: 27749 - protein, 59 aa, Homo sapiens
MIPDVISALLLLAAAGCLPFNDSQVISSASWTSHSCTSTDSMVAAVPVDFWDSFSCSVQ

SEQ ID NO: 27750 - protein, 75 aa, Homo sapiens
MALLHFGLFPLVCHLILGAGVAASPVPGPAGRDKRPSPRQKSMPFAVACNQPCDSTCRSQQPVGAGVPREAFQKD

SEQ ID NO: 27751 - protein, 22 aa, Homo sapiens
LKSLVDTWSFPDVLVAAVGGRD

SEQ ID NO: 27752 - protein, 89 aa, Homo sapiens
LDPSFGPRTLGPTLSCEASSSTHHRRRLGCPHPRPPSTTSSHQGLLRCCLRRTRAWGSPSWGPHSCIHHLPSPGPHNFPLGLHCQVRCC

SEQ ID NO: 27753 - protein, 62 aa, Homo sapiens
VQVHDASSLLGGRGLGVAMAPTPVCTEKPPRVMSAKSVLSVPQAGRAIWGGGEEAEQNTPQS

SEQ ID NO: 27754 - protein, 127 aa, Homo sapiens
LGRGSPLSSGCARGREGARRGGTERRADFLEGGIGWTTGPAALAEPERSAVRDARGTLFLRCRRLPVLALRGGGETQERSPEPAARPADERARSSRCAAAARAGEEKHPVSSPAPTADHVPGLSREL

SEQ ID NO: 27755 - protein, 91 aa, Homo sapiens
MKRWQCCLPQDLRALSISQNSLLPSLNNALLKENQRNPKKKRKMMMKKPQSQAVTWKLANSCPSSMGTFLPAWCQSPWRTWTPTMQTKRLS

SEQ ID NO: 27756 - protein, 21 aa, Homo sapiens
VSVSWILSLILKRLISSWTSL

SEQ ID NO: 27757 - protein, 47 aa, Homo sapiens
VWPGTEPHLISRRGGHQEARAPLPSQLPSARGCGQDPEQEGSQVGQQ

SEQ ID NO: 27758 - protein, 18 aa, Homo sapiens
LPFLIGLGFSIHCVTLAL

SEQ ID NO: 27759 - protein, 49 aa, Homo sapiens
VAAQAVRTRRPAEPGGRAAAAAAAPRSGLRRAGVLPKCNLEHGRCCECW

SEQ ID NO: 27760 - protein, 16 aa, Homo sapiens
LQRFLQTLRSWVVLSL

SEQ ID NO: 27761 - protein, 126 aa, Homo sapiens
LCTGEKGFGYKGSCFHRIIPGFMCQCGKFTRHNGTGGKSICGEKFDDKNVILKHTGRGILSMETGGPNTNGSQFFICTGKTEWLDGKYMVFSKVKEGKNIVEAMERFGSRNGKTSKKITIADCGQL

SEQ ID NO: 27762 - protein, 85 aa, Homo sapiens
VASMLTVLRSLPLFSRELLFPVLKIQKVILALGDYMGATCHACIGGTNVRNEMQKLQAEAPHIVVGTPGRVFDMLNRRYLCKYCL

SEQ ID NO: 27763 - protein, 37 aa, Homo sapiens
MFSGKGLPAFMNSLSRSKRTPAGSESRCRTQRNNHLL

SEQ ID NO: 27764 - protein, 114 aa, Homo sapiens
MPTARCISPTTGLAVPPATFAMPTESLTMSTTSLLMPTTSLVMPITNHAVPTTSSNSPTSRSAMPSAEYPRPTSRLSGPTSRCARAASKHITSTRCGIPARHATVTRRCATVTK

SEQ ID NO: 27765 - protein, 66 aa, Homo sapiens
VGQIPALSLWPLGRLVVITQGLVKPLLLAPQNHSVTDQGCEAAVGGGGRGMGRQASLLSSFANLGF

SEQ ID NO: 27766 - protein, 32 aa, Homo sapiens
LGLGHGVESGKNPRSWSRLQQKRICGSLQFIF

SEQ ID NO: 27767 - protein, 114 aa, Homo sapiens [sequence omitted]

SEQ ID NO: 27768 - protein, 31 aa, Homo sapiens
LGLHSTLERAGSILYSTCRIEIELAALRRPQ

SEQ ID NO: 27769 - protein, 108 aa, Homo sapiens
LRPPPSRASAPLLQTLGIVAGRSSVPRVCVQDPRSAAPRNPLALGARPCSTTGFGLEASSSPQRTLIWHRVSARHRSKRFIPITHFISATRFRRSVSSAFYRRVQERF

SEQ ID NO: 27770 - protein, 59 aa, Homo sapiens
MPLAKVIHDNFGIVEGLMTTVLAVTAIQKTVDGPSGKLWYDGCGLIRTSSLHLLELPKV

SEQ ID NO: 27771 - protein, 69 aa, Homo sapiens
LSRRAMLLEDFSLAFFCLVLLPTVPVQIPSLLSLPANKWKVISTRYLLLQQMQIKGRRLNSKNLVLEKD

SEQ ID NO: 27772 - protein, 10 aa, Homo sapiens
MGGSCQKKKL

SEQ ID NO: 27773 - protein, 84 aa, Homo sapiens
LSPARPGSGRWLQLSFLALLCSVRAALELCSPGRSPSTSSAAEEPSASAPAPLSSAAPIPGSSLRGVELFPMTVLIRLHYTFVC

SEQ ID NO: 27774 - protein, 75 aa, Homo sapiens
LLLSPARPGSGRWLQLSFLALLCSVRAALELCSPGTCSSRPRSPRAAGFPFRLCLCWPRLHPVPPRLERGARRSW

SEQ ID NO: 27775 - protein, 290 aa, Homo sapiens
LSRHAREVAAAGRPLPGAGPALRAPVRPPASAAACRRPLADARGAGQGSVRSVAAQAGLGPAGGRAGLGEGLGDAQHGGPGPGVWAACRAAPSWSWPGRAARRCGGVAAVVEPGCRHAGCGPGRAGCAAAGAGRTGAGQYRAGGRVQAGGRASWGRAAGAAAHLLVAATLSAPGCHLLAGRGPGLGCTSPAAAPTAAPFRAASPHRAPSAGRASRAGDRVDGRLCAHLQAGKLLPLLRSVLRFRLGGLACQTALVFHLDTLGASMDAGTILRGEGLALRRKRGARSLGHC

SEQ ID NO: 27776 - protein, 22 aa, Homo sapiens
LPWHRIILSFMTLWSQWTLKDF

SEQ ID NO: 27777 - protein, 40 aa, Homo sapiens
MVRFQSPFFILLWTISAGSIRAGGSASHGSPLYLDCNVNL

SEQ ID NO: 27778 - protein, 36 aa, Homo sapiens
LGESHLAKQSALLYQPRDSNNLLGPSQNDRALPVFS

SEQ ID NO: 27779 - protein, 76 aa, Homo sapiens
MRETYSMFLFSCLALSLSMAPIRSIHGCVYPRPFLFMVNGLPLGGHARSTVDRHLGCFWVLMILNKAAMNIHVQVF

SEQ ID NO: 27780 - protein, 82 aa, Homo sapiens
LLPRLECSGSIIIARCSLKWNQGSSRLSFLSSWDYSGHPKVIQLEKGSSSKTKRNKVDRKVMKGIKQSEDANEKTRSEDRNI

SEQ ID NO: 27781 - protein, 118 aa, Homo sapiens
VKFWSNCSKVMQKLGLLFEYFLRGPRCHVLLPVMCLASLHLRSLSEQRYCAALPPEVKYHLEVNRGDFSQFKRFCCLQFLSSTMTLQSRQDSPLGTLVPVPKSEQRASGIQCSYVLLL

SEQ ID NO: 27782 - protein, 39 aa, Homo sapiens
VLVNKVTFFLLHLTVVTGLCSSYVPGLREKIGRGKFTIN

SEQ ID NO: 27783 - protein, 32 aa, Homo sapiens
LTTLFTSLLRSSSSKRLLRRLRNYGNLDLALS

SEQ ID NO: 27784 - protein, 30 aa, Homo sapiens
LIKEISNYDQLGGEKNFHCPSTLREQKSKQ

SEQ ID NO: 27785 - protein, 65 aa, Homo sapiens
LGSGGPSCWSLRRALMVSLASVLPPVHKHGEHLRQPLQGPFWQKRNAHPHGGPGCCREDHDPLQA

SEQ ID NO: 27786 - protein, 66 aa, Homo sapiens
MWTSMSRMCLSRRFIMATLLVTAKTTHQWKQLASLLSDYPEPSRPNQCWLCSRTGLPHGSHCMQVC

SEQ ID NO: 27787 - protein, 25 aa, Homo sapiens
LDLDSRLLGASAMRRRKKERRPSCN

SEQ ID NO: 27788 - protein, 27 aa, Homo sapiens
LWFIIFPVFLGQMAHNTEQASGWPLPG

SEQ ID NO: 27789 - protein, 168 aa, Homo sapiens
LHIVEVEAMNYKGSPIKVTLATLKMSVQPKDSLGGFEITPPVVLRLKCGSGPVHISGQHLVAVEEDAESEDEEEEDVKLLSVSGKRSARGGGSKIPQKKVKVAADEDEDDDDEDFDDGEAEEKAPVKKSIRDTPAKNAQKSNQNGKDSKPSTPRSKGQDSFKKTGKNF

SEQ ID NO: 27790 - protein, 69 aa, Homo sapiens
LALAGDISLHPGAATSPALLLLLRLLLLHSPPLLPFVSSSTAPGKALKSGGQERQLSTFQFSMDMKIYS

SEQ ID NO: 27791 - protein, 12 aa, Homo sapiens
MPFSFLATAVGL

SEQ ID NO: 27792 - protein, 15 aa, Homo sapiens
MQLWALSPWIVILCQ

SEQ ID NO: 27793 - protein, 114 aa, Homo sapiens
LSTGEKEFGSKGSFFHRIIPGFMYQSGDFTRHKGTGGKSIYQEKFDDENFILKHTGPGILSMANAGPGTNVSQFFICTAKTEWLDGKHLVFGKEKEGMNIVKAIGYGTLQEWQD

SEQ ID NO: 27794 - protein, 16 aa, Homo sapiens
LHHMYLIRESHASAPQ

SEQ ID NO: 27795 - protein, 91 aa, Homo sapiens
LMPALKMQKKRKEIILPLLLCSVDILACHYIQGPYDVVVLPGGNLGAQNLSESAAVKEILKEQENRKGLIAAICAGDVQGQPVLQRHWWVG

SEQ ID NO: 27796 - protein, 51 aa, Homo sapiens
MEAMSGRWRISLETRGRNSPMTRSRNTSLLHITPASSPRWWTSRPKGIGRS

SEQ ID NO: 27797 - protein, 68 aa, Homo sapiens
LYPAPVPLCEHTQPPPRRHDAAAAAGRRGPSGSTGHRAQRPEIRQHPCGAGPRRLPLAGDRRFWLLPG

SEQ ID NO: 27798 - protein, 163 aa, Homo sapiens [sequence omitted]

SEQ ID NO: 27799 - protein, 55 aa, Homo sapiens
LLFPDFLMIAFFSVLQTPAHPLRSASDVTTSVKLSPALLASRHLDSYEFLKAILN

SEQ ID NO: 27800 - protein, 61 aa, Homo sapiens
LRRPEPGSTEETRRLLGQGGERSVGREESVEPPFHSLRERIGRAHEPSNPWLKHPLPKPGS

SEQ ID NO: 27801 - protein, 453 aa, Homo sapiens
LLTVGESRQMVAVAEKIRTALLTAGDIYLLSTFRLPPKQGGVLFGLYSRQDNTRWLEASVVGKINKVLVRYQREDGKVHAVNLQQAGLADGRTHTVLLRLRGPSRPSPALHLYVDCKLGDQHAGLPALAPIPPAEVDGLEIRTGQKAYLRMQGFVESMKIILGGSMARVGALSECPFQGDESIHSAVTNALHSILGEQTKALVTQLTLFNQILVELRDDIRDQVKEMSLIRNTIMECQASMSSVPTAAPIPASEVWTAWKCTSTQATAVGPAPLACRATAPTAVTSMSVLTLTPVSRAPAASTPCPASTVRPVLEGTRAHRCLVWALTMPGPANRSAMTSMNATMATMVAVTQTPSAPTLWALSSVVPAAWVSWATRARAASQPGPATAQPTAPATSMLTVSLNAMVQCPASVTWAGLGMGTCVGLTQTSMATQTKHCPAWTTTNTANRTTAF

SEQ ID NO: 27802 - protein, 16 aa, Homo sapiens
LLSTLHLLSSLFLLPL

SEQ ID NO: 27803 - protein, 87 aa, Homo sapiens
LTPSHCETSRPVTSGGRLKSSTPASDPGKAASETGPKTLPVLPAELSPVRVLDPRSTDPGSLFTAFSLPALPAGPRDAGHLRPRPLS

SEQ ID NO: 27804 - protein, 22 aa, Homo sapiens
MNTWLYVLKLSKTVLLSTMAVL

SEQ ID NO: 27805 - protein, 21 aa, Homo sapiens
VRVPGVGVFVLLLVSVRSPAV

SEQ ID NO: 27806 - protein, 19 aa, Homo sapiens
LYIQIGLQKVASLIVASCL

SEQ ID NO: 27807 - protein, 91 aa, Homo sapiens
LRGADCRLLPWAGRQPPPAAAAPPDGSGGRGEDVESPESWRVERRKKAVKVFHYHSYSDWQDTVSTSLSMYHASDILAARVWSWPVGVKYW

SEQ ID NO: 27808 - protein, 29 aa, Homo sapiens
LMLKMRNLLRLKVALTVEQKMKVVVTVIR

SEQ ID NO: 27809 - protein, 61 aa, Homo sapiens
MSPGPQLWHLLQALVSMCIRISDPTSSSACPNCLQILWNKTFGTRPKRETAEEPLSIQSLR

SEQ ID NO: 27810 - protein, 131 aa, Homo sapiens
VGRLDFAVEAASLPSGTWLRASPPWGEQRTSPDLAGPSLVLPGLSAPPSSRLWPTGVREAARRGENGHKDLPETQAVQLALSARGAPGPKFNLCGKNVWRQDSDSDLLSLLPQRLLPGGGLHGPLSRLPSS

SEQ ID NO: 27811 - protein, 175 aa, Homo sapiens
LPLILILLALLSPGAADFNISSLSGLLSPALTESLLVALPPCHLTGGNATLMVRRANDSKVVTSSFVVPPCRGRRELVSVVDSGAGFTVTRLSAYQVTNLVPGTKFYISYLVKKGTATESSREIPMSTLPRRNMESIGLGMARTGGMVVITVLLSVAMFLLVLGFIIALALGSRK

SEQ ID NO: 27812 - protein, 12 aa, Homo sapiens
VVMQWFLFVNLT

SEQ ID NO: 27813 - protein, 39 aa, Homo sapiens
LIRLHQFLIWALCCLPHSICLGLAWGVPGDAVGSRTTPE

SEQ ID NO: 27814 - protein, 15 aa, Homo sapiens
LIDFLVLCLEVFAYL

SEQ ID NO: 27815 - protein, 56 aa, Homo sapiens [sequence omitted]

SEQ ID NO: 27816 - protein, 113 aa, Homo sapiens
MGKARRKPVPGPLGSLLLRAEAVHTRNPASPGLPRGSTPGGRAAAWARSRLCRKQIMTHFSGSPGPGPRAVASAKLSGPGHQLPASQPEATAAQHPAPFKVAPKRRKPNRSGW

SEQ ID NO: 27817 - protein, 79 aa, Homo sapiens
LGFGRVSGSRESQRRQCTALRLFLRLLLAPLALGVGHRCYETHVVEHRDASPAGRVMRRRAWLWSAGNLRNCQGPRAQP

SEQ ID NO: 27818 - protein, 133 aa, Homo sapiens
LRALLSLFSLNRVAANPKVREQVRLELSLVNSDLQMLKEELEGLNISVGIYQNTEEAFTVPLIPLGLKETKDIDFSVILKDFILEHYSEDGYLYEDEITDLMDPRQACRTPSRDEARVELLMTYFIQLGFVEN

SEQ ID NO: 27819 - protein, 28 aa, Homo sapiens
LERRDCEMANDGLTRWAGPGRGQRRPFV

SEQ ID NO: 27820 - protein, 50 aa, Homo sapiens
LHRARVSANREPREGGKTGGGPRQPATGYVMDAQRHRPPAGGGGAPATKK

SEQ ID NO: 27821 - protein, 49 aa, Homo sapiens
MLTCLRSRLGKESPKLHFMSKRESRSVSSSSAEASTEVAQTLPSADSKF

SEQ ID NO: 27822 - protein, 29 aa, Homo sapiens
LGGRSSVHPSPEHLLCHDMGVQRGPHSTE

SEQ ID NO: 27823 - protein, 26 aa, Homo sapiens
LASPKQVLLALLWWTAPIGHTCPALQ

SEQ ID NO: 27824 - protein, 47 aa, Homo sapiens
LISACPCQCLGRWEPLLAAVKDRYVSRVLLALLWWTAPIGHTCPALQ

SEQ ID NO: 27825 - protein, 47 aa, Homo sapiens
LRSGSANPSRERLSMLRHERICSCSSRENGWDRLLRNNSAGKSGRWL

SEQ ID NO: 27826 - protein, 69 aa, Homo sapiens
LRARSQNSFLSEDLGGGARASAAGLEREAGGRERLSMLRHERICSCSSRENGWDRLLRNNSAGKSGRWL

SEQ ID NO: 27827 - protein, 45 aa, Homo sapiens
LPRGLLSRERLSMLRHERICSCSSRENGWDRLLRNNSAGKSGRWL

SEQ ID NO: 27828 - protein, 82 aa, Homo sapiens
VIWLYGGARAVSLWGAGAVLRCFLPMGFWCRMSENQEQEEVITVRVQDPRVQNEGSWNSYVDYKIFLHMEFCSCCPGWSAVV

SEQ ID NO: 27829 - protein, 80 aa, Homo sapiens
VGFMSPKPKPAPVTAGLGLPTSWAVSCVLSFLPSEGEGVLGRENLSRGLLQMGKSWKPRSLSTEDPYSMQDRVSCCKSQL

SEQ ID NO: 27830 - protein, 51 aa, Homo sapiens
VPIQTLRISTATLLSIMLCIVRAPHWQKNCFSMVKILKHWTRTVIPHFYSL

SEQ ID NO: 27831 - protein, 66 aa, Homo sapiens
LLVGRAARQGLGCDPGGRSRSWESWGACLNFPAAPVLGDLPDGDARCAGAWRVGVIWRTMHVSLTS

SEQ ID NO: 27832 - protein, 95 aa, Homo sapiens
VGEVLVGGAKVRGTTGEQAISCNHHRGPEKHWSSGSSSPWPPACASPGPAATPLFPRLGTQLVSPCFFPLHCGASVATSLVTYTSIFLYLLPLVT

SEQ ID NO: 27833 - protein, 120 aa, Homo sapiens
VVIILFSITEFILVKNLTNVRNAGKPLVATHNLFHIRVFILVLSPMTVRNAGRPSDYFHNSHSIRVFILVRNLINVRNVARPLDCAKNLLYIRAFILAKNPLSVRNVGRPLDLIHPLFNI

SEQ ID NO: 27834 - protein, 77 aa, Homo sapiens
LGGFFPLTFYLAFLVCVPTPTSSPPFQFFFRPLPDAPQRPLQPLPPASSLTFVPRLAFGRLHLPPRPGLLGGWRFRF

SEQ ID NO: 27835 - protein, 133 aa, Homo sapiens
LFVILFWVLGWLPALSRDLLGGTRGPPPGRRACPLPLHATSPVIPRADPSSLLGQGCQERHSRRTEGALRNCGVDWMWPRRGSRGPTHRRGLTVGNTHIPLAAVLKPSDWLSEVWLGGDCSFGHSANWTCPRS

SEQ ID NO: 27836 - protein, 100 aa, Homo sapiens
VMSTSKHPSALSLSLCCPGLASPLGHCGRCLPGMSKLCCSGASCHLLGLIPHLIPYREKCEFRWRVGPGPMRHQWKHSSKFRQVPLERKTMTGKCISSGV

SEQ ID NO: 27837 - protein, 110 aa, Homo sapiens
VGMHFMVNKCITSAVNVGKLSAAKTHLSSTREFIVERSLMSAANVGKPSAAKLHLSSIRESILEKGLMNAANVEKPSVEKTTLLSTRESTLEKCLISAMNVGNILAITPI

SEQ ID NO: 27838 - protein, 12 aa, Homo sapiens
VAILIGVGCIFQ

SEQ ID NO: 27839 - protein, 18 aa, Homo sapiens
LPRTFWTRKLMKFLLLQM

SEQ ID NO: 27840 - protein, 50 aa, Homo sapiens
LQNFRILLILCQMGRLLYLKKNQEPQKKGNQLKFLLSRDNSMQLLEPYCC

SEQ ID NO: 27841 - protein, 98 aa, Homo sapiens
VGASCSPDLGLGVQAGIELERCQQQANEVTEIMRNNFGKVLERGVKLAELQQRSDQLLDMVAQPSTRLHRTWPRRSAGRTSVTGSAWGWWWLVSCSSS

SEQ ID NO: 27842 - protein, 42 aa, Homo sapiens
MYKDIVPEVKTVCICIMNILVSFTIQEQNVIRENTASFLMLH

SEQ ID NO: 27843 - protein, 19 aa, Homo sapiens
LIFIFFFILGISGWTRTLS

SEQ ID NO: 27844 - protein, 27 aa, Homo sapiens
LLLVGLAGTRLKMCLLPATYCMTPHSS

SEQ ID NO: 27845 - protein, 38 aa, Homo sapiens
LHPFSLSLDDAAVIWLCVLTVLQQAELCRTAVLCVRAS

SEQ ID NO: 27846 - protein, 94 aa, Homo sapiens [sequence omitted]

SEQ ID NO: 27847 - protein, 569 aa, Homo sapiens
LDSMPGHPGAAEQLVKTGWRSWHLGFWKALAPLQAAWDAFSQPVPASCGQLLTQLLLCASLAAAAAGLVYHWLASLLLYPPGPSAMVATVCGLLVFLSLGLVPPVRCLFALSVPTLGMEQGRRLLLSYSTATLAIAVVPNVLANVGAAGQVLRCVTEGSLESLLNTTHQLHAASRALGPTGQAGSRGLTFEAQDNGSAFYLHMLRVTQQVLEDFSGLESLARAAALGTQRVVTGLFMLGLLVESAWYLHCYLTDLRFDNIYATQQLTQRLAQAQATHLLAPPPTWLLQAAQLRLSQEELLSCLLRLGLLALLLVATAVAVATDHVAFLLAQATVDWAQKLPTVPITLTVKYDVAYTVLGFIPFLFNQLAPESPFLSVHSSYQWELRLTSARCPLLPARRPRAAAPLAAGALQLLAGSTVLLEAYARRLRHAIAASFFTAQEARRVRHLHARLQRRHDRHQGQQLPLGDPSCVPTPRPACKPPAWIDYRLDALRTESSEGEGKELWSCRDLSCNLGPVPPPCVTLGKSLHLSEPRFLHLHNDSIFTIDVTYFPRRDVVRMEGNTGHDRPG

SEQ ID NO: 27848 - protein, 164 aa, Homo sapiens [sequence omitted]

SEQ ID NO: 27849 - protein, 114 aa, Homo sapiens
VRGAAGLRALRGRRPRARHARGAGQRHHHRQVHPGLGVWPRPRPGPRPRPGLLLLVPAPAMPQPRPSGLSSLPKVPERRLCAQVPFLCSTGPLVHTHSLRGPCLPLAAPQTGTE

SEQ ID NO: 27850 - protein, 154 aa, Homo sapiens [sequence omitted]

SEQ ID NO: 27851 - protein, 39 aa, Homo sapiens
LPERCWTLLLTLVLYPGSSCRYQTGTTRGHSRCCKPAPH

SEQ ID NO: 27852 - protein, 64 aa, Homo sapiens
VCVFFLSLPPLFFFFSFLGSAEKAVLEQFGFPLTGTEARDYMEGCLGTERRKVKRKIKSLFQRR

SEQ ID NO: 27853 - protein, 24 aa, Homo sapiens
VWESLQMEFQSLPTSEDSLSSKTV

SEQ ID NO: 27854 - protein, 47 aa, Homo sapiens
LNILRTGIFVSALLMYPQQPELPDMSVIAALLIILPTADPFCETPGC

SEQ ID NO: 27855 - protein, 38 aa, Homo sapiens
MGQIAFNINRKVSCRFISKGQYYLFNCRFSQCYDYFQA

SEQ ID NO: 27856 - protein, 34 aa, Homo sapiens
VIHIFLGFALSFLSSQEREGKELYFFPSPKSSIC

SEQ ID NO: 27857 - protein, 17 aa, Homo sapiens
MRLMMKMSLLFLRILHC

SEQ ID NO: 27858 - protein, 20 aa, Homo sapiens
LGLRLAFLLLSLQMNYCGIL

SEQ ID NO: 27859 - protein, 20 aa, Homo sapiens
LLDHLPKVWGQPGPGDPGSP

SEQ ID NO: 27860 - protein, 111 aa, Homo sapiens
VSRVPESAGGGAGGRALGRVTGRSPPSTVEAGAPARCSRCARATPRSKPRVALPGPFFPRVGRSFPASAPASPGASFRVLRPFPGGAAGPRLIPPGTPRCSALGIRAGCLR

SEQ ID NO: 27861 - protein, 27 aa, Homo sapiens
MTFFKIAATLKKVLCCFLIILENHCIL

SEQ ID NO: 27862 - protein, 10 aa, Homo sapiens
LVLAQAKRKE

SEQ ID NO: 27863 - protein, 11 aa, Homo sapiens
LHWSLFFFAGC

SEQ ID NO: 27864 - protein, 19 aa, Homo sapiens
LAVLQYIRKGLVYRGLVFQ

SEQ ID NO: 27865 - protein, 72 aa, Homo sapiens
VQKITMFTFITQLLLVVEVKDSLERLAVEVVFILQKAMYEKQAHIYMKSLCPQMVLMLRDSSCFVTTTSLAV

SEQ ID NO: 27866 - protein, 18 aa, Homo sapiens
LALPLPAQVRLRQGRVLL

SEQ ID NO: 27867 - protein, 123 aa, Homo sapiens
MLRLAQTPRRLPSPFRVTYRPWGTRAFGAFPVFGTQISSPPENLDTAHLPHPEGAFEEWMRSGWKKRVIPFFERAETGRAVSREEHLFLLARFSPSGWRELPQVPIRGLAGAMIDSGAQLIKA

SEQ ID NO: 27868 - protein, 93 aa, Homo sapiens
LRGARSRGATRETSSAERPRVLPASARVAVAVLLRLPHLAQRPGRLPSLLQPPALPAELPFGRRCSPPGRGAAAPAAGLLQPLLLPEPRGRGA

SEQ ID NO: 27869 - protein, 47 aa, Homo sapiens
LAALVFPYWGLVCLPAAVVGPSDSSLPGCRGPCAGRRGLLGGWAVRG

SEQ ID NO: 27870 - protein, 49 aa, Homo sapiens [sequence omitted]

SEQ ID NO: 27871 - protein, 26 aa, Homo sapiens
LENWNMFVGSQTTNYGEDPTKNHDEL

SEQ ID NO: 27872 - protein, 37 aa, Homo sapiens
LVASFALSFWICWKGMPKPLKLEAKSTMICMNGYVCR

SEQ ID NO: 27873 - protein, 59 aa, Homo sapiens
LCALPAGAGVPAAPGRRVPGLQPPRVCPVPSVPEGDPCLEVHGVLRGQECQNKNWRMVL

SEQ ID NO: 27874 - protein, 23 aa, Homo sapiens
VPKTITSICPSGCSDRILTTAKA

SEQ ID NO: 27875 - protein, 144 aa, Homo sapiens
LLLLIIWVRVTFMSCSTHREGLQLRYSLLKPARPRTHREEETTPDAPPLRAVTLTVKVCGITPEVRETTNPPEETPDASEHLKEQTLDTPSLRTETPRQFAASFLKAVRPRTHQFWTQKDLSRLRKWQAIYEEGRDSKRWSQVL

SEQ ID NO: 27876 - protein, 29 aa, Homo sapiens
MIALLCSPLWGVSPLLGRSGAPASPGCIS

SEQ ID NO: 27877 - protein, 82 aa, Homo sapiens
LVFLLVALLLPIETTLVYLGLSLLAGCDSSLTSGQGAFLPPRPSGWNLSPPGTEENGREERRERENVIFGLVAAHPHTQRSL

SEQ ID NO: 27878 - protein, 11 aa, Homo sapiens
LEPSALKIPTS

SEQ ID NO: 27879 - protein, 7 aa, Homo sapiens
VLNFLLP

SEQ ID NO: 27880 - protein, 105 aa, Homo sapiens
LRWTFKAPAIVWSTTKGPLRAFLGGVPPARPYESDHTGQALAWGRTPQPFLPHSGHLPPPLREHQQIPPCASTDAGAATPRGVTPASTPCSQGPGSGQERTLPSE

SEQ ID NO: 27881 - protein, 8 aa, Homo sapiens
LFGFLLFS

SEQ ID NO: 27882 - protein, 32 aa, Homo sapiens
VAAFHLLRFITIIAVPEKSWKTARCQTSETSS

SEQ ID NO: 27883 - protein, 11 aa, Homo sapiens
LLAVEGSQTKH

SEQ ID NO: 27884 - protein, 37 aa, Homo sapiens
MAAAVSDTQGVRQRGRRRGRESRAASAEVHRPCPSSP

SEQ ID NO: 27885 - protein, 22 aa, Homo sapiens
LWSFVWPWFWFILCTEWHRECI

SEQ ID NO: 27886 - protein, 10 aa, Homo sapiens
LSVFIFFIKL

SEQ ID NO: 27887 - protein, 24 aa, Homo sapiens
LYHFMMIVSVAMVKLRHRQLRSSW

SEQ ID NO: 27888 - protein, 136 aa, Homo sapiens
LSVHQLVENTNETYCINNGALYDICFRTLKLTTSTYGDLNHLVSATMSRVTTCLCFLGQLNTNLHKLAVNMVPFPCPHFFMPGFAPLTSRGSQQYQALRVPELTQQMFDAKNMMAMCNPRHGRYLTMATVFRAACP

SEQ ID NO: 27889 - protein, 13 aa, Homo sapiens
VHALFICFGIITL

SEQ ID NO: 27890 - protein, 13 aa, Homo sapiens
LIFTVRTWPRSWR

SEQ ID NO: 27891 - protein, 11 aa, Homo sapiens
LSHIASEEPTK

SEQ ID NO: 27892 - protein, 83 aa, Homo sapiens
LAGEGGAEVTAEAEATVGGAEKGAGPRRRRKPFRENSNKLSCCDRGEQDGGAEGEPLGEDPTGAPAAAAADHGLGRRFGDRFG

SEQ ID NO: 27893 - protein, 34 aa, Homo sapiens
LNVQMNELTWNSFLSALILLLTKEMYSLSVKEMG

SEQ ID NO: 27894 - protein, 30 aa, Homo sapiens
LLALTALLSQVIIYTFRVRLCIMCNHGTVS

SEQ ID NO: 27895 - protein, 191 aa, Homo sapiens
LCYVALDFKQEVATATTSSSLEKSYELPDSQVIPTGNERFRCPEEPFPPSFRGEWRPPPGPAHRKVTLGAMLWKLRLALISPSGMKSCGIHETIFNSIMKCDMDILEDQYTNTVLSGGTSMHPSITHRVQKEITALAPGTMKINVIAPPERKYSAWISGSIPASPSTFQQMWISKQAYDEPGPSILHRKCF

SEQ ID NO: 27896 - protein, 82 aa, Homo sapiens
VVHRFFKSSAFWPAEVKQPRGGPKTGSRKEGAGSRAPQPVVRSFCGSVGAEGRMEKLRLLGLRYQESIRRFARAVRAGVLCL

SEQ ID NO: 27897 - protein, 22 aa, Homo sapiens
LVILWILFFVILKRQMRACINH

SEQ ID NO: 27898 - protein, 158 aa, Homo sapiens
LSNFYYLFSRQAEKVLFCNYCDFPWPQPGPAPPGGARLPRLLLHQPSRCPAPSVLTSGAARSQCLPVGEEHSPPAPSPRDDATPSCATLGSVGCTLCPWALLGGPSPLTRGRHSTGIRLEFSHCTPSCCRGAGPALSCSTVLARGGARCLPGPQGLPQ

SEQ ID NO: 27899 - protein, 37 aa, Homo sapiens
LWQLLLICFYGYARSENPYTNQQFSDPNPKPSGGCVL

SEQ ID NO: 27900 - protein, 12 aa, Homo sapiens
LDLARLWLFLFQ

SEQ ID NO: 27901 - protein, 40 aa, Homo sapiens
VLLWLLAILTGLIAGKFLFHQRLFEHISLQTIWASEMKVS

SEQ ID NO: 27902 - protein, 64 aa, Homo sapiens
LTGKTITLEVKPSDTIENVKAKIQDKDGLLPDQQRLIFARNNWKMSTPSDYDIPKGPLGTCFCT

SEQ ID NO: 27903 - protein, 34 aa, Homo sapiens
MEPWARGRRVRWLRSCTLVLAFVNSGLSPDQVFL

SEQ ID NO: 27904 - protein, 35 aa, Homo sapiens
MVLILQHLLQLLFLLHPQSRQLIIHQHQQLPPFLE

SEQ ID NO: 27905 - protein, 47 aa, Homo sapiens
LPPTGAYSKRLCEKLLLPSEPTGAARLPTDSRKKMAAGSQRAKSTFS

SEQ ID NO: 27906 - protein, 26 aa, Homo sapiens
VKSLMANLVAAFPLGYLLMDISYKAA

SEQ ID NO: 27907 - protein, 119 aa, Homo sapiens
LRSSGGRRGGGAGGGRQGESGGCALGGAAGAGAAGGAGRGHREPRPYLGPDAARCPRWPAEGSGRAPRATHGCVTAGCCLSPCSGRRAGDGARGRALGPRSPPPGGEGATERRPHRSRE

SEQ ID NO: 27908 - protein, 98 aa, Homo sapiens
VEEVCQAHVLSVLLLLFLLQHHPDPRLVLPPPGGGGHPAPLGPDAQDGVAAAPREDVCAHLGHVHLCERGHCHLPAETLGSAVHPLGCLVPLCLPWPR

SEQ ID NO: 27909 - protein, 20 aa, Homo sapiens
VWRRRGWTSHIAMWWCVMGS

SEQ ID NO: 27910 - protein, 107 aa, Homo sapiens
LSSAEATAGPRELGAWVEATPVEVGGGGAGTLTPCGLCGRGFNPLWIWPLGGSVIGSFNPFGAGFHALDLPSSPCSPTPLLGCSAWRFEAHLRPLRTVPAAAPPWTR

SEQ ID NO: 27911 - protein, 17 aa, Homo sapiens
LCVLNLCLILLLNSTSV

SEQ ID NO: 27912 - protein, 73 aa, Homo sapiens
LPEIQGIFERDSNTLLYLLQKKSEPAEPCIGSKAPKDDKTIIEEQASKTADLKRHVEFLLAENERLRKETAKG

SEQ ID NO: 27913 - protein, 102 aa, Homo sapiens
LGDGQEEGQMSGQQSEDGLTEPSRVLPGCPGASCVRRASPRCEPHWRVLRPGRARQAASAGAGLCHQLREKAGPHPENHDAGRIGSACGDGSHPRAHDQRHS

SEQ ID NO: 27914 - protein, 113 aa, Homo sapiens
LPSSDLPSWASPSAEFTSISHHTQPMTFSSLWLVLPHEKGVPHAGSEQPSTGKSGEQGRSLHVDSKDRHPKQSSGWHRWTNQARKATVLRSRVHVMGRNRHSLTLLPRLKSTA

SEQ ID NO: 27915 - protein, 44 aa, Homo sapiens
LTSSDQPTSASQSVGITGVSQMPSQGEWFSETFQKVKEKLKIDS

SEQ ID NO: 27916 - protein, 12 aa, Homo sapiens
MPVGPWRKRVSL

SEQ ID NO: 27917 - protein, 59 aa, Homo sapiens
VSGLKVLYLVDQKLRSVFSLMLIGKKTEPIKLVLNRVMVTKINGGIVLLPGRIFLVPLK

SEQ ID NO: 27918 - protein, 89 aa, Homo sapiens
LQTEPRRVCAAAAVASVFASPQRQDKGPYRGIRLPPVFRRERKNKIYLGKLYLPELARAFFKKTFVKLNKLKVNTLRVVVTDQKYGQTS

SEQ ID NO: 27919 - protein, 14 aa, Homo sapiens
MDYLLILLFSVLQA

SEQ ID NO: 27920 - protein, 124 aa, Homo sapiens
VMVWLPRPSLGWVWGWSGLAHASHLCLHLCCHPAPPSSSSPTSSSLCASVSCRKKWVEPERRLSEEGRGRAWGGSPTPHPKPQGLPPGSGRGRSWLCGVVAPLLLPCFSHLSCPSLVPTAVHHE

SEQ ID NO: 27921 - protein, 97 aa, Homo sapiens
LPLSLLRAVTPVPAAIRPGAPDESMRGRARGVVFPRTPGGLPRPASWAVRLSWRQMTALPWMALLVPHQPAPPFFLQHPDLHSLRGSHCPRCEDVPG

SEQ ID NO: 27922 - protein, 115 aa, Homo sapiens
MPLFFLILDIFLFPFNSWFLPKRSHVRTSLGMCLQEKCGLPSSPWMPVGSLPHPGCLWAAFLTLDACGLPSSPWMPVGSLPHPGCLWAAFLTLDACGQPSSPWMPVGSLPHPGCL

SEQ ID NO: 27923 - protein, 11 aa, Homo sapiens
LDQLLFGNMNH

SEQ ID NO: 27924 - protein, 12 aa, Homo sapiens
LRRILLLCRREW

SEQ ID NO: 27925 - protein, 154 aa, Homo sapiens
LQDVPPPGIHLQRLSQPGPQTAPRECPSQWPLIRGRHHCQLSPRVTVAQLDWDIAMVHQLSAIQPDVVIAADVLYCPEAIVLLVGVLLRLAACREHQRAPEVYVAFTVRNPETCQLFTTELGQARIRWEVEPRHDQKLFPYEEHLEMAMLNLTL

SEQ ID NO: 27926 - protein, 110 aa, Homo sapiens
VTSPTGVLRSLVEASSSGVSVLSLCEKGDAVIMEETGKIFKKEKEMKKGIAFPTSISVNNCVCHFSPLKSNQDYILKEGDLVKIELGVHVDGFIANVAHTFVVDVAQGTK

SEQ ID NO: 27927 - protein, 19 aa, Homo sapiens
MEQLLSQGHQPLCFYSVQS

SEQ ID NO: 27928 - protein, 26 aa, Homo sapiens
LQEAIFFLLVVNVRVRETNCLELSCF

SEQ ID NO: 27929 - protein, 18 aa, Homo sapiens
VKLPRSSRVCVYEKPRSI

SEQ ID NO: 27930 - protein, 101 aa, Homo sapiens [sequence omitted]

SEQ ID NO: 27931 - protein, 96 aa, Homo sapiens
LRRLSCPVQLRRSGGGGEAHTLRRLKPGFTHWRRELALRCQPCAPGAVHPDARGAPGAAADRARTDCRSYSPCRRRPGPGDIEVFVYRRWADRASF

SEQ ID NO: 27932 - protein, 13 aa, Homo sapiens
LWLVAGYLFLGNV

SEQ ID NO: 27933 - protein, 63 aa, Homo sapiens
LLLGRDVRELLVPEGHSLHILQHSMKAFLVLFKVRYNKLLCCIHLYTFIACSPRHAIIPKATW

SEQ ID NO: 27934 - protein, 98 aa, Homo sapiens
LVTYSSCCPRPWCFNNELLAPLRRGSRVGAADRGFPFPSASVPFPLPRTDSCLPRDAGALGLGGGDPGPGRGGGRPPESAPSAPPSPPVNQRRVPENL

SEQ ID NO: 27935 - protein, 11 aa, Homo sapiens
MVKMLVFILKL

SEQ ID NO: 27936 - protein, 44 aa, Homo sapiens
LELHLFQRAPSLPTSRALAGAEDSGCLASLDLQVTPSATPDEQD

SEQ ID NO: 27937 - protein, 126 aa, Homo sapiens
VACWIEAPPPPPRGPRRLASRADGPGYPGRLGGRAPRVGALAAVPGAPRHPGLGQRPLRPHAGSGPAGGETRVAATSASSVSWSSSPLSLSPLRERGGHRGVAGPRRMRPPPPLGLRRLAGMKHRP

SEQ ID NO: 27938 - protein, 28 aa, Homo sapiens
LIARVLCSMITILFLPVLLRSSNNSRVD

SEQ ID NO: 27939 - protein, 42 aa, Homo sapiens
LPLLFGLNMSLQFLEFFVYCSSVDFFCWNLEHWNDGNVFFTK

SEQ ID NO: 27940 - protein, 355 aa, Homo sapiens
LTFRDVAVEFSPEEWECLDSAQQRLYRDVMLENYRNLVSLGLAIFKPDLMTCLEQRKEPWNVKRQEAVAKHPSPCCFHFTAEVLPEHDIKDSFQKVILRKYGSSDLNTLHLKKDYQSVGNCKGQKSRYNGLHQCLSTTRSKTSQCNKCGKAFGLCSIFTEHKEIFSKEKCYKCEECGKDCRLFSDFTLQKRIHTAERCYKCEDCAKVFKKFSNLTEHNRVHPGEKPYKCEECGKTFTCSSTLIKHKRNHSGDRPGKCEECNKAYRWFSHLAKHKRIHTGEKSYKCNECGKAFTWISVLSHHKKIHTREKPYICEGCGKAFTRSSTLISHKRIHMEERPYKCEECNKAYKWFSNLA

SEQ ID NO: 27941 - protein, 28 aa, Homo sapiens
LFELLWPHNTGRKTKAAKGPTASAAWAG

SEQ ID NO: 27942 - protein, 54 aa, Homo sapiens
LTKEHLIWLITLFLKCLLMTRSNTFQLSFDFILEKLAKEWKNILVMSCFQFSDE

SEQ ID NO: 27943 - protein, 93 aa, Homo sapiens
VSGPASPLLPVPGGAASPGPAPRRPPRPGRGGKGGGRPPALGPVRSPKLRAPARSRRGAPRRRVELRVARFRKRTRASCGGPSAGAAGARREG

SEQ ID NO: 27944 - protein, 73 aa, Homo sapiens
LKANKDYHFKVDNDENEHQLSLRMVSLGAGAKDELHIVEAEAMNYEGSPIKVTLATLKMSVQPTVSLGGFEIT

SEQ ID NO: 27945 - protein, 26 aa, Homo sapiens
LNFGTWPLLHQGLILVITTVEGCSYR

SEQ ID NO: 27946 - protein, 35 aa, Homo sapiens [sequence omitted]

SEQ ID NO: 27947 - protein, 58 aa, Homo sapiens
LFVCLFVCLFETESRSGTRLECSGTVSAYYNLRLPDSSDSAASASRIAGITVFQNHLG

SEQ ID NO: 27948 - protein, 20 aa, Homo sapiens
LPFYAVVCKEMNGPVQTAGQ

SEQ ID NO: 27949 - protein, 69 aa, Homo sapiens
LAGTVTSAADTGTGATDSAGPRARRRRYAGAAGGVAGPGARCLCAAGRLVPGAPSVRRAARAPAAAARP

SEQ ID NO: 27950 - protein, 33 aa, Homo sapiens
VGEEALSPRHCILYLLPNPTDEDQPMFMQIPYT

SEQ ID NO: 27951 - protein, 68 aa, Homo sapiens
LSTPGPPLLLLHLFLSILKSPLKEKSSQEHPPLCLTDKEVCRCDHPARSGQYGCHQPDRAAHPGHSEW

SEQ ID NO: 27952 - protein, 1227 aa, Homo sapiens
LCGRTAPSGPTMPLSSHLLPALVLFLAGSSGWAWVPNHCRSPGQAVCNFVCDCRDCSDEAQCGYHGASPTLGAPFACDFEQDPCGWRDISTSGYSWLRDRAGAALEGPGPHSDHTLGTDLGWYMAVGTHRGKEASTAALRSPTLREAASSCKLRLWYHAASGDVAELRVELTHGAETLTLWQSTGPWGPGWQELAVTTGRIRGDFRVTFSATRNATHRGAVALDDLEFWDCGLPTPQANCPPGHHHCQNKVCVEPQQLCDGEDNCGDLSDENPLTCGRHIATDFETGLGPWNRSEGWSRNHRAGGPERPSWPRRDHSRNSAQGSFLVSVAEPGTPAILSSPEFQASGTSNCSLVFYQYLSGSEAGCLQLFLQTLGPGAPRAPVLLRRRRGELGTAWVRDRVDIQSAYPFQILLAGQTGPGGVVGLDDLILSDHCRPVSEVSTLQPLPPGPRAPAPQPLPPSSRLQDSCKQGHLACGDLCVPPEQLCDFEEQCAGGEDEQACGTTDFESPEAGGWEDASVGRLQWRRVSAQESQGSSAAAAGHFLSLQRAWGQLGAEARVLTPLLGPSGPSCELHLAYYLQSQPRGFLALVVVDNGSRELAWQALSSSAGIWKVDKVLLGARRRPFRLEFVGLVDLDGPDQQGAGVDNVTLRDCSPTVTTERDREVSCNFERDTCSWYPGHLSDTHWRWVESRGPDHDHTTGQGHFVLLDPTDPLAWGHSAHLLSRPQVPAAPTECLSFWYHLHGPQIGTLRLAMRREGEETHLWSRSGTQGNRWHEAWATLSHQPGSHAQYQLLFEGLRDGYHGTMALDDVAVRPGPCWAPNYCSFEDSDCGFSPGGQGLWRRQANASGHAAWGPPTDHTTETAQGHYMVVDTSPDALPRGQTASLTSKEHRPLAQPACLTFWYHGSLRSPGTLRVYLEERGRHQVLSLSAHGGLAWRLGSMDVQAERAWRVVFEAVAAGVAHSYVALDDLLLQDGPCPQPGSCDFESGLCGWSHLAWPGLGGYSWDWGGGATPSRYPQPPVDHTLGTEAGHFAFFETGVLGPGGRAAWLRSEPLPATPASCLRFWYHMGFPEHFYKGELKVLLHSAQGQLAVWGAGGHRRHQWLEAQVEVASAKEFQIVFEATLGGQPALGPIALDDVEYLAGQHCQQPAPSPGNTAAPGSVPAVVGSALLLLMLLVLLGLGGRRWLQKKGSCPFQSNTEATAPGFDNILFNADGVTLPASVTSDP

SEQ ID NO: 27953 - protein, 98 aa, Homo sapiens [sequence omitted]

SEQ ID NO: 27954 - protein, 23 aa, Homo sapiens
MESMTPQLWQWLMWELLLAQAQM

SEQ ID NO: 27955 - protein, 47 aa, Homo sapiens
LSPFLFLAIGRLTEIQQPRLQPACHLQSIICGYIEHCADRLSFNVMI

SEQ ID NO: 27956 - protein, 23 aa, Homo sapiens
MCLLPSTMIVRPPQPRGTVEILF

SEQ ID NO: 27957 - protein, 137 aa, Homo sapiens
LQEVPWMSLRFLMLDTASACCVVCKSTLSPGCCSICPTPPHPISLGCLIPTLSPCTHTDARASLIPDLAWGSECLHPAAETGVATHCARIHVFLFLHFLFRVYHLQEKPVTRGRQLIFTVVSSVWVSIAIYFQQEGN

SEQ ID NO: 27958 - protein, 120 aa, Homo sapiens
LTKTCKMKSEPDKADPFSFAGPEIMDCDGCTIDWKKGKNVTVKTIKKKQKRKGPGTVRTITKQVSNESFFNFFNPLKASGDGESLDKDSEFVLASDFEIGHFFRERTTGCAVLRWGGLKG

SEQ ID NO: 27959 - protein, 18 aa, Homo sapiens
MNTQRAYFVRQIHINKNA

SEQ ID NO: 27960 - protein, 23 aa, Homo sapiens
MLSHPVPLRSSSSAHAKAVPHGL

SEQ ID NO: 27961 - protein, 54 aa, Homo sapiens
LCFVSGSFLFCLLSCFLALGFPSSEVNTEIPDVSRDILKRLGGGGALVCPQRDS

SEQ ID NO: 27962 - protein, 20 aa, Homo sapiens
MWITKIQFLVLSVLIDVLYS

SEQ ID NO: 27963 - protein, 77 aa, Homo sapiens
LWHRLFATWSLFQPLPIILQMCFSRLIQLQRWQLSHCLSPSGHCPAGSWKPGMRTCKRSCLQMKMGVPMFHLLEMKR

SEQ ID NO: 27964 - protein, 26 aa, Homo sapiens
VSFLPAQFQLSRATASFVVKKQSSIH

SEQ ID NO: 27965 - protein, 21 aa, Homo sapiens
MTLSMLLLRPTIFKWDILIDE

SEQ ID NO: 27966 - protein, 134 aa, Homo sapiens
LSVKMQRVSGLLSWTLSRVLWLSGLSEPGAARQPRIMEEKALEVYDLIRTIRDPEKPNTLEELEVVSESCVEVQEINEEEYLVIIRFTPTVPHCSLATLIGLCLRVKLQRCLPFKHKLEIYISEGTHSTEEDSK

SEQ ID NO: 27967 - protein, 215 aa, Homo sapiens
VYPDSRRHVRSPRAGPACPLPRVASSQHRPQTAVRRADQRSRPSQAWSRTRRGRAPEAAARRNPREGSRAGRSAQRHGPTAQALPATSGVARRLPAGGRGHTASPRPGCEGRGPEPGRTLGGRAARPAAMEQDDPVEALTELRERRLGALELLQAAAGSGLAAYAVWALLLQPGFRRVPLRLQVRGGARPGRGARLPLRVSRSGRGRGELRPAVW

SEQ ID NO: 27968 - protein, 87 aa, Homo sapiens
VNPPHLDTLQTPVPLYDVGQIDHRDLSFHLGFLPVLASCTVTMDKGQKLPSDLHLEASFCNRCVGGATGKIHFPQDKSWGTGKKRGM

SEQ ID NO: 27969 - protein, 36 aa, Homo sapiens
MVQNLRILLLVTCCVSYKPCGLQRSLPLAKVSRASS

SEQ ID NO: 27970 - protein, 48 aa, Homo sapiens
LCPPLESVLHLLLLTLPLSQRMMMEEIMKCSHENLFFDLNCLMSPNLI

SEQ ID NO: 27971 - protein, 28 aa, Homo sapiens
LDLLSLVLMSTLLLATMEVGRVQYSQLS

SEQ ID NO: 27972 - protein, 60 aa, Homo sapiens
LSPAANLWPLAARSRRRQQQQQARRKMAGRLPACVVDCGTGYTKLGYAGNTEPQFIIPSY

SEQ ID NO: 27973 - protein, 112 aa, Homo sapiens
LVDLCCRLVPVPAASLRPHLPQLVPSRPRGGRGEPRDAREQLRHETDPVLLRLGKRLLQRHHRLRKLLQAVPRAETDQHQSSLCGGREAAVQPVRGWPAAAEGDALGRPGAV

SEQ ID NO: 27974 - protein, 148 aa, Homo sapiens
VTVLKSAGYRSCAVNKGQPIIAALYEMPVPACWISSSLSLLASHHSVSCSNIFLNFNPDHIRVQAQVYFTQESSILSSTLWNFCLLPQQRFCGREYVQAGWPCWLLQFFSQTYMHPMKTAGKPWLLRYPSLLEQQILSTYQMTPQSPS

SEQ ID NO: 27975 - protein, 58 aa, Homo sapiens
VCDLPASQGASHAVRSHPLGGDQGVPVFNIVILLAGGFLSKSLVFSVLFAVTLRSFVP

SEQ ID NO: 27976 - protein, 62 aa, Homo sapiens
LAPAIGLSAGQSQLLVLLLLLLTRVQPGTDVLPQSTSAMCPSSQTTPWRGGSPCPPSRWSSL

SEQ ID NO: 27977 - protein, 97 aa, Homo sapiens
LCICCQFLCLWMLVIFRGAKRGWCVFFHSSTGGPGMVTDAERSIVSPSESCGPINVKTEPMEDSGGYQDAFRIKYRPSVVAHACNPSNLGGRGRRIT

SEQ ID NO: 27978 - protein, 108 aa, Homo sapiens [sequence omitted]

SEQ ID NO: 27979 - protein, 98 aa, Homo sapiens
VVCSSLKTFFFLILYIFPPEAVSSLHPAPHSPSSVRPAGRRARRQRRGAGSAERPMSGAGEALAPGPVGPQRVAEAGGGQLGSTAQGLFSRSRTAAAL

SEQ ID NO: 27980 - protein, 160 aa, Homo sapiens [sequence omitted]

SEQ ID NO: 27981 - protein, 122 aa, Homo sapiens
VATTVRGDGCDACADLDPKLPPARIWTRIHPLPIFRCRWRESLRSPGQPACTEEMPPQLNAVFHDRLCSSHTRMAGIQISKNRGLGETPPPMSSQLIIDLCHLPIFSLPVCVSRSINKSLPI

SEQ ID NO: 27982 - protein, 68 aa, Homo sapiens
LSLQLRCPGTDVARGKCGTPRSVLGPDLCPCFHSPHSCPKPLTPPRAVVCGLWDELRRGPFLSSGGFK

SEQ ID NO: 27983 - protein, 48 aa, Homo sapiens
MLKPSLPFTSLLFLQLPLLGVGLNTTILTPNGNEDTTAGGKSGTGGGW

SEQ ID NO: 27984 - protein, 47 aa, Homo sapiens
MLKPSLPFTSLLFLQLPLLGVGLNTTILTPNGNEDTTAGGKSGTGGG

SEQ ID NO: 27985 - protein, 184 aa, Homo sapiens
LEGERVTLTDITVVCTLLWLYKQVLEPSFCQAFPNTNRWFLTCINQPQFCTVLGKAKLCEKMAQSDAKKFVESQPKKDTPRKEKRSREEKQKPQAEQEEKKAAAPTPEEEMDECEQALAAEPKAKDPFAHLPKSTFVLDELKLKYSNETHSLWHCHISGSTLIRTAGPCGTQSVASLKNSLRPS

SEQ ID NO: 27986 - protein, 41 aa, Homo sapiens
VSATKSVLLSLLFACRNVKDCSSWRYKLKPAPVQNCYKWSL

SEQ ID NO: 27987 - protein, 13 aa, Homo sapiens
LPPPPPLPPHLAM

SEQ ID NO: 27988 - protein, 67 aa, Homo sapiens
LRETWFPVPERMRASSRRSPSRTTSRLALRRLIHPISSSSRFWARDPLAKSSWCGKSPGLTVGTCML

SEQ ID NO: 27989 - protein, 24 aa, Homo sapiens
LKLPLGHLILIPLLMILIKIQISP

SEQ ID NO: 27990 - protein, 16 aa, Homo sapiens
MVYVIFLLWFFPDLHS

SEQ ID NO: 27991 - protein, 58 aa, Homo sapiens
MNSRLVTLQDFTERAVPIIQSKCFLCPDSTELQPRYLHGSSSFHLKYDSIYFESLLPN

SEQ ID NO: 27992 - protein, 82 aa, Homo sapiens
LLISAKRLKDAPTADGTFSPPAGKDVQRSVARASPPAQSRPHRIARRWHARRPAPTAQRQPRPALARIPASLPLDSCSVGGA

SEQ ID NO: 27993 - protein, 7 aa, Homo sapiens
LDFSILH

SEQ ID NO: 27994 - protein, 20 aa, Homo sapiens
LSLPVGLLAAQLHRRDGRRG

SEQ ID NO: 27995 - protein, 233 aa, Homo sapiens [sequence omitted]

SEQ ID NO: 27996 - protein, 35 aa, Homo sapiens
LRRQPPRSPRGSPAPFTGGRLSRWKRHREETQRRP

SEQ ID NO: 27997 - protein, 92 aa, Homo sapiens
LEVNKYGSCLGEKKNVLQPVSKLQTTECINETLYMDTRAFKTALPACRAFAVLQRFTGVIALKPRNNFTRYSPLVECKWKPEEKGTLDTVFI

SEQ ID NO: 27998 - protein, 68 aa, Homo sapiens
LGLHCVLRVSTRRWNHWWDKCRSGWWPTWRRSWLTGSTAVGAGRSSQLYTGTGPWRRRGVCGRGTGHQ

SEQ ID NO: 27999 - protein, 52 aa, Homo sapiens
LDPGSRPRCVSAAAAGARGQRGSRSHCYHMFYQRLGHQERESRCPLPRGLPS

SEQ ID NO: 28000 - protein, 62 aa, Homo sapiens
VDAVPLLVVRRRRRRRRRHSAQRALAAAAAAAASEVPPPSQPPRWCSHPRSLCSSSLRSHHG

SEQ ID NO: 28001 - protein, 22 aa, Homo sapiens
MQQSGAWPRKRVGRVCADPDSG

SEQ ID NO: 28002 - protein, 45 aa, Homo sapiens
LFSFVCWVCITLSDLSFIHICSLGYPRTWKSQHHGSINESLPRGR

SEQ ID NO: 28003 - protein, 36 aa, Homo sapiens
LGGRMCRITEGKVSLTVLQSGDDGLKIYALHAMCSG

SEQ ID NO: 28004 - protein, 268 aa, Homo sapiens
VLLSFPRLTLFCNFLFMSLEATKWWEIRDSNIWWPCDVSKLLDFSQFPFPIKWVVLGIRGSNSAGNRGRNRQLRPRTSPKPRAATGTTVRGASVKRTGGPAPAQPSPPGPLPPTPHGPHARAETGASPGSPVRQPLPGPAPQREAAWGRRRVERAAEDKEEVAVENKKELSAVCPDAGRRWGQARPDLHAIPAGVPACLREGKDPGRLLPKVRLLPKVRLLPRGPHKARQTLQPDPDAPPSRMHMRGTLPETHLPERPGSTRANWRAD

SEQ ID NO: 28005 - protein, 71 aa, Homo sapiens
VRREGGAESSAPPPPLARRPYRACALPPGLHLGIGRKRERETGTRPGLWCGERLRRRRGEAERARGPSAAP

SEQ ID NO: 28006 - protein, 263 aa, Homo sapiens
LSGPWCHVALHPDLLAPAAPVCEREAAEVGRVSSCADGGHRGRHRAHADADAVAEPGGAGEGRVRQVLDLCVCWHVHRGQLRRPPRGLQDCLHVPLPALPHPLPGLLQPVAEAAQGLLVARGGLHHAGPHRRLHLPVPGLPCLLAQPHWLHRRAAGGPGPGAVQRVRALLQHPGARLLPPGLHPAAALLPQALHAAHRHGARVPAWHAPPALGSQAGCSEWDPTAAGGAAGASAAAAGGGGGGGGLQGRGAGRGHSPPGHAGA

SEQ ID NO: 28007 - protein, 112 aa, Homo sapiens
LDIHLRRMRLRILLYTGYKVFSSVPQQNGKTMFNFGSPMWLFVRSGLLKLDLARYSLPCWRFIPTNQLCGLWQPNGKWKIDCLQKAQGNYFFAHCAFIQSAQNFIKNTLGWS

SEQ ID NO: 28008 - protein, 70 aa, Homo sapiens
VPGHSRVTWPAAPHDVLAAGRHGDVRATCRVARLPQSPVWSQCCHGPGTHAQELPRGPREMENPLLACCC

SEQ ID NO: 28009 - protein, 58 aa, Homo sapiens
VEPGAGGGCPGGGLRRSGEAPAPPRACPGGERSGPQPGRVGAPPGRSVERRRRRRQQK

SEQ ID NO: 28010 - protein, 57 aa, Homo sapiens
VEPGAGGGCPGGGLRRSGEAPAPPRACPGGERSGPQPGRVGAPPGRSVERRRRRRQK

SEQ ID NO: 28011 - protein, 45 aa, Homo sapiens
LFFYPEPQCSCQCGYVGLMKKVSMKLTFCFTMKVSKSSQKYGTEY

SEQ ID NO: 28012 - protein, 148 aa, Homo sapiens
VSDLFQEQQKMIEYQIPVSFKDVVVGFTQEEWHRLSPAQRALYRDVMLETYSNLVSVGYEGTKPDVILRLEQEEAPWIGEAACPGCHCWEDIWRVNIQRKRRQDMLLRPGAAISKKTLPKEKSCEYNKFGKISLLSTDLFSSIQSPTW

SEQ ID NO: 28013 - protein, 419 aa, Homo sapiens
MLRLELDIMKHQSQLREKKYLEEIESVEKKNDNLLKALQLNELTMDDDTAVLVIDNGSGMCKAGFAGDDAPQAVFPSIVGRPRHQGMMEGMHQKESYVGKEAQSKRGMLTLKYPMEHGIITNWDDMEKIWHHTFYNELRVAPEEHPILLTEAPLNPKANREKMTQIMFETFNTPAMYVAIQAVLSLYTSGRTTGIVMDSGDGFTHTVPIYEGNALPHATLRLDLAGRELTDYLMKILTERGYRFTTTAEQEIVRDIKEKLCYVALDSEQEMAMAASSSSVEKSYELPDGQVITIGNERFRCPEALFQPCFLGMESCGIHKTTFNSIVKSDVDIRKDLYTNTVLSGGTTMYPGIAHRMQKEITALAPSIMKIKIIAPPKRKYSVWVGGSILASLSTFQQMWISKQEYDESGPSIVHRKCF

SEQ ID NO: 28014 - protein, 142 aa, Homo sapiens
LFADKFPKTAENFCALNTGEKGFGYKGCCFHRIIPGFMCHGGDFTHHNGTGGKSIYGEKVDDDNFILKHTGPGILSMANAGPNTNGSQFFICTAKSEWLDSKHVVIGKVKEGMNIVEAMEHFGSRNGKTSKKVTIPDFGQLE

SEQ ID NO: 28015 - protein, 45 aa, Homo sapiens
LHRWWSVTWWARLFSSWSARRLPWVLDAGCTTCGSPLSIYSWSST

SEQ ID NO: 28016 - protein, 78 aa, Homo sapiens
MAPGVARGPTPYWRLRLGGAALLLLLIPVAAAQEPPGAAGFLNTRSTCLEEGLLSAGAQEEDLHLLVLRTQTKPVKSA

SEQ ID NO: 28017 - protein, 237 aa, Homo sapiens [sequence omitted]

SEQ ID NO: 28018 - protein, 39 aa, Homo sapiens
MDLLAPWAWLMIVVLYSQKPGTLTIHLRNSETASLSYVP

SEQ ID NO: 28019 - protein, 29 aa, Homo sapiens
LSLTVFTVQVILTTALQRIGSEVWKQEEN

SEQ ID NO: 28020 - protein, 16 aa, Homo sapiens
LHRSNSFYRILLLVCF

SEQ ID NO: 28021 - protein, 58 aa, Homo sapiens
LLRRPRLKHEDRLSSGIKDQPGDFNCTSNVLPRLWLPFDAVPGRRRSGDSLQNQYTGT

SEQ ID NO: 28022 - protein, 151 aa, Homo sapiens
LLALPWAAWAACWNGRTSPLKSCGRHLPGLGAPASLMGSSGRAWASVSSSATCTSPRRTARAPRTPSGPLGTSLPTMPPSTTGNILARVTSARPRCQNGVALTSAAFAPQCSSLRRATGKASYPCKVWRPTKARSCGAAMAACTRWPATRP

SEQ ID NO: 28023 - protein, 17 aa, Homo sapiens
LLQVAALYLSLCLLEAL

SEQ ID NO: 28024 - protein, 26 aa, Homo sapiens
LSFGSWLVVLFFFLQNFTPSPLSPRC

SEQ ID NO: 28025 - protein, 86 aa, Homo sapiens
LIFFSYWSLRLWLLQGHHELGLLVSSFPCLVSFSQFSQKPCPGPCSSPSPQPLTPATSGRMGSSSHSPRSQSPPWMGLQPELSMRP

SEQ ID NO: 28026 - protein, 27 aa, Homo sapiens
MKTEAFCFIPFLLLLSVRNLDNGLCAM

SEQ ID NO: 28027 - protein, 164 aa, Homo sapiens
LPRAPGRLCVAPSRPRPWTRPREPGLAEAAGAGVALLGAEGPAVGGGIPVRGVSRWAEPGGAARIRSGEPGGTWRRHPPAAPTRAAVACFPREPGRARGEARAQLGLPGSRSSGATVLCPWSRGEGARARVFPAGRPALSPSPVRTAAFCFQAKENKSKTQKAA

SEQ ID NO: 28028 - protein, 84 aa, Homo sapiens
LKGHLLLVRKEIIARRASIRRVSITRSNRSGNTIKKEKKGISGFPGRGGASLLGSCSSRRFLNTAFYALYNLASHTFTLTLYDF

SEQ ID NO: 28029 - protein, 114 aa, Homo sapiens
LTSSPPKTVSTWTTTRKSRTTWMPASRTQTTFTPHWSQMKTTPSLSPGRRKGKAQTTLPTAQQQGSAHRCQDRTGLCVRVHGWLPSRPGWRLLQLSCPSRRSRKARKKRVPRGS

SEQ ID NO: 28030 - protein, 114 aa, Homo sapiens
LTSRLPRTVSTWTTTRKSRTTWMPASRTQTTFTPHWSQMKTTPSLSPGRRKGKAQTTLPTAQQQGSAHRCQDRTGLCVRVHGWLPSRPGWRLLQLSCPSRRSRKARKKRVPRGS

SEQ ID NO: 28031 - protein, 26 aa, Homo sapiens
VWAPCKSLSVHLKTCACQISQLWRLF

SEQ ID NO: 28032 - protein, 232 aa, Homo sapiens
MGSAPWAPVLLLALGLRGLQAGGEWRRPPAHSPVPAPPLRFASPHSPQGPGPRLPGALLPAASGPLQLRALRQQDLPSALPGVGQVLGPGRGAHLLLHWERGRRVGLRQQLGLRRGAGGRAGGSTGLRGAPLLREVAAVRCAVHAARAHGAADGGAGPGRLRRAAPRATTRPRGPGCPRHRLRWKLWGDAQCLPEDEVSPPGGGGAGGQRARSSCGRPRRLQPVLPGRHGGL

SEQ ID NO: 28033 - protein, 114 aa, Homo sapiens
MVGAAGESVRGCQCLHSELLNVHPMGAAVCIFGCLPGACICTICLWLWHTRDKDHFERLYHQGLLGEVDPANQDSHAGAGSVLRSEPWEGRAASARGLLLWQLLQQPFLQVQQE

SEQ ID NO: 28034 - protein, 105 aa, Homo sapiens
LPLLLTATTSRSQGLVETTIFEARLVAVTHGPLRRRCKSAQLPTCCALTQCEGNQDFVQPSATASRQHQDGSQRSADQLSYLQCPSCPVRRGCPPGEVRASAGAA

SEQ ID NO: 28035 - protein, 80 aa, Homo sapiens
VPCLRARLHHARKRESGRRLAQGGPVGCTQAPWPECGTRARGGAAAADRGGAASETARRGTADELGPGRGRLWLPTETGE

SEQ ID NO: 28036 - protein, 62 aa, Homo sapiens
LHQDLYTGRMAVAQAAEPEQKLSCHSVSLGTPIITGRWCLDKQEILNTLSLEIFRTPRQHQS

SEQ ID NO: 28037 - protein, 52 aa, Homo sapiens
LVTISFFNLISFFNFGVQAVTFHLSKCNTLISSNRDTPLSDKFAKCCLHFLY

SEQ ID NO: 28038 - protein, 59 aa, Homo sapiens
LAEAAATAAGGGGSGSGASGSIEPSPLGTRPVPRRGQCPWILPLLRRRWGPVRRQRPPL

SEQ ID NO: 28039 - protein, 106 aa, Homo sapiens [sequence omitted]

SEQ ID NO: 28040 - protein, 144 aa, Homo sapiens [sequence omitted]

SEQ ID NO: 28041 - protein, 17 aa, Homo sapiens
VQFLKSPVVYMMMIMLL

SEQ ID NO: 28042 - protein, 87 aa, Homo sapiens
LSGVLSRLQLGSGAPLLTWVQETAGVAGGAPRRRTPVTMWRLLARASAPLLRVPLSDSWALLPASAGVKTLLPVPSFEGESLSFSCS

SEQ ID NO: 28043 - protein, 319 aa, Homo sapiens
VMPREDRVTWKPNYFLKIIQLLDDYLKCFIVGADNVNSKQMQQIRMSLCGKAVVLMGKNAMTRKAIRGHLENSPALEKLLPRIWENVGFVFTKEDLTEIRDLLLANKVPAATRAGAITPCEVTVPAQNTGLDPEKTSFFQALGIITKISRGAIEILSDAQLIKTGDKVGASEATLLTMLNISPFSSGLVIQQVFDNGSIYNPEVLDITEETLYSRFLEGVRNVAGVCPQIHYPTVASVPHSIIDGYKRVLALSVETDDNFLLAEKVKAFLADPSAFVAAAPVAAATTAAPAAAAAAPAKDEAKEESEGGVRRGYGIGSL

SEQ ID NO: 28044 - protein, 76 aa, Homo sapiens
MTVCLYLTVLLTNNLLGSKGQHLLSKAQEEFEVNGFAIVTINGCYIKFSVIFVCDSTVVWVNVHRHNWLNPKSLIS

SEQ ID NO: 28045 - protein, 14 aa, Homo sapiens
VTRNIPNKQQSSRN

SEQ ID NO: 28046 - protein, 37 aa, Homo sapiens
LLIFSSVLATSIYYICFSTRYNPETRLPQVSRESCQH

SEQ ID NO: 28047 - protein, 11 aa, Homo sapiens
MVTILYSITLM

SEQ ID NO: 28048 - protein, 42 aa, Homo sapiens
LLIMAMLKSSDLGVNLWLHIQALPFTSFAFHPTPLCLGFLFC

SEQ ID NO: 28049 - protein, 26 aa, Homo sapiens
MSFQLRSIFLILCIKFLFHLLRDHGF

SEQ ID NO: 28050 - protein, 78 aa, Homo sapiens
LCRLAAALFGFRGLLGLCNNFSYVVMLSAAHDILSHKRTSGNQSHPPGSRQWDLCCWKLRPGCLFSFCGDQPVWCGLR

SEQ ID NO: 28051 - protein, 45 aa, Homo sapiens
LEEGTAAWVLMLLLSSLSPPTSSISSLPAAPLPPPGELKIVLAAT

SEQ ID NO: 28052 - protein, 99 aa, Homo sapiens
LGLGMWYRLLAAAGSRAVARPLALLWRCGGPGGGRTAKTSARALGKARQKKLGKLIWPPVPVLPGDPRSEADSAGKTDVIFLVAVFKTTQRYLSFIHHH

SEQ ID NO: 28053 - protein, 111 aa, Homo sapiens
VRGSGVVVELRPRALGGFRIPATPNSEGRLSPGAGTRALAPAKSAEGEGHGLHHLHSHPAPAVRLPGRLRPLPAAAVGAREGLPAECCGGDHRRHLRAGQRMCKSLLCCGC

SEQ ID NO: 28054 - protein, 39 aa, Homo sapiens
VSLWGAGAVLRCFLPMGFWCRMSENQEQEVRVWSAENRR

SEQ ID NO: 28055 - protein, 46 aa, Homo sapiens
LYIYIYIFLNFAFDLKCHEKICILQGGPSHLLDLGTLGYVPAALLQ

SEQ ID NO: 28056 - protein, 102 aa, Homo sapiens
LLPRPASRRRPGGAERAPRFTALSARTSGHGQGVTSGGGQTRRFLDASYAWRESCLSWHHHTAHDIFAGKPVDPLPGSTRGQDSAVCSQGQFLIVRPEAEDQ

SEQ ID NO: 28057 - protein, 19 aa, Homo sapiens
LPGTLHLKSLCLCCVLLSA

SEQ ID NO: 28058 - protein, 103 aa, Homo sapiens
VSDLFQEQQKMIEYQIPVSFKDVVVGFTQEEWHRLSPAQRALYRDVMLETYSNLVSVGYEGTKPDVILRLEQEEAPWIGEAACPGCHCWGISKLWPTDWPPAL

SEQ ID NO: 28059 - protein, 52 aa, Homo sapiens
MGGSGFENLVFEVFFLLLSSAFPGPGHYSGHGSSAVRVSHVSGMSDIPRCGH

SEQ ID NO: 28060 - protein, 38 aa, Homo sapiens
LSVVCVLISLISGMFFCLMNAILNAVLERGVGVRVYSI

SEQ ID NO: 28061 - protein, 67 aa, Homo sapiens
LSPAANLWPLAARSRRRQQQQQARRKMAGRLPACVVDCGTGYTKLGYAGNTEPQFIIPSLANPPWYS

SEQ ID NO: 28062 - protein, 129 aa, Homo sapiens
LGRLLSLPTLPGPNWISAPGSSNFSKCEILSSVLEFSSAQTISATDRICENTSMSRLGIILRHHLASPASHFKWVTRMELRCCLQEKLTTGFYFSNLIGGYAGTVSRLSIFNPVSKNFFTTITFRFLPL

SEQ ID NO: 28063 - protein, 40 aa, Homo sapiens
MFGFIRNLFSIKETDVRVSTFGVAKFLRVSGGGGEQWLPS

SEQ ID NO: 28064 - protein, 103 aa, Homo sapiens
MRRREAAWWWGTSRSQPSTVGVTWSVKGRVSSPVCRTLETQPQSSPFSCMDLTYVSLLLQEFGFPRSKVLKLTRKIDNVETSWALGAIFHYIDSLNRQKSPAS

SEQ ID NO: 28065 - protein, 58 aa, Homo sapiens
LSVAAPGTRTGAGSAVRLWLFRVRSAVPVSQESALVIVLCCGRVESKLFHCQCPETGV

SEQ ID NO: 28066 - protein, 33 aa, Homo sapiens
LQQPGGKAQDGVLVGDPNPHERPFGPGMKVTGR

SEQ ID NO: 28067 - protein, 11 aa, Homo sapiens
LRPPTPPGLEP

SEQ ID NO: 28068 - protein, 42 aa, Homo sapiens
LVLLMTLFQVTYSLHLASSSVFLIRLKIHKAYINESGGSRSG

SEQ ID NO: 28069 - protein, 26 aa, Homo sapiens
LVLLMTLFQVTYSLHLASSSGGSRSG

SEQ ID NO: 28070 - protein, 17 aa, Homo sapiens
LYLSNRCGKIKREYKSR

SEQ ID NO: 28071 - protein, 77 aa, Homo sapiens
LLVVEVKDSLERLAVEVVFILQKAMYEKQAHIYMKSLCPQMVLMLRFIQWVQIMPMLKLENLQHLMARWNETVKEKK

SEQ ID NO: 28072 - protein, 105 aa, Homo sapiens
LVGTVLREAIICKNIPQLVSGWVKSIIVGRIAYGDQYRAADFVVPGPGKVEITYTLSDRTQKVTYLVHNLEEGGGVAIGMYNQDKSIEDFAHSSFQMALRIGLCS

SEQ ID NO: 28073 - protein, 48 aa, Homo sapiens
LAIGACSLVFWELASSCLAMRKNCSPILYSISLKFMYKLIKKQQMIKV

SEQ ID NO: 28074 - protein, 340 aa, Homo sapiens
MDTKQLIGDAAKHQVAMNPTNTVFDAKRLIGRRFDDAVVQSDMKHWPFMVVNDADRPQVQVEYKGETKSFYPEEVSSIVLTKMKEIAEAYLGKTVTSAVVTVPAYFNDSQFQVTKDAGTIAGLNVLRIINEPTVAAIVYKSSDKKVGAQRNVLIFDLGGGTFGVSILTIEDGIFEVKSTARDNHLGGEDFDNRMVNHFIAELKRKHKKDISESKRAVRCLRTACEHAKRTLSSSTQVSIEIDSLYVGIDFYTSITCAQFEELNADLFCGTLDPVEKALRDAKPDKSQIHDIVLVGGSISIPKIQKLLQDFFNGKELNKSISHDEAVAYGCPGSHPVWRQV

SEQ ID NO: 28075 - protein, 152 aa, Homo sapiens
MAVQAAILSGDKSENVQDLLLLDVTPLSLGIETASGVMTILINCNTTIPTKQTQTFITYSDNQPGVLIQVYEGERAMSKDNNLLGKFEFTGIPPEPQGVPQIEVTFDIDANGILSVSAVDKSTGKENKITITNNKGHLSKEDIERMVQEAEN

SEQ ID NO: 28076 - protein, 182 aa, Homo sapiens [sequence omitted]

SEQ ID NO: 28077 - protein, 106 aa, Homo sapiens
MEVTGDEYNVENIDGQPGAFTCYLDAGLARTITGNKVFGTLKGTVDRSLSIPHSTKRFPGYDSESNAEVHQKRIMGQNVADYMRYLMEQDEDAYKKQFSQYIKKTA

SEQ ID NO: 28078 - protein, 16 aa, Homo sapiens
VWFPIRKLFFLLGFHL

SEQ ID NO: 28079 - protein, 138 aa, Homo sapiens
MGHSETGDAVDRLKEVLEYNAIGGKYHQDLMVLVAFWELVEPRKQDADSLQQALTVGWCVELLQAFFLVADDIMDSSVSRRGQIWWYQKPGMGLDAINDAMLLEVCIYHLLKLYCPEQPYFLDLIELFLQSSYQTEIG

SEQ ID NO: 28080 - protein, 20 aa, Homo sapiens
MFWSCIMCHCLLALSSLLLL

SEQ ID NO: 28081 - protein, 189 aa, Homo sapiens
LPPATPGGQVRGAWPLQLCRLGEVAEICTLCKSKGILPTVYHGMYNATTRQVEMELFPCLGHFGLRFYAYNPLAGGLLTGKYKYEDKGRKQSGGHFFGNSWAETHRNRFWKEHHFEAISLMQKATQAVYGVSAPSMTLATHPLVDVPPLTAAGCPQRRGHPGHVQPGEAGAELGSDGGRAHGPGCHGHF

SEQ ID NO: 28082 - protein, 233 aa, Homo sapiens
MKQSDKTDQFLVTDSGRTVILYKVSDQKPLGSWSVKQGQIVTCPAVCNFQTGEYIVVHNNKILRIWNNEDVNLDKVFKATLSVEVYRKLSVQGSEPLVLFKEGVRGLEASLAGPQQKIEAVISDEVIKWTKFFIVFRHPVLIFITEKHGNHFAYVQMFNSRILTKYTLLVGQDKNYFIESFTALVDQKFISLTSLSSDGCIYETLMPIRPTDPEKNQSLVRSLLLKAVVSGNT

SEQ ID NO: 28083 - protein, 41 aa, Homo sapiens
LCFSLQALLRCFTWLRLCQISMFLSLKCLNTRSSHLGAHCR

SEQ ID NO: 28084 - protein, 44 aa, Homo sapiens
LWQSMVFCMFLEVDLPAMIFWLQVPWTQLKFITLIQIHGQKLVT

SEQ ID NO: 28085 - protein, 32 aa, Homo sapiens
LQGGTLRLLLICKDCLCSEQAEVTGRDALLEK

SEQ ID NO: 28086 - protein, 14 aa, Homo sapiens
MLYFYTFLCICVCV

SEQ ID NO: 28087 - protein, 44 aa, Homo sapiens
VNATPLPLTPLALCFTLMWQTCGSWCECQKLPPWFGHRVHRTVL

SEQ ID NO: 28088 - protein, 64 aa, Homo sapiens
LPASVLFRLSQISSLLLITVPDCDIVQVLNCVPFVPEERDVSYSLCWIGPGIFEMLRFLDTTVS

SEQ ID NO: 28089 - protein, 34 aa, Homo sapiens
MAGPAALSAAAAAALAAALLLLRREDPGPGAGPR

SEQ ID NO: 28090 - protein, 127 aa, Homo sapiens
VFESIGKFGLVLAVAGGVVNSALYNVDAGHRAAIFDQFHGVQDIVVGEGTHFLIPWVQKPIIFAVLDHVMLQSSLVAKIYRLSISHGGSSSGLSLANFLISSPASERTMMSVCCRPSLPNQVSGGTL

SEQ ID NO: 28091 - protein, 31 aa, Homo sapiens
LLGRRAPPKRTSIFRIPPGNADSLLGALMLL

SEQ ID NO: 28092 - protein, 113 aa, Homo sapiens
MWLFFGITGLLTAALSGHPSPAPPDQLNTSSAESELWEPVAGSQGPLLSFPEFAQSVHSRSPCKCSDSHYRIFCDSENREQGISGANAPHPLHRSGNSPPWLPHLHSLHPLEN

SEQ ID NO: 28093 - protein, 206 aa, Homo sapiens
LALQTHSNSEGPVMTPLIWLLMSLIPCPEPKVVKPQKEPLARLLHIGRSQEPPICHSQRTANMSMTLTSLLHEKSKQNPILETRSSLIPKSRQQQQNVEDAMKEMQKPLARYIDDEDLDRMLREQEREGDPMANFIKKNKAKENKNKKVRPRYSGPAPPPNRFNIWPGYRWDGVDRSNGFEQKRFARLASKKAVEELAYKWSVEDM

SEQ ID NO: 28094 - protein, 142 aa, Homo sapiens
LGLVCPWLFSQQCSPHILSVAAFSLSSFLYSLSAPMKQRPWQSISLPVAPLLLGGLLKQQTLPQDSLPAVGPEQLYFCREVPFTASVACQTEGYCRSLSCLPSKGDGRDWKKLWQLFSLFTSRLPGKAGPALPRALCVFPSL

SEQ ID NO: 28095 - protein, 74 aa, Homo sapiens
VELPANTSCDLRRLCCPCGQQNWERGAGLPHCRERTERREDQYCFLLPGGCPRLCHPHPRPPQCPEAVWRASGQ

SEQ ID NO: 28096 - protein, 20 aa, Homo sapiens
LVFLLIYSVVPTQQYMISWL

SEQ ID NO: 28097 - protein, 57 aa, Homo sapiens
VHPSPRVRCLGPLALECKCWVNKNRLAQAVSTLHAAFSDRAACPHSVFTSRSRSGSR

SEQ ID NO: 28098 - protein, 11 aa, Homo sapiens
MDKFEATSQCC

SEQ ID NO: 28099 - protein, 73 aa, Homo sapiens
LVLQVQQPSCRPPPRLARPWQAGTPKGSVRGLPMICRQLGGCLAAQKPPELGAAGGGRGPGGSRASRLAVGRA

SEQ ID NO: 28100 - protein, 125 aa, Homo sapiens
LVTFEEPPYAIKAGWKENHATFMNELKNLQAEGLTTLGQSLRTAFDLLNLNRLVTGIDNYGQGRNPFFLEPAIIITITDGSKLTTTSGVQDEMGSQIYQGLLDLSLGIAVTNSYMSDQILKLGFL

SEQ ID NO: 28101 - protein, 17 aa, Homo sapiens
LAPHMLRRMSVSLNLRW

SEQ ID NO: 28102 - protein, 18 aa, Homo sapiens
LRDIIITVILKCATSLLL

SEQ ID NO: 28103 - protein, 68 aa, Homo sapiens
LTLKNNEILILLVVWSIGKGSLWCIDPEYRQNLIQALKKTPYHPHPHVFNTPPTCPQAYQRREHKVIF

SEQ ID NO: 28104 - protein, 15 aa, Homo sapiens
LTLKGNLFTLLTLLM

SEQ ID NO: 28105 - protein, 22 aa, Homo sapiens
LLHLIYWAISLSCLDHCRLPER

SEQ ID NO: 28106 - protein, 269 aa, Homo sapiens
MVPMCSPPPPTLATTLAHLPTGSRRINDRPEVRMAIPGPRPGVSVPTSFWPGRSVIPVSWTLLGSSLLCSSGPGAAGWEGAAKKPELAAYPEIRGPPTPKSRVQLELAPPCSEAGRSLGDWCLCTDGGLWGSFLPALTSLFVPGLGLGQPWGIRRGHLGPAVYSEGGQPPPLHSASTKSAPESSRLLLFICAGPGRVKGQRDGHKEPAGGRSEDVLSRETSRESLAGLPQPRAPPGLRVPRPELGRCSESHCRPVCHAEVQLATRVPGT

SEQ ID NO: 28107 - protein, 18 aa, Homo sapiens
LRISILLLMVVLRKPRSS

SEQ ID NO: 28108 - protein, 34 aa, Homo sapiens
LLFFLALLTTTSPQSISITVTPGSGSTPSIMSGC

SEQ ID NO: 28109 - protein, 103 aa, Homo sapiens
LLPGCLCLLFLLWDPAGKDNKRKVWGRSQAGDVHLCLNFGLHSMCDQCCVCQDLVDRTRSWLYAACSISYLGAMVSSNSALQFVNYPTQVKPQGGMMVGSDII

SEQ ID NO: 28110 - protein, 28 aa, Homo sapiens
LPGVYSVSLAFSLILMDIVWARGRDGWL

SEQ ID NO: 28111 - protein, 87 aa, Homo sapiens
LMCLRPARQPRHHLLASLGLILCGNPLWGGTFAAGAGGDTFILTLKKKNYLKNICQEKFSSSRLDCTEEGLRRERALVIFICSAPSL

SEQ ID NO: 28112 - protein, 64 aa, Homo sapiens
LLFAGVRFPTPFRQSPRAPSALRPGGGDSPRSACACQATRDYVSQRAERPAPRLRSGDPVAWPQ

SEQ ID NO: 28113 - protein, 8 aa, Homo sapiens
MRLSLRPC

SEQ ID NO: 28114 - protein, 62 aa, Homo sapiens
MSSVSEDVKQLGLSYLASGRQNRATLARTVSQGLRKFSTQFITLWAGRFIPRHSWRAAPRSP

SEQ ID NO: 28115 - protein, 30 aa, Homo sapiens
LELPDPDALWANMAAPSNKTELAWSPRLAA

SEQ ID NO: 28116 - protein, 29 aa, Homo sapiens
MASGIWRRLCLSLQPELQVSLSLLCVLCS

SEQ ID NO: 28117 - protein, 18 aa, Homo sapiens
LVSICSLCYWLLIIETVS

SEQ ID NO: 28118 - protein, 40 aa, Homo sapiens
MRKTNIKMKCLIQGHTMSGMDLQISLLENKLRAPTDCTLW

SEQ ID NO: 28119 - protein, 46 aa, Homo sapiens
LDKQWLMDVGWIVLVITTSFSEMSMRCIDHCRVQNFLRRLLPTVTQ

SEQ ID NO: 28120 - protein, 59 aa, Homo sapiens
LLPVGAPSVSFVLIVTLEFCTSRTYVSICDGLVVSSHIKIYCKNTEKNGSGNADTELWA

SEQ ID NO: 28121 - protein, 56 aa, Homo sapiens
LRLGLGLVASGVWAWFYPAPLRSCCPFLNVTTRLGSLPSQQQVCTFQACNRPHSEA

SEQ ID NO: 28122 - protein, 67 aa, Homo sapiens
LSMANAGPNTNGSQFFICTAKTEWLDGKHVVCGKAKEGKNIVEAMERCGSRNGKTSKKITIADCEQL

SEQ ID NO: 28123 - protein, 43 aa, Homo sapiens
VTSACLSAIALTLYSAPCEPPRLNQTQEAAPPTSLAEAEALEQ

SEQ ID NO: 28124 - protein, 47 aa, Homo sapiens [sequence omitted]

SEQ ID NO: 28125 - protein, 26 aa, Homo sapiens
LDDLTGPQASLQRSEKKMDPFHEKFL

SEQ ID NO: 28126 - protein, 104 aa, Homo sapiens [sequence omitted]

SEQ ID NO: 28127 - protein, 32 aa, Homo sapiens
LYLTTFALLAMTTCPQLGAQPSVTLQWRFFLL

SEQ ID NO: 28128 - protein, 79 aa, Homo sapiens
LSIPWPLWLPLGYVVCVREWCAGAVPYAPCVLCVSRHGSLRPMCAVCVLPVYVASSDADKVGNNPCQSGLGPDFVLFLT

SEQ ID NO: 28129 - protein, 75 aa, Homo sapiens
LKDCTPVTFCLIPVLGAIMFASPHFRRERFEPGCSDGPGSPGTCPTQATAAPVICCLRIPRTVGTGLAKTRNRTP

SEQ ID NO: 28130 - protein, 69 aa, Homo sapiens
VSTPWSLAREAGPPRPPGALCRDVPQAQSGIWDVCACCGAESLQHGLTLSPRLECIGMNTSHCSLNLPG

SEQ ID NO: 28131 - protein, 62 aa, Homo sapiens
LEPLWLLSAEWKRVLLFVSLAMALQLSREQGITLRGSAEIVAEFFLHPEKSLRKLSRMKSVQ

SEQ ID NO: 28132 - protein, 30 aa, Homo sapiens
MPDLPLLRWPLPRPHRGHDRGGFPRTSGGD

SEQ ID NO: 28133 - protein, 12 aa, Homo sapiens
LHDCGSESYGEK

SEQ ID NO: 28134 - protein, 12 aa, Homo sapiens
LVLLMTLFQFFL

SEQ ID NO: 28135 - protein, 61 aa, Homo sapiens
MPGVARLPLLLGLLLLPRPGRPLDLADYTYDLAEEDDSEPLNYKDPCKLPFLGTLPWTKRT

SEQ ID NO: 28136 - protein, 20 aa, Homo sapiens
MDPFPFLLVLSFLEIFGHIQ

SEQ ID NO: 28137 - protein, 41 aa, Homo sapiens
LICFHLQVLLLLNLRILAAQQLRDPSDLWKQKEAVLTPTRI

SEQ ID NO: 28138 - protein, 129 aa, Homo sapiens
LLVLVFFLMGLVGFMICHVLKKKGYRCRTSRGSEPDDAQLQPPEDDDMNEDTVERIVRCIIQNEVWMPPPACRTEPPPIITQCTWALQPLASIAAAARGLHLSVRDAPRKEKAAPGQGRPLCSLWAGSG

SEQ ID NO: 28139 - protein, 58 aa, Homo sapiens
LGERSSVPDSRLAQNDTAHKTTGRRETPTVFQHTEDTVLDPDIRQTPTPDFQEKREHD

SEQ ID NO: 28140 - protein, 25 aa, Homo sapiens
MNFFFLPSFGINIFLLSMEIWARCL

SEQ ID NO: 28141 - protein, 77 aa, Homo sapiens
MFGPGREYNFTRPNEKGEYEIAEGISATVFRTVLVLYSMNCLMTVLISSLITTSKSSSCPSWWAVPRKENESATLLC

SEQ ID NO: 28142 - protein, 83 aa, Homo sapiens
MAFRVPTANMSVVDLTCRLEKPTKYDDTKKVVKQASEDPLKGILGYSEHQVVSSNFNRHPLFHLRCWGWHCPQRPLCQAHFLV

SEQ ID NO: 28143 - protein, 11 aa, Homo sapiens
LSFFLFAMALI

SEQ ID NO: 28144 - protein, 13 aa, Homo sapiens
MRYVFILIACVLQ

SEQ ID NO: 28145 - protein, 177 aa, Homo sapiens
LEPRDEKIKMPLLRGLLWLQVLCAGPLHTEAVVLLVPSDDGRAFLLRSRLLHPEAHVPPAADRGASLQCVLHQAAPKSRPRSPAAGAALLHRPRRTGDEPCREFHGNGFPGPTQLTPGECGLPAPSSLLQHASAPVRTGSEGQVVGCPRARGETGEGLSLAFLSSLMFTSRNGLVGC

SEQ ID NO: 28146 - protein, 123 aa, Homo sapiens
LLFFRALRVTRRASSVLHGTAAEGQDGQSGAGLQGPGCHPQGQGHPGHRAARPHDLRASLHLFPPGTRGAASQPRALAVTQIHIPPTIPRGVGGQPVAWNHLSGLGPQNHWNPPDQPAPFPPP

SEQ ID NO: 28147 - protein, 29 aa, Homo sapiens
MKCHSRPLTLTQSRISEKNLNMILAKFPS

SEQ ID NO: 28148 - protein, 46 aa, Homo sapiens
LRRARPPLSAPRDPRSHRTAGGPWPLCRAQSAARSRSRSTGILQRK

SEQ ID NO: 28149 - protein, 72 aa, Homo sapiens
MGQKDSYMGHEAQSKHDILTLKYPIEHGIITIWDDMEKIWHHTFYNELCMTPEKHPVLLAEAPRTPRPTEKR

SEQ ID NO: 28150 - protein, 21 aa, Homo sapiens
VGRTTKLCDAALKGLVIDRMV

SEQ ID NO: 28151 - protein, 41 aa, Homo sapiens
LAAFCIFSVTQPLLSLIVKATTTCKVMWTESWTEKCLRNVL

SEQ ID NO: 28152 - protein, 164 aa, Homo sapiens
LEGDVSTTWHSNNDDVYRVPPIDRSILPTAPRAAREPNIDRSRLPKSPPYTAFLGNLPYDVTEESIKEFFRGLNISAVRLPREPSNPERLKGFGYAEFEDLDSLLSALSLNEESLGNRRIRVDVADQAQDKDRDDRSFGRDRNRDSDKTDTDWRACPATDSFDD

SEQ ID NO: 28153 - protein, 128 aa, Homo sapiens
LGMPVVFGSLVRAFTKATPLSLQSLSLIPAMQVGSGCPPAGAGALCIAPRLRGIHPLGYGGLSLSIEGPSKVDINTEDLEDGTCRVTYCPTEPGNYIINIKFADQHVPGECSSASAAPLTTPGPTGSM

SEQ ID NO: 28154 - protein, 87 aa, Homo sapiens
VLPESSYRCSPPPLPVFLPSAAALGGCQWLGAPGLSPPPEENKEPGQREAKGRVCSSCSFLLWFYPRHLFRGHSLGWYLSSYLAAML

SEQ ID NO: 28155 - protein, 45 aa, Homo sapiens
LASSCLGWDTRRHVSHCLPECPGGIMFQVPTVGGHRLVGMRDNLH

SEQ ID NO: 28156 - protein, 86 aa, Homo sapiens
LLPESIIHRAFLLHTSLKSTRIQRNGASRKRRDLAAKDSGNAGLTGAPIFAGARRLVSSPQLSAHGTPVPRWPSTQGNHQPLSGSS

SEQ ID NO: 28157 - protein, 154 aa, Homo sapiens
LDFEQEMATTTSSSLEKSYKLPDGQVITISNKRFQCPEALFQPSFLGMESCGIHETTFNSIMKCDVDIRKDLYTNIGLSRGTTMYPGITDRMQKEINALASSTMKIKLIVPPECKYSVWISGSILASLSTFQQMWISKQEYDESGPCIVHRKCF

SEQ ID NO: 28158 - protein, 234 aa, Homo sapiens
LLILFKDDYFAKKIILIKKKKEEERKQNKVEAKLRAKQEQEANQKLEEDAEMKSLEEKIGCLLKFSGDLDDQTCREDLHILFSSHGEIKWIDFIRGAKEGIILFKEKDKEALGKAKDVNNGNLQLQSKEVTWEVLEGEVEREALKKITEDQQESLNIWKSKGHRFKGKGKGNKAAHPRSGKEKVQFQGKKMKFANDDEHDENGATGPMKRSGEETDKEEPVSKQQKRENGAGDE

SEQ ID NO: 28159 - protein, 69 aa, Homo sapiens [sequence omitted]

SEQ ID NO: 28160 - protein, 56 aa, Homo sapiens
VYIYIYITKHQPWVVCSYINSKGKHTDCLSNHAKTLPGPVASAEKPTACRLLELYR

SEQ ID NO: 28161 - protein, 20 aa, Homo sapiens
LVCFSKVQFTEHFISTRICS

SEQ ID NO: 28162 - protein, 175 aa, Homo sapiens
MSESEKRKKLLEILKQGFDPAITIFVNQKKGCDVLAKSLEKMGYNACTLHGGKGQEQREFALSNLKPGAKDVLVTTDVAGHGIDIQDVSMVVNYDMAKNIDDYIHRIGRMGQAGKSGVAITFLTKEDSAVFYELKQAILESPVSSCPPKLANHPDAQHKPGTILTKKRRGETIFA

SEQ ID NO: 28163 - protein, 17 aa, Homo sapiens
LKVGVIKRTLYKTKEKE

SEQ ID NO: 28164 - protein, 52 aa, Homo sapiens
LGKMLRPALPWLYLGLCSLLVGEAEAPSPVDPLERSRPYAVLRGQNLDQTLH

SEQ ID NO: 28165 - protein, 64 aa, Homo sapiens
LGKMLRPALPWLYLGLCSLLVGEAEAPSPVDPLERSRPYAVLRGQNLETTGERICLQLFAQHLT

SEQ ID NO: 28166 - protein, 76 aa, Homo sapiens [sequence omitted]

SEQ ID NO: 28167 - protein, 42 aa, Homo sapiens
MLRMTVTLSMDLMRRISCKTCWMDSLKNLFSVLNVRILKQIW

SEQ ID NO: 28168 - protein, 169 aa, Homo sapiens
LHMTVETVVLTETLLVLGAEVQWSSCNIFSTQDHAAAAIAKAGIPVNAWKGETEEKYLWCTKQTLYFKDKLLNMILDITGGLTNLTHTKYPQLLSGIRDISEETMTEVHNLYKMMANGILKVSTINVNDSVTKSKFDNLYGCHQSLPRWHQVGHRCDDCQQGSCGSGLW

SEQ ID NO: 28169 - protein, 27 aa, Homo sapiens
LVAHLMTLERMILLAGLNWKKNGMKQM

SEQ ID NO: 28170 - protein, 25 aa, Homo sapiens
LIKIMMVLSMMLNSTSFRGFVSTLH

SEQ ID NO: 28171 - protein, 13 aa, Homo sapiens
LDSLRDELECAAR

SEQ ID NO: 28172 - protein, 22 aa, Homo sapiens
MSSTQFNKGPSYGLSAEVKNRG

SEQ ID NO: 28173 - protein, 173 aa, Homo sapiens
LVGRRRAGTGMALLLCLVCLTAALAHGCLHCHSNFSKKFSFYRHHVNFKSWWVGDIPVSGALLTDWSDDTMKELHLAIPAKITREKLDQVATAVYQMMDQLYQGKMYFPGKGRETEAGPPHPGTPRPPPEPDLLLPRRLRVFPQRAAKHLPGAGAPHPERHHRKPHRLSAPLW

SEQ ID NO: 28174 - protein, 80 aa, Homo sapiens
LLPSCLRRPRRPQAPPCAALLARRLPPPFVPTLSGRTDVSNFDEEFTGEAPTLSPPRDARPLTAAEQAAFLDFDFVAGGC

SEQ ID NO: 28175 - protein, 53 aa, Homo sapiens
VIGILMRWPGQTSARRKCIKHECQANGPEDLNRACIAEKLGGSLIVAFEGCPV

SEQ ID NO: 28176 - protein, 36 aa, Homo sapiens
LPSLGLRKQHRRCLSHGMDPSLPRRPCLLHRIRGLL

SEQ ID NO: 28177 - protein, 210 aa, Homo sapiens
LTFLNSCLKYMYPPPSSTILTNRVNALASVPKFYVQVLHLMNKMNLPTAFRSITAQPPIYEDHMPLHPPLPPTSPQPPEEPPWPEDDEELSSEELEDDSSDDEDQQKMNKLMELANLQPQRPKTIRQRHVRKKRKIKDMLNILSCPSQNSLHLVLLPSDVFDQPQPVGNKRIEFHISTDMPAAFKKDLEKKQNCEKKIMIYLLLKLMHPV

SEQ ID NO: 28178 - protein, 33 aa, Homo sapiens
LIFQFDCETSRFARVHYFKPCDGWAGEQVMGSL

SEQ ID NO: 28179 - protein, 196 aa, Homo sapiens
LVLKAEGIRHEVIYINLKDKPEWFFKKNPFSLVPVLENSQGQLIYESAITCEYLDEAYSGKKLLPDDPYDKACQKMVFELFSKVPSLVGSFLRTQNKEDGAGLKEALCKEFSKLEEVLINKKTTFFGGSSISMIDYVIWPSFERLEAMKLNECVEHTPELKLWMAAMREDPTVSALLTGVKDWQGFTELYLQPGGL

SEQ ID NO: 28180 - protein, 65 aa, Homo sapiens
MMERLLDPSEDLISRFQQCLTHLGCHPKALVSPSAMCLHGWRPPIPLGTPAFQCLHNSHPKSLPR

SEQ ID NO: 28181 - protein, 50 aa, Homo sapiens
LRLREPAALEMELLPLWLCLGFHFLTVGWRNRSGTATAASQGVCKLVSFP

SEQ ID NO: 28182 - protein, 45 aa, Homo sapiens
LREPAALEMELLPLWLCLGFHFLTVGWRNRSGTATAASQGVCKLA

SEQ ID NO: 28183 - protein, 93 aa, Homo sapiens
MKSDVDIYKDLYANTVLSGSTTMYPSITNRMQKEITALAPSAMKIKIIAPPECKYSVWIRGSILASLSTFQQMWISKQEYSESSPSIVHRKCF

SEQ ID NO: 28184 - protein, 24 aa, Homo sapiens
MIVAVKKCMCRNECRNLGTELCKC

SEQ ID NO: 28185 - protein, 23 aa, Homo sapiens
MIVAVKKCMWNECRNLGTELCKC

SEQ ID NO: 28186 - protein, 112 aa, Homo sapiens
LNGKLTGMALRVPTANVSVVDLTYHLEKPAKYDDIKKVVKQASEGPLKGILGYTGHQVVSSDFNSDTHSSTFNAGAGTALNDHFVKLISWYDNEFGYNNRVVDLMAHMASKE

SEQ ID NO: 28187 - protein, 78 aa, Homo sapiens
LLGSVIFLFFSFSRKKSQNRTVQQPENLMAFLLMPQPIPLSFLNSRTKTATRVPCLTSISLRWTAAPTQAPAPSRVSP

SEQ ID NO: 28188 - protein, 65 aa, Homo sapiens
VGLAPRLQLQEQVLQEAQSCTSTRPTLPGPRHGRADMGTVHCDPTKGFQKRIWNCSVRRQRQPPL

SEQ ID NO: 28189 - protein, 40 aa, Homo sapiens
LAPRPRHGRADMGTVHCDPTKGFQKRIWNCSVRRQRQPPL

SEQ ID NO: 28190 - protein, 68 aa, Homo sapiens
MERPCESLCKLSPCFPQPFFMGRGGKQNHSHSPRHGRADMGTVHCDPTKGFQKRIWNCSVRRQRQPPL

SEQ ID NO: 28191 - protein, 94 aa, Homo sapiens
LCSFSGYKIYPGQGRHYARTDGKVFEFLNAKCESAFLSKRNPWQINWTVLHRRKHKKGESEEIQKKRTHPAVKFQRAITGASLADIMAKRNQKP

SEQ ID NO: 28192 - protein, 36 aa, Homo sapiens
LEVVPGVRRWSPGREDEVPLPGESSAAVGSRSPALS

SEQ ID NO: 28193 - protein, 111 aa, Homo sapiens
MAGKQAISASGKWLDGIRKWYYNTAGFNKLGLMRDDTIYEDEDIKEAIRRLPENLYNDRMCHIKSALDLTMKHQILPKEQWTKYEEENFYLELYVQEVIRERKEREEWAKK

SEQ ID NO: 28194 - protein, 78 aa, Homo sapiens
LSSGWAEPLNLFYLVLSSLFLAPQASSHEENFTPSTAGAKRCPKDMATWVHSSDRPLTRAGLWRLSCMGPSNTKPVSL

SEQ ID NO: 28195 - protein, 112 aa, Homo sapiens
LRGATASFALLIHLSLGAVAATFPGPTAASSGGRFAGHSRSPATEGGPLSLTVSSLQIVCSLSLARDPLPQSRPGGGRRGGDKSHPSSRRRRPPHPRVCPINGVGKRHRGIL

SEQ ID NO: 28196 - protein, 64 aa, Homo sapiens
LKVRRQLAVCLWQVTFLLWAAVPSSVQMELDYRGSQTSRGYRAPGAVAHVCNAGTSGGRGGRII

SEQ ID NO: 28197 - protein, 68 aa, Homo sapiens
VLVGGERWRPACLSSWGGLPPPLRTLRGISVTPNGYHFQRPPTLKRRLTLAPCLDGGAPEPGVTIPPL

SEQ ID NO: 28198 - protein, 66 aa, Homo sapiens
MGQHPSTDVAPAPGPNRYLPGPAQLHRAPSHPWHPGYPWDTWPRWPTWDPRDKRRERASRAGWRPW

SEQ ID NO: 28199 - protein, 292 aa, Homo sapiens
LLSAARAKEEDMGTVVAIHLGTTYPCVGVFKNGRMEIIANDQGNRIMPSYVAFTPEGECLIGDAAKNQLTSNPKNTVFDAKRLIGRRWHDPSVQQDIEFLPFKVVEKNTKSYIQIDVGGGQTKTFAPKEISAMVLTKMKENAEAYLGKVTHAVVTAPAYFNDAQCQATKDAGTIADLNVMRIINKPTAAAIAYGLDKREGEKNILVFDLGGGTFDVSLLTIDNGVFKVVATNGDTYLGGEDFDQRVMEHFIKLYKKKTGKDVRKDNRAVQKLWRKVEKAKRALSSQHQASSN

SEQ ID NO: 28200 - protein, 27 aa, Homo sapiens
LLLEIRLLISGDTRCSCRHPSLLLTLV

SEQ ID NO: 28201 - protein, 65 aa, Homo sapiens
LRATLWGPAPWFLLLPLPPPDPSGPACSAPTGLQPASHRTFGGPRLERSAGVGAPRPQTLQKEQQ

SEQ ID NO: 28202 - protein, 716 aa, Homo sapiens [sequence omitted]

SEQ ID NO: 28203 - protein, 731 aa, Homo sapiens [sequence omitted]

SEQ ID NO: 28204 - protein, 154 aa, Homo sapiens
MGPAVSPWTRRAPCRGLPDPRCPGHSGGSRGQQLPVSSFRDRRGVACTATSSSTISRTPRPFLNSHSSFTTPSPFSLWPRSCTLETTSPTSLTTFSGCFMTRGCFCGSTRRTSMGLRECRASLPQSWLKLMEPLPLPPAQSAKDPSQGRTFGLT

SEQ ID NO: 28205 - protein, 129 aa, Homo sapiens
VLKGVHSHKKKKTRTSPAFWWPKTPRLRKQPKYPRKSTLRRNKLDHYAVIKFPLTTESAMKKIEDNNTLVFIVDVKANKHQIKKAVKKLYDIDVAKVNTLIQPDGEKKAYVQLAPDYNALDVANKIGII

SEQ ID NO: 28206 - protein, 68 aa, Homo sapiens
LRTLPPPPAQKDPTGVEALPLKAPPYTWRGPEPGSQDCSRTEGSSGPSKLAMFCCCSPLRVTTWSTRP

SEQ ID NO: 28207 - protein, 81 aa, Homo sapiens
LDFTLHFSLELFLVINFLGGTGTRGPAARPRIAAAGQRGLGRAPRRSGAAQAVMVTRDLKDRVAMYHPLECPPRNSVKMMT

SEQ ID NO: 28208 - protein, 165 aa, Homo sapiens
LPKCGVKVGLTNYAATYCTGLLLARRLPNRFGMDKIYEGQVEETGNEYNVESIDGQPGAFTCYLDTGLARTTTGNKVFGTLKGAVDGGLSVPHSTKRFPSYDSESKEFNAEVHQKHIMGQNVADYMHYLTEEDEDAYKNQFSQCIKKSVTPDMMEEMYKKAHAAI

SEQ ID NO: 28209 - protein, 19 aa, Homo sapiens
LILDFQPPELLSAFKRAFY

SEQ ID NO: 28210 - protein, 49 aa, Homo sapiens
LFTFLGRSLLLVLSALKNRNSSVQVRGRKVSFYKLVLSKRMPCVPKVKE

SEQ ID NO: 28211 - protein, 86 aa, Homo sapiens
LVVLVLCLWTEWRLVFSNPLWWSPLLQSTLQLKSIEMHHGALSEALLGDIMGFNVMNVSVKDVRWGSVAVDSKNDPRMKAVGLTAQ

SEQ ID NO: 28212 - protein, 138 aa, Homo sapiens
LKRELLKGIFEMGWEKPPPVQEESIPIALSGRHILARAKHGTGKSRTYLIPLLERRDLKKHNIQAVVLVPTRELALQVSQICVQVRKHMGGAKVMATTGGTNLRDDIIRLDDTMHVVIATPRRILDVTKKRQRLIMSR

SEQ ID NO: 28213 - protein, 93 aa, Homo sapiens
LGNKDLEGFKTLTFLAVMLIVLNSTGPAHQPGRGAILPAAQQHGQQAHHLPVHPRLLHLPVLPKVQAHADSGECGACCFLQSASTPLTIWAAS

SEQ ID NO: 28214 - protein, 45 aa, Homo sapiens
VQLVESGGGKPGGSLRLSCAASGFTFSHELGPPGSREGAGVGLIH

SEQ ID NO: 28215 - protein, 34 aa, Homo sapiens
LLILLLLLLTTLRVKLCDRPRRDGAISVCGGAGG

SEQ ID NO: 28216 - protein, 256 aa, Homo sapiens
LVNTGIGMTKADLINNLGAIAKSGTEAFMEAFQSCAEISMIGQFGVGFYSAYLVAEKVAITKHNDEEQYSWVSSAGSSFTLHVDHGEPIDRDTKVILHLKEDQTEYLEERWVKEVVKKHPQFIGCLIAVYLEKEPEKEISDDEEEKGEKEEEDKDDKEKPKTEDVGSDEEDDTDKNNKKKTKKIKEKYTDREELNQTKPIWTRNPDDITQEECGEFYKSLTSAWEDHLAVKQFPVEGHLEFRALLFIPHQAPFDLF

SEQ ID NO: 28217 - protein, 40 aa, Homo sapiens
LDSASGKAREDRCSKQTNIIGMGSKEDVSGTPCDSKSINR

SEQ ID NO: 28218 - protein, 138 aa, Homo sapiens
LPAEPRGQLPSSLMDTWRARPLLGVPPRNPLGSQGPWGPSPAPRHRRTSQRSAAPAHPGCRRPQTQAAACPTGVPSPRELPGEEPSAHPVHQGLPAERRGPLQRVQEPLRGVQTGPDLRSPVLQELPGPAGGEFPEGL

SEQ ID NO: 28219 - protein, 31 aa, Homo sapiens
MTLLPVPVHFSLALFFYFARNSSCTQPLAEI

SEQ ID NO: 28220 - protein, 65 aa, Homo sapiens
MFLVSFAFDFLLMLLGVFSCCGSHRDTSTSPRCRRGSKSRSRRTARATSRSITWGRTVRCCRVHS

SEQ ID NO: 28221 - protein, 95 aa, Homo sapiens
LCARLVRTWYLFCEAAAEETPALAMADEKPKEGVKTENNDHINLKVAGQDGSVVQFKIKRHTPLSKLMKAYCERQLEMEDEDTIDVFQQQTGGVY

SEQ ID NO: 28222 - protein, 58 aa, Homo sapiens
LLSLLVTSVFRVTPLPLPTVPSSLPLGPLLHPICVSLPPVLSCLDPLVHSLPWASSEP

SEQ ID NO: 28223 - protein, 42 aa, Homo sapiens
LANVGQKEDFKEARKKALNLGSKKVFIEDVSKEFVEEFIWPV

SEQ ID NO: 28224 - protein, 132 aa, Homo sapiens [sequence omitted]

SEQ ID NO: 28225 - protein, 34 aa, Homo sapiens
VNWATTPSSQKKDTSSSTVVSTQRSQAQKLQLKI

SEQ ID NO: 28226 - protein, 59 aa, Homo sapiens
LRSLLHDRKALWKLQWMLILLRMIFLWRSPRQNHRFPRQYMTVLFVDRVAPPLKIDLLD

SEQ ID NO: 28227 - protein, 13 aa, Homo sapiens
LFILCLMHSYFTP

SEQ ID NO: 28228 - protein, 28 aa, Homo sapiens
MPHQGMLLSDRKLLLCPRKCKMFLYWKK

SEQ ID NO: 28229 - protein, 52 aa, Homo sapiens
LQLSIFGREHWTRSQKVEFWVLFSHSWALGMFCSVHQMFSACLPLSCHQSHL

SEQ ID NO: 28230 - protein, 108 aa, Homo sapiens
MITGMSQADCAVLIVAAGVAEFEAGISKNGQTQEHALLSYTLGVKQLIVGVNKMDSTEPLYSQKRYEEIIKEVSTYIKKIGYNPDTVAFVPISGWNGDNMLESSDNMP

SEQ ID NO: 28231 - protein, 107 aa, Homo sapiens
VGPRAGEPERSLSVPESLERPDDPRVSEPRTPSPGAPERQAGSRRRRRQSGAPASAPVPPGRLQRREPKPPGGRGRAENDAEEAPTEAPRHRACCRVALRAPLADSL

SEQ ID NO: 28232 - protein, 128 aa, Homo sapiens
VAVFCQVYLLSCSWLRFADLCIHCGLLGTSNWKFFTPAMAGRNFGPQLRLPDSGRYSQSQLPSELGEREKGKYKKTQPCGLTPYSMIQAHSQLCVSRVIMVKRMVTSKDNHRASLLTLVRTRFLSLVL

SEQ ID NO: 28233 - protein, 150 aa, Homo sapiens
LVGLRVCLFLLAPCLVHLGHQLCQAEPGQARWTDPCSDVRLSRFCQSSLDTSPRSCPSKGRHCGSYQTWTETDLVLTSPYTFWAEDHPAVFRIFLLCLGLHASEQTPPTSFLRHQCRQQREDSTGSRLVVKSGSGCMGCGGVDQLLQCLK

SEQ ID NO: 28234 - protein, 75 aa, Homo sapiens
LFFCLPKQDTPGFIVNRLLVPYLMEAIRLYERGILLTQARSSRPQLLAPLSGILSVSRRGRAVHNGGSSVCFLAL

SEQ ID NO: 28235 - protein, 279 aa, Homo sapiens
LRSDQPAFQPRPKLLLLRHGDRCAHLQRGALDGEGASGPQAGGSIGLVEMLHRCNLLALVGGGSSPKFSEISVLIWDDAREGKDSKERLVLEFIFTKPVLSLCMLHGKIVTVLKNRIYVYSFPDNPRKLFEFDTRVNPNRLCDLCPSLDKQLLVFPGHKCGSLQLVDLASTKPGTMSAPFTINAHQSDITCVSLNQPGTVVASASQNGTLIRLFDTQFKEKLVELHRGTDPATLYCINFSHDSSFLCASSDKGTIHIFALKDTHLNRCSALAPWTRWGL

SEQ ID NO: 28236 - protein, 96 aa, Homo sapiens
VVFQLSSCALLSTPTSPFQPSHHVPAGNTGLRRRPSQPPGPERSRLGLGVSLHQRSCPKCIAVFTRVSEPRIQFPASRILPSSNTSKDFESSLWTV

SEQ ID NO: 28237 - protein, 132 aa, Homo sapiens
LLFPSAFLLLLHHVEPTAGPPQAHGLRGGGATAPPAGAGGSTAEGAEGAAAGQQEAAEKRRPRGSWRGMCGCDPRGNRGEGARCSSSCGKPSGGQRKRRERGLWSAFVEACSTLKHSKPSSGSSSLCPVPRG

SEQ ID NO: 28238 - protein, 223 aa, Homo sapiens
LKVNPNIHAVCTQEKEQIKTFNNKFASFVDKVRFLEQQNKMLETKWSLLQQQKTAGSNMDNIFESYINSLRRQLETLGQEKLKLEAELGNTQGLVEDFKNNYEDEINKSTETENEFVLIKKDVDEAYINEVELESCLEGLTISTSSGSCMKRRSGSCSPRSRTRLWCCPLTTAAPWTRTASSLRSRYSTRRSPTAVGLRPRACIRSSMRSCRRWLGRPASYKD

SEQ ID NO: 28239 - protein, 61 aa, Homo sapiens
LIFSLWTGFYFPTSGGWLLALCRRVAVLNTTFITKARHWITVTADVSTPVVINSSFKRTLD

SEQ ID NO: 28240 - protein, 71 aa, Homo sapiens
MLVMAPRTVLLLLSAALALTETWAGECGSGGKWPLPGGARGPQAGAQDLRSRAGRRVGRVSAPPHPQAPTP

SEQ ID NO: 28241 - protein, 94 aa, Homo sapiens
LCGHPFQPRAPGKPCCQHQHHRTRRGGANCRLCGRIRAGNSSPGPGDPGRPGDSRPAHWGHLVAKAATPRRGEEGPRKPGGRGGACRTESVGGT

SEQ ID NO: 28242 - protein, 26 aa, Homo sapiens
LLCFVSIWLQDRPSTSKLDTAAKKLL

SEQ ID NO: 28243 - protein, 66 aa, Homo sapiens
LFLYMCLFLNCFGLLIVNQVAALLFPLLAKEDSTFSGTYKQQLAPIMTLRAQTSVCPLCPLLKMSP

SEQ ID NO: 28244 - protein, 206 aa, Homo sapiens [sequence omitted]

SEQ ID NO: 28245 - protein, 62 aa, Homo sapiens [sequence omitted]

SEQ ID NO: 28246 - protein, 173 aa, Homo sapiens
LLCDLLLLSLFSSVFSSCQRDCLTCQEKLHPALDSFDLEVCILECEEKVFPSPLWTPCTKVMARSSWQLSPAAPEHVAAALYQPRASEMQHLRRMPRVRSLFQEQEEPEPGMEEAGEMEQKQLQKRFGGFTGARKSARKLANQKRFSEFMRQYLVLSMQSSQRRRTLHQNGNV

SEQ ID NO: 28247 - protein, 157 aa, Homo sapiens
LKNDISPVSPEGAEFHFVTFCGTRARVAARVVVSYANTHADVTDHVGFGVDSPLIEAFFFPFFFLFFFLLKILAIVLRTGAFSVCLSGWQAGFPPLSHGARAGRPVGSGEWVGGASRVPFWNARAASPRSQPGSPRSQPQRRSGCTDCFWNKKIPRM

SEQ ID NO: 28248 - protein, 137 aa, Homo sapiens [sequence omitted]

SEQ ID NO: 28249 - protein, 267 aa, Homo sapiens
LYRYEEVRKFSYQPRVHPCVVYGDADIGQQIQVLEHGCHLLVATPGGLVDLMERGKIGLDFCKYLVLDEADRMLDMGFGPQIHLILEQDTMPLKGIHHIMMFSATFPNEIQMLARDFLDEYIFLAVGRVGSTSETITQEVVWVEEPDKRSFLLDLLNAPGKDSLTLVFVETKKGEDSLENFLYHEVYPCTSIHGDQSQRDREGGPSSVLLGENPNSSGYSCGSMKTRHFKCETCFNFDLPSDIEEYVPCIGCTGCVGIQGLATSFFN

SEQ ID NO: 28250 - protein, 86 aa, Homo sapiens
VAAADRGRLGDGPEVPEGGRRTVNLSRVELPWDLWPPPTDHAPGAPDFPAVEGRSLGRRPPALARLWSAGQPGLRAPLQHIAGRPR

SEQ ID NO: 28251 - protein, 87 aa, Homo sapiens
LLSGHSPGMPSSASPWLKWTPACTSSPAPSVASSCAMCDVLLLSLYSLQTQDCKRAGPGLSCASSCPQTSGSPSVVLGAWLGSQGHP

SEQ ID NO: 28252 - protein, 176 aa, Homo sapiens
LASSPALWAASTTLLTMCTSRAPTCGWPCTRTTCRPPIPTMSTRRATWTRHLVGPCSSCGPTTRSGCRCRRTRPTASTPRSTSTPPFQDSCSAPHNPRGGSCCPGLLPFSGRATFSITKNLLEKKTKAEQRRPWPWPEETNLLSPCMQAEIVSGRGWPEFLSPKCLCSVRAAPHRP

SEQ ID NO: 28253 - protein, 19 aa, Homo sapiens
LRRALIEGLLLSIAVSRWL

SEQ ID NO: 28254 - protein, 57 aa, Homo sapiens
VGERLRGHRCPDPLCLLLDMLFLSVSCFAVVAGRIRGLSHAPGEEEGAGPLRSVWPG

SEQ ID NO: 28255 - protein, 171 aa, Homo sapiens
MEEEARGAHLRPPEPVPRQPPRAPQGAALPLHPQGGLRGAHGQVRVLHHRHHRPQGDRLPLRGRELLERGHRAGAHRFPEPPRPAGLSQPPGTHRTRRTRRGRRGCRGRRTLRALGALQAIPAAQTPHAMSPPRAIRWTSRTEARTWPALSSPAAEELPVRADPRSVARAP

SEQ ID NO: 28256 - protein, 34 aa, Homo sapiens
LGPWPFQLRIRVPFFVWWMIPMSTCCRCGTAAGE

SEQ ID NO: 28257 - protein, 57 aa, Homo sapiens
LCPAGQPAPVRNEHRRSAPPTPAPQPHGDRRPEGTALGESCLSALVPPSGDGPHQPA

SEQ ID NO: 28258 - protein, 55 aa, Homo sapiens
LCPAGQPAPVRNEHRRSAPPTPAPQPHGDRRPEALGESCLSALVPPSGDGPHQPA

SEQ ID NO: 28259 - protein, 697 aa, Homo sapiens
MSSDGTIRLTHPNVVAARDVPEGMQNLAPNDLPLLAMEYCQGGDLRKYLNQFENCCGLREGAILTLLSDIASALRYLHENRIIHRDLKPENIVLQQGEQRLIHKIIDLGYAKELDQGSLCTSFVGTLQYLAPELLEQQKYTVTVDYWSFGTLAFECITGFRPFLPNWQPVQWHSKVRQKSEVDIVVSEDLNGTVKFSSSLPYPNNLNSVLAERLEKWLQLMLMWHPRQRGTDPTYGPNGCFKALDDILNLKLVHILNMVTGTIHTYPVTEDESLQSLKARIQQDTGIPEEDQELLQEAGLALIPDKPATQCISDGKLNEGHTLDMDLVFLFDNSKITYETQISPRPQPESVSCILQEPKRNLAFFQLRKVWGQVWHSIQTLKEDCNRLQQGQRAAMMNLLRNNSCLSKMKNSMASMSQQLKAKLDFFKTSIQIDLEKYSEQTEFGITSDKLLLAWREMEQAVELCGRENEVKLLVERMMALQTDIVDLQRSPMGRKQGGTLDDLEEQARELYRRLREKPRDQRTEGDSQEMVRLLLQAIQSFEKKVRVIYTQLSKTVVCKQKALELLPKVEEVVSLMNEDEKTVVRLQEKRQKELWNLLKIACSKVRGPVSGSPDSMNASRLSQPGQLMSQPSTASNSLPEPAKKSEELVAEAHNLCTLLENAIQDTVREQDQSFTALDWSWLQTEEEEHSCLEQAS

SEQ ID NO: 28260 - protein, 20 aa, Homo sapiens
LLIWDIQLFKCLLVLLTREN

SEQ ID NO: 28261 - protein, 104 aa, Homo sapiens
LCSSSRPKPQVVGRFLPFLTPWNCIACFTCVHVDSFSWQPRRKPSRSHFTAGILWFTEVTELARGQLNEKIHHRFDGCLTNFTNCCISRSFCRFVFNFRTNTEK

SEQ ID NO: 28262 - protein, 70 aa, Homo sapiens
LSFRLDVRKPSRSHFTAGILWFTEVTELARGQLNEKIHHRFDGCLTNFTNCCISRSFCRFVFNFRTNTEK

SEQ ID NO: 28263 - protein, 52 aa, Homo sapiens
LAASGDPVARILGVPDPTPVPHWLSGQKPPSNEERGAVPRSARFPRCDLVLQ

SEQ ID NO: 28264 - protein, 14 aa, Homo sapiens
LWIYQIVLLLHMCL

SEQ ID NO: 28265 - protein, 97 aa, Homo sapiens
MYKFTRLFFFFLFFETESHSVAQAGVRWRDLGSPQAPPPGFTPFSCLCLVSSWNYWRLPPHPANFFVFLVQTGFHRVSQDGLDLLTLGSARLGLRKC

SEQ ID NO: 28266 - protein, 26 aa, Homo sapiens
MVPLGLFLVSGLPSRGWQCCFTGGHG

SEQ ID NO: 28267 - protein, 73 aa, Homo sapiens
MKGRGKRCQPPKGLRGEKLLPVVPRQRGGLPHVERYLPKRNPPASLDPVQPHILLKRHQEPIANWGLWLHRSL

SEQ ID NO: 28268 - protein, 84 aa, Homo sapiens
LTPLPKQGSPRMPSSQALPPGPSTMALATVLLSFTGKGLLYHGNCDRFRGKACHLGLGGIRTCRSPRMYTHCALSAAWCSSGGA

SEQ ID NO: 28269 - protein, 25 aa, Homo sapiens
LIPCLLVFLSRLQFQGFRTASQHLS

SEQ ID NO: 28270 - protein, 10 aa, Homo sapiens
MLIIVLAQMA

SEQ ID NO: 28271 - protein, 40 aa, Homo sapiens
LRMSQDALEKERISLRLCKTFRMREQGNSCLLKKGFLRNN

SEQ ID NO: 28272 - protein, 109 aa, Homo sapiens
MILIILFCLIVMCCHRRSLQEDEEGFSRGIFRFLPRRRCSSRRESQDGLFSFRRPLWLKDMYKPLSATRVNNHAWKLHKKSSNEDEILNRDPGDSEAPTEKGEESEALP

SEQ ID NO: 28273 - protein, 94 aa, Homo sapiens
LPKPTRKSRTKNKQKCPRSRTLTAVHDAFLEDLVFPSEIVGKRIPVKLDSSRLIKVHLDKAQQNNVEHKVETFSGVYKKLTGKDVNFEFPEFQL

SEQ ID NO: 28274 - protein, 16 aa, Homo sapiens
LLRPSDRDWSPGDRRW

SEQ ID NO: 28275 - protein, 56 aa, Homo sapiens
LCEQTEQASVQPCRVLPGGRPGRRPAPAHPTFSLPQQSFRWCLRGESQAFLTSIRI

SEQ ID NO: 28276 - protein, 114 aa, Homo sapiens
MDRGGPGGCGGHCQCSGPRILSPVVPVPQVCPSSEEAGEGSCQWAWCERDQPGRLLPAACRRPARPGGPHPPPAEARGQRRCQERRPSRPAPPGLPAGPLSGGEVSVRFECKTQ

SEQ ID NO: 28277 - protein, 63 aa, Homo sapiens
LLVGGIPGHLFMSLFLPFLALCRHNSAFPGTASLRTLQVSRSKRENDHVQGGNDLQGRGCGLH

SEQ ID NO: 28278 - protein, 49 aa, Homo sapiens
LSSGGGACRAAAALTVRSPAVPCRREHALFHSRNRVPQRGQRRLRLRGL

SEQ ID NO: 28279 - protein, 71 aa, Homo sapiens
LSSGGGACRAAAALTVRSPAVPCRREHALFHSRNRVPQRGQRRLRLRASEGVWGQCASCIPPKEAFLSDSC

SEQ ID NO: 28280 - protein, 84 aa, Homo sapiens
LAPCDIQMTQSPSSLSASVGDRVTITCRASQGISNYLAWYQQKPGKVPKLLIYAASALQSGGPISVQWQWIWDRFHSHHQQPAA

SEQ ID NO: 28281 - protein, 152 aa, Homo sapiens
MERETVRKAWFLRRKVGAKKSSEVGGCVFKKKKGGGNPTSQVCRKKINEVCLSPGQSPSPRPAREECDPGAASSRRRGSGARERDPPPARPGPAWPVPAVSARADAQECGRREAPTARRGLSASEVSKDPHETPAFPVMILRLKSSSSSQNT

SEQ ID NO: 28282 - protein, 54 aa, Homo sapiens
LSLVLMEWRSSHGDKGLNTCSKQWPGWRLTGAGCSATMSSCGVPWSRWSCCKLS

SEQ ID NO: 28283 - protein, 52 aa, Homo sapiens
LGLALLASVLGFFLCTAGLALLTSPGVIEHPCACCHPLPVCRIPDSVSGDRN

SEQ ID NO: 28284 - protein, 117 aa, Homo sapiens [sequence omitted]

SEQ ID NO: 28285 - protein, 61 aa, Homo sapiens
LSCLRQLHRPSCSSSRWRCSSSSNSSSSSSSSRRRYSSSSSSSNSSSSRLSRVPCSSSSKQ

SEQ ID NO: 28286 - protein, 104 aa, Homo sapiens
VSLFVCLFLRQSLTLLPRLECSGAISAYCSLRFRGSSDSPASACQVAGTTGAHHHAWLIFEFLVESGFHYVGQAGLERLTSSDPSASAFQSSGITGVSHRARPE

SEQ ID NO: 28287 - protein, 49 aa, Homo sapiens
LGWGWRVHPRRRVTLLCCFLSSCLVPGSVASREFSNYVYKISSLWPYKW

SEQ ID NO: 28288 - protein, 52 aa, Homo sapiens
LLPVWRRNGGGARCGWANPGSPRTLRSARQGARACQGRRAGVNVASVGLQPR

SEQ ID NO: 28289 - protein, 68 aa, Homo sapiens
LVFIFWATESVPLKSKMINASSKDAINKKLTGIKQELQANYYEEVKDHCTLAEKLGGSAIISLEGKPL

SEQ ID NO: 28290 - protein, 50 aa, Homo sapiens
LCLALLAWCRACCLLTLTMSCPGPDPPEGPGTQRVWQGALRILQLPGAPR

SEQ ID NO: 28291 - protein, 68 aa, Homo sapiens
LILCLALLAWCRACCLLTLTMSCPGPDPPEGPGTQRVWQGALRILQLPGAPDGVSPYQPGWSRTPDLK

SEQ ID NO: 28292 - protein, 233 aa, Homo sapiens
LLLYTCFPTTARKNHGPGVTVIRGRGCGLHPERVAAAGPGAEDPVPGCDAGELQPPALCGLNCLLAWKAQLAQHKSFNRFSPRGCQVSKPAVISSLEQGKEPWMEEEEIRTWSFPEEVWQVATQPDSQQQHEDQHLSHTFLDKKDWTGNELHECNELGKKLHQNPNLLPSKQQVRTRDLCRKSLMCNLDFTPNAYLARRRFQCDGHGNFFSVRNLKLHLQERIHAEVTSVEVL

SEQ ID NO: 28293 - protein, 95 aa, Homo sapiens
MVYIPAALAMLKNTSLLYGNHTYISYSKRHLVPRESFVLGRWKTDQNIMEESFMGSSLGSRRMSFLEAWRVPTSLEKASGNQDATRWLSGLETRP

SEQ ID NO: 28294 - protein, 90 aa, Homo sapiens
LTARQSGPWLWAASPSAATPSTCCASWPCTATAIRMEVCSVPPAKPSMREDGDPAPGKDGGITVPDVAPRPRGLRDHPHSLQHSPWHPGP

SEQ ID NO: 28295 - protein, 72 aa, Homo sapiens
LPRVSPFSRSPELHSRRPWAAGSASAEGQPDRPSASRNCPDHPPSQPLSERPSERLPGVLPTSQRPARWCPG

SEQ ID NO: 28296 - protein, 111 aa, Homo sapiens
LPGLPAHLAFERRTGRPGTAARHPLGCRWPQRPQPTEVRGGPGRGAEPGWGAGGRRTHLSNKIPTDPGRDGDLGAPRRPERSTSAPLPQSRCRNREEAFSTAPGAFTTGWS

SEQ ID NO: 28297 - protein, 35 aa, Homo sapiens
MLVLPTYSKNWSVSKTVCTRKIQSRPRLNVDLCWG

SEQ ID NO: 28298 - protein, 281 aa, Homo sapiens
LTPLLGGRASASTGSTSESASPARGARFPPLSPSGVPVGVEPPPRQAPSRLFPQALPADRPGNGVWEPRGAGGTRGPGHAAAAPAPPRPSPAQAGAAAAFLLLAAPATPDPAPVTPRAACGLAPRPAPGETVHAVQGGESAALRAGPAAAGREDAPRTASRRSAGPARGVPTRCSGLREPRACLQHSGHAQRRGPASPSSTHRPAAPRQASTGASPVPGRQGLEEEAFSRQPGGPGSPEWDQSLQGLSAERGPRGPRPQLLPALPEHLLAGNPQVPRGPEQ

SEQ ID NO: 28299 - protein, 296 aa, Homo sapiens
LPGLRGSTDSPGPPGCRSRAFPARLPAPPRGAAPGGGVRKAGSRRQRGGRLESRARVLPDLPTPPHGLRGTGLPGNRRPPGGRTQAVAGSGDARDHRAESDHSSASPAPRAPPREPRPASPAPRAPPREPRPASPAPPAPHRQPREPRPAPRAPRIGRVPAATPPTRLGPLLDAAAAANRSRSCCDAAVGSGARSRPGWRRSRGRLELVWGLRSRARHGRPGRSGALPGPGCGPNEQVDEQAGPAQLQGPQGPGRQGHRLPHLGLEVRADQGDGPGVRRPGSDRLQAQALRELPRP

SEQ ID NO: 28300 - protein, 177 aa, Homo sapiens
LEKPVPGASRTQVQHRASTTPNAWDQQCFECQVVLERLHHIHQFNSPHLKTPNRKHCDEHFPGASCQHSALDLVAFWIWGFRLETLNLYTKVYSLQCSCWRPKATFCIKTCQMHTILTHLTDARCPENPRRPAGQHSETLSLQKIQQLAGVVACACGPSDWEAEAGGSLETRRSRLQ

SEQ ID NO: 28301 - protein, 41 aa, Homo sapiens
MSILLHLLIPLTKCFVTDLRLIMQMIVCDNWSSFTNNRFLN

SEQ ID NO: 28302 - protein, 94 aa, Homo sapiens
VYGPAGHGHAAPGGRSGSRSSWGAETDPLAAERQWDLGAPGSFGLHHLSDSAVPARNHSASAWLKPSYSSHLNTPCSSSAPEKHGSGSTGQGRP

SEQ ID NO: 28303 - protein, 110 aa, Homo sapiens
VRAGRGRAKEAGAGRLQRRPLPLPRTHEHARPIYCRGFSGRRCASFFLFVCCVFPGKQLEKEQLMERLREAVFASYPNWESNLQQLDSPIGFPSFSVKSHSLAGDTDGLK

SEQ ID NO: 28304 - protein, 34 aa, Homo sapiens
MFAFKLILFSILPWSWARGEWGGKTDPCCAASRK

SEQ ID NO: 28305 - protein, 105 aa, Homo sapiens
LREDGTCRLLLLLLLLGRRCGRRGRRPACPAAAAAGGPVRRAAARRPGHRALLAALPAQAGAAAPAAAGGPGGRRRLQPAVRGLGGPVLCRVRRYCLCLDWQWSV

SEQ ID NO: 28306 - protein, 25 aa, Homo sapiens
LEFWMIACVILTASITSIPTKSSPK

SEQ ID NO: 28307 - protein, 37 aa, Homo sapiens
MDYKFLPYNDGHLFSPEKITPYSSNTRFLKNPSRCRR

SEQ ID NO: 28308 - protein, 59 aa, Homo sapiens
MLLLSLFFPLRISLSPSNHLWSASPRCHCDAEVAASWPDAFRKYFEVIVAVDWGISCFH

SEQ ID NO: 28309 - protein, 21 aa, Homo sapiens
VVSIARKKNGKRPKQIASLGC

SEQ ID NO: 28310 - protein, 37 aa, Homo sapiens
LYFWVNWRRASTLFTCLQVGLLSSLVVSLASVKENPL

SEQ ID NO: 28311 - protein, 41 aa, Homo sapiens
VAFGGSVCLVAYLGLFMLCVSYQVDERTCIQFSMKIHCHDF

SEQ ID NO: 28312 - protein, 116 aa, Homo sapiens
LGAAAGSSTLSFSRLLSTLSTRRRGLWCSGGGSCSCRSSLPFLPPHQIPEIARHGFTYCGRPALGNQECILSCSCSPACQCFLHGKVWKRRLRIRIIAASLTLGQRIWQPPGLLLS

SEQ ID NO: 28313 - protein, 133 aa, Homo sapiens
LDWPWLLPHTYPRAQGQFWWAAETCSAKLSSSRVALAWASQASDAPGKTRWQVAVGYLPFPPHRLWASPQNGSRIRVIMRWWEPEQLRCMIQGEVVIWVGQRGGLAHLNRGVFHSRPSVFGNGHPGVGILAPL

SEQ ID NO: 28314 - protein, 116 aa, Homo sapiens
VQAGSHHRVHGAEASIQAGIYATRSGGTLVLVGLGSEMTTVPLLHAAIREVDIKGVFRYCNTWPVAISMLASKSVNVKPLVTHRFPLEKALEAFETFKKGLGLKIMLKCDPSDQNP

SEQ ID NO: 28315 - protein, 82 aa, Homo sapiens
MTSVTSCLASLLTWLAGTIIPPTSISCSYSVPLMSPQSSKNLSRGGKATLKAAGQSTTRAHNQNCTSASAVHRNYRLCLRRA

SEQ ID NO: 28316 - protein, 96 aa, Homo sapiens
LGHHPVHGTAQDSPEIRAVSSGYTGHRHVLAAGPQGHVEHAGALPLCLRDHGLHVGLPLRAPAPVLPHLVAALGLLPPARRLYGLCGHRHLHLHDD

SEQ ID NO: 28317 - protein, 192 aa, Homo sapiens
LLISIQVLPFLLAMPETEDQAVELGRVGARTRWEFCPPMPGPKVSCTPARHCLPYPPLSSLHTQPRLNSCQLHPTWLPCALGINPKPLSLCLKPLALLPQLCQLRSVYTQMVALVTLAWQSCSQCSVPVCSHPFLLLLQKPGHPSTPRSLVLSSPHPATISPAWSHLPFGNKTKPFCGRSRWYCAHQSDPVF

SEQ ID NO: 28318 - protein, 9 aa, Homo sapiens
LDNSREKAR

SEQ ID NO: 28319 - protein, 91 aa, Homo sapiens
LECGCTMGTQDPQAEQGLRIPLPGLLLSKRHHPAPELPALALLHAGHAEPAQDGEPGHPRGLQPGPRAPGTGRRARALQLLCTGVRWNFPR

SEQ ID NO: 28320 - protein, 110 aa, Homo sapiens
LTVMIAAVRTQAAAPAPKRVRKKSLLYLLISRLSKTMGKSTHTQMVNLAWLPVRCVGWLASEMLFTLKQSVSVAFHVQEVTRQTPRRQAFWPDFRVSLQQRKQKFFRNNL

SEQ ID NO: 28321 - protein, 19 aa, Homo sapiens
LGTVLLQALLLPSAATQER

SEQ ID NO: 28322 - protein, 29 aa, Homo sapiens
LELISFLLLLLARERRWAGGTALCGPVWI

SEQ ID NO: 28323 - protein, 101 aa, Homo sapiens
LYAPSPRPYRQNRRPTFAIPCCGPGDQTWPAPGRAQRAGQPRSGAGLEGSMRGALGRTGDGARVLLPIGRHLGGRGRLRLVAPGVSPPRGNRRLPGTGAWR

SEQ ID NO: 28324 - protein, 21 aa, Homo sapiens
LWGYGRASEAPGCVRLRMSGL

SEQ ID NO: 28325 - protein, 34 aa, Homo sapiens
MWGWSLCNVLVLFFFLSPLWPLRLSFCSEPCWAS

SEQ ID NO: 28326 - protein, 33 aa, Homo sapiens
LGLPGHITYPPLLPGLFWATATVCLLPTPPVPT

SEQ ID NO: 28327 - protein, 31 aa, Homo sapiens
LENFVSMKLRKTFMASSFSGKKMKQMAMQHP

SEQ ID NO: 28328 - protein, 19 aa, Homo sapiens
LHMNFLMFFLCINFRFLIN

SEQ ID NO: 28329 - protein, 97 aa, Homo sapiens
LSSWMRFLISIICTWRFIQERITGADLNHGAHKWGGCSSGHGKNFLLQLETAFCVAGYHADSTNTNPHLDAVQTPDVPPISVSLGNVSMTERLKDRV

SEQ ID NO: 28330 - protein, 37 aa, Homo sapiens
MFSELTPMKGRWQRGSCLPHLAPKSSSTVPQPCMLSP

SEQ ID NO: 28331 - protein, 56 aa, Homo sapiens
LPAFLFPSFPLLMFSGCAHLYQLLSIHLRMHPDFSVPICPICYSSRCSTSPVCCFP

SEQ ID NO: 28332 - protein, 90 aa, Homo sapiens
LTVTICCVHNLSVFFFLFSFPPGVSSLPWFLGSPDAPGGSCCSHRKLFDHLCSPLRQPFSLQSWGRLIYCCRHPIFIGGDAVCHLGPGSG

SEQ ID NO: 28333 - protein, 85 aa, Homo sapiens
VVYVSAKQFLCYLNFHYSSLREMMFLYVFIGKVLCKTKLFSWDGRNVKEKQPCLQEVLSSALFSLENHSFFFFFPGEMFESAENR

SEQ ID NO: 28334 - protein, 16 aa, Homo sapiens
VQVDASSICKGSINFK

SEQ ID NO: 28335 - protein, 11 aa, Homo sapiens
MSLCQDPSKLE

SEQ ID NO: 28336 - protein, 15 aa, Homo sapiens
MEKSLALMCTRILLF

SEQ ID NO: 28337 - protein, 104 aa, Homo sapiens
LKMMSKMLRIWMIVIFLKHLLEGGESMMGKKASELRTMLKATGRNSDYRDIIDTPMDFGTVRETLDAGNYDSPLEFCKDIRLIFSNAKAYTPNKRSKVIFYVVY

SEQ ID NO: 28338 - protein, 103 aa, Homo sapiens
VDPQPTPPHHLSTHPHHRLEAANTQGCRISRQRERQLQRQPLARHRSSKKQHGLHRKCLLHLRRTGQGLRTRQDGRATEARQVHHHGVLHIRHVIGAVDGRDK

SEQ ID NO: 28339 - protein, 46 aa, Homo sapiens
MSGGEGAALPILLLLLALRGTFHGARPGGGASGIWCLLLPEQEPPV

SEQ ID NO: 28340 - protein, 86 aa, Homo sapiens
LLFSLLMLGWGPPCSLFLLGPASAPELAFHILPGYGDLDLSLGPLASGVIARRVGSMELLGSCGDVQGIGVRGLSAPAPTSNQALM

SEQ ID NO: 28341 - protein, 72 aa, Homo sapiens
LGLFVKVLLTSIFLSLSLKLSLKFSLPLHCFCEQSLSPPHLWWEVRGSPGQDTHALAMWLPENVVANPPVSC

SEQ ID NO: 28342 - protein, 208 aa, Homo sapiens [sequence omitted]

SEQ ID NO: 28343 - protein, 161 aa, Homo sapiens
LEASFHQAFPNTNRWFLTCINQPQFQVVCGEVSLCENMAQFDAKKFAESHPKQDTPWKRKCSQEGKQKPQAEQKEGKKAAAPASEEEMDECEQVLAAEPKAKDPFTYHPRVPLCWINFSAGTLRRTHSLWCCHIFGSSSIRTAGSCGSQSITSLKNSPRSS

SEQ ID NO: 28344 - protein, 52 aa, Homo sapiens
LTDAPRSSLSAVPQVGGTGVGRAGSASAAESARTAWGWGSIPGTAGGRKLWS

SEQ ID NO: 28345 - protein, 66 aa, Homo sapiens
LLVLLPRRLLMRRLPRAVPPSPPPARDRRSPASRSASRSARRGPQLTRAVIPRLSQQCTPFPDIYS

SEQ ID NO: 28346 - protein, 32 aa, Homo sapiens
MEPIFCKERAYALESRENRVHKEPAAGSITLL

SEQ ID NO: 28347 - protein, 96 aa, Homo sapiens
LKCLLVLFSGIGTLTQDTLWCFSQVKGTIEIGTTEDVPCFPFAFCHDCKFPETSPAMQNCSDHGAVPLAPLPPSPVRLAAGRDHGYLSAGFWFPRK

SEQ ID NO: 28348 - protein, 84 aa, Homo sapiens
MEKIWHHTYNEVRVTAEEHPVLLTEAPLNPKLNHEKTTQFIMFETFNTPAMDVAIQAVLSLYASGGTTGIVMHPGDRVTHTLSI

SEQ ID NO: 28349 - protein, 148 aa, Homo sapiens
MSRMMGTRPPCTGPQWWGTRRSSRRSSTKGVPWTDKTRMGIQPCMKHPGMVSASQPSCSLKQEPTCLPRTRRGTQLCTWPARTATPRARASSCWPGPALTSKIMQETPVCTLLRAIITCPSLGSSSLLSVLSMKRTRLETQHFTLLLP

SEQ ID NO: 28350 - protein, 17 aa, Homo sapiens
LHLMTPKLKTVSQLSWK

SEQ ID NO: 28351 - protein, 68 aa, Homo sapiens
VTRSPVRSVVSFVCLLGQLSLCLLCVLESRAQRKCKRVLRQRGEPLRGAVGDSSAVIRVAGELFETPS

SEQ ID NO: 28352 - protein, 19 aa, Homo sapiens
LPQVYSHDPPEDPHRRETV

SEQ ID NO: 28353 - protein, 28 aa, Homo sapiens
MIDFFSSALAFFLGLAPPKPLQKRELFL

SEQ ID NO: 28354 - protein, 65 aa, Homo sapiens
LQPGWSPAGAVRGGGDRVSWQLFCVGGHDRGLRSDEFPLRHRLSGLAAGQHEIQRQVGHRPGRLQ

SEQ ID NO: 28355 - protein, 56 aa, Homo sapiens
LQREIQVGDVSGSRENSMPPQRYWRTGRMKVSSPESGLSNRAGSSRRTLQRICASR

SEQ ID NO: 28356 - protein, 34 aa, Homo sapiens
LQALLPPRPGALRVAPADWSRTVPGHRAPDRHWP

SEQ ID NO: 28357 - protein, 39 aa, Homo sapiens
LLLLYKTRTDLHIGTRRRSMVIRERERISKQELPRRLPT

SEQ ID NO: 28358 - protein, 45 aa, Homo sapiens
VVAGPGRGPPGLCGLRVAISSRRLEPLLAYQHAHPGVASGEPGHL

SEQ ID NO: 28359 - protein, 10 aa, Homo sapiens
VCPEEGQERR

SEQ ID NO: 28360 - protein, 22 aa, Homo sapiens
VLLFLKLLKFVGFSLFLSLLEQ

SEQ ID NO: 28361 - protein, 41 aa, Homo sapiens
MRWQKMKAEDTSRRWGACSPFATQIMMKMTMMLIVKTLIAS

SEQ ID NO: 28362 - protein, 89 aa, Homo sapiens [sequence omitted]

SEQ ID NO: 28363 - protein, 53 aa, Homo sapiens
LSVGRRDCWPGLPSVQAAVLQTDLVPRDGQARWQRGGLGVDGSLRTHTPASRC

SEQ ID NO: 28364 - protein, 67 aa, Homo sapiens
VSSCSGVLWSSSLRTYSRRPPVGGGGCRAAASAPAARGPRRGRQSRGRRRRPGIPCRPLSPRPQLRP

SEQ ID NO: 28365 - protein, 19 aa, Homo sapiens
LALVLTAPKRNRISISSMS

SEQ ID NO: 28366 - protein, 50 aa, Homo sapiens
LRSSLGRARPPPPSLPPRARLLPPSAPRITSPWAPRPSCSSPRLGHVFLR

SEQ ID NO: 28367 - protein, 152 aa, Homo sapiens
LETVELQISLRNCDSQKDKHLSDTVRLKSTPHPKFSVCVPGYQQHCDEAKVMDIPHMDIEALKKLNKNKKLVKKLAKKYDAFLASEPLIKWIPQILGPGLNKAGKFPSLLTHNENMAAKADEVKSTFKFQMKKVLCLAVAVGHVKMTEDELV

SEQ ID NO: 28368 - protein, 35 aa, Homo sapiens
LLLYSRSETAEKALHKSGPQILSLILRNFQLVLNL

SEQ ID NO: 28369 - protein, 77 aa, Homo sapiens
LFRPRQRFLVTQALMSRLSLIILLRMSGASVLCALGLHTGGATNSHCPGLLVDSPRHRCRNLPIQCTKSSLTWCGPT

SEQ ID NO: 28370 - protein, 89 aa, Homo sapiens
VIFLKQLASGWLLVTGPLVLNQVPLQRTHQKSVIATSAKIDISNVKIPKHLTDTYFKKKKKKTLQKPRHQERDMFHIEREIRDYRAAQD

SEQ ID NO: 28371 - protein, 191 aa, Homo sapiens
LCFDGALNVDLTEFQTNLVPYPRIHFPLVTYSPIISAKKAYHEQLSVAEISSVYFEPSNQMAKCDPRHGKYMACCLLYCGEVVPKDENATIATIKTKQIFVLRTCPTGFKVGINYQSPTVVPGGAVAKVQRAVCVLNNTTAITEAWARLNQKFDLMYAKRAFMHCYVDRGMEEGELSGPERTWLPWRRIMK

SEQ ID NO: 28372 - protein, 23 aa, Homo sapiens
LIYRQIRMWVLPLFQILQMTCGF

SEQ ID NO: 28373 - protein, 27 aa, Homo sapiens
LEMQELANLAYFISLLKKNSKMTQIIQ

SEQ ID NO: 28374 - protein, 186 aa, Homo sapiens
LYRPALEEMRRQIRSSTTSMTLVTKSLKCLRPHYGKLKEMYENMAPGENEHFAADIISVLAMTMSGECECLKYRLVGSQKELASWSHEYIRHLAGEVAKEWQELDDAKKVQQEPLLTLVKEIVPYNMVHDAEHEACDLMEIEQVDMLEKDIDENAYTKVCLYLTSCVNYVSEPENSVLLRCALGVF

SEQ ID NO: 28375 - protein, 369 aa, Homo sapiens
MDPCKVNELRAFVKMCKQDPSVLHTEEMRFLREWVESMGGKVPPATQKAKSEENTKEEKPDSKKVEEDLKADEPSTEESDLEIDKEGVIEPDTDAPQEMGDENVEITEEMMDQANDKKVAAIEVLNDGELQKAIDLFTDAIKLNPRLAILYAKRASVFVKLQKPNAAIQDCDRAIEINPDSAQPYKWRGKAHRLLGHWEEAAHDLAFACKLDYDEDASAMLKEVQPRAQKIAEHWRKYERKHEEREIKERIERVKKAQEEQERAQREEEARRQSGAHYGPFPGGFPGGMPGNFPGGMPGMGGDMPGMAGMPGLNEILSDPEALAAMQDPEVMVAFQDVAQNPANMSKYQSNPKVMNLISKLSAKFGGQA

SEQ ID NO: 28376 - protein, 58 aa, Homo sapiens
MLLRKFAVLFVLRDIGLTLLTHHLVWHFFGPYTNNNLFETDECYRHLGFSVDDLRCLK

SEQ ID NO: 28377 - protein, 29 aa, Homo sapiens
LELPIFTILLSSCVSARAAWGTSSCLLDT

SEQ ID NO: 28378 - protein, 44 aa, Homo sapiens
LQYWACRLPSLSLSLLACEVGVVTKRPVAVGLSARSRRSFQTAV

SEQ ID NO: 28379 - protein, 23 aa, Homo sapiens
LLISHVIFNLLQKLTALAPLLFH

SEQ ID NO: 28380 - protein, 118 aa, Homo sapiens [sequence omitted]

SEQ ID NO: 28381 - protein, 191 aa, Homo sapiens
MPRNACGVLVLSPTRELAMQIFGVLKELKTHHVHTYGLIMGGSNGSAEAQKLANGINITVATPGRLLYHMQNIPGFMYKNLQCLVIDEADRILDVGYEEELKQIIKLLPTCRQTMLFSATQTRKVLKVGKDFSEKRSHCMLVLMMIKLIQQWMVLSRDMLFVLLKRDSFCSLHSLRRTERSSWSSFHLVCP

SEQ ID NO: 28382 - protein, 43 aa, Homo sapiens
LDRGTGSGMGTFLISKMQEEYPDRIKNTFSVVPSPKVLNCMPF

SEQ ID NO: 28383 - protein, 58 aa, Homo sapiens
LLAGLLALSITPSLPPSLPPGGRGGAGEAVKRSGPALEECGSDKGTEPSAVSPRFKQH

SEQ ID NO: 28384 - protein, 122 aa, Homo sapiens
LKHFDHSHGHCIFILMLRFFLNLFDLNGCGEVKQAECPPVFMGEGGEGTAPSLCPPPPPSPHRSPKALASSNKHFCEKAYFKRGPWEQPQVPAKETERGRHRRQGNRRVNQRVRWKEPVFSF

SEQ ID NO: 28385 - protein, 318 aa, Homo sapiens
LRERVGEGAEPAGGGACVNGAGRGRSLVSGAGRVCGVGAEPYERGGAGAWSGRGARAPAAALTSSGERSRAEVRQLLSVRGAAAASRARCPGARPPPACRLPRPPGPARSARSPRRAHGARPRGGGRGPLSAGPAPADAPSRPRRGSQAAPGPGLSRPPRPACPARPAARRRPGPEPARRTLSPAAPRSRGSPPAASQARGVKVTGPTGRTRGHGGQGPPEPALARAAGPWPAPGGRPRRPRPESVVGRRARAQPRQGERGPPRRAPPRRRPRAPHRASPAPPPPRVQLAGGGGHRRLRHRQLQHPGGPGEGYGPEAT

SEQ ID NO: 28386 - protein, 106 aa, Homo sapiens
MMAACDPRHGRYLTVAAVFHGRISMKEVDEQMLNVQNKNSSYFVEWIPNNVKTAVCDIPPRGLKMAVTFIGNSSAIQELFKRILEQFTAMFGRKAFLHWYTGEGMD

SEQ ID NO: 28387 - protein, 106 aa, Homo sapiens
LCWENESSIWKRGSCFAEAAFWIFLRMPAEGRMGAGTGMCTSATGGTRGYPKEGRRHTSGIGGVSKSAEMWAGHQPSKSSLGLASCTGEMVGPGKEVTPSCFPEKA

SEQ ID NO: 28388 - protein, 81 aa, Homo sapiens
LCWENESSIWKRGSCFAEAAFWIFLRMPAEGRMGAGTGMCTSATGGTRGYPKEGRRHTSGIGGVSKSAEVRDLFSYQTVPG

SEQ ID NO: 28389 - protein, 32 aa, Homo sapiens
MGLRVPPPPRRGLLTARTFKRNRVTWQVRKQH

SEQ ID NO: 28390 - protein, 30 aa, Homo sapiens
LGFFSPLKNSILENWEKSLWFGKKKKESSA

SEQ ID NO: 28391 - protein, 27 aa, Homo sapiens
LRVLGLHLRSLTAAERWEASPGLPDLP

SEQ ID NO: 28392 - protein, 118 aa, Homo sapiens
MLPNKQTNKKSPPVRCRDLIETVVGALAFFQAGGDPHPWQPDREAEEARAPGDSREGGGPGGQAPSPTPPQDPGAGLSPAFAPMGMRERRWVREQLWPLGKVTWMQPLKEMLPVNPIG

SEQ ID NO: 28393 - protein, 59 aa, Homo sapiens
LEAYFPVARTHFSEWKQVLACGCVFPQADGPSLPSTSLPPPGLRPSTQFLLTWQVSTDF

SEQ ID NO: 28394 - protein, 79 aa, Homo sapiens
VILLSVSVTTRAQPYLSRRTGAGAARAAKQPTAETSGLLQSPRHHECHRGSLPLLRAPRPPHSLLHGGAARPTSSRGWE

SEQ ID NO: 28395 - protein, 75 aa, Homo sapiens
LLVALSALFLGRWLVVRLATKWCQRKLQAELKIGSFRFFWIQNVSLKFQQHQQTVTLCGIVLWRSAYQNGPTESF

SEQ ID NO: 28396 - protein, 72 aa, Homo sapiens [sequence omitted]

SEQ ID NO: 28397 - protein, 262 aa, Homo sapiens
LESGKCHLPHHLWPLLGLLPRRLPLPGLYQRRPLRGHRASAPSRAAALHSRPRTLGLRHRVAAVTAPGAACAALQPGWAAGRPTTLSPHLPRGPHADGEGGERRGAGGPGLRAAAGRHGSLLRASGPHAAGRQGARAPACAARRGGSGGGLRGAAAALQPRPAAGYCRSTGCARAELPCQQTQGCRTAGDQRLGPRPLWPQSRSLRLPGPALPPGPAEAATGWELPLRASTPPRLPPPAPPFFLLSSHGDPQSLLGQLGLRI

SEQ ID NO: 28398 - protein, 80 aa, Homo sapiens
VKWRISGLTFLVLFLKTSACPKKCRLCPSSLRLGSRTPPAHFKAKGKNLDNQLRLEKTPMSAELRFHLWAKDYLDAKARD

SEQ ID NO: 28399 - protein, 47 aa, Homo sapiens
LRSLVHASARASTAGSHDGTFSSFLGGGQHRGEGVPTDARSLKAAGG

SEQ ID NO: 28400 - protein, 19 aa, Homo sapiens
MFYTNQMGNTLSIISDMYA

SEQ ID NO: 28401 - protein, 118 aa, Homo sapiens
VEEGGCSDGRECRGPLESASAAGAPGRRTRQAGHRGGAEQPHRAAAAPAAVPPRTPCAPHPPPSRAGGRQCYGAACSVWSPGCPGSAGGGCQGGPCGRGGRGVQSGESPEQECISLAP

SEQ ID NO: 28402 - protein, 29 aa, Homo sapiens
LLTFLFSVALPALCFSLHVTRGTTLRASR

SEQ ID NO: 28403 - protein, 64 aa, Homo sapiens
VARKLVVIERDLELTEERAELAVSHCREMDEQMRLMDHNLKCLSDAEEKYSQKEDKRGRDQDSY

SEQ ID NO: 28404 - protein, 16 aa, Homo sapiens
LLLMLGPLAPVFLCPT

SEQ ID NO: 28405 - protein, 32 aa, Homo sapiens
MNRMLEIFCDLVFMIVSLVSYQSLGQHFICSQ

SEQ ID NO: 28406 - protein, 38 aa, Homo sapiens
LYFLEKSVFFLLTLTASFWPGTTGGTWQIMGFEELSIC

SEQ ID NO: 28407 - protein, 25 aa, Homo sapiens
LLLPDDVARVSSHCLLPQVPGNWIL

SEQ ID NO: 28408 - protein, 40 aa, Homo sapiens
LPLVHRKRVATRQVPARKKRPKRLRTGNMVRSGNKLLKTL

SEQ ID NO: 28409 - protein, 33 aa, Homo sapiens
VAVVLACALSSLGVWCWLLGTTNPRVRCARPHF

SEQ ID NO: 28410 - protein, 38 aa, Homo sapiens
LTLRDFSFTGQIKTRRQSYWISALSKMPDVGDTPKLPR

SEQ ID NO: 28411 - protein, 57 aa, Homo sapiens
LTLRDFSFTGQIKTRRQSYWISALSKMPDVGDTPKLPRTPNYVNFWMWGTSGAWSSA

SEQ ID NO: 28412 - protein, 45 aa, Homo sapiens
LLRRQSYWISALSKMPDVGDTPKLPRTPNYVNFWMWGTSGAWSSA

SEQ ID NO: 28413 - protein, 53 aa, Homo sapiens
LLNDFTFLPSRRQSYWISALSKMPDVGDTPKLPRTPNYVNFWMWGTSGAWSSA

SEQ ID NO: 28414 - protein, 15 aa, Homo sapiens
LLFLVFLEMLSPSIF

SEQ ID NO: 28415 - protein, 82 aa, Homo sapiens
LSRAPGPKFGGGSGRQSGLPGRLPGPSRVLAPDPWAAGGNGSRGRANSEAGTPRRELEGAGCLMKEPGLHTDNSRTGGPRGM

SEQ ID NO: 28416 - protein, 41 aa, Homo sapiens
LLIEWFYLILLYIATLTILPATYLKGCDGEVINWCFQTSVG

SEQ ID NO: 28417 - protein, 24 aa, Homo sapiens
LIFFSFMSVRHLLVFIVKRASRAL

SEQ ID NO: 28418 - protein, 21 aa, Homo sapiens
LHQIPEKASLDTSRLCGHEAL

SEQ ID NO: 28419 - protein, 25 aa, Homo sapiens
LEAGRNFRSSILSVSLRWRFPTEVM

SEQ ID NO: 28420 - protein, 22 aa, Homo sapiens
LLPLCSLVSLWALWYMTASRLP

SEQ ID NO: 28421 - protein, 33 aa, Homo sapiens
LLVLLGFSTNTISAWCLCPFAGAATDNCLMEKE

SEQ ID NO: 28422 - protein, 41 aa, Homo sapiens
LWTLTANKESLLSSLSGWVLVMFLRPAQSVGWRLAEAGVCQ

SEQ ID NO: 28423 - protein, 205 aa, Homo sapiens
LRRARLGGSGGEPNPRGTGSGRGRAGPGREPAGVGRGRGRGRRSAVLGVQVLRRLHVARRPVGWSGRSSARGLRELRPVPASRAPALRLLLGHGRAGPRPGGPGRAVRFPVQAGAGGRRKRGQDVRGAALQDRRLLGAPGKHHRRRLHHEDAGDPGQAGQAADLGHGRPGAVPHHHPELLPQCQWGHPCLRHHQEELLPVGASLD

SEQ ID NO: 28424 - protein, 54 aa, Homo sapiens
VPLRRLISETASILICGEPLPYQGVLSARRWMLRACPPQPRSAVLRWGLRPRMH

SEQ ID NO: 28425 - protein, 89 aa, Homo sapiens
VTGAPLAPRPAQTTSRGSAPPRPGLAPPGIPRPPSLQPRRRAGQRFGGGGGRGGSEGGGGGGSGSGRCSPTLRRQTGGATEARPQEDGG

SEQ ID NO: 28426 - protein, 53 aa, Homo sapiens
MTQVPISLKRVLWNCPILIRDGKRKSSHITRLILCLISNFNLKLWFSFLFTLK

SEQ ID NO: 28427 - protein, 24 aa, Homo sapiens
MLYSKMKENMKCFFLSLLVECVSI

SEQ ID NO: 28428 - protein, 22 aa, Homo sapiens
LLTVVLLMLSFFMISQQSKLMI

SEQ ID NO: 28429 - protein, 17 aa, Homo sapiens
MRTFFGLAFLLKWLNLC

SEQ ID NO: 28430 - protein, 63 aa, Homo sapiens
LLAAPNPANGGRGGRKAGRPKPRRGRFRAPGLLRPGRRETCPAVLEGGEGSPVALPTLQSCWS

SEQ ID NO: 28431 - protein, 46 aa, Homo sapiens
LILPTSQYRRLAPQQNTKFAFPKGRPGGGPGKGSPLHFAVCWNGVE

SEQ ID NO: 28432 - protein, 33 aa, Homo sapiens
LPGIPHAARNPTHSYSVRLPRKGCSAVAALVRQ

SEQ ID NO: 28433 - protein, 41 aa, Homo sapiens
VPTFLIVIFVLIQNWLLYPGLGRNGGCRHFPPVEDLPVEEF

SEQ ID NO: 28434 - protein, 24 aa, Homo sapiens
LPACPPACSLAVLLLKEISPSFPT

SEQ ID NO: 28435 - protein, 92 aa, Homo sapiens
LAGSSARVLLTPRTSERRARTGAWGRRRRSQKGPSGAETFGGRRGLRVSMAGSGMRLDRPGRRSGTRREAEGWRPRGHPSAANQAEALGLDP

SEQ ID NO: 28436 - protein, 171 aa, Homo sapiens
VAGGSQESGARAGGAQRGDAAERAPRLGGGRQTGVPAAGGSRSGGSRPGPGSGAGSREPSEDPAPAVQSWPRPCSAWPRGAGTTARPGHPKPSAGPGRAGVGGGPPGPPMGSGCRCGGATSRRRTPSWTPSSASLRARAVSSSSPTLGWRTAPSSTATTASASCAATRGPR

SEQ ID NO: 28437 - protein, 32 aa, Homo sapiens
LRRIALTRLLFIVTNLWWNLQLHIGSDSPRPE

SEQ ID NO: 28438 - protein, 149 aa, Homo sapiens
LGVCLGIYCGNPGCFPTSPWAPTRVWTDQVPGWRPELEKEMRLGGNCRGRQHGKAAPEQQERPRPPRGAASCWAAADHGPDEYSALPLPRPLLHRSSTIHCGPHTLSLWSLQDRTDEKLLTLAVLRGAENRSETAEACWGRSCKESLSV

SEQ ID NO: 28439 - protein, 108 aa, Homo sapiens
LDLMETEQAVDLTLPKVEAMNKRLDSLVVEFKELVYPPDYNPEGKFTKRKQNNEDFGSKRPKMKYSEEELKANISKGMLGNFTVPMLKEAYGLKKQELLEVLSEHFQA

SEQ ID NO: 28440 - protein, 19 aa, Homo sapiens
LQIGVLKDNWEKGFEIVNS

SEQ ID NO: 28441 - protein, 46 aa, Homo sapiens
LYYCLVLFILAHRGFSHRKFGQSELNIVSQPLGPEDFWDPAVGRRK

SEQ ID NO: 28442 - protein, 83 aa, Homo sapiens
LATILGLGAAHRWAVSAILCSSWSSLLTSLAHPAPPTGPPQLLIPLCAGLHARQKEEWHWHPDPALPSRWGWMGKGESCLALR

SEQ ID NO: 28443 - protein, 46 aa, Homo sapiens
LAHTLGHTVLCALILITGVSKGSIYPDGYLDHDYLDWGEGGSVFFF

SEQ ID NO: 28444 - protein, 114 aa, Homo sapiens
MNSHSSSFFFASFICRSVLLTYIILDNKEEHMQQKKEEEEVLKEVTAHFQITLTETQAQLEQHEIHNAKLQQENMEMGEKLKKLTDQYALREEVNGVWFVYRQLLTSSKSYTLP

SEQ ID NO: 28445 - protein, 9 aa, Homo sapiens
MTCTSLSKS

SEQ ID NO: 28446 - protein, 136 aa, Homo sapiens
MHIRKAMKYLKDVTLQKQCVPFRRYNGGAGRCAQAKQWGWTQGQWPKKSAEFLLHMLKNAESNAELKGLNVDSLVIEHIQVNKAPKMCRWTYRAHGWINPSMSSPCHIEMILTEKEQIVPKPEEEVAQKKMISQRN

SEQ ID NO: 28447 - protein, 62 aa, Homo sapiens
LALHLPREVPWQALLLLQPWPEPRQWQERSAAADQHRPHLVQAEGDHNLLGPLPPARALPRR

SEQ ID NO: 28448 - protein, 28 aa, Homo sapiens
MPRVLWLFWISSFTHYQSTRKVSLLPGV

SEQ ID NO: 28449 - protein, 72 aa, Homo sapiens
LQGSDLPSKKTTSTFFFCILINTEAGAVKFILGKPQNWSIWCRGTSYCFQYTISNQLFCILVFSFHFDKQAL

SEQ ID NO: 28450 - protein, 123 aa, Homo sapiens
MTQIMFETFNSPAMYVAIQPVLSLYASGRTSGIVRDSGDGVRVTHTVPIYVGYALPHAVLHLDLAGRDLTGYLMKILTERGYSFTTSAQREIMPHIREKLCYITLDFEKEMATAASSSSLEKS

SEQ ID NO: 28451 - protein, 88 aa, Homo sapiens
LQNKSQFRTIAPKIVPKVLTSRMLPCHSPSRSDQDLRPTVIRYPPPQKALMQPPRWQAGYLFHKCHSRVPVKVPFVHPPNLILTTKQN

SEQ ID NO: 28452 - protein, 20 aa, Homo sapiens
METCALCSFSWAAWLLATSC

SEQ ID NO: 28453 - protein, 23 aa, Homo sapiens
MPAPPSPAGSPRPLPRLAAAVPM

SEQ ID NO: 28454 - protein, 130 aa, Homo sapiens
LLEPDHPFYSNISKDRRYADLTDDQLSSCESLKDTIASALPFWNKEIVPQIKEGKWVLIAAHGNSLRGIVKHLEGLSEEAIMELNLLTGIPIVCKLDKSSKPIRCMEFLGDEGTLCKAMEAVAAQGKAKK

SEQ ID NO: 28455 - protein, 34 aa, Homo sapiens
LGFSAAISLAGLGWCASSLGFRFFPLLCCESCRL

SEQ ID NO: 28456 - protein, 102 aa, Homo sapiens [sequence omitted]

SEQ ID NO: 28457 - protein, 16 aa, Homo sapiens
LFKAGFRNSSRTYLHY

SEQ ID NO: 28458 - protein, 21 aa, Homo sapiens
MPVQDPRLVLEHTEGCKGWKI

SEQ ID NO: 28459 - protein, 67 aa, Homo sapiens
VSRSRGGLCDPCSPDPPSAQLGRAHWAPAPLPVRSAASPKPPTSHELLQKGPPRRQQLRAPPGHHCG

SEQ ID NO: 28460 - protein, 64 aa, Homo sapiens [sequence omitted]

SEQ ID NO: 28461 - protein, 84 aa, Homo sapiens
LKEAGTPGSQTRADPIVKYFYIFSFPQKRSLTYCFIDSLAVRGSFPEVGRRGSGVAVSCLPSQVVTLVMDCLSPSFHPGETVQI

SEQ ID NO: 28462 - protein, 20 aa, Homo sapiens
MWTYCYLFFMFSTCQEMPHL

SEQ ID NO: 28463 - protein, 132 aa, Homo sapiens
MDDDIEVLVVNNGSGMCKVNFVGDNAPRAIFPSIVGHLKHQGVMVGIGQKDSYVGEDAQSKRGNLTLKYPIEQSIVTNWDDIEKIWHHTFFFFFFFLRRSLALLLRLEGSGAISAHCMLHLPGLCHSPASAS

SEQ ID NO: 28464 - protein, 38 aa, Homo sapiens
LLLEQCSHRPPGFQTLQVLKIPKNDRRSMPNTESETSA

SEQ ID NO: 28465 - protein, 32 aa, Homo sapiens
MLLPIKGGKEHLRRVFQLRISWTVYKGMGLSV

SEQ ID NO: 28466 - protein, 131 aa, Homo sapiens
LKRRRSPCPGTAGGPGETNPGPGACPRGPREEAAAAMEIAPQEAPPVPGADGDIEEAPAEAGSPSPASPPADGRLKAAAKRVTFPSDEDIVSGAVEPKDPWRHGWSAMARSQVITTSASQVQAILLPQPPE

SEQ ID NO: 28467 - protein, 156 aa, Homo sapiens
LPTMTIHILILLLLLAFSAQGDLDTAARRGQHQVPQHRGHVCYLGVCRTHRLAEIIYWIRCLHQGALGEGQPRAPGPLQLWAPPVARGGSPARFPGFRPAARGLAQCPARWVTSGTARPLLGFSLPICMLELLLHISSPLTPAPETVFPSPSPGCD

SEQ ID NO: 28468 - protein, 87 aa, Homo sapiens
LTVTTRYVFGVFFGFVLFCFGGGHGLSLPPRLESSGMISAHCSFYFLASSSLSTSASQRTGITDVSHHTRPTSGPYTRLIYLEMAGN

SEQ ID NO: 28469 - protein, 175 aa, Homo sapiens
VAGGRLRAACGAGTRDPCGPPPENEAASLESTTVTWLKRGGEVQHWPLQRGSPGQALSCQVSLTSHLSEDMDNGSEWSQEDPECRLATEKRRAGILQPELCAPGWRLQPRRLGREDSPRPMPRVPPGPGRRGPRSRGPSKRTELGAAPLKRGTCVERRAVGRLPQAGAPGAAASG

SEQ ID NO: 28470 - protein, 13 aa, Homo sapiens
LASCLCGAVLLIV

SEQ ID NO: 28471 - protein, 52 aa, Homo sapiens
MSSWDYRCVPLRPSDVCIFSRDRVSPCWSGCSRTPDLVIRPPGPTKVLGLQA

SEQ ID NO: 28472 - protein, 22 aa, Homo sapiens
LTMMIRMWCFLTVGCCQRTMAF

SEQ ID NO: 28473 - protein, 41 aa, Homo sapiens
VKAIKELGDHVTNLRKMGAPESGVGEYLFDKHTLGDSDNES

SEQ ID NO: 28474 - protein, 24 aa, Homo sapiens
LHSELLLLAGMSVIIVSGVAGPLH

SEQ ID NO: 28475 - protein, 50 aa, Homo sapiens
VFWTFMALRFSRMQTTALSSSLLIIVTKSCNKSSLNLLLKKSRRSIYGRI

SEQ ID NO: 28476 - protein, 47 aa, Homo sapiens
VTHDMFWRLWRTTALSSSLLIIVTKSCNKSSLNLLLKKSRRSIYGRI

SEQ ID NO: 28477 - protein, 36 aa, Homo sapiens
VDGGPRLLVRSPWLVLWNLTLDVLGSGAPNTGKSTP

SEQ ID NO: 28478 - protein, 159 aa, Homo sapiens [sequence omitted]

SEQ ID NO: 28479 - protein, 34 aa, Homo sapiens
LVSPSSAGPEGRQPQLTAHADCGRWCQPVVDLLL

SEQ ID NO: 28480 - protein, 99 aa, Homo sapiens
VALTWSPCLGLAFLTVSWASCHPGSGGRLSGRGSASPPHPEDSLSGPGLCCVHRLSAGPSLPRALPGDRSSCAGLSCHLATGHPGVQPSCPEATCHRPG

SEQ ID NO: 28481 - protein, 37 aa, Homo sapiens
LSTALSLRYYGVVTLVSILQVVLQCILPNAQGPGPGR

SEQ ID NO: 28482 - protein, 70 aa, Homo sapiens
LMPSLSFIVSGVPGPLRLKTLPSPYTSPGVRVTSTGRPGHASRFMEDTAAEKLHKVVNSILAFREKEWQR

SEQ ID NO: 28483 - protein, 47 aa, Homo sapiens
VGGLIWKKKLPISCHQKTHGGEAQSINSKLKRPRMLPLFKLVCLKII

SEQ ID NO: 28484 - protein, 120 aa, Homo sapiens
LSTGEKGFGYKGSCFHIIIPGFMCQGGDFKHHDGTGGKSIYGEKFDDEKFILKNTGPGILSMAMLDPTQMVLSFSSALPRLSGWMASMWSWQGERRHEYCGRHGVLWVQECQDQQEYHHC

SEQ ID NO: 28485 - protein, 42 aa, Homo sapiens
LKIYFLMVVIPLHSFEFGRMAYTSEKYHYFLHWTARYFCLEK

SEQ ID NO: 28486 - protein, 23 aa, Homo sapiens
MQPCPFKKTKRQSALRRRRSLGG

SEQ ID NO: 28487 - protein, 13 aa, Homo sapiens
MYIFPILFSVYME

SEQ ID NO: 28488 - protein, 27 aa, Homo sapiens
LYIVPKLLQGVIFALVLRNNSAVLKNI

SEQ ID NO: 28489 - protein, 26 aa, Homo sapiens
MEKNKVKLYHCPKMKHSPGQVPKQLR

SEQ ID NO: 28490 - protein, 18 aa, Homo sapiens
VTSQTSSEMLPRISQPPG

SEQ ID NO: 28491 - protein, 8 aa, Homo sapiens
MIILAWAA

SEQ ID NO: 28492 - protein, 63 aa, Homo sapiens
LSGLLLVTLHFRLPCVLQLRAAQGNEANGSKWRGGSWGGSPGSWLSEEVQLRQGQGSLGSAIS

SEQ ID NO: 28493 - protein, 34 aa, Homo sapiens
MWFPAFLAQSGILLFCSGFQHSSPSPGTLWVCPA

SEQ ID NO: 28494 - protein, 154 aa, Homo sapiens
VFASSPSLPEDQVPPLLPLQLRPPPPPPPPPSCMTQQNRSCCSNFKPSAQEAPQPGLGRGGGGEAEAAAPGDPWPHCAPHTPFPAQGHANKMRLKLTRPSRRNAGAWQQKGWDQREGCGGDPSEGQDISGKERSYLRTSLPDTNKFSLLSATKP

SEQ ID NO: 28495 - protein, 27 aa, Homo sapiens
LNFNWKRLIMLSALCWISTFLKDLVLR

SEQ ID NO: 28496 - protein, 8 aa, Homo sapiens
VRLWLLLS

SEQ ID NO: 28497 - protein, 17 aa, Homo sapiens
VLLLEELPKSRRTEWSQ

SEQ ID NO: 28498 - protein, 62 aa, Homo sapiens
MDEVVKATSRGCITIIGGGNTATCCAKWNTEDKIRHVSTTGGASLELLDSKVLPGVDALGNI

SEQ ID NO: 28499 - protein, 37 aa, Homo sapiens
LLLYSKLILLSHLKNVCREQEPSYPSPSCIGNPPKSE

SEQ ID NO: 28500 - protein, 121 aa, Homo sapiens
LPGLHLPRELCCHFTSTHHIPPTDYHLSRSGPTWKMPELAMPFQTLIWTAHQPLKGPFSLVSFLPTPSVLPCPTRLLQGRGVPGSQIVDTSFFLCTGFTQLSFFFQNCSSPTDVCIWTNST

SEQ ID NO: 28501 - protein, 63 aa, Homo sapiens
MQKEITALAPSTMKIKIIAPPERKFSVWIGCSILNSLVTFQQTWISKQEYDESGPYIVHHKCF

SEQ ID NO: 28502 - protein, 234 aa, Homo sapiens
LPSLPRTGSPSGPGLPPACTRSPGTRVIRRLCCHRLCRNRLRAPVAPAPPPPSRTLGWGWHVGTGPGRRRRCALTCRRCCCGGGCGGGASGQPRPCCPPRRRRLCLSLLLLLLPPRSVSPARRRRRRRGFSCPVTLRSHDRESGETSAKRLRAAPAGGERRRESSGGKSPLRPPPSRSPPPARLRLLLLCRRRRRLQHSTAAPTQAPRSAPAKLLQTMCSRGEETSLHLLGLEA

SEQ ID NO: 28503 - protein, 292 aa, Homo sapiens
LAAVLGLWMLSWPVDGVPASTYPSQPLLLDSSHGPAREPELLQDRERRVWLQPRPLLHRPGRGPLRRVPRLRHLQPGPEGAEGRHRESGHPVSELPPGDLLSQWDPGGMSAPDQPSLEKSDRPLRSHPGAATSPASLGPVFTAWGPGSQGGSLRLSEHWALHLPLPRPRPHSRRCSWLVTKAGAGTSSSHWVWWFLSGSLVIVIVCSTVGLIICVKRRKPRGEHTAAPSGLMSPAVTSWSSVTPSLGGGPRAFPGSAAPPRAATAGWGRWAFCCGQSPGVSWPPWGKGRWDP

SEQ ID NO: 28504 - protein, 20 aa, Homo sapiens
VLVSDMILIFYTLLVLSRSH

SEQ ID NO: 28505 - protein, 13 aa, Homo sapiens
MILIFYTLLVLSR

SEQ ID NO: 28506 - protein, 20 aa, Homo sapiens
MFMVLLYIGTWTFWLQPKPP

SEQ ID NO: 28507 - protein, 57 aa, Homo sapiens
VALNWGLALAGLSRRLTGGQILSIYFVPNTMPGTGDTMADSIDLVPALSAYTAPHFR

SEQ ID NO: 28508 - protein, 51 aa, Homo sapiens
MTTALLTSSLFISLSSTHPFTSLCRFICIPPPVLWGYTASAFPHCMGMCSL

SEQ ID NO: 28509 - protein, 24 aa, Homo sapiens
LLPNALSCHFRVPILNKRSPDRSK

SEQ ID NO: 28510 - protein, 32 aa, Homo sapiens
LKIARLFLSLCSKLFSFFTRFCFPPPAAVVSH

SEQ ID NO: 28511 - protein, 49 aa, Homo sapiens
MGLPLSLVLYPFPLGSSCCLCDLLVVPRTGHLQESGQTADVAGGQGSSA

SEQ ID NO: 28512 - protein, 67 aa, Homo sapiens
MPVPSAGRVSTPGGIVFCMAKSTQERHPICAASVEKASPREGVWLCTSEAAHRGSPFDHFPEEKFSL

SEQ ID NO: 28513 - protein, 49 aa, Homo sapiens
LAVLWFLCSPPIRVLLATQRKMLPTASLAQVGWTSTCPQGCVYCIGATV

SEQ ID NO: 28514 - protein, 31 aa, Homo sapiens
LALQENILLKPWEKRQMVKRRMKGCRRELLF

SEQ ID NO: 28515 - protein, 81 aa, Homo sapiens
LLELILFAFPLLCGCVTESLEPGHASHILPASSLVETSFEDSYNCDSPTGQGFGKAGDWPADCSGSKIGLLSPWPEFYAYW

SEQ ID NO: 28516 - protein, 221 aa, Homo sapiens
LNQTMTQTLKYASRVFHRVRWAPELGASLGYREYHSARRSLADIPGPSTPSFLAELFCKGGLSRLHELQVQGAAHFGPVWLASFGTVRTVYVAAPALVEELLRQEGPRPERCSFSPWTEHRRCRQRACGLLTAEGEEWQRLRSLLAPLLLRPQAAARYAGTLNNVVCDLVRRLRRQRGRGTGPPALVRDVAGEFYKFGLEGESQDRAGQASGAPYQSLPEP

SEQ ID NO: 28517 - protein, 39 aa, Homo sapiens
LRTRPSIWLSRALFLALQPGGIGLANGQLGCPDRLRIRL

SEQ ID NO: 28518 - protein, 90 aa, Homo sapiens
VAPVWEAGGVAASGRRCPLLGSSPPSPFCCYRERGGHGTLPGAARGRTRRAAFTQRSVPPLGFGWVLFKSVEEPFLRIPSHQRYLCCLLM

SEQ ID NO: 28519 - protein, 37 aa, Homo sapiens
LLPGARWPRNAARSRAREDPTRGVYPAQRSTARVWLE

SEQ ID NO: 28520 - protein, 33 aa, Homo sapiens
VVEELPAAAAQVAKTRICWNLAARSCSTTRCMP

SEQ ID NO: 28521 - protein, 110 aa, Homo sapiens
LLVLLVLFILQQHSRQPLSTGSPCIRTNNLWSVKIQAPVRFEWAVKSRVLLPQVPSAPDKPLLVSPSPAKHPPVPPPVGLASGLWTDSCPIPETPRDRALARGPWPGWVG

SEQ ID NO: 28522 - protein, 181 aa, Homo sapiens
MKRETPKKKKNAEKTPQGAVPAYLLDREGQSRAKVLSSMIKQKRKEKAGKWEVPLPKVCAQGETEVLKVIRTRKRKKKAWKRVVTNVCFVQDGFTRIPPKYERFIRPMGLRFKKAHVTYPELKVTFCLPIFGVKKNPSSPLYTTLGVITKGTAMEVNVSKLGLVMQGGSYLGKICPGYQQS

SEQ ID NO: 28523 - protein, 246 aa, Homo sapiens
VALVLPHPSHLPLPWVSLQLCPDPSPCPWTPADSSHTEQSEVMLATALAAHGNSKCLPNQTAPHEVRVPHPPPAQRPTLFPSPFIPEGPHQQRQKLMFHACPCFQSLTFQSLLPSSWLHRHLCLATALLFGPQATRPLTAWPLALPALPSPSAVPRSAQHYSACSPGPAASASPGSFLEMQTCGLYHRPLESESSGWGPAVCVLTGSPGDAGACSSLRTAALIDCSSKGKQCGTAEKVPSLSLTVQ

SEQ ID NO: 28524 - protein, 98 aa, Homo sapiens
LGTAPGSEAVQDRTGGGSAEAPAAGLVCLPGPRAQPAPGGCGCGCLRVGGCELPPGRECCVAPVQQRQLPGLIPRLGATEGLAGSPVLLTGGQAAAPG

SEQ ID NO: 28525 - protein, 84 aa, Homo sapiens
LLSVSWAAGGLAGEELGATEKQAATCLRNPSPTWQSTCTRSPGPMSATARLAGGSAQSPSRVPTTGPTPSSFPRGPETQWGVTV

SEQ ID NO: 28526 - protein, 117 aa, Homo sapiens
LELRAASLCQLLWTLAAVGSGCRACLPEGGPSPLHLSSNSGCAGYCLGKTGTPGTWQTKISSSAWKALMAASPPELAMMVILMGTATMRKVTSSAPSRMTQARTRMSIPRLISTTAT

SEQ ID NO: 28527 - protein, 27 aa, Homo sapiens
MIRNWLTIFILFPLKLVEKCARGYAFL

SEQ ID NO: 28528 - protein, 25 aa, Homo sapiens
VEAAAAAGRERRAPRGQPGRATVLV

SEQ ID NO: 28529 - protein, 11 aa, Homo sapiens
MLPSANSSRLR

SEQ ID NO: 28530 - protein, 35 aa, Homo sapiens
LSYDVLSASYAASTKVLLALLWWTAPIGHTCPALQ

SEQ ID NO: 28531 - protein, 67 aa, Homo sapiens
LNRVPRSRPSGGAAREEAWACGPGAAGAARGRERKSRGGRGQRREQGGRVPRSLPMAGSGPRRRRRR

SEQ ID NO: 28532 - protein, 56 aa, Homo sapiens
LIMALAFLGKWRLPDPVRVSPMPGRGAGGCQPWGPAQAWAFPFPQARAPPPVVGSL

SEQ ID NO: 28533 - protein, 155 aa, Homo sapiens
LFFLDTEAPTRLSRGRGSGLQAGQGWVGARDAPACFLHGWSPSTAGPQPKADLDYRPAPRSQDLPPAEPTRIALRPGRRRPRLLYPALGLLRTARLPFSSCGSMRRRPCRPRGSWRSSGAPTAACAGRVGPSPRRLSCSSCTSFPGAGWTWPRKA

SEQ ID NO: 28534 - protein, 118 aa, Homo sapiens
LPPASQCSLDLGGVGPCAFLKCWQPSGTSFRPLGYSPSVPKSASYSGRTACLDFGVGGGQTPQELSPPADGQINWWRTERNLFISLLRGLWEEVTRVPGTPARRVSASPGLGEVHLSP

SEQ ID NO: 28535 - protein, 116 aa, Homo sapiens
LSALRPVGQTSRHPPPLTGRPLSTRLVTSKCRLDPSPASPHAGQRPFSPPNVYTVYTGHRCCRRDWFSVPKNVTFVMSCPPGVFPHTPAIAARSQEARAGLRGLEAGEAGPPPRWH

SEQ ID NO: 28536 - protein, 138 aa, Homo sapiens
VGLAEHPICASPSRRTPPPGASRDHRALGLLDTEAEPPRCADSPPLRFQIVHAPEQRRTSPRLRRHHLRAKLWPRPLRHRSDPDQRPRQRPRPPNSHSTPRPAPCSPRQPAPAQRSPLRGASGPRTGALVPRSPEFHR

SEQ ID NO: 28537 - protein, 32 aa, Homo sapiens
LAMDSLHRTASLLLATVLPFLSLALGVAEGAD

SEQ ID NO: 28538 - protein, 68 aa, Homo sapiens [sequence omitted]

SEQ ID NO: 28539 - protein, 16 aa, Homo sapiens
MVCTLSHWDSWPWWRI

SEQ ID NO: 28540 - protein, 72 aa, Homo sapiens
MVSFSSNRISVAHLMLTKDLMIPTVFRQREYGKSQKKCPQPAQATVHVVKWLSLESLLPWHKVLQRSLNNSS

SEQ ID NO: 28541 - protein, 52 aa, Homo sapiens
LPWRDQRAFVFLLTLHLLFSPNTLPATGGPCFSEYHVSRRGHGGQGGFERAG

SEQ ID NO: 28542 - protein, 167 aa, Homo sapiens
LERGLRAPVSGAGVCSDHHHRGGDDGDGGGDHVPAEPLQAVCTVLHQPAQPGAEERRCPVLRRMPVALGEHSVRQRNPRAAGLRPASAHRPPGRAALRPAGALPPLPAHLSVPAARDRPATHHLAVRRGGAPTLPGPLHPPASGPRAAAGTEPGVGARTPKQNHLRQ

SEQ ID NO: 28543 - protein, 243 aa, Homo sapiens
LAATRARRAGARLPRRAPPACGAPAPGAGRSPPRPPPSPPRPAPRRRAVHAPLDGGQQHRRRRRRAAQCLLHVQLQTLFVPEHGDHGAGVCSDHHHRGGDDGDGGGDHVPAEPLQAVCTVLHQPAQPGAEERRCPVLRRMPVALGEHSVRQRNPRAAGLRPASAHRPPGRAALRPAGALPPLPAHLSVPAARDRPATHHLAVRRGGAPTLPGPLHPPASGPRAAAGTEPGVGARTPKQNHLRQ

SEQ ID NO: 28544 - protein, 189 aa, Homo sapiens
LAASLCLCRESGNPLPAPAFSEFFRMNSLWSSGAGVCSDHHHRGGDDGDGGGDHVPAEPLQAVCTVLHQPAQPGAEERRCPVLRRMPVALGEHSVRQRNPRAAGLRPASAHRPPGRAALRPAGALPPLPAHLSVPAARDRPATHHLAVRRGGAPTLPGPLHPPASGPRAAAGTEPGVGARTPKQNHLRQ

SEQ ID NO: 28545 - protein, 75 aa, Homo sapiens
LSAPAESQFDPGSAGAQGAVTVVGGGGGGGGTEPVVEPPRRVTQHNASSAPGPTPDHPQGPEDRKAEDFTSAGDL

SEQ ID NO: 28546 - protein, 13 aa, Homo sapiens
MFVHQKPPVLFEA

SEQ ID NO: 28547 - protein, 55 aa, Homo sapiens
MCPWRWNLLWHSLLFEAVFLARPSPNRPGVSHAGGGLSLCCRGLYVTYHCNQDAL

SEQ ID NO: 28548 - protein, 107 aa, Homo sapiens
LTNLCFLQTDENFILKHDRAFLLSMANRGKHTNGSQFFIKSVTPCAPKVMSHYSKALSLFAFISLILLLCALKHFKKKKNFLLYLYSSSTCKTSAFYFSWLILGTIF

SEQ ID NO: 28549 - protein, 48 aa, Homo sapiens
LQLFGLSLWLVLGCAASHGALWAQRSDRLRRVGTGPAACGHHGLHGVR

SEQ ID NO: 28550 - protein, 34 aa, Homo sapiens
LDEVYPMCKALRRTESNSSSVQVEYILPSLYRYP

SEQ ID NO: 28551 - protein, 43 aa, Homo sapiens
LLMYWKCFLTFGSLCSHCPHPRPTTKNPAEAETTKRQSSLLLQ

SEQ ID NO: 28552 - protein, 80 aa, Homo sapiens
VGYFSSGAFAFFFLWARAECRPLSKDSLVKPRATLPSIVGLGSVAVPRARRARRQRERSRPRTGPGACLPPSLAPAGSLA

SEQ ID NO: 28553 - protein, 74 aa, Homo sapiens
LTVLSFLIFYLLLVFPLLPQQSINKNKSQDFRLGSESMTHSEMRKEQSHEDQGHIMDTRMRKNKQAGRKVTLIE

SEQ ID NO: 28554 - protein, 104 aa, Homo sapiens
LLSVLFEKTFQERRKIPCRACYGSGPWSGCRRHGAASQALGVREPGRCGAAPGRPAAAAAAAAAAAAPAAAATPGRRQGCGAGRGGGAHPLSVEDWSMGPMYGR

SEQ ID NO: 28555 - protein, 102 aa, Homo sapiens
LLWGFATGCWLFSPPLSRSLLLLLGCSTPVRIRRGGTSLSAAANSRRVRLRTPGAESRVPPPPRGTHSPRSPGPRVLPPATLPHFSPLFQSHGILRMPERWR

SEQ ID NO: 28556 - protein, 119 aa, Homo sapiens
VAWRGGGFKSPRVSDHSDRSPNFSQSPGARGAFQSSRVARGGASLDPEASLSTSTRPRASLLLQTFASSAKLRFSASDIRTGGFSSFSELLALEPSPLFPSPASPDPPSSEPNGLQRTK

SEQ ID NO: 28557 - protein, 17 aa, Homo sapiens
LPSPSLSGCTSSLVLMH

SEQ ID NO: 28558 - protein, 38 aa, Homo sapiens
VILAYVCSSLLRVLLSSGAARNGGSHLASAAGMDQTAS

SEQ ID NO: 28559 - protein, 31 aa, Homo sapiens
LNMGLVLLSSGAARNGGSHLASAAGMDQTAS

SEQ ID NO: 28560 - protein, 52 aa, Homo sapiens
VVVPEDPCGKEDTFHRHDQFCTPKTDLWLSLGWHRGRHYYPWLERPVLSLAA

SEQ ID NO: 28561 - protein, 43 aa, Homo sapiens
VRRPADGGSGELAAGWASSHNRRRRPSEDPRELPGRAEPPLAE

SEQ ID NO: 28562 - protein, 1148 aa, Homo sapiens
LCGRTAPSGPTMPLSSHLLPALVLFLAGSSGWAWVPNHCRSPGQAVCNFVCDCRDCSDEAQCGYHGASPTLGAPFACDFEQDPCGWRDISTSGYSWLRDRAGAALEGPGPHSDHTLGTDLGWYMAVGTHRGKEASTAALRSPTLREAASSCKLRLWYHAASGDVAELRVELTHGAETLTLWQSTGPWGPGWQELAVTTGRIRGDFRVTFSATRNATHRGAVALDDLEFWDCGLPTPQANCPPGHHHCQNKVCVEPQQLCDGEDNCGDLSDENPLTCGRHIATDFETGLGPWNRSEGWSRNHRAGGPERPSWPRRDHSRNSAQGSFLVSVAEPGTPAILSSPEFQASGTSNCSLVFYQYLSGSEAGCLQLFLQTLGPGAPRAPVLLRRRRGELGTAWVRDRVDIQSAYPFQILLAGQTGPGGVVGLDDLILSDHCRPVSEVSTLQPLPPGPRAPAPQPLPPSSRLQDSCKQGHLACGDLCVPPEQLCDFEEQCAGGEDEQACGTTDFESPEAGGWEDASVGRLQWRRVSAQESQGSSAAAAGHFLSLQRAWGQLGAEARVLTPLLGPSGPSCELHLAYYLQSQPREVSCNFERDTCSWYPGHLSDTHWRWVESRGPDHDHTTGQGHFVLLDPTDPLAWGHSAHLLSRPQVPAAPTECLSFWYHLHGPQIGTLRLAMRREGEETHLWSRSGTQGNRWHEAWATLSHQPGSHAQYQLLFEGLRDGYHGTMALDDVAVRPGPCWAPNYCSFEDSDCGFSPGGQGLWRRQANASGHAAWGPPTDHTTETAQGHYMVVDTSPDALPRGQTASLTSKEHRPLAQPACLTFWYHGSLRSPGTLRVYLEERGRHQVLSLSAHGGLAWRLGSMDVQAERAWRVVFEAVAAGVAHSYVALDDLLLQDGPCPQPGSCDFESGLCGWSHLAWPGLGGYSWDWGGGATPSRYPQPPVDHTLGTEAGHFAFFETGVLGPGGRAAWLRSEPLPATPASCLRFWYHMGFPEHFYKGELKVLLHSAQGQLAVWGAGGHRRHQWLEAQVEVASAKEFQIVFEATLGGQPALGPIALDDVEYLAGQHCQQPAPSPGNTAAPGSVPAVVGSALLLLMLLVLLGLGGRRWLQKKGSCPFQSNTEATAPGFDNILFNADGVTLPASVTSDP

SEQ ID NO: 28563 - protein, 56 aa, Homo sapiens
LPVAFVLGSACLAAVATAEGLGGGCEAVWLTESHLGVKGLWLRAKTCLPSVFPARK

SEQ ID NO: 28564 - protein, 12 aa, Homo sapiens
LGLGHDVLGLHR

SEQ ID NO: 28565 - protein, 23 aa, Homo sapiens
LLLCSYDLLRLLLLWMDRAGALP

SEQ ID NO: 28566 - protein, 404 aa, Homo sapiens
LPGSCQPPTALCQLDQGWKGPAAGQVPWLVPGHRRLTDHRPGERGCPGRILLHPLQQSWYRRALSCDPRAAQGSPSFYRAAQGRIFPRSRAGAAHPLLRPRGPSSCCLLDQGGPGAARPGPGGQQQQPHPATIDQGGPRALGMQCQQCCGPSGHLHERLRAGAKRPDRMHHDWVSLAVPVGAAHLLVPGLQPHTQYQFSVLAQNKLGSGPFSEIVLSAPEGLPTTPAAPGLPPTEIPPPLSPPRGLVAVRTPRGVLLHWDPPELVPKRLDGYVLEGRQGSQGWEVLDPAVAGTETELLVPGLIKDVLYEFRLVAFAGSFVSDPSNTANVSTSAAGPPASARAGRRGGRSLLSGSGRPCEHPGRLPPEPAQGCPPPPQAPPPRSTSYLLSDREVSCTLCSGLRQS

SEQ ID NO: 28567 - protein, 37 aa, Homo sapiens
LNMHFAQWLEMCWWWNVLVIVSGWRATAPQCSAMTDS

SEQ ID NO: 28568 - protein, 18 aa, Homo sapiens
LALFMYLFRCFMCLPPAS

SEQ ID NO: 28569 - protein, 39 aa, Homo sapiens
LTFYSIVCVTWCDMVPFRLKTVGAAEFSPCSPTRQGSLN

SEQ ID NO: 28570 - protein, 29 aa, Homo sapiens
VDPGEGGRGLGVFILLNKNSTTEWELSVL

SEQ ID NO: 28571 - protein, 27 aa, Homo sapiens
LAGSPLMKLTLALISLVLGRKGSEAIQ

SEQ ID NO: 28572 - protein, 53 aa, Homo sapiens
MLPQPPELVRVLQGPAPRHRHLLSSEFPSDETTGVFTHHPHHFFFPNLMEGST

SEQ ID NO: 28573 - protein, 81 aa, Homo sapiens
LEVNKYGSCLGEKKNVLQPVSKLQTTECINETLYMDTRAFKTALPACRAFAVLQRFTGVIALKPRNNFTRFSWLPHLATEY

SEQ ID NO: 28574 - protein, 16 aa, Homo sapiens
LNFFLGKMALCFIGLS

SEQ ID NO: 28575 - protein, 51 aa, Homo sapiens
LSKSLSAALLTAALLTFGDCGKTPDCSCPVPHSAAPGSLYSHLCCSLHGAE

SEQ ID NO: 28576 - protein, 26 aa, Homo sapiens
LYLACLKKKKMKMRRRRKIILMNPYL

SEQ ID NO: 28577 - protein, 31 aa, Homo sapiens
LALRALMAIIVELHLHLLMRPAARPLPRPRS

SEQ ID NO: 28578 - protein, 77 aa, Homo sapiens
LPPRRGGSQAPPTTRGVGGGESPLRPGPRVQGNLPRCLVALPLAPEQKGSLTLAHTKQLTLTKELQHLHRGGGCPPS

SEQ ID NO: 28579 - protein, 202 aa, Homo sapiens
LGDENNPEMRVHCAIIPSDMLHISTNCRTAEEMVLTLLDYLFHREVQAVSSLSGQGKHGKKQLDPLTIYGIRCHLFYKFGITESDWYRIKQSIDSKCRTAWRRKQWGQSLVVKSFSWRMPNSSSYCPSEPMMSTPPPARELLQPQLQPQALHYALANVQQVQIHQIGEDGQVQVGHLHIAKVPQGEQVQITQDSESPCSGTT

SEQ ID NO: 28580 - protein, 19 aa, Homo sapiens
MHPADDPACGGGVPGQPSI

SEQ ID NO: 28581 - protein, 49 aa, Homo sapiens
LMCYLLLLLIQTAELLIHPQGLQAVSNGESALKGTRPTFSSPFILLPSV

SEQ ID NO: 28582 - protein, 45 aa, Homo sapiens
LMCYLLLLLIQTAELLIHPQGLQAVSNGESALKGTRPTFSSPFIL

SEQ ID NO: 28583 - protein, 88 aa, Homo sapiens
LTRPRGRRSLTRRLSFAGSAGLGRRRSANGSGGLNASRPGESERARLEGECPGRTCGGPGFASSFLVASSPAWGQGLGVAVGSTVSDT

SEQ ID NO: 28584 - protein, 115 aa, Homo sapiens
VLWRPECMRTGPAHAECHWEQGHTPLPGEDRTCRPLLAIPSAGHAIDFHETNTYLEIRFFLYLLKEQEFPSISWTKTEATFAASFPARCHSEIFVIPGRYEDCQGTQFHGRKVFF

SEQ ID NO: 28585 - protein, 117 aa, Homo sapiens
LSAQAQGDGMETRGRTFLPRSLRLPGGWRCRVRAGASARGRRFFFFIFLTNGFYFTVIRGCTSLPPYTSRTFSPFVNGKGSLFLALTYGSLFSKKKKKRKKEKKQRNIKHTSAPCPQ

SEQ ID NO: 28586 - protein, 139 aa, Homo sapiens
LEKEPRCWQQPPKTPGRLRRALRARGPEPHRVGAHTRPLLVHAVRLLHGLAARHDPAPGGPPPRRPRGPRGRAAAPRRPRGSGPACTQGVAAAVRGGASSVLAALNPAALGVGHGMWVVLSFGGGCREGGLGWTIKKAP

SEQ ID NO: 28587 - protein, 138 aa, Homo sapiens
LFADKFPKTAENVCALSIGEKGFGYKGSCFHRIIPGFMCHGGDFTHHNGSGGKYIYGEKFDDENFILKQTGSGILSKENAGPNTNGSQFFICSAKSEWLDGEHVFFGKVKEGMNIVEAMEGFGSRNGKTSKKITIADC

SEQ ID NO: 28588 - protein, 137 aa, Homo sapiens
MLPTLTAPTLALLLLPKISCLLTSTHPRTQGSRAHFPRAWRLDPGEFLHPLQDPHSSPLWSLDHRWRWPELTCWLWGHSSCWPRMRRGTRSFTCLRLGGCAGRHMLRLRCSRCTGVLTFVSIRARPLSWWRLLPTSP

SEQ ID NO: 28589 - protein, 58 aa, Homo sapiens
MVSSHLLDRGLDFPRPLSTLQELRRQDEWRGEPSQQAHAGAGRTGRRALDVPAPSVRG

SEQ ID NO: 28590 - protein, 25 aa, Homo sapiens
LPASKWLLGLLGIVVASLRPRPWLF

SEQ ID NO: 28591 - protein, 54 aa, Homo sapiens
LSGIAAYALILQLVSNRGSIDWELLIQKIKRKKPENIINPLRTRHNELYILPLP

SEQ ID NO: 28592 - protein, 87 aa, Homo sapiens
LDAGPGLGRRLAPAPKRLSVPDPLRLTPMMKRASTGVLAVDIFDKFNFTGARVPWFDAIHEEFPRELESSISFPANFFKPPEEKVLR

SEQ ID NO: 28593 - protein, 48 aa, Homo sapiens
VVGFLSLSLSLLALPTQQRRPPARNGLPGASSSSFPKLNCPVSDSDFS

SEQ ID NO: 28594 - protein, 176 aa, Homo sapiens
LQRETEIEALKEELLFTKKNHEEEVKGLQAQIASSGLTVEVDAPKSQDLTKIMADIQAQYDKLAQKNQEELDKYWSQQIEESTTVVTTQSVEVGAAEMMLTELRCTVQSLEIKLDSVRNLKPSLENSLREVEARYTLQIEQLSGILLHLELALTWAEGQPGPGLRDPAEHQCQAGG

SEQ ID NO: 28595 - protein, 125 aa, Homo sapiens
LEQQNKMLETKWSLLQQQKMTLSNMHSMLQSYINNLQRQLETLGQENLKLGAELGSMQGLVEGFKNKYKDKINKRTEMENEFVLIKKVVDDAYMNKAELESHLEGLTDEINFLRQLYEEEIRELS

SEQ ID NO: 28596 - protein, 72 aa, Homo sapiens
LSCGLLAVFTRFKLRGPHCCCAKKVYSLPRMGPHTTLHLHSTFNRVLAVFLFSFLFVSKNLYLDFNNQRSVK

SEQ ID NO: 28597 - protein, 23 aa, Homo sapiens
LLLQEDIRRHRNRNDPIRVIKGF

SEQ ID NO: 28598 - protein, 107 aa, Homo sapiens
LISPTLLVLVATRVRGRPRPPSVCRCSGGGLAGCGRVCACGLGPGPSQKLKRQMSGIATLAPPVAGGLWGSTWSRTEKLLCLCSLGTHWKLYSDIFWDLVWIVQTGA

SEQ ID NO: 28599 - protein, 28 aa, Homo sapiens
MFTFLVTLTCWLNTSNSPVEGSPPGRKG

SEQ ID NO: 28600 - protein, 42 aa, Homo sapiens
LSRSRRPAALLVRVCVVAGLIHGLTAEVRRAGGTGHRRGGSE

SEQ ID NO: 28601 - protein, 154 aa, Homo sapiens
LGGGVSGFAGVRGPPPDPHTETRNHSGIQTPVYTHHPWAGCAAQALPRDRPVSRPVSRPVFVRRQLAPQPAAQRGWACRRSSSRGRAGLRVRAGRGWRGAAGVMLGKDYMLAIILVNCDGVHGGARWEDQELREDEGIRKATLGLKDGGGYLSV

SEQ ID NO: 28602 - protein, 69 aa, Homo sapiens
MDDPDAGNYTDISDVKRLKPGYLEATVDWFRRYKVPDGKPENEFVLMQNLKIRTLQLILLKALMTIGKH

SEQ ID NO: 28603 - protein, 50 aa, Homo sapiens
LAGLSCAAAIAKAYSPTSMSRSSPTVLVICGPGNNGGDGLVCAAHLKLFG

SEQ ID NO: 28604 - protein, 96 aa, Homo sapiens
VNFHVNIVQPPCPQAMWPPLLLLLLLLPAAPVPTAKAAPHPDANTQEGLQNLLQGVGAGGDGELRADSHLAPGSGCIDGAVVATRPESRGGRPAVP

SEQ ID NO: 28605 - protein, 48 aa, Homo sapiens
VLRSLAVPYTLLQAPVQGRSGIWPTRAARTSRVQMRRVFCTLPTAATC

SEQ ID NO: 28606 - protein, 132 aa, Homo sapiens
LLLTIVDTPGFGDAVDNSNCWQPVINYIDSKFEDYLNAESQVNRCQMPGNRVHCCLYFIAPSGHGLKPLDIEFTKHLHEKVNIIPLIAKADTLMPEECQQFKKQIKKSKNIKLKYMNFQKQMMKKKKNLLKR

SEQ ID NO: 28607 - protein, 67 aa, Homo sapiens
LLTIVDTPGFGDAVDNSNCWQPVINYIDSKFEDYLNAESQVNRCQMPGNRVHCCLYFIAPSGHGSVT

SEQ ID NO: 28608 - protein, 39 aa, Homo sapiens
LGLHSSPPWELLARASEPALAPCSRKVAAAGAPEAQDTG

SEQ ID NO: 28609 - protein, 95 aa, Homo sapiens
MILKARNLMQKYTGSTSRARMLQYMCYLMEEDEDAYKKQLSQYIKNSVTSDMMEEMYKKGHATIRKNPVYEKKPKKEVKKKRWNRPKMSLAWKKG

SEQ ID NO: 28610 - protein, 24 aa, Homo sapiens
LAPELARPGAAAGRTRAADSANTR

SEQ ID NO: 28611 - protein, 51 aa, Homo sapiens
LQIPAFLSRLYLPLHPSRPSQKIYKISSGKSLGVLGRERRKIVGWNKNRVE

SEQ ID NO: 28612 - protein, 52 aa, Homo sapiens
MAHIPAFLSRLYLPLHPSRPSQKIYKISSGKSLGVLGRERRKIVGWNKNRVE

SEQ ID NO: 28613 - protein, 92 aa, Homo sapiens
MWKSPFKVCIMELTWPNLSGRKIPTREGNFPVAPASGSCNLNTYWLLGVIHLLHREVLKRPLLYSGMPSPVCLPKSSLTFKFQRREVPGRIS

SEQ ID NO: 28614 - protein, 26 aa, Homo sapiens
VEIWLTLVVCLGQLEQRDARGRVSVQ

SEQ ID NO: 28615 - protein, 89 aa, Homo sapiens
VTPGPSLLRRSPIPGLPLLRFAKLFLIKPKPTLQPRRLGDRKPRSGGRLESPPPESPHPILSPACAGKKLRSGGLPLKEHSPGSHRRLP

SEQ ID NO: 28616 - protein, 76 aa, Homo sapiens
MTVMKCRGPGCPQVSWQCVILRRFMLHVKLSSFVTMDLWSWDNLYGKQKARTPVILGRNNSMLMQKIMQCATELQR

SEQ ID NO: 28617 - protein, 85 aa, Homo sapiens
LTRPSQAASMSTASQPCGNSSSSGRTSSSSMTGTARAPLATQSCSKVCTQLQVLTEAFREKDTAVQGNIRLSFEDFVTMTASRML

SEQ ID NO: 28618 - protein, 196 aa, Homo sapiens
LPKYGLKVGLTNYAAAHCTGLLLARSLLNRFGMDKICECQVEVTGGKYNVEGNLGQPRAFTCYLDADLARTTTGNKVLGTLKGAVDGGLSVPHSTKRFPGYDSESKEFNAEVHRKHIMGQKVADYMHYLMKEDEDAYKKQFSQYIKNSVTPDMMEEMYKKAHAAIRENPVYEKKPKKQKRRGGTIPKYPLLRRKIR

SEQ ID NO: 28619 - protein, 29 aa, Homo sapiens
VCVLCYLSLYALQNLFTLLFWKRIPEAKP

SEQ ID NO: 28620 - protein, 133 aa, Homo sapiens [sequence omitted]

SEQ ID NO: 28621 - protein, 14 aa, Homo sapiens
MPSQCMWLEMLLLL

SEQ ID NO: 28622 - protein, 42 aa, Homo sapiens
LLDSDTFLKIRSCTNIFIGNSSEKAKRRANIHIYHGYTNNSA

SEQ ID NO: 28623 - protein, 95 aa, Homo sapiens
LDALVQPWHPAGLLGVSEVPAGSAARRGENGHKDLPETQAVQLALSARGAPGPKFNLCGKNVWRQDSDSDLLSLLPQRLLPGGGLHGPLSRLPSS

SEQ ID NO: 28624 - protein, 119 aa, Homo sapiens
LPGRGVSGQPHLHLVLAGRERLLSERPEAEGAHPNRWDPDHLPGEAGGLGEVHLCAQQQPGALPLRLGVPDRAVPSACPQHAPCDLRARGDPWLHPLPCGRRTTGHRGQVEQGRPSPAG

SEQ ID NO: 28625 - protein, 213 aa, Homo sapiens
LSAGALISRGCGRDSADARCRGPGGCPRGPGHGWPGFQLGPGPPERGQRALSAAGRAHRALPAGRRRRLLRAGAGARAPGQAALGGAPGQLQPRPQPEPRRAARLPPPLRGGHSGRHPRGQRPPALGLHRRLLLRGHRRFHHRVWDDNSGDSRRKNLSDLLRPCWVFQHHLVLQPLPGAPDHHHRLHHEVVPPAAAPETRGPAPGEPEGCGAV

SEQ ID NO: 28626 - protein, 16 aa, Homo sapiens
MMENLTSSTSSMRSPR

SEQ ID NO: 28627 - protein, 69 aa, Homo sapiens
LRARIPGYDVIAQAQSGTGKTATFAISILQQIELDLKATQALVLAPTRELAQQPPNTSRCLYWMKLTKC

SEQ ID NO: 28628 - protein, 110 aa, Homo sapiens
MLRRDTKHVVLVVATLVPPSWVLAAETGTPTSPRCEPGEATPAVRDGCASWPRQGYLRWSSTADGYHEGGGTLAERWRNVGGVRGWTGTPGLKRSFHLSGTTDACLPINT

SEQ ID NO: 28629 - protein, 119 aa, Homo sapiens
LRRDTKHVVLVVATLVPPSWVLAAETGTPTSPRCEPGEATPAVRDGCASWPRQGYLRWSSTADGYHEGGGTLAERWRNVGGVRGVGESLGWRLQCVPPSYRTKRCQLNCVFLEEPIIYR

SEQ ID NO: 28630 - protein, 87 aa, Homo sapiens [sequence omitted]

SEQ ID NO: 28631 - protein, 45 aa, Homo sapiens
LHSPSDWITSHPEAPQDFEQFFSHPYRKIPSPDKRSIYIRSIGSL

SEQ ID NO: 28632 - protein, 171 aa, Homo sapiens
LKSGVNGFVGTGSLVTRAVFNSSKVDIVAINDPFIDLNYMVYMFQYDSTHGKFHGTIKAENGKLVINGNPITIFEVRDPSKIKWGNAGAESIMESTGIFTTRKKAGARLQGGAKRVIISAPSSDAPMFVMGMNHEKYDNSFKIISNASCTTNCLVPQPRSPMTTLVSWKDS

SEQ ID NO: 28633 - protein, 23 aa, Homo sapiens
MLILPRQVCPHRRLSLVTYVAPS

SEQ ID NO: 28634 - protein, 51 aa, Homo sapiens
VCTSIQEGRDFLQFQKINSPFRFGLLQARGHSGVVHHLVGQCDRGAIGEGG

SEQ ID NO: 28635 - protein, 59 aa, Homo sapiens
VRWELLVLLLLLLPTLRRPGPRCRPGPGCRLRPRRPRPRVRPSQDAAPGRVSTSWPHLP

SEQ ID NO: 28636 - protein, 18 aa, Homo sapiens
LLLPLPLSRRRRAGRFRS

SEQ ID NO: 28637 - protein, 115 aa, Homo sapiens
VTGDEYSVESIDGQLGAFVYSLDAELARTAAGNKVFGALKGAVDGGWSVPHGTKQFPGHDSESKEFNAEVHWKHIIGQNVADYMRYLMEEDEDAYKKLSQYIKNRLNSRHDGGDV

SEQ ID NO: 28638 - protein, 23 aa, Homo sapiens
VWITVFTPMLIFLVPLKLFWKQN

SEQ ID NO: 28639 - protein, 71 aa, Homo sapiens
LGLAFLFLLTSSLPLSSTTRESCWPQVTRAAGSSSSSGNQRTLGKTAVAWTTCPGPRFWNTERASGQKPIY

SEQ ID NO: 28640 - protein, 25 aa, Homo sapiens
LGEMWNNTAADDKEPYEKKAVWLEK

SEQ ID NO: 28641 - protein, 38 aa, Homo sapiens
LLEALDCILPPTRPTDKPLCLPLQDVYKIGGIGTVPVG

SEQ ID NO: 28642 - protein, 42 aa, Homo sapiens
VRGRRGAGVAAAGQDPEPRVAAGHRGAQGGGEVAVPARGGAL

SEQ ID NO: 28643 - protein, 28 aa, Homo sapiens
LPSLHIKAARGARGGGTQGAERRQYLRR

SEQ ID NO: 28644 - protein, 63 aa, Homo sapiens [sequence omitted]

SEQ ID NO: 28645 - protein, 277 aa, Homo sapiens
LLVSLLLLLTRVQPGTDVAAPEHISYVPQLSNDTLAGRLTLSTFTLEQPLGQFSSHNISDLDTIWLVVALSNATQSFTAPRTNQDIPAPANFSQRGYYLTLRANRVLYQTRGQLHVLRVGNDTHCQPTKIGCNHPLPGPGPYRVKFLVMNDEGPVAETKWSSDTRLQQAQALRAVPGPQSPGTVVIIAILSILLAVLLTVLLAVLIYTCPSSSPSSPAQVPPLPGSPLGPSPVSVGAVCPWLLPESIAEIWTQDSGLPALGWQHWQQRPLLHREGGQ

SEQ ID NO: 28646 - protein, 244 aa, Homo sapiens
LLVSLLLLLTRVQPGTDVAAPEHISYVPQLSNDTLAGRLTLSTFTLEQPLGQFSSHNISDLDTIWLVVALSNATQSFTAPRTNQDIPAPANFSQRGYYLTLRANRVLYQTRGQLHVLRVGNDTHCQPTKIGCNHPLPGPGPYRVKFLVMNDEGPVAETKWSSDTRLQQAQALRAVPGPQSPGTVVIIAILSILLAVLLTVLLAVLIYTCFNSCRSTSLSGPEEAGSVRRYTTHLAFSTPAEGAS

SEQ ID NO: 28647 - protein, 70 aa, Homo sapiens [sequence omitted]

SEQ ID NO: 28648 - protein, 111 aa, Homo sapiens
LSLAVGAAKSACPEWQTRSWRRDGFRSAVNQLYFVSPALHIRLTTSGHYSKYVTNTNSFYLHNIFGPACADPFWTVRETEAQSGEAACSRSSFEPMSELSFLCAVRPWERH

SEQ ID NO: 28649 - protein, 23 aa, Homo sapiens
VSSIQEENSVHTRKRKREKVKPC

SEQ ID NO: 28650 - protein, 76 aa, Homo sapiens
VYGPAGHGHAAPGGRSGSRSSWGAETDPLAAERQWDLGAPGSFGLHHLSDSAVPARNQSFLLAPCIHGLGVLPLHG

SEQ ID NO: 28651 - protein, 133 aa, Homo sapiens
MGHIKPDLIDVDLIRGSTFAKAKPEIPWTSLTRKGLVRVVFFPLFSNWWIQVTSLRIFVWLLLLYFMQDNKTIRKQWKSKKKSFALVAQAGVQWRNLGSLQPIPPEFKRFSCLSLSSSWDYLRMPPHPANFFF

SEQ ID NO: 28652 - protein, 139 aa, Homo sapiens
LNVFFFPWTGSLLCVYSEAVMTCCPGSSLLHTECSGSLNHCFSFESRASCHFHVASAVSPPTPLCSPATLMAQDKAGKPSQKHLWPRKPLSPSLSHEAQPSQALMLSQWASHRAKEGLFSVPSLWVRTRGHAECPLLTW

SEQ ID NO: 28653 - protein, 191 aa, Homo sapiens
LNVFFFPWTGSLLCVYSEAVMTCCPGSSLLHTECSGSLNHCFSFESRASCHFHVASAVSPPTPLCSPATLMAQDKAGKPSQKHLWPRKPLSPSLSHEAQPSAHVEPVGQPQSKRGFIFSPLSGSEPEGMLNAPCLLGEGAPPESVLSAGSAMLVEVGGTVLTGKKQGQEPKCLTSKGGPVPWSQGELQSFG

SEQ ID NO: 28654 - protein, 23 aa, Homo sapiens
MVSILMGIRQSLICCLKMLLTSG

SEQ ID NO: 28655 - protein, 48 aa, Homo sapiens
LLLAFGLAVSVLGGPKTAGRPPVSGGEQAVASLVTWSRRRTVGDTVSL

SEQ ID NO: 28656 - protein, 45 aa, Homo sapiens
LLLAFGLAVSVLGGPKTAGRPPVSGGEQAVASLVTWSRRRTVGGT

SEQ ID NO: 28657 - protein, 441 aa, Homo sapiens
LMEYQILKMSLCLFILLFLTPGILCICPLQCICTERHRHVDCSGRNLSTLPSGLQENIIHLNLSYNHFTDLHNQLTQYTNLRTLDISNNRLESLPAHLPRSLWNMSAANNNIKLLDKSDTAYQWNLKYLDVSKNMLEKVVLIKNTLRSLEVLNLSSNKLWTVPTNMPSKLHIVDLSNNSLTQILPGTLINLTNLTHLYLHNNKFTFIPDQSFDQLFQLQEITLYNNRWSCDHKQNITYLLKWMMETKAHVIGTPCSTQISSLKEHNMYPTPSGFTSSLFTVSGMQTVDTINSLSVVTQPKVTKIPKQYRTKETTFGATLSKDTTFTSTDKAFVPYPEDTSTETINSHEAAAATLTIHLQDGMVTNTSLTSSTKSSPTPMTLSITSGMPNNFSEMPQQSTTLNLWREETTTNVKTPLPSVANAWKVNASFLLLLNVVVMLAV

SEQ ID NO: 28658 - protein, 12 aa, Homo sapiens
MGRVSTSHQPLR

SEQ ID NO: 28659 - protein, 137 aa, Homo sapiens
LRRPEPAMAQMRTSSLSTWTADSRSLVRLGPRTPSPPQPGPLRMPWPRLGAAGVGMWNCSLSPSGRVPGTRRLAQLLCLPVPCVVMSLTPSTCWLLEAYPKTPSLDSSCAHRKSSPDSALVAFEPDPWQWSPHRPQD

SEQ ID NO: 28660 - protein, 38 aa, Homo sapiens
LENPNFSLFRLLFLAKFKGWLLVHPVALCHAETVCRQA

SEQ ID NO: 28661 - protein, 43 aa, Homo sapiens
LARRCAWICQILYFRFVEGYFFAVLERCYFRCASDDAAVGEET

SEQ ID NO: 28662 - protein, 38 aa, Homo sapiens
LCPPRSSSRLPTPIRAARRPWRLKRRWNAFRSSLNIIK

SEQ ID NO: 28663 - protein, 58 aa, Homo sapiens
LLLLRHGDRCAHLQRGALDGEGASGADLGRCPGGQGLQGEAGAGVHLHQASAFCAHAP

SEQ ID NO: 28664 - protein, 59 aa, Homo sapiens
LLLLRHGDRCAHLQRGALDGEGASGSADLGRCPGGQGLQGEAGAGVHLHQASAFCAHAP

SEQ ID NO: 28665 - protein, 146 aa, Homo sapiens
LKSKTHAVLVALKRAPSELAAHQKKILHIDKHIGISIAGLTDDGKLLRNFMCQECFDSRFVSDRPLPVSSLVSLIGSKTQISTQQYGWRPYGVRLLTAGYNDMGLTFSKPGHLLTILTTELRPLGPILSQLVLTWRDICLNLWNTI

SEQ ID NO: 28666 - protein, 29 aa, Homo sapiens
LFLALLFFFFLPEWLQFCAGHAVTDHTIC

SEQ ID NO: 28667 - protein, 35 aa, Homo sapiens
LPFLTFPGTEYLPRSGTKDLKVPGRAWGREGHHST

SEQ ID NO: 28668 - protein, 35 aa, Homo sapiens
LPPVPEAGTEYLPRSGTKDLKVPGRAWGREGHHST

SEQ ID NO: 28669 - protein, 136 aa, Homo sapiens
MRPADGIRWERRIDWGLRPRGPGLEFASDAVEPPESEKVFRHHGGQTQHPDHRVGTPGQEEVLRVWCGNDNDDPCQCLPIHPHPHPVASSEGEEPLPWDLRCLHQDPASRWYHWPLPRVPGQYLHPHLWPVLCHHL

SEQ ID NO: 28670 - protein, 158 aa, Homo sapiens
MAMVRKSSALGKEVGRREGNGDAGGPFPAVKFPIKDIQFSESGEGTCFHGARLSPLSRNIARLLLYVRASPFYESRITLKKPSNRHEVKRNRCNRKTAKQMLMTTLFNELEPTRKYGITEDCTSLNRVLFSANRKCLHKSLYKKDCFKAAPFSMFSFR

SEQ ID NO: 28671 - protein, 22 aa, Homo sapiens
LLPGLHSIRVLREDWHPGSPRK

SEQ ID NO: 28672 - protein, 283 aa, Homo sapiens
MLLETIGKAKVQVTKRRLRARVGGITTRFTPRRSWRRAARLQPDRLPAITVVIYAANKLEPAGWHLQAAARTHPLCGGAVEARRTGCKQPGPGRQQLHPQRGSQDAPLCWGYCRGGAGGCRAHSPAHQGRAPFRTHRDPSTKAEKGASPQNAGERAMQRVWGQGLGLPLQCSELRGLQGILPPQRHQGSALHLPQWRPLPHGHLHASQVPGVSASQMPSGWHAGGVCPVRRTDPPEETEAARGGTGSCHILAPQGFLTPPNPAPAQPGTTGHDREARRCPATV

SEQ ID NO: 28673 - protein, 280 aa, Homo sapiens
LVSPSLITKVTKRRLRARVGGITTRFTPRRSWRRAARLQPDRLPAITVVIYAANKLEPAGWHLQAAARTHPLCGGAVEARRTGCKQPGPGRQQLHPQRGSQDAPLCWGYCRGGAGGCRAHSPAHQGRAPFRTHRDPSTKAEKGASPQNAGERAMQRVWGQGLGLPLQCSELRGLQGILPPQRHQGSALHLPQWRPLPHGHLHASQVPGVSASQMPSGWHAGGVCPVRRTDPPEETEAARGGTGSCHILAPQGFLTPPNPAPAQPGTTGHDREARRCPATV

SEQ ID NO: 28674 - protein, 220 aa, Homo sapiens
VVWLWRRSIRRLCGGAVEARRTGCKQPGPGRQQLHPQRGSQDAPLCWGYCRGGAGGCRAHSPAHQGRAPFRTHRDPSTKAEKGASPQNAGERAMQRVWGQGLGLPLQCSELRGLQGILPPQRHQGSALHLPQWRPLPHGHLHASQVPGVSASQMPSGWHAGGVCPVRRTDPPEETEAARGGTGSCHILAPQGFLTPPNPAPAQPGTTGHDREARRCPATV

SEQ ID NO: 28675 - protein, 53 aa, Homo sapiens
MMDTMVLHLNIRVIQMLRRLFFCRWIRTVFAILTMSSLCYGFIEPSVQLNRLR

SEQ ID NO: 28676 - protein, 63 aa, Homo sapiens
LALRAAGGVALRLLGLHLGPGLLLHLQPCRAAQCHMPTRPPPSTNLPTRAAWVSSASEKVSFY

SEQ ID NO: 28677 - protein, 248 aa, Homo sapiens
LQAGREEVEWVAPALCLGSACWGRRAAACQVTRTMSSQVVGSEPLYIMAEPARPDSPKGSSETETRASCGPGPWSSSHPLPPRPQGRGGWEGAGPGELGGGKLVLSFLSKSLCLVCGDVASGYHYGVSSCEDCKAFFKRTIQGSIKYSCPASNKCEIIKRRRKACQACRFTKCLRECAWIASGVGGRSTSGARGGPAALPGRLPCWAPGSRWRPPEDTPVNALVSHLLVVEPEKLYAMPDPVGPDGHL

SEQ ID NO: 28678 - protein, 38 aa, Homo sapiens
LAWILFILLYHQYHSWKVWCYLRIWPFLDQMDPYCQVF

SEQ ID NO: 28679 - protein, 25 aa, Homo sapiens
LQIIICSLFHLPLEGILILQTMLPT

SEQ ID NO: 28680 - protein, 53 aa, Homo sapiens
LPPVPLVRTRSCSSSMTSARCCCHSYTCPPSCPTARLEPPLPARGAWLPSSTR

SEQ ID NO: 28681 - protein, 33 aa, Homo sapiens
VAAVSLLLLLHQARSHAGQVFSTGLHELLLQKH

SEQ ID NO: 28682 - protein, 181 aa, Homo sapiens
LLVIRRHQDAARRLDRRGPARARTLGSGEWVVLRPARDGRARGPMGAASWPRGAPTRGSRPPAPQPRGSEAAGGGAVRALWPCPAGLTRLPLARRAFGRGRPGPSWPGHAAGDTGRAVRGAGAGHRRAFGGGQRAGVRRGGHGEHSADAHQLLPGVPGCGRRGRGALRHPLCHHHQPGLLH

SEQ ID NO: 28683 - protein, 33 aa, Homo sapiens
VFCLPSLAVWGLPGPLLAASIDPRCAAICHGRH

SEQ ID NO: 28684 - protein, 58 aa, Homo sapiens
LSRQKLGPTGGSCRRLRARPRPLREHPTQCPLLFCQFGDPDTPTFSPGLCVSPSLEGR

SEQ ID NO: 28685 - protein, 25 aa, Homo sapiens
LEQENGGCQAQPGPSPPRILCPVPV

SEQ ID NO: 28686 - protein, 33 aa, Homo sapiens
LRNCESVREDVKYGLVPVIWACGSRVLIARLCR

SEQ ID NO: 28687 - protein, 36 aa, Homo sapiens
LRNCESVREDVKYGLVPVIWACGSRVLIARLCSFNF

SEQ ID NO: 28688 - protein, 32 aa, Homo sapiens
MVWNFLSLILMMHHARKFFLIPKLQFQNYLPF

SEQ ID NO: 28689 - protein, 81 aa, Homo sapiens
MSISCPTWILNLNSQPRLHLDTATNHQNDEDFDSFQSGEDTEDWFWLYQCDCTPKMEIFKTWHQAPFCQGTDSTHCPGRWN

SEQ ID NO: 28690 - protein, 18 aa, Homo sapiens
LAGLPGKIRSISGVLPPG

SEQ ID NO: 28691 - protein, 211 aa, Homo sapiens
LPGPSDRVPRPSLPNRFGRSCFVLKGFLGVRGVPQRCHRAGLLAPCQLPVPVLTAPTPPAKAEPHTRSTCISSTDSPAQMPLFTLASLSGCPRRSSRPTPTAGLTVFSGRSLADAPWPGGEPPVTFLRTEEGPDATFPRTIPLIQQLLNATELTQDPAAYSQLVAVLVYTAERAKFATGVERQDWMELFIDTFKLVHRDIVGDPETALALC

SEQ ID NO: 28692 - protein, 42 aa, Homo sapiens
LLMLSMGIKLTVFLLLYGKPGLIKLYSSTKSRIVSCGLTHHM

SEQ ID NO: 28693 - protein, 37 aa, Homo sapiens
LQDMWPHLLLLLLQQLRPEQARWQKGALLPSLFPEAQ

SEQ ID NO: 28694 - protein, 75 aa, Homo sapiens
VAAGAHGAAGAHADLSGRGVEAGAGCLDERAAGAELPAQLPRGLHLLPTPYAAAARGTPLDGPALHRLHEDPLPW

SEQ ID NO: 28695 - protein, 30 aa, Homo sapiens
LCGGTGSFCWIRLRGNLRDSDGDQLIRKGR

SEQ ID NO: 28696 - protein, 15 aa, Homo sapiens
MPMIFTSLICYLNIL

SEQ ID NO: 28697 - protein, 82 aa, Homo sapiens
VSLEISGAEQSRQRGQPVSSPGQECAWCASFRQEASVQRQGDHARPEDDLARALLYLCCLQDAHPEQGLLHGGGRALLRARL

SEQ ID NO: 28698 - protein, 110 aa, Homo sapiens
MAESVHTWQDHGYLATYTKKNGSFANLRIYPHGLVLLDLQSYDGDVQGKEEIDSILNKVEERMKELSQDSTGRVKRLPPIVRGGAIDRYWLTADGRLVEYDIDEVVYDED

SEQ ID NO: 28699 - protein, 136 aa, Homo sapiens
LGEVLRRPCLQQIQHPTASLIAKVATAQDDITGDGTTSNVLIIGELLKQADLYISEGLHPRIITEGFEAVKEKALHFLEEVKVSREMDKETLKDVARASLCTKVHAELADVLTEAVVGSILAIKRKDEPIDLFMIL

SEQ ID NO: 28700 - protein, 96 aa, Homo sapiens
LAFCRRCGAWVHWAWCLVAALSSFPSTAQGPSAFCGAGLRPCCVPLPWISRELVFLEVPDPCSGPGRLPGPSYGHERLWRVICSSRNRRILHGSVM

SEQ ID NO: 28701 - protein, 26 aa, Homo sapiens
MKLPARVFFTLGSRLPCGLAPRRSEK

SEQ ID NO: 28702 - protein, 82 aa, Homo sapiens
LWLTYSSQTTAILGALLGSCCPQLQVLEVSTGINRNSIPLQLPVEALQKGCPQLQVPGALPLPPVTPSPIYSLDLAPRCCGC

SEQ ID NO: 28703 - protein, 27 aa, Homo sapiens
LGLLPLLRWHCPLHQWLPAHPFGAHQP

SEQ ID NO: 28704 - protein, 33 aa, Homo sapiens
MGRGPTQSPPSAVTVQPLTAAAPLRSSRLQREH

SEQ ID NO: 28705 - protein, 30 aa, Homo sapiens
LKPWRFFLLLLPGGPLSLPNMLGVEETSWR

SEQ ID NO: 28706 - protein, 40 aa, Homo sapiens
LKPWRFFLLLLPGGPLSLPNMLGVEETSWRILNVPEPLIF

SEQ ID NO: 28707 - protein, 56 aa, Homo sapiens
MDGQGPPASLCHPRRLERPEARGAASCPGGVRARRVERVEPGGHGHALDRIQESSS

SEQ ID NO: 28708 - protein, 216 aa, Homo sapiens [sequence omitted]

SEQ ID NO: 28709 - protein, 41 aa, Homo sapiens
MHLKKHYIQQLRYGRSEVNVPGSSSKARATVCGRYNDNGAV

SEQ ID NO: 28710 - protein, 85 aa, Homo sapiens
LGEPWRRGLALLYAGASAGVSGVDASFLRLFPCCCESERAAGGGGSGAGMEDVNSNVNADQEAGVQWRDLGSLQPLSPRFRKMAL

SEQ ID NO: 28711 - protein, 124 aa, Homo sapiens
LQLGLGPPGEGTSTSDGKQKGKTYCGKDLDLCSGVFPHSQSFLFLSSQGWGLAPLLWQRFWARRWDNTCMEPKSPEAPVLSVVIGVLGLPRCRERGAASLSAHEPQGPRLLQTGLFQAAKEGDP

SEQ ID NO: 28712 - protein, 146 aa, Homo sapiens
LVHGRGAGPGVSNSYGRRGPGSGWGLPTQRECDLPDPLRRCPALPHPALYRHPTSRRSHLCSGWDRSGGGRGLPRQELGAEAGSAADQGSEALAGRGRCGASLRLGCSARIQRPLPCPVLPCPVLSCPALPCPVLPCPALCPQTIC

SEQ ID NO: 28713 - protein, 16 aa, Homo sapiens
LIKRGLLLMHSIDLLL

SEQ ID NO: 28714 - protein, 172 aa, Homo sapiens
VSRVPAGRVGWATQSPLTARDAALSLPPSGPEREQLQAEASERFAAGYIQCMHEVHTFVSTCQAIDATVAAELLNHLLESMPLREGSSFQDLLGDALAGPPRAPGRSGWPAGGAPGSPIPSPPGPGDDLCSDLEEAPEAELSQAPAEGPDLVPAALGSLTTAQIARSVWRPW

SEQ ID NO: 28715 - protein, 40 aa, Homo sapiens [sequence omitted]

SEQ ID NO: 28716 - protein, 303 aa, Homo sapiens [sequence omitted]

SEQ ID NO: 28717 - protein, 293 aa, Homo sapiens [sequence omitted]

SEQ ID NO: 28718 - protein, 128 aa, Homo sapiens
LKEKAKIEEEKKDEEKEEPIGIPEFWLTIFKNVDLLSDMLQEHDEPILKHFKFIKVKFLDAGQPMSFVLEFHFEPSEYFTNEVPTKTYRMRSEPDDSGPFSFDGLEIMGCTGCQIDWKKRKECHFEKH

SEQ ID NO: 28719 - protein, 155 aa, Homo sapiens
LRPAVASRATRRHGLSLEQRRGEAAAAGARARAWAGGLLEKPGGGGGGAARGGPGSRAGIRAPLAGAAALLAAGVRSGPGLEHLGSHPELGAPGLRLLQLGHRAARAVGAHRLPALLRVHVAPGQERSPDNCAPDILPYGFGNWSKMHTYIRLNP

SEQ ID NO: 28720 - protein, 15 aa, Homo sapiens
VNVILKFVMWMLMQP

SEQ ID NO: 28721 - protein, 182 aa, Homo sapiens
LSVPPPRHGPAAAGVLPAFPAPGRLRLAEPGTREVEELNALQEELAPFGLVILGFPCNQFGKQEPGENSEILPTLKYVRPGGGFVPNFQLFEKGDVNGEKEQKFYTFLKNSCPPTSELLGTSDRLFWEPMKVHDIRWNFEKFLVGPDGIPIMRWHHRTTVSNVKMDILSYMRRQAALGVKRK

SEQ ID NO: 28722 - protein, 38 aa, Homo sapiens
LFGAADFLVVPHKKTCRPWSLMIVPVPLWRSLTAWRCW

SEQ ID NO: 28723 - protein, 98 aa, Homo sapiens
LWPRRARRGLAGRGRAAAAAAARRSGARGPPGRPACERSPGRPPSRLAGPSPGRRGCRAAAAGISQSSVGDGRKEQIAKNMGSATVQSCTTVSELIEE

SEQ ID NO: 28724 - protein, 76 aa, Homo sapiens
VAGACPVPAPVPTLLPPRTGRGSAEPKLACPRNRPAAAACFLCSRLARQSLLCARLHLGHGWCCYRSYNSRFKAGI

SEQ ID NO: 28725 - protein, 178 aa, Homo sapiens [sequence omitted]

SEQ ID NO: 28726 - protein, 71 aa, Homo sapiens
LWASVMAPVLEKARRTRALLQPGDFLKGFKMVRAGPGAGGGTEAGLGRRKASTARSGLPSIPNLPQARNRT

SEQ ID NO: 28727 - protein, 17 aa, Homo sapiens
MDTSFLKMFFCGLLPCL

SEQ ID NO: 28728 - protein, 41 aa, Homo sapiens
VRVQRRRCEMSTMFADTLLIVFISVCTALLAEGESGYFSDV

SEQ ID NO: 28729 - protein, 141 aa, Homo sapiens
LHPLRDGHREAPLPGLHSQGGAAPHLSPPRSVSRCSVPLTTRGRRNSSSPGAERDGEERLGRLSPGRGPPVASAIFAPTSYIASLSSRPWPWASRRPSPPSLVSPGTPTEETWPGVTAFSEFRTYSFPCYLPQPLINHAPR

SEQ ID NO: 28730 - protein, 33 aa, Homo sapiens
LVCLVVFGWIGLLRGGRGGDCLQHRSSADGKVN

SEQ ID NO: 28731 - protein, 83 aa, Homo sapiens
LKRESAMRSVLPMGWIRRQSLNSWNSVFRMAQFSKSPTKALPPIRTQTTLGAFHQLNQALFLSQPRGLEDHVMISAMWIGINF

SEQ ID NO: 28732 - protein, 32 aa, Homo sapiens
LGIQSPPGKEASPRWELEGIASNPGFAISSAK

SEQ ID NO: 28733 - protein, 41 aa, Homo sapiens
LLLLYSVRDWTSWSLRTFQKVWFWEMTNGIILCYELSWNDR

SEQ ID NO: 28734 - protein, 25 aa, Homo sapiens
MKPLKMTRIHFSQTAQEPLFSNKRI

SEQ ID NO: 28735 - protein, 9 aa, Homo sapiens
MLQRREMSP

SEQ ID NO: 28736 - protein, 156 aa, Homo sapiens [sequence omitted]

SEQ ID NO: 28737 - protein, 48 aa, Homo sapiens
LVPEGRSLLPRVARNFPLSPTLQRLGYRGSRRFLNPGPRSPRLGFALV

SEQ ID NO: 28738 - protein, 151 aa, Homo sapiens
LNCASIIHGICLCKAHKYHYCHLDVAYLETKLQEAQKHRLFLVATDGAFSMDGDIVPLQKICRLASRYGALVFVDECHATGFLGLTGQGTDELLGVMGQVTIINSTLGKALGGASGGYTTGPGPLVSLLLPSPISSPTVCHLLLLAAPLRP

SEQ ID NO: 28739 - protein, 37 aa, Homo sapiens
LVQALCLLILISAVPSIVPDTSQMLRNYLLDLISGPW

SEQ ID NO: 28740 - protein, 46 aa, Homo sapiens
LHSPSDWITSHPEAPQDFEQFFSHPYRKIPSPDKRSIYIRSIGKYW

SEQ ID NO: 28741 - protein, 12 aa, Homo sapiens
MASIASSASRLS

SEQ ID NO: 28742 - protein, 26 aa, Homo sapiens
LQLLMIWVCRMEFFRSGVLLIRVTLI

SEQ ID NO: 28743 - protein, 118 aa, Homo sapiens
LGVQGPSMATVARAPRAPPGPLIAGSQNGGVSQDVEPQGAPRLGPAVPRALHSLLQGAAAPPPNTGIPLESGREGGFGGVLGPRGLLHPVPLPPNPGPAAGEDGALPALWCLFEHPLI

SEQ ID NO: 28744 - protein, 9 aa, Homo sapiens
LLLCLYMCL

SEQ ID NO: 28745 - protein, 42 aa, Homo sapiens
LMSARVRTSHLLLWLLLVVKFSHLDPIGLEYTPKELTLMHFV

SEQ ID NO: 28746 - protein, 8 aa, Homo sapiens
LTWMWLLW

SEQ ID NO: 28747 - protein, 121 aa, Homo sapiens
VKDRDHISTRFLGSMDSLTSAKLTLKEADPSSKVAIRRKDSPPPGKVSSQKQPAEKAASDEKDSVSNIATEIKEGPISGTVSSQKQPAEKAASDEKDSVSNIATEIKDGQQSGRHNFAKQI

SEQ ID NO: 28748 - protein, 10 aa, Homo sapiens
MCLLIVLLFA

SEQ ID NO: 28749 - protein, 129 aa, Homo sapiens
VLKGVHNHKKKKIHTSPTFRRPKTLQLRRQPKYPWKSTPRRNKLDHYAIIKFPLTTESAMKKTGDNNTRVFMVDVKANKHQIKQAVKRLYDIDMIKVNTLIWPDGEKKAYVPLAPDYDALDVANKIGII

SEQ ID NO: 28750 - protein, 48 aa, Homo sapiens
LNLMYQVSMVILIPVLFRFFKHLNESDKFKTDPFSSSLYDMKGLTVAG

SEQ ID NO: 28751 - protein, 39 aa, Homo sapiens
LYHCIPGGGCGKGDKKAEGTKGSCTHSWRSLNSDSSARI

SEQ ID NO: 28752 - protein, 60 aa, Homo sapiens
VDLKRLRVSFKTLLYVAAMHFFQLYFQPCNVHTSISVPRPLQGFLVPERAMCFSPLELFE

SEQ ID NO: 28753 - protein, 66 aa, Homo sapiens
VNKAPEMCRRTYRAHGRINPYMSSPCHIEMILMEKEQIVPKPEEEVAQKKKISQKKLKKQKLTARE

SEQ ID NO: 28754 - protein, 37 aa, Homo sapiens
MNIVWFVMSHMCFKMALCLGLPYVNGSCVCLLFKPWE

SEQ ID NO: 28755 - protein, 13 aa, Homo sapiens
LVCILIVFVISSC

SEQ ID NO: 28756 - protein, 151 aa, Homo sapiens
MSYQGKKNIPRITSDRLLIKGGRIVNDDQSFYADIYMEDGLIKQIGDNLIVPGGVKTIEANGKMVIPGGIDVHTHFQMPYKGMTTVDDFFQGTKGLTPSWFIWLIRICIKYLTQSSMRSSPAWESWGPLLKFMLRMGISLPRSKPACWKWG

SEQ ID NO: 28757 - protein, 83 aa, Homo sapiens [sequence omitted]

SEQ ID NO: 28758 - protein, 452 aa, Homo sapiens
LLPASCSSTMECLRSLPCLLPRAMRLPRRTLCALALDVTSVGPPVAACGRRANLIGRSRAAQLCGPDRLRVAGEVHRFRTSDVSQATLASVAPVFTVTKFDKQGNVTSFERKKTELYQELGLQARDLRFQHVMSITVRNNRIIMRMEYLKAVITPECLLILDYRNLNLEQWLFRELPSQLSGEGQLVTYPLPFEFRAIEALLQYWINTLQGKLSILQPLILETLDALVDPKHSSVDRSKLHILLQNGKSLSELETDIKIFKESILEILDEEELLEELCVSKWSDPQVFEKSSAGIDHAEEMELLLENYYRLADDLSNAARELRVLIDDSQSIIFINLDSHRNVMMRLNLQLTMGTFSLSLFGLMGVAFGMNLESSLEEDHRIFWLITGIMFMGSGLIWRRLLSFLGRQLEAPLPPMMASLPKKTLLADRSMELKNSLRLDGLGSGRSILTNR

SEQ ID NO: 28759 - protein, 107 aa, Homo sapiens
LLLGKGMRILLGLCLWGPSSTTWKVSQAGVPNISELQVLETCVATVGRVSNVDHNKRVIGKAGRNRWLGKRPNSGRWHRKGGWAGRKIRPLPPMKSYVKLPSASAQS

SEQ ID NO: 28760 - protein, 61 aa, Homo sapiens
LGHSESRHVFGESDKLIGQKVAHALAKGLRVIACTGEKLAEREVASLRSLFSRRKRSSQIT

SEQ ID NO: 28761 - protein, 14 aa, Homo sapiens
MGDPVKCFRALEIC

SEQ ID NO: 28762 - protein, 95 aa, Homo sapiens [sequence omitted]

SEQ ID NO: 28763 - protein, 63 aa, Homo sapiens
LRSARRVGLWRKRKFAKARVTSSRSWALLKIIFSASRGCSITVRWSLGIWKLPMCRGIMIFPS

SEQ ID NO: 28764 - protein, 32 aa, Homo sapiens
LVCPMRTIIMVLVLLRHLRLPLLHQSLLAKMK

SEQ ID NO: 28765 - protein, 21 aa, Homo sapiens
LKCLTYLFFFFRKLTMALQLC

SEQ ID NO: 28766 - protein, 67 aa, Homo sapiens
LYHSVFPVLCKDAVPEAWAENVDHRVNLAMNVGKAGGFFKKEDVVIVLTRWCPACSFPNTMRVVSMP

SEQ ID NO: 28767 - protein, 39 aa, Homo sapiens
MGEGSRMFGVFLFPPFCPFLLPLFLSQLFPLRCLLEPGV

SEQ ID NO: 28768 - protein, 93 aa, Homo sapiens
LPFTSRLRLLRPRESENVSKDKFSDTENSLEPASAPLAPAGKMRPSLALFRLYSELRKYCMFTGNMGKCRNTLTAAYIPSTNPSLYIQLDREQ

SEQ ID NO: 28769 - protein, 94 aa, Homo sapiens
MNEFLTSKSVFLLLSICFSSSLTLLGHLKRCIINQVLRKKNKTKLAIWINWDARKSTAEVQTSKLVNLEYAECLMPRSINLGCHLPKYRSNNIQ

SEQ ID NO: 28770 - protein, 85 aa, Homo sapiens
LLLLCTADSPKIPPFLPSFPPSFLSFSFFFFLFFLSFDRVLLSHPGWSAVAPSRLTATSASRVQEILLPQLLEEPGLQVHTTMPS

SEQ ID NO: 28771 - protein, 135 aa, Homo sapiens
LGVPSALCQTPGEEAGAHPLGARVEARGPGPAPVGAETDRVGDCKGPARTASDPPTPRCPPPHQATASCPPRRRRCSPGSRSSCGSRTWPGWSCPPTSCGRRSWRARAHSCWRPRPPCAPTTAPRSCSGAGPCWC

SEQ ID NO: 28772 - protein, 14 aa, Homo sapiens
MCTASPYTMCCCAC

SEQ ID NO: 28773 - protein, 65 aa, Homo sapiens
VYGPAGHGHAAPGGRSGSRSSWGAETDPLAAERQWDLGAPGSFGLHHLSDSAVPARNQNRSPDGG

SEQ ID NO: 28774 - protein, 29 aa, Homo sapiens
LWNWILAVCVLYPVTVETQRRESAGEDMC

SEQ ID NO: 28775 - protein, 163 aa, Homo sapiens
LEQQNKMPETKWSLLQQQKTARSNMDKFESYINNLRQQLEILGQEKLKLEAELGNMQGLVEDFKNKYEDEINKRTEMENEFVLTKKDVDEAYMNKVELESRLEGLTEEISFLRQLYEEEIRELQSQISDTSVVLSMDNSHSLDMDSVIAEVKAQYEDRQPQPG

SEQ ID NO: 28776 - protein, 19 aa, Homo sapiens
LIFQLRQTPYTVQTRAVSR

SEQ ID NO: 28777 - protein, 42 aa, Homo sapiens
VKHIPEGAKRRKVTRTEDQATWKEVGLSLLRSCLPELGQPPP

SEQ ID NO: 28778 - protein, 28 aa, Homo sapiens
LPLFPARHGGDGRGRVRDFEIFNNSLEV

SEQ ID NO: 28779 - protein, 19 aa, Homo sapiens
LPLTHPVDLACMASLLLAV

SEQ ID NO: 28780 - protein, 48 aa, Homo sapiens
LAHAFHLFLLCSFLRDPNGFNDWTFSTVRCWGERARGTYRLVIRDVGC

SEQ ID NO: 28781 - protein, 47 aa, Homo sapiens
LAHAFHLFLLCSFLRDPNGFNDWTFSTVRCWGERARGTYRLVIRDVG

SEQ ID NO: 28782 - protein, 263 aa, Homo sapiens
LVSATALPLLWPWEQEVPCVSVSRSSASLCPAQVSLPLLSPPKLWPAAGRHHELFPSYFPVRELLAPEQLVSSWSLGGGKRSRQGANQDWGDGRAGGAWPGRSAGAGAPPTGGSGVASAPKEAIGEPGGGTARGPRRPGSRCQRYEATPRPAAPGPGGRLAPTGRQQDPQPLPGAPRPSRHAGPPWQPGLAGPRWPRRPRRRARGSGRERRGREAGTAGTSRGPRAARRGGTRGAHRACRGVLGASAIRLQRQALREPGASAV

SEQ ID NO: 28783 - protein, 56 aa, Homo sapiens
LLQSGHAQYQGCPSKSGGSESTRVPRAGPRGESTGDRDPAPPPGPPSRENGKTSKS

SEQ ID NO: 28784 - protein, 59 aa, Homo sapiens
LKEFTDADNTLEPEENLDCPELIEAFLNSQKAGEEKDGTKRKPLSGSESDDSKSKKRCC

SEQ ID NO: 28785 - protein, 49 aa, Homo sapiens
LAAATPGPLIKKGEGKDKCKKGGLSPPRVAGGRGGSMCSGQLQGAPLQK

SEQ ID NO: 28786 - protein, 73 aa, Homo sapiens
LWKLCSFGLHDKSCCCSLVGSVPPLRAVTLTAKVCNFTPGASKTTNAPRGMNNSGHTIFKNRNTHRKGLQLHS

SEQ ID NO: 28787 - protein, 64 aa, Homo sapiens
LWLMGRPASLARGMSVWMAAAGLSAVITSWTRPSRRTSVCGVGVTARPATPSQAPLTLMTSAEL

SEQ ID NO: 28788 - protein, 80 aa, Homo sapiens
LLEFGCEFTGSGPFMTSSVTRSTPRTTLSFMDLTTTLDHTSLSLQSHQCQGTFQIGLKHCFGGVNNEAKDISNIMKAGIK

SEQ ID NO: 28789 - protein, 86 aa, Homo sapiens
LNNSSGFKINWLWLGWTVLGSRHLCVSRVTGEEVPVPLGIVLYATSSQEWQAVESLAFVGPLDIWQRTRKPRFPSVSPSAGKLQGV

SEQ ID NO: 28790 - protein, 72 aa, Homo sapiens
LAPDPERDGLSLFCPLALGQGPQTTLPLPPLPITLAGLLLFRPQIRETRGVPDAGVHMSDGSAGGRPRTADR

SEQ ID NO: 28791 - protein, 138 aa, Homo sapiens
LQPLFSGEARAPPYTPAAQPRVPGSGSGSASSRSRRSCRTPADYTSRRPMRPRHVMQGSPAFPPEGGTELQLPASSQGGPPRNAATGSAGRASGGVPGPGGCAFLRVGAARSAVARRGRGFLVRPGPPWPNQQAKIQA

SEQ ID NO: 28792 - protein, 14 aa, Homo sapiens
LYSVGMTAVGLAIL

SEQ ID NO: 28793 - protein, 42 aa, Homo sapiens [sequence omitted]

SEQ ID NO: 28794 - protein, 103 aa, Homo sapiens
LSHLWGWSLSPGIWTLGAIDEAWLALLAAMCKTCVPGKAPLSLQRSSESHGRSQQSSKCRLGKSRGLCGGWEGLIHIPTRKFSRTPACHLDPLEGPGSGWTTS

SEQ ID NO: 28795 - protein, 20 aa, Homo sapiens
LTVLNAVVLSVSSMLVNCTT

SEQ ID NO: 28796 - protein, 18 aa, Homo sapiens
LGSGSGNGGRRSPGGARR

SEQ ID NO: 28797 - protein, 20 aa, Homo sapiens
VLGMLLTIMKAKRPVDWGCF

SEQ ID NO: 28798 - protein, 142 aa, Homo sapiens
MGWLLGGTKGTGWPVLTTPSGRLPVLPRAGKGVGQLPQSPGRTGCCGGWHGSGDGGRWWPQQRLQEVTAWFPLGSPGQQLGRDGRVRAGHVAEPAAAPAVAGAPARRRLGRRCLPPPGGELAAPAPGLSPALLLPPSRHCGL

SEQ ID NO: 28799 - protein, 105 aa, Homo sapiens
VSPAARHALWGRAQLRAGAGAGPGRRLPRRGAAVRPGAAGGGGAAAGASARGEGARRGGHPLVGGSQRGRQRRIQRLRGRGDLPAASAAAAPRYRGDHDAASWAP

SEQ ID NO: 28800 - protein, 44 aa, Homo sapiens
LSAGGVTHSSSFPSSPTPGLWAPGGGKRPPIYSSAPVPSLRQSQ

SEQ ID NO: 28801 - protein, 55 aa, Homo sapiens
MISFFFFFFRDGVFALVAQAGVQWHNLGSPPPPPPGFKRFSRLSLRSCWNYRYFF

SEQ ID NO: 28802 - protein, 29 aa, Homo sapiens
LMYSAKTLLGWALSTAMCRTSIPTFPQDN

SEQ ID NO: 28803 - protein, 14 aa, Homo sapiens
MQVFIMTFQLALMF

SEQ ID NO: 28804 - protein, 78 aa, Homo sapiens
LPCWKTLDKCKLRDILKENRSLLFKSYKAIKDKETNFHRLKETIIKCDMVPKLDYEEFIPTPLTLGLSLPVLWLTDHE

SEQ ID NO: 28805 - protein, 49 aa, Homo sapiens
LPGPGGLATLRGQERSVWNGAGWSTVARSQLTTTSASQVQVILLPRPPE

SEQ ID NO: 28806 - protein, 52 aa, Homo sapiens
LAPVQFGAQSSTKGRSVLLGSSLLQGLQEFSSAALSLHFFGGERLQKEKETQ

SEQ ID NO: 28807 - protein, 28 aa, Homo sapiens
MDEELLFRDEQRKLLLEGRTVLMALSVA

SEQ ID NO: 28808 - protein, 53 aa, Homo sapiens
VIIRYWLLWVWAGLEPEGDLFFLSYATPGGEGGRFQTPVSPLPFYSQASLAPV

SEQ ID NO: 28809 - protein, 66 aa, Homo sapiens
LPSGFQKFLVHNVKELEVLLMCNKTYCAEIAHNVSSKNCKAIMERATQLAIRVTNPNARLHSEENE

SEQ ID NO: 28810 - protein, 179 aa, Homo sapiens
VEKCALMEQVVPQTIVMQFILELAKSLKVDPRACFRQFFTEIRTADRQYVEGFNDELETLKEHVQGRAKLPIKKAMKEYEEEERQKQLGPGGLDPIEVYESLPEELQKCFHVKDVQMLQDAISKTDPTNAKYHMQRCFDSGLWVPNSKASQAKVGEEAGPGDPLLEAVPKTGNEKDVGV

SEQ ID NO: 28811 - protein, 78 aa, Homo sapiens
LLLLRCRYARAGRGGRAAGAPRRGHLLTRTPGPAEPPPGSRGRQPAPAAPSVGIRGGSVPLPAPRTPQSSALSLATRP

SEQ ID NO: 28812 - protein, 131 aa, Homo sapiens
MVNPTVFFDIAVIDEPLGRVSFKLFADKFPKTTENFHALSTGEKGYGYKGSCFHSIIPGFMCQGGDFTLLNGTGGKSIYREKFDDENFILKHTGPGILSMANAGLNTNGSQFFICTAKTEWWMAGMWSLAR

SEQ ID NO: 28813 - protein, 96 aa, Homo sapiens
LLRGAGGRGHQRGVDTPRLNLGPLPALPWVRSRTAGTGNPRAPGEPRGGPRPAPETRGPLRTWLVPGASCARPLRPPCRRWSGSTSALRSAVVPRS

SEQ ID NO: 28814 - protein, 44 aa, Homo sapiens [sequence omitted]

SEQ ID NO: 28815 - protein, 26 aa, Homo sapiens
LRPAEKKKLLIFLPRTYLEVSKKIKF

SEQ ID NO: 28816 - protein, 73 aa, Homo sapiens
LRSRNGRESSLTGRPEAQRRITAQMQTTEAGTVAQEDRGPGVTGFRPLPLGNRVMPVPRQMNSFQEFHSPAQS

SEQ ID NO: 28817 - protein, 13 aa, Homo sapiens
MSFLLLSCMWWET

SEQ ID NO: 28818 - protein, 130 aa, Homo sapiens
LLDICNEVPELLDKSLIPHATQPESKAFSLKMKGDCFGYLSGVASGDNKQTTLLNSQQAYQETSEISKKDMQPTHPIRLGLALNFSVFCYGILNSPEKACSLANVAFDEAIAELDTLNEESYKDSTPTMQ

SEQ ID NO: 28819 - protein, 341 aa, Homo sapiens
VRTGPPAPLASLVSGVLKENQGSKARRAALEPRVPRAIKDSWVRWASLETLDPLALQALKGPGAAWDQRVLRDAWGPKENRDWLVMMDTKALWDPLDLLDQKAKRGSRARTARLRGPLGHLEIGALWVIEETAGNRETLGTLDRRVCKASVESQASRANPGIRDPGGGRDPKDRKAQRDQRESKARQGPQAGGGSRACRGCQGPGAWWGDRASRASLDQMGFLAGTGKQDSRGSRETMGTLAPWALLGREEIQVWPAYLEHRDPQDSRVRVGYPDSWVPLASEEQRAERGSLETRGSLGPKASRATLARWASQEWQVSSDPRARLETLASKASRALGGHLA

SEQ ID NO: 28820 - protein, 207 aa, Homo sapiens
LEQHKLTKEQWEERIQNWHEEHRGMLREDSMMENLKVAQDLEIYGVNYFEMKNKKGGTELWLGVDALSLNIYEHDDKLTSKIGFPWSEIRNISFNDKKIAIKPIDKKAPDFVFYAPHLRIHKGILALCMGNHELYMRRRKPDTIEVQQMKSQAREGKHQKQLERAQLQNEKKKREIAEKEKERIEREKEELMERLRQIEERTIKAQK

SEQ ID NO: 28821 - protein, 72 aa, Homo sapiens
MHPGLWLLLVTLCLTEELAAAGEKSYGKPCGGQDCSGSCQCFPEKGARHNLQLLNDMAGRLYHFSEVLPNLF

SEQ ID NO: 28822 - protein, 73 aa, Homo sapiens [sequence omitted]

SEQ ID NO: 28823 - protein, 50 aa, Homo sapiens
LDLMPNNSLQKELGSQTAPKLHETSPHLCTEEWPTLEPRRSLPGLVLNPP

SEQ ID NO: 28824 - protein, 91 aa, Homo sapiens
VGRISEPGGRRAAVKAGSLAVVLAIALAVLKLLPRFPTVLRKKCRLLSSTHFSSFFALLPDSLGLPKNDPLAPKVQVISHLWASAFATPLQ

SEQ ID NO: 28825 - protein, 22 aa, Homo sapiens
LVSFSIGNTKSGILGTVMVRAA

SEQ ID NO: 28826 - protein, 22 aa, Homo sapiens
LEHTVLAKRRLKIIHLLCGVII

SEQ ID NO: 28827 - protein, 33 aa, Homo sapiens
LLPSEGKTPGASVGARRHPGWTSTQIWGDDGTD

SEQ ID NO: 28828 - protein, 42 aa, Homo sapiens
VAFFLWLPVGLRTLADICWLATANIIQDVQQREQHRWQNRLS

SEQ ID NO: 28829 - protein, 47 aa, Homo sapiens
VTLAEEGEREARGRASRESRCRLLLPHNLVCAARGGSPSSGPSGVRS

SEQ ID NO: 28830 - protein, 67 aa, Homo sapiens
LLRGDGGLRGARSGDRGATSGIQISVWWLDVDFNEFGLHVDLVVSLIPSCGQGEGPRAALSSRRRPR

SEQ ID NO: 28831 - protein, 23 aa, Homo sapiens
VPGGGGRRIRGLELATSAHPHHP

SEQ ID NO: 28832 - protein, 116 aa, Homo sapiens [sequence omitted]

SEQ ID NO: 28833 - protein, 19 aa, Homo sapiens
LTSSCCLFFYTIMICLCQL

SEQ ID NO: 28834 - protein, 38 aa, Homo sapiens
MFKSKCQIMWRMYTSRAKLWVVHKFNIFTGRNAYFCTM

SEQ ID NO: 28835 - protein, 11 aa, Homo sapiens
MWIVRIAFVVF

SEQ ID NO: 28836 - protein, 45 aa, Homo sapiens
LFPLLLCFFLSVLKVEEGPYLFLWVLQVLLEVEAAVTRGSFPCRM

SEQ ID NO: 28837 - protein, 27 aa, Homo sapiens
MNLVLGSIYILFRVRGRFYLAIFFKKR

SEQ ID NO: 28838 - protein, 33 aa, Homo sapiens
MVNVGSGFRSCIHPADQSWGAWKSAQWGVFANF

SEQ ID NO: 28839 - protein, 36 aa, Homo sapiens
VRLEKWRLLPPLLASAFWLLLCLPHWHPAEGRWEDL

SEQ ID NO: 28840 - protein, 119 aa, Homo sapiens
LSNADASVTRVESLPSSHMCHKGWHGPGVPHHVAFTPCKARLRPATQCQAHSSPRRKMVQAGSIPLAAASDPLAKQEGTISSLRSWLAGSLGDRPALLPAHPQDVDSSCAHLDFLLVLI

SEQ ID NO: 28841 - protein, 119 aa, Homo sapiens
LLRPDASVTRVESLPSSHMCHKGWHGPGVPHHVAFTPCKARLRPATQCQAHSSPRRKMVQAGSIPLAAASDPLAKQEGTISSLRSWLAGSLGDRPALLPAHPQDVDSSCAHLDFLLVLI

SEQ ID NO: 28842 - protein, 47 aa, Homo sapiens
VYLCGEGVWREGYRELRGRWGTGIPVTKMGIFPLSSTWKPQPPLQAP

SEQ ID NO: 28843 - protein, 84 aa, Homo sapiens
LVIVVTKMMVLSRDHQNQEAITAILPHLLFKISNDHPDEDTVNSLYPDFLLSACRKHHHSSRGTDQQDIPRSNHSGNLEFSGRK

SEQ ID NO: 28844 - protein, 43 aa, Homo sapiens
LQTSLLVSVYVLLETFHSCLTNGTDQSKTGCQFASNSVRSIPL

SEQ ID NO: 28845 - protein, 12 aa, Homo sapiens
LMCLKSILVFIS

SEQ ID NO: 28846 - protein, 43 aa, Homo sapiens
LSLPYLSLVQVLSALCGQRILLQEEVRVHCGAKADIKVCVLCG

SEQ ID NO: 28847 - protein, 126 aa, Homo sapiens
LWGFLLWVSFICAGRSLIDLVPSSSAFSSRLSSASAPSSWWLFHFTVILSTPSSALPLPSQACPFTSSSSECQNISDRFTSEGSWGLPQGTSRSCVCQLLQKWIWKMEERCPSNGIPNLTKHHLES

SEQ ID NO: 28848 - protein, 200 aa, Homo sapiens
MGRNPMMRKATQGQLENSPALEKLLPPLQGNVGFAFTKEDLTEVRDLLLANKVPAATRAGAIGPCEVTVPAQNTGLGPEKISFFQALGITTKISRGTTEILSDVQLIKTGDRVGASEATLLNTPNISPFSFGLVIQQVFNNGSIYNPEVLDITEETLYSGFLEGVRNVASVSANWLPTCCISTPFYHQWVQRMPGSICGD

SEQ ID NO: 28849 - protein, 82 aa, Homo sapiens
MGVFLPVVLLVHMVLLYQNPYKHHGNCSHYNCSFLLSFGRFKVYEQCQILIPGGTCLHNSSHSCHSVDTFALQTFLSRTKKA

SEQ ID NO: 28850 - protein, 16 aa, Homo sapiens
LIHWRPLLLVMIVVKQ

SEQ ID NO: 28851 - protein, 92 aa, Homo sapiens
LPAAGRWEPLPPPGRAGFREQQWERQYQHHGHLKEYHFHTHRELAQSSHAQRRGHGALHRTSKADHQELRTSEHSAQSLCQEPPFALYKPVK

SEQ ID NO: 28852 - protein, 35 aa, Homo sapiens
LLFQHQDLPGVRVRPDAGAGHGGRLPGERPDHPGA

SEQ ID NO: 28853 - protein, 46 aa, Homo sapiens
MPASANAKSTNAPLARRGCSCYPVGCAKCAQGCICKGASDKCSCCA

SEQ ID NO: 28854 - protein, 165 aa, Homo sapiens
VRRLEARGLPLMWLLVQGLWCLPQRKWRAARGGREQRPGCPCEDERRDDWRVPEDLTRVPPAGPLPGSDTPTAPGLQLRGSPLWLGEAGPLGAGARVASGSTRCLKTPTSPGLTSIGRFHALPWPEAPSPRAMCKLLQGSLSFQNFNYWKVLPGPAPKSAVNVDS

SEQ ID NO: 28855 - protein, 160 aa, Homo sapiens
VLLAQTQAEGALLPTLCVLPASKAPPKVSPSWGTSTGPWCTVQLWRDKRKSWCLPVDYFILEALGMHVSLEERPSLGRSLERGDTPGGGGILLPPLSKRKDGNVHATQGHSSRRSLALYICCHFILTATPRDVLQIKQVSARLCGLSKITLLIIKSRAGI

SEQ ID NO: 28856 - protein, 323 aa, Homo sapiens
MPSCRRSAFPTEARGIQLCLGVGATRGALSLKVSVFFPSDNNRWRRRRREQLLRLFVCTVAAVVTLPGARAALPEQVAQLGYAEQRRQQPHREIEEHEDGLLGGPAHEAVDRVRAGRTGAREVRGHAEAVEQRLAAQEGQLGQQAQRHAQQVAAARAAGAQGARRALGLGQSGGALRRRLSAARLLACPVHGVDDEQHRGRREQQDVEEPEAVVGDREGAVVAGLATARLQRVAHELLLLVLEHGAAHRGQHQDAEDQHDHQPEAAHERRLQLHGVQQRAQERPLPHGAGDAGRGVRGWGKSGTPAPSKPIGVGSVGPSLTSG

SEQ ID NO: 28857 - protein, 47 aa, Homo sapiens
VPEHFCCCHSSEERSQDRSSHMGDGHLQARHHDHPVEQADGRGGHVL

SEQ ID NO: 28858 - protein, 57 aa, Homo sapiens
VPEHFCCCHSSEERSQDRLSDVTESPTRSSHMGDGHLQARHHDHPVEQADGRGGHVL

SEQ ID NO: 28859 - protein, 109 aa, Homo sapiens
VQLHLFECCFLGSGLRLLCFSFLRCYRPVHCVWLPCLCCPLQCRRLWVGLRVFGPGRRAQIFKEAREEAPPSWQQMPGARPGETGGASGTGLERPRWLLNSNKESLQPE

SEQ ID NO: 28860 - protein, 17 aa, Homo sapiens
LPPIFGFLSFAPFFLPF

SEQ ID NO: 28861 - protein, 20 aa, Homo sapiens
LQPDSRCIYFKFRSPCFMSF

SEQ ID NO: 28862 - protein, 124 aa, Homo sapiens
LLIPPSRPQRPLLVQRGMAPGHLGRSRSQLEAEGQQSEDGLTEPSRVLPGCPGASCVRRASPRCEPHWRVLRPGRARQAASAGAGLCHQLREKAGPHPENHDAGRIGSACGDGSHPRAHDQRHS

SEQ ID NO: 28863 - protein, 163 aa, Homo sapiens
LENHAGGGCGDMDEHPRPPVTDVPRSVSLCQPSGPEQRPCRSLCAEPDRPLLVQRGMAPGHLGRSRSQLEAEGQQSEDGLTEPSRVLPGCPGASCVRRASPRCEPHWRVLRPGRARQAASAGAGLCHQLREKAGPHPENHDAGRIGSACGDGSHPRAHDQRHS

SEQ ID NO: 28864 - protein, 13 aa, Homo sapiens
LVPLIRSTKETTK

SEQ ID NO: 28865 - protein, 100 aa, Homo sapiens
MGGAPPGPHWLPLQGAPGGLSSGGGDTYPLPRLRPREAEGGLPARACAREPWGVLLGAGAGGGTAGAGAAAGPAGGAVRPGQGGAQRGAAAGPAGGGGVG

SEQ ID NO: 28866 - protein, 160 aa, Homo sapiens
MTLAAEPISGSPSGLTVPNPVTLRPSEHPICASPSRRTPPPGASRDHRALGLLDTEAEPPRCADSPPLRFQIVHAPEQRRTSPRLRRHHLRAKLWPRPLRHRSDPDQRPRQRPRPPNSHSTPRPAPCSPRQPAPAQRSPLRGASGPRTGALVPRSPEFHR

SEQ ID NO: 28867 - protein, 281 aa, Homo sapiens
LPSDVPRGQRLLLQSQPPGDSSQRRCGPHHHDGVSFRLRADHAPPAPPLLRSELPSASTVHGDSGTLRAPGRGRGPGVGRPRLRGLPALRATRAPRPVHLRRALRQDRRVEGRCPGSPSGTTCPFDRGCAPSAPRSPTPRPGPILCACQGLPGSGGGSALRALPRALPSQSRRAWRPLRRGPGPGSPPGAPSKLPVVRRELALPLPVGRRGRLLGPVRLRAGPPAPRRALGRAGRALPGSALPLLLRAPARVPLGRSAMRLRRLRGSPRGGCAVRTAWWVP

SEQ ID NO: 28868 - protein, 36 aa, Homo sapiens
LGRGSERRKYLEGSPDGEGVGKGTGNQRLGRGSVRR

SEQ ID NO: 28869 - protein, 131 aa, Homo sapiens
MRRRLNDSRALAKAPGKGSSHAACDPGGLGVQGPSMATVARAPRAPPGPLIAGSQNGGVSQDVEPQGAPRLGPAVPRALHSLLQGAAAPPPNTGIPLESGREGGFGGVLGPRGLLHPVPLPPNPGPAAGLI

SEQ ID NO: 28870 - protein, 50 aa, Homo sapiens
MSVPLCRLNLRLAVPHSHTRCPGVATDLKSPHRTLHLRNVPGSEHCPLTT

SEQ ID NO: 28871 - protein, 40 aa, Homo sapiens
LGRSFAIGWWRRRRQNVCIVTPYSSNFRRFWVKQLSLVCK

SEQ ID NO: 28872 - protein, 21 aa, Homo sapiens
MYANELVRRILLLQMQEWDLI

SEQ ID NO: 28873 - protein, 13 aa, Homo sapiens
MSRMLSSCLPKTR

SEQ ID NO: 28874 - protein, 86 aa, Homo sapiens
LERGSAPLDAHARCPGSGDGRPPCFGPVLEWLAAGPGCPPSARGRRLWHRSPASEATPRLLPTVGAPRGPALRGAAAKKPQSGGAG

SEQ ID NO: 28875 - protein, 54 aa, Homo sapiens
LAVPGPRPRGPLLVGLVGCPLLAAPPGADMGARPGVGRGGCRETQAAHGARLLG

SEQ ID NO: 28876 - protein, 54 aa, Homo sapiens
LLHLPSARTVPSAGTRTGGVGLGPGFSGPRIKVPAWVRPPRIPVFGTRPLKRAQ

SEQ ID NO: 28877 - protein, 26 aa, Homo sapiens
LHHIRRLGAQFRKVLHSCGGGYCVSD

SEQ ID NO: 28878 - protein, 17 aa, Homo sapiens
LYHGLLCLQLRIQRRKL

SEQ ID NO: 28879 - protein, 14 aa, Homo sapiens
MVHEWLSYWLLYGF

SEQ ID NO: 28880 - protein, 17 aa, Homo sapiens
LAYILALWRCLFFCGDT

SEQ ID NO: 28881 - protein, 17 aa, Homo sapiens
MNLLSVTLIFMPLETSK

SEQ ID NO: 28882 - protein, 23 aa, Homo sapiens
LGYACLRGLSCVWDPDLLSSRKP

SEQ ID NO: 28883 - protein, 417 aa, Homo sapiens
LLPASCSSTMECLRSLPCLLPRAMRLPRRTLCALALDVTSVGPPVAACGRRANLIGRSRAAQLCGPDRLRVAGEVHRFRTSDVSQATLASVAPVFTVTKFDKQGNVTSFERKKTELYQELGLQARDLRFQHVMSITVRNNRIIMRMEYLKAVITPECLLILDYRNLNLEQWLFRELPSQLSGEGQLVTYPLPFEFRAIEALLQYWINTLQGKLSILQPLILETLDALVDPKHSSVDRSKLHILLQNGKSLSELETDIKIFKESILEILDEEELLEELCVSKWSDPQVFEKSSAGIDHAEEMELLLENYYRLADDLSNAARELRVLIDDSQSIIFINLDSHRNVMMRLNLQLTMGTFSLSLFGLMGVAFGMNLESSLEEDHRIFWLITGIMFMGSGLIWRRLLSFLGRQLEAPLPPMV

SEQ ID NO: 28884 - protein, 455 aa, Homo sapiens
LLPASCSSTMECLRSLPCLLPRAMRLPRRTLCALALDVTSVGPPVAACGRRANLIGRSRAAQLCGPDRLRVAGEVHRFRTSDVSQATLASVAPVFTVTKFDKQGNVTSFERKKTELYQELGLQARDLRFQHVMSITVRNNRIIMRMEKYSLLLESVASILQNSVSFMERQTEQWLFRELPSQLSGEGQLVTYPLPFEFRAIEALLQYWINTLQGKLSILQPLILETLDALVDPKHSSVDRSKLHILLQNGKSLSELETDIKIFKESILEILDEEELLEELCVSKWSDPQVFEKSSAGIDHAEEMELLLENYYRLADDLSNAARELRVLIDDSQSIIFINLDSHRNVMMRLNLQLTMGTFSLSLFGLMGVAFGMNLESSLEEDHRIFWLITGIMFMGSGLIWRRLLSFLGRQLEAPLPPMMASLPKKTLLADRSMELKNSLRLDGLGSGRSILTNR

SEQ ID NO: 28885 - protein, 402 aa, Homo sapiens
LLPASCSSTMECLRSLPCLLPRAMRLPRRTLCALALDVTSVGPPVAACGRRANLIGRSRAAQLCGPDRLRVAGEVHRFRTSDVSQATLASVAPVFTVYLKAVITPECLLILDYRNLNLEQWLFRELPSQLSGEGQLVTYPLPFEFRAIEALLQYWINTLQGKLSILQPLILETLDALVDPKHSSVDRSKLHILLQNGKSLSELETDIKIFKESILEILDEEELLEELCVSKWSDPQVFEKSSAGIDHAEEMELLLENYYRLADDLSNAARELRVLIDDSQSIIFINLDSHRNVMMRLNLQLTMGTFSLSLFGLMGVAFGMNLESSLEEDHRIFWLITGIMFMGSGLIWRRLLSFLGRQLEAPLPPMMASLPKKTLLADRSMELKNSLRLDGLGSGRSILTNR

SEQ ID NO: 28886 - protein, 31 aa, Homo sapiens
MKMASSLAFLLLNFHVSLLLVQLLTPCSGRE

SEQ ID NO: 28887 - protein, 19 aa, Homo sapiens
LTPEFILAVCLLLLFWSCG

SEQ ID NO: 28888 - protein, 30 aa, Homo sapiens
LGLGHGVESGKITPSVSFSEENKFFSRRKV

SEQ ID NO: 28889 - protein, 97 aa, Homo sapiens
LGRLASRMWSRAHFSRWRVNPPRLCIGPVWVDPDPKWPFPSRPELRFSVGVWSLPAGGLCGGGRSCTTRALAHPYFPRPETRNAVGLPEAVPSLICD

SEQ ID NO: 28890 - protein, 18 aa, Homo sapiens
LPVAPVTARMCILQPSRD

SEQ ID NO: 28891 - protein, 76 aa, Homo sapiens
VGEPRATLRDDVGQRSPGGCWGRRGGSDCGLHQRSRLLPPPAAASRGPAASAAESSYRSGLESPACILELGGRQAF

SEQ ID NO: 28892 - protein, 95 aa, Homo sapiens
LSSVAEARVAHQGADPGAAGAGAVPHYPAPRVLRLDPGAWPREWQGPGRHGGGPDRKSTGGQGGSMPQAGRAGGNSTLQRRLGARHPAGASGGQA

SEQ ID NO: 28893 - protein, 90 aa, Homo sapiens
LDPGAWPREWQGPGRHGGGPDRKSTGGQGGSMPQAGRAGGNSTLQRRLGASWDLLPGNCVNFTLFGASSVSGYNILSSSVKLPRPLFLAL

SEQ ID NO: 28894 - protein, 38 aa, Homo sapiens
VRIHWELLGKVLVPGLAWFLSKCQIGHPSYRPMSKITV

SEQ ID NO: 28895 - protein, 38 aa, Homo sapiens
LLLCLSLSIYVFNFTDASSKIGISTQSSANLFSERCVM

SEQ ID NO: 28896 - protein, 100 aa, Homo sapiens
VLLVLSVNSSVFLHLQALGIPLHLAYAGSTHHMLGVRVTLACQDPVMGPGPSTKSDKSLSVRTTCQALCKDGQEFQPGHLPRAPGGQHHRAAILPQDPDP

SEQ ID NO: 28897 - protein, 432 aa, Homo sapiens
LDLFLFIAILNQLWAAPSHPASHRISPTWSWLVLSRFLDQSNLRRGMAEAYPNHPMVLEFSKAPDGEVKSSQLSSSGLSANNNNNNYSSRNNNSRNSSNRSSSRNNKSKNSSNSSSNSSNSSNNSNYSSNCNSNSRSISDNSSSNNNKSNSSNNSNSNSNSNSSSNRYGNSNTISSNSNSNNRILSSNSNSNSSNTSNSSSNNSISNSNSNSNSISSSSNSNSSSNNNKSNRNSNNKTNNSNNSSNNFSNSSNNSNRINTITIKSNNSSNNSHRNSKISSSNNRSRSNNSSSSNRSSSSNSSNSSSSSSSNHYHSSNNSSSNTSSSSSSNSNSNSSSNSNSNSSSISNNSSNNSSSSRNSSNNYNSSSNNSNNSRNKYNSNNNSNSNSKNNSSSNNNNSNSSNNSNKKNDNSSSNNSSSSNNISHRVAARIQ

SEQ ID NO: 28898 - protein, 31 aa, Homo sapiens
LSAAMCLVSFTMIVRPPLPRGTTLALLPSLE

SEQ ID NO: 28899 - protein, 208 aa, Homo sapiens
LQTAASARGNRQTPAFVAPAPRPYPADGCSAPARGGGPRAEDRGGLALFVTGEVRGPLAVGAGGERRPVASREVLQDRGVFQELRHLGDLRSPLPTAFAAAAHAGALAPGRGPRCRLRASRLLPGKSAAERNKNSRTQSQARPGHKRPQSRTTNQLRPSWKLAPTPAHTLQAGGEQPASPTPQERAPPLAGDGRKRGGDWRDGSRGFH

SEQ ID NO: 28900 - protein, 82 aa, Homo sapiens
LPGGGGRVRFFSGDVEIIFVTGVGRGRGVPRRARASSSPALLHSSLAPAAERRHAAQNPPKNGRHRRRCRRGTPGTAAAAPS

SEQ ID NO: 28901 - protein, 48 aa, Homo sapiens
LLANTRSSRWLKLSGEVLRRLLLAALGLRVTGTCISVSGSPPEPWRRH

SEQ ID NO: 28902 - protein, 107 aa, Homo sapiens
LLGGLQRRLIAGPVSLSLSLNGLAMCIVTCAVQMGTCSMLCSQPAGTAGMGGVTKISGMWQEAAAHASICFHRDLYRCARVSSWGDLLPVLTPSAFPPSTAQDPSES

SEQ ID NO: 28903 - protein, 59 aa, Homo sapiens
LGSCSTASFRQITRDFVHPGSTGSVTRERLPRLWLPKLLRAPAEYFIQKSCETTAQPEQ

SEQ ID NO: 28904 - protein, 54 aa, Homo sapiens
LGSCSTASFRQITRDFVHPGSTGSILYRNLVKPLPNQSNDCSKSGIEFSTWKKW

SEQ ID NO: 28905 - protein, 57 aa, Homo sapiens
LPPLLLSAAFAAWVVTGAAAEEATATRTGVEAAQHEAAQARSIAHVGTVRAGPGGRL

SEQ ID NO: 28906 - protein, 18 aa, Homo sapiens
MLSSEEPSRSGQGQHGQS

SEQ ID NO: 28907 - protein, 44 aa, Homo sapiens
LGEWVGLCQIDREGKPRKVVGCSCIVVKDYGKESQAKHVIRENF

SEQ ID NO: 28908 - protein, 99 aa, Homo sapiens
VSTMELAALCRWGLLLALLPPGAASTQVCTGTDMKLRLPASPETHLDMLRHLYQGCQVVQGNLELTYLPTNASLSFLQTTTFLRTWDPAPSSAPCTTKR

SEQ ID NO: 28909 - protein, 14 aa, Homo sapiens
LSRPAASMEAPAGP

SEQ ID NO: 28910 - protein, 64 aa, Homo sapiens
LFLTLGAAAMFPEHKMATREEDKHKDEVLNSRSHNVGDGPPDFLTGETWSCNTVVKNVTLEPAC

SEQ ID NO: 28911 - protein, 53 aa, Homo sapiens
LFLTLGAAAMFPEHKMATREEDKHKDEVLNSRSHNVGDGPPDFLTGKQAQGSH

SEQ ID NO: 28912 - protein, 115 aa, Homo sapiens
LDAGPGLGRRLAPAPKRLSVPDPLRLTPMMKRASTGVLAVDIFDKFNFTGARVPWFDAIHEEFPRELESSISFPANFFKPPEEKEGPLVRPASRRTTPQTTRPGPGTEGEAPISR

SEQ ID NO: 28913 - protein, 168 aa, Homo sapiens
LLSSPAAQQPLPHPISRASCPHAPTCPWTDTPLFLLAQGPAEAHTRGPPRLPAATGCPPHLPGLLSGISVDIDPTGLQSQWTPKGQDPPLMFSEDYQKSLLEQYHLGLDQKLRKYVVGELIWNFADFMTNQCQPKTTPSVILFLPSCEEPQANKATLVCLMNNFIRES

SEQ ID NO: 28914 - protein, 20 aa, Homo sapiens
LAPALWTLSRSGAETAAARA

SEQ ID NO: 28915 - protein, 144 aa, Homo sapiens [sequence omitted]

SEQ ID NO: 28916 - protein, 30 aa, Homo sapiens
VPGWVLVCALLLPIPLPPRIKEEPGGVLRK

SEQ ID NO: 28917 - protein, 166 aa, Homo sapiens [sequence omitted]

SEQ ID NO: 28918 - protein, 24 aa, Homo sapiens
LFGLSLWLVLGCAASHGALWAQRR

SEQ ID NO: 28919 - protein, 13 aa, Homo sapiens
LSLWMSLHVIWVS

SEQ ID NO: 28920 - protein, 17 aa, Homo sapiens
VKTSTVDLPIENQLFGR

SEQ ID NO: 28921 - protein, 119 aa, Homo sapiens
LHDMLVSLGKNPTDAYLDAIMNEAPGPIDFTMFLTIFGEKLNGTDPEDVIGNAFACFDEEATGIIQEDYLRELLITMWDRFTDEEVDELYREAPINKKGNFNYIEFTCILKHGAKDKDD

SEQ ID NO: 28922 - protein, 106 aa, Homo sapiens [sequence omitted]

SEQ ID NO: 28923 - protein, 68 aa, Homo sapiens
MPSHHAILRLDLAGQDLTNYLMKILTKLHHHGQAGDCARHQREGVLHRPGLRAGDGHCHILLLPGEEL

SEQ ID NO: 28924 - protein, 43 aa, Homo sapiens
LDFSSNTSSSLVSSLSACCADFSLASPHNHAWKMCLLPLYLLP

SEQ ID NO: 28925 - protein, 163 aa, Homo sapiens
LRAAACVQQRPTAACGGSRASGPRLHRGAPRRAEAVRPAEAPPRPAQKTPRSLALILSALHFCQLKVQNMRGRYEASQDLLGTLRKQLSDSESERRALEEHLRGAGEEQPGPQPAGGPAAGRGAAAGAGEAAGCPGGAAAPAGPAGGRAGRGGAEWRTGSPGA

SEQ ID NO: 28926 - protein, 97 aa, Homo sapiens
MLPGVPHPDTSLALAVSPRMPKAPWATSPRAWLTWKCSRGRPPHSPVPSPVTWDLAPGLRMASSSPPRMESSLSKTVSCTASSSRMCRGPKLGGTPL

SEQ ID NO: 28927 - protein, 43 aa, Homo sapiens
LRKTRCLCSLQAEVTVPEPVKVNPLGLAGGEEEDLFQKELSEG

SEQ ID NO: 28928 - protein, 20 aa, Homo sapiens
LPGSQSRQVHRPVLPAMAPR

SEQ ID NO: 28929 - protein, 38 aa, Homo sapiens
LQILPGQWIPSQLGRALEAGGETEPRLFPHKPTLWQPC

SEQ ID NO: 28930 - protein, 138 aa, Homo sapiens
LPGPQTARGPRRPGSRCQRYEATPRPAAPGPGGRLAPTGRQQDPQPLPGAPRPSRHAGPPWQPGLAGPRWPRRPRRRARGSGRERRGREAGTAGTSRGPRAARRGGTRGAHRACRGVLGASAIRLQRQALREPGASAV

SEQ ID NO: 28931 - protein, 35 aa, Homo sapiens
LRAILLSLSRLWTCAKGPLLSPDDAHTNGFSDGGD

SEQ ID NO: 28932 - protein, 87 aa, Homo sapiens [sequence omitted]

SEQ ID NO: 28933 - protein, 33 aa, Homo sapiens
LPGAQSRTILVSEDTSLSAEFQPESLAQFYFYI

SEQ ID NO: 28934 - protein, 48 aa, Homo sapiens [sequence omitted]

SEQ ID NO: 28935 - protein, 19 aa, Homo sapiens
MAPSPFWVLMMPLLVTLWS

SEQ ID NO: 28936 - protein, 25 aa, Homo sapiens
MAADPPGAAEKGEMAPGTRVSPRRC

SEQ ID NO: 28937 - protein, 28 aa, Homo sapiens
LWAVQGTEPLAARGGVGVRRGREGSVRV

SEQ ID NO: 28938 - protein, 71 aa, Homo sapiens
LPAGARGVEGAGRSAGFQRELCAGSFPVVAPGHPQPQHPILGLLPCSHIRSTSSLQELPVAWSPPTLVHAS

SEQ ID NO: 28939 - protein, 61 aa, Homo sapiens
LARGNHRLFSRILFFSHLLAFFFLPPWLPSPNPAIPSSTPVLPSPAILSHPTCNLLSFAPP

SEQ ID NO: 28940 - protein, 327 aa, Homo sapiens
VQYVNGLLPSSESVRSCVKQGNWRHSHQSQDLHQQLCPWPPVPPVSSPLSLRSQRQTSTSPSFSATPATHLPLAFALSIPRSGPGSDFSPGDSYASDAASGLSDVGEGMGQMRRPPGRNLRRRPRSRLRVTSVSDQNDRVVECQLQTHNSKMVTFRFDLDGDSPEEIAAAMVYNEFILPSERDGFLRRIREIIQRVETLLKRDTGPMEAAEDTLSPQVRPLGGHFQGKWTLCSRVYYSLPSAVPLDLTPLHLWDPKTVALFFFFEMESHSVAQAGVQWHDLGSLQAPPPGFTPFSCPSLPSSWDYRRSPPHPANFFCIFSRDRVSPC

SEQ ID NO: 28941 - protein, 141 aa, Homo sapiens [sequence omitted]

SEQ ID NO: 28942 - protein, 24 aa, Homo sapiens
MRNVKKQLLKLTLSLSCTLSGLGF

SEQ ID NO: 28943 - protein, 50 aa, Homo sapiens
VMVMAALSLVAACWGRAAADESVQLPAPLPSGSSSLRKPAFLQDLPSIMP

SEQ ID NO: 28944 - protein, 129 aa, Homo sapiens
LRPGNVGGLPCARAESPSCMPSPVLGLAACVCVACTDILQGALVIPADSTEPQTDTWRGCPRTRPPGRSQPQTSSFPTSWSQRDRLLPLRPCLNGQNPYSLSCLWTSRARAIVTTVFSSHRMGPKQYRA

SEQ ID NO: 28945 - protein, 38 aa, Homo sapiens
LRTRHWAALAGSLAAAPQSAAAAAACGPGGWEKRSVGE

SEQ ID NO: 28946 - protein, 29 aa, Homo sapiens
VRCRTRLPPPIDPRSARSRAGLLCWQGPW

SEQ ID NO: 28947 - protein, 186 aa, Homo sapiens
LMSKGSLFNFLKEGDGKYLKLPQMVDMPAQIADGMAYIKRMNYIHRDLWAANILVGENLLCKIADFGLARLIEDNEYTSRQGAEFPIKWTAPEVALYGGFTIKSGVCSFGILQTELVTKGRVPYPGMVNHEILEQVERGYRMPCPQGCPESLHELMNLCWKKDPDERPTFEYVQSFLGDYFTATEP

SEQ ID NO: 28948 - protein, 25 aa, Homo sapiens
LIPQRGGARCQSTDVSLAGCPLTCR

SEQ ID NO: 28949 - protein, 62 aa, Homo sapiens
LSQGMSAAQARAQCVPWGPRPAWLLWVGGRGHPQGWSLRVMFWLWGDFSNVPARQGRGRRMF

SEQ ID NO: 28950 - protein, 13 aa, Homo sapiens
VVLKIQEVCRLLC

SEQ ID NO: 28951 - protein, 199 aa, Homo sapiens
LELQRLGAEVVKGDLNDKASVDSALKGVYGAFLVTNFWDPLNQDKEVCRGKLVADSAKHLGLKHVVYSGLENVKRLTDGKLEVPHFDSKGEVEEYFWSIGIPMTSVRVAAYFENFLAAWRPVKASDGDYYTLAVPMGDVPMDGISVADIGAAVSSIFNSPEEFLGKAVGLSAEALTIQQYADVLSKVLGKEVRDAKVSS

SEQ ID NO: 28952 - protein, 96 aa, Homo sapiens
LGLQVVMLVLAWKLDAQNMGYFTLQEWLKGMTSLQCDTTEKLRNTLDYLRSFLNDSTNFKLIYRYAFDFARAEDGVSDCELLAGTLAEQEKRTSAA

SEQ ID NO: 28953 - protein, 64 aa, Homo sapiens
MAKAPFYHLLFCFGIWSDSYSSLGLAQWRNWCSYCTESGTKIQGMSVTSYGIPPGQNIRFEDCD

SEQ ID NO: 28954 - protein, 18 aa, Homo sapiens
LLWVRLVCISNVFILITQ

SEQ ID NO: 28955 - protein, 40 aa, Homo sapiens
LRRSKTILLHLFVKLPLQVVLSFIWMATPHQVLKCLKHTT

SEQ ID NO: 28956 - protein, 80 aa, Homo sapiens
VLALVAVLLLAACHLASRRYRGNDSCEYLLSSGRFLGEKVWQPHSCMMHKYKISMKTFLLKTRLHQLKWIFCGILKLMVL

SEQ ID NO: 28957 - protein, 140 aa, Homo sapiens [sequence omitted]

SEQ ID NO: 28958 - protein, 71 aa, Homo sapiens
VQMPLPPTRSCAASVWPRGHQTDLRARTRHASAASHPSSATGRSPAPPHAAAPHPGPRSLCSPTWTSPPAT

SEQ ID NO: 28959 - protein, 42 aa, Homo sapiens
LNKSKILLMALLHNASFSVFQETLLHLHCSITYGRMRKAGFG

SEQ ID NO: 28960 - protein, 82 aa, Homo sapiens
LASPGPSLCRSPLWRQSQWSPVRQGCLAATGLQLRNPSRGHGQAAPLTARVKHVRSRPGAKQEGRGFHRFYSQRITTILQGP

SEQ ID NO: 28961 - protein, 203 aa, Homo sapiens [sequence omitted]

SEQ ID NO: 28962 - protein, 383 aa, Homo sapiens
LEKIQLPQWSISLNMTDEHGNLVNLVCDIKKPMDVYKIHLNQTDPPDIDINAMVALDFEYPMTQENYENLWKLIAYYSEVPMKLHRELMLSKHPRVSYQYRQDADEEALYYTGVRAQILAEPEWIMQPSIDIQLNRPQSTAKKVLLSYYNQYSQTIATKDTRQARGRSWVMIEPSRAVQKDQTVLEGGRCQLSCNVKASESPSIFWVLPDGSILKVPVDDPDSKFSILSSGWLRIKSMEPSDSGLYQCIAQVRDEMDRMVYRVLVQSPSTQPAEKDTVTIGKNPGEPVMLPCNALAIPEAHLSWILPNRRIINDLANTSHVYMLPNGTLSIPKVQVSDSGYHRCVAVNQHGADHITVGITVTKKGSGSPSKRGRWPGPKALSR

SEQ ID NO: 28963 - protein, 98 aa, Homo sapiens
LRRGLTFCTAGLLRALLMLLVPGPPLRPWMTSEVLPPCKNPQLLGPLPALPKPFQIFSCSPHKELGVAVSAAVDSHVGCLSSTSSKTELKCYLPEEPS

SEQ ID NO: 28964 - protein, 11 aa, Homo sapiens
MTSIFLRKLCC

SEQ ID NO: 28965 - protein, 38 aa, Homo sapiens
LFWVLFFTALRNYHSQKVHSYCDLFICYLGLKEPAYIY

SEQ ID NO: 28966 - protein, 36 aa, Homo sapiens
VVTMAESAGASSFFPLVVLLLAGSGGSGPRGVQGCA

SEQ ID NO: 28967 - protein, 24 aa, Homo sapiens
MIILFVLVQKKLMMMHCWCFGMQG

SEQ ID NO: 28968 - protein, 93 aa, Homo sapiens
LRTGGQELEQTGLRPKAGAPPMPDLLGHRICTDIGKGWRMDGGRTCSCSSFCRCPERGARRSSPDAPGLALDFPLLLDLLWHLCSWTSQPLEL

SEQ ID NO: 28969 - protein, 104 aa, Homo sapiens
MRPVTVLAQTIRWPPHLPLFRQGLRPKAGAPPMPDLLGHRICTDIGKGWRMDGGRTCSCSSFCRCPERGARRSSPDAPGLALDFPLLLDLLWHLCSWTSQPLEL

SEQ ID NO: 28970 - protein, 24 aa, Homo sapiens
LGWESEGFLASFLLLLFSSLLLCR

SEQ ID NO: 28971 - protein, 39 aa, Homo sapiens
VLWGSAGSFMLFFLYLSSRCRWYLCRRCDGGSREVSLHL

SEQ ID NO: 28972 - protein, 162 aa, Homo sapiens
VKARVNRFGHIGHQITRAAFNSGKVDIVAISDPFTGLNYMVYVFQCGSTHGKFHGTVKAENGKLVINGNLITIFQERDPTKIKWDNVDAEYIWVSTGVFTTTEKAGAHLQQGAKRVIISTPSADAPMFMMGVNHKKYENSLKIISNCLLYHQLLSLPGQAHP

SEQ ID NO: 28973 - protein, 62 aa, Homo sapiens
LRKLWAFTGPGFLMSIAFLDPGNIESDLQAGAVAGFKRWGSHYVAQAALELLDSSNPPTLAF

SEQ ID NO: 28974 - protein, 28 aa, Homo sapiens
VPEIARIYKTDRDKYNRISREWTQKYAM

SEQ ID NO: 28975 - protein, 56 aa, Homo sapiens
VLALSVLLSRTLPPAPFVSPPRSPACRSVCEGGGGRRGGGGRRSGPQETRGGRRRL

SEQ ID NO: 28976 - protein, 216 aa, Homo sapiens
LPQKKKPRMPPALGPEETLASAGLLRKGEKEQQEAIECIDEVQNEIDRLNEEASEEILKVEQKYDKLCQPFFQKMSELIAKIPNFGVTTFVKHPQVSALLEEDEEALHYLSRVEMTEFEDIKSGYRIDFYFDENLYFENKLLSKEFHLNESGDPSSKSTEMKWKSGKDLMKCSSGKDLMKCSSQMQNKASRKRQHEEPESFFTWFTDHSDAGADEL

SEQ ID NO: 28977 - protein, 63 aa, Homo sapiens
LGYNTEHQVVSFDFNSDIHSSTFDVGAGIALNNHCVKLISWYENEFGYSNRVVDVMAHKSSKE

SEQ ID NO: 28978 - protein, 157 aa, Homo sapiens
LLLPLVPSSRNDCGSTVPDNPFVRTLPHTTMSGHQLPPAGTQRPGPAGPAWFLEVFPVFPASPGPGEPWAQQRPRGCPAPIPALLWSLPSFPRRCCWGAGMGGVFPFTDGADARTQPILRRTRVLMERVLRPRRGSQCPVSSSATILLGTGGASIGL

SEQ ID NO: 28979 - protein, 94 aa, Homo sapiens [sequence omitted]

SEQ ID NO: 28980 - protein, 132 aa, Homo sapiens
LRPPGAHALPGPAQASVSSTGPQPTPLAALPPRSSPGPSKWGWGHSCPPSERPTGHGEQRPGAEPEPWKGNWDPERKRLPHEAAGQMLVPLGTHCTRKPARAAEERKVQTGLKSKTASTRKGTWTQLQHGRP

SEQ ID NO: 28981 - protein, 163 aa, Homo sapiens
VQLQHVLPVLLLVLWAQRETARGQGSEVGQAAPSGSPRPPRPCSGLSFLYGTTAHAPGGPPTPVLPGTLQVGLGTLVPPQRETHRTRRAASRSRARALEGKLGDPERKRLPHEAAGQMLVPLGTHCTRKPARAAEERKVQTGLKSKTASTRKGTWTQLQHGRP

SEQ ID NO: 28982 - protein, 8 aa, Homo sapiens
IFSLVWGL

SEQ ID NO: 28983 - protein, 40 aa, Homo sapiens
MATHTFLQESCFVMKGRTQIHSMVNLLKSTLKKERLYQLR

SEQ ID NO: 28984 - protein, 25 aa, Homo sapiens
LQPQPAAPPPAKSAALTPGSKSPPW

SEQ ID NO: 28985 - protein, 146 aa, Homo sapiens
KVTKKLKMGGGERYNIPAPQSRNVSKNQQQLNRQKTKEQNSQMKIVHKKKERGHGYNSSAAAWQAMQNGGKNKNFPNNQSWNSSLSGPRLLFKSQANQNYAGAKFSEPPSPSVLPKPPSHWVPVSFNPSDKEIMTFQLKTLLKVQV

SEQ ID NO: 28986 - protein, 8 aa, Homo sapiens
KGLIVWLA

SEQ ID NO: 28987 - protein, 14 aa, Homo sapiens
KTRLIVLGCGWLWS

SEQ ID NO: 28988 - protein, 54 aa, Homo sapiens
LRLRKIKNFSGAKKLLRMYPKLRTKSGTFFLRVPELRLKCTQRHKEIQKSRMIK

SEQ ID NO: 28989 - protein, 12 aa, Homo sapiens
TRRSTLSIGFKG

SEQ ID NO: 28990 - protein, 10 aa, Homo sapiens
VTLPIIRLSR

SEQ ID NO: 28991 - protein, 21 aa, Homo sapiens
LWECTVLWALAALAPCWPVTW

SEQ ID NO: 28992 - protein, 45 aa, Homo sapiens
LIPAFLKISRSGLLLKKFPVRLTYVCKDGKKIQEHCSTKRIRGHQ

SEQ ID NO: 28993 - protein, 281 aa, Homo sapiens
VASAGPASAMMIHGFQSSHRDFCFGPWKLTASKTHIMKSADVEKLADELHMPSLPEMMFGDNVLRIQHGSGFGIEFNATDALRCVNNYQGMLKVACAEEWQESRTEGEHSKEVIKPYDWTYTTDYKGTLLGESLKLKVVPTTDHIDTEKLKAREQIKFFEEVLLFEDELHDHGVSSLSVKIRVMPSSFFLLLRFFLRIDGVLIRMNDTRLYHEADKTYMLREYTSRESKISSLMHVPPSLFTEPNEISQYLPIKEAVCEKLIFPERIDPNPADSQKSTQVE

SEQ ID NO: 28994 - protein, 17 aa, Homo sapiens
LCSSVYIYYFLSSLTVC

SEQ ID NO: 28995 - protein, 16 aa, Homo sapiens
IACVPLQFPWFIWLTC

SEQ ID NO: 28996 - protein, 9 aa, Homo sapiens
VTAIPGIPL

SEQ ID NO: 28997 - protein, 13 aa, Homo sapiens
RICCGWLWTFFVH

SEQ ID NO: 28998 - protein, 25 aa, Homo sapiens
MSASTPGRAPTTWSPRGDGLLDSCP

SEQ ID NO: 28999 - protein, 12 aa, Homo sapiens
LLFFFLFHMYQR

SEQ ID NO: 29000 - protein, 912 aa, Homo sapiens
RSADSGAAGAGRGGGGEAAGKEEEGESRSRRASMGRLASRPLLLALLSLALCRGRVVRVPTATLVRVVGTELVIPCNVSDYDGPSEQNFDWSFSSLGSSFVELASTWEVGFPAQLYQERLQRGEILLRRTANDAVELHIKNVQPSDQGHYKCSTPSTDATVQGNYEDTVQVKVLADSLHVGPSARPPPSLSLREGEPFELRCTAASASPLHTHLALLWEVHRGPARRSVLALTHEGRFHPGLGYEQRYHSGDVRLDTVGSDAYRLSVSRALSADQGSYRCIVSEWIAEQGNWQEIQEKAVEVATVVIQPSVLRAAVPKNVSVAEGKELDLTCNITTDRADDVRPEVTWSFSRMPDSTLPGSRVLARLDRDSLVHSSPHVALSHVDARSYHLLVRDVSKENSGYYYCHVSLWAPGHNRSWHKVAEAVSSPAGVGVTWLEPDYQVYLNASKVPGFADDPTELACRVVDTKSGEANVRFTVSWYYRMNRRSDNVVTSELLAVMDGDWTLKYGERSKQRAQDGDFIFSKEHTDTFNFRIQRTTEEDRGNYYCVVSAWTKQRNNSWVKSKDVFSKPVNIFWALEDSVLVVKARQPKPFFAAGNTFEMTCKVSSKNIKSPRYSVLIMAEKPVGDLSSPNETKYIISLDQDSVVKLENWTDASRVDGVVLEKVQEDEFRYRMYQTQVSDAGLYRCMVTAWSPVRGSLWREAATSLSNPIEIDFQTSGPIFNASVHSDTPSVIRGDLIKLFCIITVEGAALDPDDMAFDVSWFAVHSFGLDKAPVLLSSLDRKGIVTTSRRDWKSDLSLERVSVLEFLLQVHGSEDQDFGNYYCSVTPWVKSPTGSWQKEAEIHSKPVFITVKMDVLNAFKYPLLIGVGLSTVIGLLSCLIGYCSSHWCCKKEVQETRRERRRLMSMEMD

SEQ ID NO: 29001 - protein, 23 aa, Homo sapiens
ILLFWGTRGDSKSINFANREKRC

SEQ ID NO: 29002 - protein, 10 aa, Homo sapiens
ILAVLIFWIN

SEQ ID NO: 29003 - protein, 15 aa, Homo sapiens
KHCHGDASNTIKRAQ

SEQ ID NO: 29004 - protein, 26 aa, Homo sapiens
VGTPGILRDFCVFPKLTFNYRQRGIS

SEQ ID NO: 29005 - protein, 10 aa, Homo sapiens
ISVICMGLWI

SEQ ID NO: 29006 - protein, 501 aa, Homo sapiens
RSTMPLVTRNIEPRHLCRQTLPSVRSELECVTNITLANVIRQLGSLSKYAEDIFGELFTQANTFASRVSSLAERVDRLQVKVTQLDPKEEEVSLQGINTRKAFRSSTIQDQKLFDRNSLPVPVLETYNTCDTPPPLNNLTPYRDDGKEALKFYTDPSYFFDLWKEKMLQDTKDIMKEKRKHRKEKKDNPNRGNVNPRKIKTRKEEWEKMKMGQEFVESKEKLGTSGYPPTLVYQNGSIGCVENVDASSYPPPPQSDSASSPSPSFSEDNLPPPPAEFSYPVDNQRGSGLAGPKRSSVVSPSHPPPAPPLGSPPGPKPGFAPPPAPPPPPPPMIGIPPPPPPVGFGSPGTPPPPSPPSFPPHPDFAAPPPPPPPPAADYPTLPPPPLSQPTGGAPPPPPPPPPPGPPPPPFTGADGQPAIPPPLSDTTKPKSSLPAVSDARSDLLSAIRQGFQLRRVEEQREQEKRDVVGNDVATILSRRIAVEYSDSEDDSSEFDEDDWSD

SEQ ID NO: 29007 - protein, 21 aa, Homo sapiens
LCRIHCLSLVFYSPWLLLISR

SEQ ID NO: 29008 - protein, 61 aa, Homo sapiens
MNSQMPLRVSFFCGLCRMAMVMSAMYECGQILQDLTSKKTGGGAGGGGEDVWPMHAECKAA

SEQ ID NO: 29009 - protein, 234 aa, Homo sapiens
IAPAGMGDKIWLPFPVLLLAALPPVLLPGAAGFTPSLDSDFTFTLPAGQKECFYQPMPLKASLEIEYQVLDGAGLDIDFHLASPEGKTLVFEQRKSDGVHTVETEVGDYMFCFDNTFSTISEKVIFFELILDNMGEQAQEQEDWKKYITGTDILDMKLEDILESINSIKSRLSKSGHIQTLLRAFEARDRNIQESNFDRVNFWSMVNLVVMVVVSAIQVYMLKSLFEDKRKSRT

SEQ ID NO: 29010 - protein, 52 aa, Homo sapiens
VGAWCSPWRVLTLWLSGLLSFSAFSGRRPAASGRGDRTVCQRRDGAWTPGIL

SEQ ID NO: 29011 - protein, 615 aa, Homo sapiens
TGGAAASGPRTLNMSRLKRIAGQDLRAGFKAGGRDCGTSVPQGLLKAARKSGQLNLSGRNLSEVPQCVWRINVDIPEEANQNLSFGATERWWEQTDLTKLIISNNKLQSLTDDLRLLPALTVLDIHDNQLTSLPSAIRELENLQKLNVSHNKLKILPEEITNLRNLKCLYLQHNELTCISEGFEQLSNLEDLDLSNNHLTTVPASFSSLSSLVRLNLSSNELKSLPAEINRMKRLKHLDCNSNLLETIPPELAGMESLELLYLRRNKLRFLPEFPSCSLLKELHVGENQIEMLEAEHLKHLNSILVLDLRDNKLKSVPDEIILLRSLERLDLSNNDISSLPYSLGNLHLKFLALEGNPLRTIRREIISKGTQEVLKYLRSKIKDDGPSQSESATETAMTLPSESRVNIHAIITLKILDYSDKQATLIPDEVFDAVKSNIVTSINFSKNQLCEIPKRMVELKEMVSDVDLSFNKLSFISLELCVLQKLTFLDLRNNFLNSLPEEMESLVRLQTINLSFNRFKMLPEVLYRIFTLETILISNNQVGSVDPQKMKMMENLTTLDLQNNDLLQIPPELGNCVNLRTLLLDGNPFRVPRAAILMKGTAAILEYLRDRIPT

SEQ ID NO: 29012 - protein, 331 aa, Homo sapiens
ITMATGQKLMRAVRVFEFGGPEVLKLRSDIAVPIPKDHQVLIKVHACGVNPVETYIRSGTYSRKPLLPYTPGSDVAGVIEAVGDNASAFKKGDRVFTSSTISGGYAEYALAADHTVYKLPEKLDFKQGAAIGIPYFTAYRALIHSACVKAGESVLVHGASGGVGLAACQIARAYGLKILGTAGTEEGQKIVLQNGAHEVFNHREVNYIDKIKKYVGEKGIDIIIEMLANVNLSKDLSLLSHGGRVIVVGSRGTIEINPRDTMAKESSIIGVTLFSSTKEEFQQYAAALQAGMEIGWLKPVIGSQYPLEKVAEAHENIIHGSGATGKMILLL

SEQ ID NO: 29013 - protein, 12 aa, Homo sapiens
LLIYKRCRYEQV

SEQ ID NO: 29014 - protein, 14 aa, Homo sapiens
IAVTSALPGRTQAG

SEQ ID NO: 29015 - protein, 12 aa, Homo sapiens
MTSLLAALWMRL

SEQ ID NO: 29016 - protein, 42 aa, Homo sapiens [sequence omitted]

SEQ ID NO: 29017 - protein, 37 aa, Homo sapiens
LVSPSVSSVVSSLLSIFWLMHLGQVWLGSMETHPITS

SEQ ID NO: 29018 - protein, 95 aa, Homo sapiens
IEVRKLLGGGTREAESRACSDGRSRKSKKKRQQHQEEEDILDVRDEKDGGAREAESRAHTGSSSRGKRKRQQHPKKERAGVSTVQKAKKKQKKRD

SEQ ID NO: 29019 - protein, 15 aa, Homo sapiens
ILHGARWLRRGRERR

SEQ ID NO: 29020 - protein, 22 aa, Homo sapiens
ILHGARWLRRGRERRQLRPSLP

SEQ ID NO: 29021 - protein, 12 aa, Homo sapiens
INLLILRIILKL

SEQ ID NO: 29022 - protein, 16 aa, Homo sapiens
IFLPDKRPFVFCDGIC

SEQ ID NO: 29023 - protein, 7 aa, Homo sapiens
ILGLTLL

SEQ ID NO: 29024 - protein, 14 aa, Homo sapiens
LIMAWIVGHVFTLL

SEQ ID NO: 29025 - protein, 10 aa, Homo sapiens
MPFLNIALLM

SEQ ID NO: 29026 - protein, 49 aa, Homo sapiens
MDTSHKLHCEPGHSAPMPPACGSLKGPPPNRTAKFSGLPRDIIENYLYE

SEQ ID NO: 29027 - protein, 27 aa, Homo sapiens
ILLLLTLWVHTAFMSCNTHREGLQLHS

SEQ ID NO: 29028 - protein, 16 aa, Homo sapiens
IWILGFLQMGLYRTED

SEQ ID NO: 29029 - protein, 11 aa, Homo sapiens
RNPSRTILGNC

SEQ ID NO: 29030 - protein, 18 aa, Homo sapiens
LMATPMVFLMICSTHSLL

SEQ ID NO: 29031 - protein, 38 aa, Homo sapiens
IGGERIHRLLKQERKRDLPCSVTPLEKKKKSRSILLSP

SEQ ID NO: 29032 - protein, 14 aa, Homo sapiens
LGFMLQSLLISLSM

SEQ ID NO: 29033 - protein, 10 aa, Homo sapiens
KIILKMLLCA

SEQ ID NO: 29034 - protein, 817 aa, Homo sapiens
MLNSNVLLWLTALAIKFTLIDSQAQYPVVNTNYGKIRGLRTPLPNEILGPVEQYLGVPYASPPTGERRFQPPEPPSSWTGIRNTTQFAAVCPQHLDERSLLHDMLPIWFTANLDTLMTYVQDQNEDCLYLNIYVPTEDGANTKKNADDITSNDRGEDEDIHDQNSKKPVMVYIHGGSYMEGTGNMIDGSILASYGNVIVITINYRLGILGFLSTGDQAAKGNYGLLDQIQALRWIEENVGAFGGDPKRVTIFGSGAGASCVSLLTLSHYSEGLFQKAIIQSGTALSSWAVNYQPAKYTRILADKVGCNMLDTTDMVECLRNKNYKELIQQTITPATYHIAFGPVIDGDVIPDDPQILMEQGEFLNYDIMLGVNQGEGLKFVDGIVDNEDGVTPNDFDFSVSNFVDNLYGYPEGKDTLRETIKFMYTDWADKENPETRRKTLVALFTDHQWVAPAVATADLHAQYGSPTYFYAFYHHCQSEMKPSWADSAHGDEVPYVFGIPMIGPTELFSCNFSKNDVMLSAVVMTYWTNFAKTGDPNQPVPQDTKFIHTKPNRFEEVAWSKYNPKDQLYLHIGLKPRVRDHYRATKVAFWLELVPHLHNLNEIFQYVSTTTKVPPPDMTSFPYGTRRSPAKIWPTTKRPAITPANNPKHSKDPHKTGPEDTTVLIETKRDYSTELSVTIAVGASLLFLNILAFAALYYKKDKRRHETHRRPSPQRNTTNDIAHIQNEEIMSLQMKQLEHDHECESLQAHDTLRLTCPPDYTLTLRRSPDDIPLMTPNTITMIPNTLTGMQPLHTFNTFSGGQNSTNLPHGHSTTRV

SEQ ID NO: 29035 - protein, 25 aa, Homo sapiens
MYILTKLLLSVITVVRCSGDWYVKD

SEQ ID NO: 29036 - protein, 55 aa, Homo sapiens
LISRTSTLLPALRVLLGQGLPCHATCQCLAVEPLGAAAVPAVQFVLGVSVPFHGP

SEQ ID NO: 29037 - protein, 14 aa, Homo sapiens
RKGINCEICVRIDS

SEQ ID NO: 29038 - protein, 17 aa, Homo sapiens
RLLHFLIFLMTKMNGNL

SEQ ID NO: 29039 - protein, 553 aa, Homo sapiens
IRPSRANPDTAEFAMPENVAPRSGATAGAAGGRGKGAYQDRDKPAQIRFSNISAAKAVADAIRTSLGPKGMDKMIQDGKGDVTITNDGATILKQMQVLHPAARMLVELSKAQDIEAGDGTTSVVIIAGSLLDSCTKLLQKGIHPTIISESFQKALEKGIEILTDMSRPVELSDRETLLNSATTSLNSKVVSQYSSLLSPMSVNAVMKVIDPATATSVDLRDIKIVKKLGGTIDDCELVEGLVLTQKVSNSGITRVEKAKIGLIQFCLSAPKTDMDNQIVVSDYAQMDRVLREERAYILNLVKQIKKTGCNVLLIQKSILRDALSDLALHFLNKMKIMVIKDIEREDIEFICKTIGTKPVAHIDQFTADMLGSAELAEEVNLNGSGKLLKITGCASPGKTVTIVVRGSNKLVIEEAERSIHDALCVIRCLVKKRALIAGGGAPEIELALRLTEYSRTLSGMESYCVRAFADAMEVIPSTLAENAGLNPISTVTELRNRHAQGEKTAGINVRKGGISNILEELVVQPLLVSVSALTLATETVRSILKIDDVVNTR

SEQ ID NO: 29040 - protein, 54 aa, Homo sapiens
LAASVLTLVTLGRSLTLRALWHPRLKGAVILQPCWSVRVRVRGICAPSTVHGTW

SEQ ID NO: 29041 - protein, 12 aa, Homo sapiens
IIPKELTKRHLI

SEQ ID NO: 29042 - protein, 8 aa, Homo sapiens
IQCFGKVK

SEQ ID NO: 29043 - protein, 23 aa, Homo sapiens
RKVNNDNCGTYGCCKRCGLGEKR

SEQ ID NO: 29044 - protein, 26 aa, Homo sapiens
LRSGAVAHASSHLQGRADPEAGPGEV

SEQ ID NO: 29045 - protein, 36 aa, Homo sapiens
LLVWKRQMLFFWLVQTHVLRHHCLMLEFERAGCIMT

SEQ ID NO: 29046 - protein, 29 aa, Homo sapiens
VAPQLFASISSRQAINYIQLSLQDWEELG

SEQ ID NO: 29047 - protein, 46 aa, Homo sapiens
MQTFLTILKIFLMMMTSSEMPSGCRRGQALGTEPQCEPAQDSFRWF

SEQ ID NO: 29048 - protein, 163 aa, Homo sapiens
VVCIMSGARSKLALFLCGCYVVALGAHTGEESVADHHEAEYYVAAVYEHPSILSLNPLALISRQEALELMNQNLDIYEQQVMTAAQKDVQIIVFPEDGIHGFNFTRTSIYPFLDFMPSPQVVRWNPCLEPHRFNDTEVIPAFFLSRLRVHRGDLSQGPEAVTC

SEQ ID NO: 29049 - protein, 22 aa, Homo sapiens
ISLSPCLEESWSLCLALLFLCC

SEQ ID NO: 29050 - protein, 10 aa, Homo sapiens
LPAVGISRSF

SEQ ID NO: 29051 - protein, 20 aa, Homo sapiens
ILTSRWNSTSIKGKVMASIS

SEQ ID NO: 29052 - protein, 45 aa, Homo sapiens
VSILPWTPTSRSGSCVPILGWRSTRKTRSISCAHWHGRETSMCLR

SEQ ID NO: 29053 - protein, 14 aa, Homo sapiens
IVILTVKVLFAWTY

SEQ ID NO: 29054 - protein, 20 aa, Homo sapiens
LLHLGIMIPLMLSWSLNLKV

SEQ ID NO: 29055 - protein, 434 aa, Homo sapiens
TYPSRAQPSNVGRRRRRRPGLGALAAGVPAMAESVERLQQRVQELERELAQERSLQVPRSGDGGGGRVRIEKMSSEVVDSNPYSRLMALKRMGIVSDYEKIRTFAVAIVGVGGVGSVTAEMLTRCGIGKLLLFDYDKVELANMNRLFFQPHQAGLSKVQAAEHTLRNINPDVLFEVHNYNITTVENFQHFMDRISNGGLEEGKPVDLVLSCVDNFEARMTINTACNELGQTWMESGVSENAVSGHIQLIIPGESACFACAPPLVVAANIDEKTLKREGVCAASLPTTMGVVAGILVQNVLKFLLNFGTVSFYLGYNAMQDFFPTMSMKPNPQCDDRNCRKQQEEYKKKVAALPKQEVIQEEEEIIHEDNEWGIELVSEVSEEELKNFSGPVPDLPEGITVAYTIPKKQEDSVTELTVEDSGESLEDLMAKMKNM

SEQ ID NO: 29056 - protein, 15 aa, Homo sapiens
MVFLIFLFQSLKQLI

SEQ ID NO: 29057 - protein, 11 aa, Homo sapiens
VLLIWTLKWAL

SEQ ID NO: 29058 - protein, 30 aa, Homo sapiens
VERTLRLSSNASPCDSVLCSLVCSVGRELG

SEQ ID NO: 29059 - protein, 26 aa, Homo sapiens
KLPDTLSCVLLRWCLLLYVPCRIQMM

SEQ ID NO: 29060 - protein, 33 aa, Homo sapiens
LCQTLNWALDGHHLLILRTSQGAPQDPHILGHE

SEQ ID NO: 29061 - protein, 44 aa, Homo sapiens
MPPRGCLKLTIAGTPSSRMASHFATSQEAFTTPVCPASTGRTGC

SEQ ID NO: 29062 - protein, 26 aa, Homo sapiens
LLLFLPFLFLSGRASSTFPNGGLDPT

SEQ ID NO: 29063 - protein, 27 aa, Homo sapiens
LGSPWLLVISFSLMVGSQPTSWILEVV

SEQ ID NO: 29064 - protein, 40 aa, Homo sapiens
LCVAVMARPTSTTVNCIEMPASLDPKSRLITMDTAKRRNP

SEQ ID NO: 29065 - protein, 12 aa, Homo sapiens
VHPLILLLGYGM

SEQ ID NO: 29066 - protein, 12 aa, Homo sapiens
RLCIWISCYLAI

SEQ ID NO: 29067 - protein, 11 aa, Homo sapiens
MAEAEITPMSS

SEQ ID NO: 29068 - protein, 384 aa, Homo sapiens
VAALDPASGRPGGRGGARVCQAGAMKALILVGGYGTRLRPLTLSTPKPLVDFCNKPILLHQVEALAAAGVDHVILAVSYMSQVLEKEMKAQEQRLGIRISMSHEEEPLGTAGPLALARDLLSETADPFFVLNSDVICDFPFQAMVQFHRHHGQEGSILVTKVEEPSKYGVVVCEADTGRIHRFVEKPQVFVSNKINAGMYILSPAVLQRIQLQPTSIEKEVFPIMAKEGQLYAMELQGFWMDIGQPKDFLTGMCLFLQSLRQKQPERLCSGPGIVGNVLVDPSARIGQNCSIGPNVSLGPGVVVEDGVCIRRCTVLRDARIRSHSWLESCIVGWRCRVGQWVRMENVTVLGEDVIVNDELYLNGASVLPHKSIGESVPEPRIIM

SEQ ID NO: 29069 - protein, 9 aa, Homo sapiens
IYDWLLGLL

SEQ ID NO: 29070 - protein, 355 aa, Homo sapiens [sequence omitted]

SEQ ID NO: 29071 - protein, 8 aa, Homo sapiens
RNIRALYC

SEQ ID NO: 29072 - protein, 16 aa, Homo sapiens
ICFALCCSLLFPVFLV

SEQ ID NO: 29073 - protein, 407 aa, Homo sapiens
KMAAAVRQDLAQLMNSSGSHKDLAGKYRQILEKAIQLSGAEQLEALKAFVEAMVNENVSLVISRQLLTDFCTHLPNLPDSTAKEIYHFTLEKIQPRVISFEEQVASIRQHLASIYEKEEDWRNAAQVLVGIPLETGQKQYNVDYKLETYLKIARLYLEDDDPVQAEAYINRASLLQNESTNEQLQIHYKVCYARVLDYRRKFIEAAQRYNELSYKTIVHESERLEALKHALHCTILASAGQQRSRMLATLFKDERCQQLAAYGILEKMYLDRIIRGNQLQEFAAMLMPHQKATTADGSSILDRAVIEHNLLSASKLYNNITFEELGALLEIPAAKAEKIASQMITEGRMNGFIDQIDGIVHFETREALPTWDKQIQSLCFQVNNLLEKISQTAPEWTAQAMEAQMAQ

SEQ ID NO: 29074 - protein, 8 aa, Homo sapiens
LWLLFAVV

SEQ ID NO: 29075 - protein, 13 aa, Homo sapiens
MKIRCLISMLLFT

SEQ ID NO: 29076 - protein, 34 aa, Homo sapiens
MLRLLKILLVLHTFGRRVEKLLEIVNQRNKDREI

SEQ ID NO: 29077 - protein, 19 aa, Homo sapiens
ITSNLSILLVLIKQWMSQK

SEQ ID NO: 29078 - protein, 25 aa, Homo sapiens
IRKNRVEDRVTANCTMAVEWVLKNV

SEQ ID NO: 29079 - protein, 21 aa, Homo sapiens
MDWRKQLPNARDWVPRFIPLW

SEQ ID NO: 29080 - protein, 13 aa, Homo sapiens
VWGPVTIWSFVLC

SEQ ID NO: 29081 - protein, 485 aa, Homo sapiens
RAQPGPRMASTTTCTRFTDEYQLFEELGKGAFSVVRRCMKIPTGQEYAAKIINTKKLSARDHQKLEREARICRLLKHPNIVRLHDSISEEGFHYLVFDLVTGGELFEDIVAREYYSEADASHCIQQILESVNHCHLNGIVHRDLKPENLLLASKSKGAAVKLADFGLAIEVQGDQQAWFGFAGTPGYLSPEVLRKDPYGKPVDMWACGVILYILLVGYPPFWDEDQHRLYQQIKAGAYDFPSPEWDTVTPEAKDLINKMLTINPAKRITASEALKHPWICQRSTVASMMHRQETVDCLKKFNARRKLKGAILTTMLATRNFSAAKSLLKKPDGVKESTESSNTTIEDEDVKARKQEIIKVTEQLIEAINNGDFEAYTKICDPGLTAFEPEALGNLVEGMDFHRFYFENALSKSNKPIHTIILNPHVHLVGDDAACIAYIRLTQYMDGSGMPKTMQSEETRVWHRRDGKWQNVHFHRSGSPTVPIN

SEQ ID NO: 29082 - protein, 22 aa, Homo sapiens
IGIHDGRVSSRSTARKNGYCKL

SEQ ID NO: 29083 - protein, 10 aa, Homo sapiens
MRGARMSGFL

SEQ ID NO: 29084 - protein, 12 aa, Homo sapiens
RTKTRQRRYGTE

SEQ ID NO: 29085 - protein, 16 aa, Homo sapiens
VVSSVSLHKLLPSPTS

SEQ ID NO: 29086 - protein, 8 aa, Homo sapiens
IFGWYLCL

SEQ ID NO: 29087 - protein, 31 aa, Homo sapiens
MKHVMVPMLLLFALSGTCLRNWIMNAFIKKC

SEQ ID NO: 29088 - protein, 380 aa, Homo sapiens
ITLLLVSVRGSGGCSLGGSGGDTSTMSEEQFGGDGAAAAATAAVGGSAGEQEGAMVAATQGAAAAAGSGAGTGGGTASGGTEGGSAESEGAKIDASKNEEDEGHSNSSPRHSEAATAQREEWKMFIGGLSWDTTKKDLKDYFSKFGEVVDCTLKLDPITGRSRGFGFVLFKESESVDKVMDQKEHKLNGKVIDPKRAKAMKTKEPVKKIFVGGLSPDTPEEKIREYFGGFGEVESIELPMDNKTNKRRGFCFITFKEEEPVKKIMEKKYHNVGLSKCEIKVAMSKEQYQQQQQWGSRGGFAGRARGRGGGPSQNWNQGYSNYWNQGYGNYGYNSQGYGGYGGYDYTGYNNYYGYGDYSNQQSGYGKVSRRGGHQNSYKPY

SEQ ID NO: 29089 - protein, 13 aa, Homo sapiens
IPAILWSILPWIS

SEQ ID NO: 29090 - protein, 33 aa, Homo sapiens
MALILLLGVLMEVTLEGKKKMDGVHMEEMVQKT

SEQ ID NO: 29091 - protein, 80 aa, Homo sapiens
ISSVLILCAFRRASSSGMLGQSIRRFTTSVVRRSHYEEGPGKNLPFSVENKWSLLAKMCLYFGSAFATPFLVVRHQLLKT

SEQ ID NO: 29092 - protein, 13 aa, Homo sapiens
MLSLTLVNWILCM

SEQ ID NO: 29093 - protein, 19 aa, Homo sapiens
LCFLIPKRRFGFLWVIPRH

SEQ ID NO: 29094 - protein, 22 aa, Homo sapiens
KQTAARRSPYPPKFLPSGGGWG

SEQ ID NO: 29095 - protein, 14 aa, Homo sapiens
MPWLLISLMFFTGT

SEQ ID NO: 29096 - protein, 19 aa, Homo sapiens
IKSYSNRKEKEEGMEENGY

SEQ ID NO: 29097 - protein, 1326 aa, Homo sapiens
VGSRSLVRLETFANMSRIEKMSILGVRSFGIEDKDKQIITFFSPLTILVGPNGAGKTTIIECLKYICTGDFPPGTKGNTFVHDPKVAQETDVRAQIRLQFRDVNGELIAVQRSMVCTQKSKKTEFKTLEGVITRTKHGEKVSLSSKCAEIDREMISSLGVSKAVLNNVIFCHQEDSNWPLSEGKALKQKFDEIFSATRYIKALETLRQVRQTQGQKVKEYQMELKYLKQYKEKACEIRDQITSKEAQLTSSKEIVKSYENELDPLKNRLKEIEHNLSKIMKLDNEIKALDSRKKQMEKDNSELEEKMEKVFQGTDEQLNDLYHNHQRTVREKERKLVDCHRELEKLNKESRLLNQEKSELLVEQGRLQLQADRHQEHIRARDSLIQSLATQLELDGFERGPFSERQIKNFHKLVRERQEGEAKTANQLMNDFAEKETLKQKQIDEIRDKKTGLGRIIELKSEILSKKQNELKNVKYELQQLEGSSDRILELDQELIKAERELSKAEKNSNVETLKMEVISLQNEKADLDRTLRKLDQEMEQLNHHTTTRTQMEMLTKDKADKDEQIRKIKSRHSDELTSLLGYFPNKKQLEDWLHSKSKEINQTRDRLAKLNKELASSEQNKNHINNELKRKEEQLSSYEDKLFDVCGSQDFESDLDRLKEEIEKSSKQRAMLAGATAVYSQFITQLTDENQSCCPVCQRVFQTEAELQEVISDLQSKLRLAPDKLKSTESELKKKEKRRDEMLGLVPMRQSIIDLKEKEIPELRNKLQNVNRDIQRLKNDIEEQETLLGTIMPEEESAKVCLTDVTIMERFQMELKDVERKIAQQAAKLQGIDLDRTVQQVNQEKQEKQHKLDTVSSKIELNRKLIQDQQEQIQHLKSTTNELKSEKLQISTNLQRRQQLEEQTVELSTEVQSLYREIKDAKEQVSPLETTLEKFQQEKEELINKKNTSNKIAQDKLNDIKEKVKNIHGYMKDIENYIQDGKDDYKKQKETELNKVIAQLSECEKHKEKINEDMRLMRQDIDTQKIQERWLQDNLTLRKRNEELKEVEEERKQHLKEMGQMQVLQMKSEHQKLEENIDNIKRNHNLALGRQKGYEEEIIHFKKELREPQFRDAEEKYREMMIVMRTTELVNKDLDIYYKTLDQAIMKFHSMKMEEINKIIRDLWRSTYRGQDIEYIEIRSDADENVSASDKRRNYNYRVVMLKGDTALDMRGRCSAGQKVLASLIIRLALAETFCLNCGIIALDEPTTNLDRENIESLAHALVEIIKSRSQQRNFQLLVITHDEDFVELLGRSEYVEKFYRIKKNIDQCSEIVKCSVSSLGFNVH

SEQ ID NO: 29098 - protein, 28 aa, Homo sapiens
TARLKSLQWLTKLILVRVTLATDLSMEG

SEQ ID NO: 29099 - protein, 320 aa, Homo sapiens [sequence omitted]

SEQ ID NO: 29100 - protein, 11 aa, Homo sapiens
ITSILKLLCLL

SEQ ID NO: 29101 - protein, 495 aa, Homo sapiens
TALITRCLAWSVLISRLAMATYTCITCRVAFRDADMQRAHYKTDWHRYNLRRKVASMAPVTAEGFQERVRAQRAVAEEESKGSATYCTVCSKKFASFNAYENHLKSRRHVELEKKAVQAVNRKVEMMNEKNLEKGLGVDSVDKDAMNAAIQQAIKAQPSMSPKKAPPAPAKEARNVVAVGTGGRGTHDRDPSEKPPRLQWFEQQAKKLAKQQEEDSEEEEEDLDGDDWEDIDSDEELECEDTEAMDDVVEQDAEEEEAEEGPPLGAIPITDCLFCSHHSSSLMKNVAHMTKDHSFFIPDIEYLSDIKGLIKYLGEKVGVGKICLWCNEKGKSFYSTEAVQAHMNDKSHCKLFTDGDAALEFADFYDFRSSYPDHKEGEDPNKAEELPSEKNLEYDDETMELILPSGARVGHRSLMRYYKQRFGLSRAVAVAKNRKAVGRVLQQYRALGWTGSTGAALMRERDMQYVQRMKSKWMLKTGMKNNATKQMHFRVQVRF

SEQ ID NO: 29102 - protein, 38 aa, Homo sapiens
MPTLQLCDGNVSSKARYTRGWKNHTRQRTCVKIRTEIH

SEQ ID NO: 29103 - protein, 108 aa, Homo sapiens
IGMAQEFVNCKIQPGKVVVFIKPTCPYCRRAQEILSQLPIKQGLLEFVDITATNHTNEIQDYLQQLTGARTVPRVFIGKDCIGGCSDLVSLQQSGELLTRLKQIGALQ

SEQ ID NO: 29104 - protein, 12 aa, Homo sapiens
LYIIWITWLYVN

SEQ ID NO: 29105 - protein, 9 aa, Homo sapiens
RLPHCTHSN

SEQ ID NO: 29106 - protein, 9 aa, Homo sapiens
IFWYVLFRL

SEQ ID NO: 29107 - protein, 26 aa, Homo sapiens
RRTSWMVEICLVLLIFEDLGSTSFSG

SEQ ID NO: 29108 - protein, 327 aa, Homo sapiens
TITAATAKPRSSQGGGKARALEMENSQLCKLFIGGLNVQTSESGLRGHFEAFGTLTDCVVVVNPQTKRSRCFGFVTYSNVEEADAAMAASPHAVDGNTVELKRAVSREDSARPGAHAKVKKLFVGGLKGDVAEGDLIEHFSQFGTVEKAEIIADKQSGKKRGFGFVYFQNHDAADKAAVVKFHPIQGHRVEVKKAVPKEDIYSGGGGGGSRSSRGGRGGRGRGGGRDQNGLSKGGGGGYNSYGGYGGGGGGGYNAYGGGGGGSSYGGSDYGNGFGGFGSYSQHQSSYGPMKSGGGGGGGGSSWGGRSNSGPYRGGYGGGGGYGGSSF

SEQ ID NO: 29109 - protein, 23 aa, Homo sapiens
IFHITFIIMWLCGRNKVTNGLQL

SEQ ID NO: 29110 - protein, 9 aa, Homo sapiens
KKKFVSKTT

SEQ ID NO: 29111 - protein, 30 aa, Homo sapiens
VGLARLSPGVEKRRPRRRGNKEGGGSWLPL

SEQ ID NO: 29112 - protein, 12 aa, Homo sapiens
IASVWRLLLSVI

SEQ ID NO: 29113 - protein, 47 aa, Homo sapiens
TRAQRVCKVAGERLVSQGPTSGRWFGIKRTSLGNNVGGNLREWESGP

SEQ ID NO: 29114 - protein, 9 aa, Homo sapiens
IPGLWKCRT

SEQ ID NO: 29115 - protein, 21 aa, Homo sapiens
MQRAVRYNSTLKMSAVIVEEI

SEQ ID NO: 29116 - protein, 16 aa, Homo sapiens
LIRSQRFRVAILGLNL

SEQ ID NO: 29117 - protein, 16 aa, Homo sapiens
LDLARHQHGLQDLPRI

SEQ ID NO: 29118 - protein, 50 aa, Homo sapiens
LEGSRSLVVRMPARDGWLPCRTAASLPPWHGIWGSCFYLLGSTASWQLKE

SEQ ID NO: 29119 - protein, 26 aa, Homo sapiens
IPVGGLGHRRQVSGAGNVSGYDRHRG

SEQ ID NO: 29120 - protein, 30 aa, Homo sapiens
IPVGGLGHRRQVSGAGNVSGNLFTPSLWSP

SEQ ID NO: 29121 - protein, 15 aa, Homo sapiens
KMCMLIPKILCLPCR

SEQ ID NO: 29122 - protein, 11 aa, Homo sapiens
RCQASPKSAAG

SEQ ID NO: 29123 - protein, 19 aa, Homo sapiens
MESCRRGRPATLATLSPLR

SEQ ID NO: 29124 - protein, 17 aa, Homo sapiens
IFIMVMVLKKLFIQQIV

SEQ ID NO: 29125 - protein, 10 aa, Homo sapiens
IILFSFFIPI

SEQ ID NO: 29126 - protein, 43 aa, Homo sapiens
VAIFVGGVQLWRLLVSNSQDAAESAGSSSDWAEDDKHCFPQAF

SEQ ID NO: 29127 - protein, 8 aa, Homo sapiens
ILILYLSL

SEQ ID NO: 29128 - protein, 19 aa, Homo sapiens
MFFIMILMQGIQMIMDRII

SEQ ID NO: 29129 - protein, 21 aa, Homo sapiens
LGHAPISKNSKDYTLFCHLPR

SEQ ID NO: 29130 - protein, 20 aa, Homo sapiens
LASKMVCSFWKLYILLDLSR

SEQ ID NO: 29131 - protein, 541 aa, Homo sapiens
IVSFSSAGAAMAAVKTLNPKAEVARAQAALAVNISAARGLQDVLRTNLGPKGTMKMLVSGAGDIKLTKDGNVLLHEMQIQHPTASLIAKVATAQDDITGDGTTSNVLIIGELLKQADLYISEGLHPRIITEGFEAAKEKALQFLEEVKVSREMDRETLIDVARTSLRTKVHAELADVLTEAVVDSILAIKKQDEPIDLFMIEIMEMKHKSETDTSLIRGLVLDHGARHPDMKKRVEDAYILTCNVSLEYEKTEVNSGFFYKSAEEREKLVKAERKFIEDRVKKIIELKRKVCGDSDKGFVVINQKGIDPFSLDALSKEGIVALRRAKRRNMERLTLACGGVALNSFDDLSPDCLGHAGLVYEYTLGEEKFTFIEKCNNPRSVTLLIKGPNKHTLTQIKDAVRDGLRAVKNAIDDGCVVPGAGAVEVAMAEALIKHKPSVKGRAQLGVQAFADALLIIPKVLAQNSGFDLQETLVKIQAEHSESGQLVGVDLNTGEPMVAAEVGVWDNYCVKKQLLHSCTVIATNILLVDEIMRAGMSSLKG

SEQ ID NO: 29132 - protein, 494 aa, Homo sapiens
RPEARGFKTAVWSPPFQAMSGPTWLPPKQPEPARAPQGRAIPRGTPGPPPAHGAALQPHPRVNFCPLPSEQCYQAPGGPEDRGPAWVGSHGVLQHTQGLPADRGGLRPGSLDAEIDLLSSTLAELNGGRGHASRRPDRQAYEPPPPPAYRTGSLKPNPASPLPASPYGGPTPASYTTASTPAGPAFPVQVKVAQPVRGCGPPRRGASQASGPLPGPHFPLPGRGEVWGPGYRSQREPGPGAKEEAAGVSGPAGRGRGGEHGPQVPLSQPPEDELDRLTKKLVHDMNHPPSGEYFGQCGGCGEDVVGDGAGVVALDRVFHVGCFVCSTCRAQLRGQHFYAVERRAYCEGCYVATLEKCATCSQPILDRILRAMGKAYHPGCFTCVVCHRGLDGIPFTVDATSQIHCIEDFHRKFAPRCSVCGGAIMPEPGQEETVRIVALDRSFHIGCYKCEECGLLLSSEGECQGCYPLDGHILCKACSAWRIQELSATVTTDC

SEQ ID NO: 29133 - protein, 13 aa, Homo sapiens
ISYVHALIHLVLL

SEQ ID NO: 29134 - protein, 31 aa, Homo sapiens
MVNPTVFFDIAVDGEPLGRVSFEVRGLDTKK

SEQ ID NO: 29135 - protein, 1391 aa, Homo sapiens
IMKAPAVLAPGILVLLFTLVQRSNGECKEALAKSEMNVNMKYQLPNFTAETPIQNVILHEHHIFLGATNYIYVLNEEDLQKVAEYKTGPVLEHPDCFPCQDCSSKANLSGGVWKDNINMALVVDTYYDDQLISCGSVNRGTCQRHVFPHNHTADIQSEVHCIFSPQIEEPSQCPDCVVSALGAKVLSSVKDRFINFFVGNTINSSYFPDHPLHSISVRRLKETKDGFMFLTDQSYIDVLPEFRDSYPIKYVHAFESNNFIYFLTVQRETLDAQTFHTRIIRFCSINSGLHSYMEMPLECILTEKRKKRSTKKEVFNILQAAYVSKPGAQLARQIGASLNDDILFGVFAQSKPDSAEPMDRSAMCAFPIKYVNDFFNKIVNKNNVRCLQHFYGPNHEHCFNRTLLRNSSGCEARRDEYRTEFTTALQRVDLFMGQFSEVLLTSISTFIKGDLTIANLGTSEGRFMQVVVSRSGPSTPHVNFLLDSHPVSPEVIVEHTLNQNGYTLVITGKKITKIPLNGLGCRHFQSCSQCLSAPPFVQCGWCHDKCVRSEECLSGTWTQQICLPAIYKVFPNSAPLEGGTRLTICGWDFGFRRNNKFDLKKTRVLLGNESCTLTLSESTMNTLKCTVGPAMNKHFNMSIIISNGHGTTQYSTFSYVDPVITSISPKYGPMAGGTLLTLTGNYLNSGNSRHISIGGKTCTLKSVSNSILECYTPAQTISTEFAVKLKIDLANRETSIFSYREDPIVYEIHPTKSFISGGSTITGVGKNLNSVSVPRMVINVHEAGRNFTVACQHRSNSEIICCTTPSLQQLNLQLPLKTKAFFMLDGILSKYFDLIYVHNPVFKPFEKPVMISMGNENVLEIKGNDIDPEAVKGEVLKVGNKSCENIHLHSEAVLCTVPNDLLKLNSELNIEWKQAISSTVLGKVIVQPDQNFTGLIAGVVSISTALLLLLGFFLWLKKRKQIKDLGSELVRYDARVHTPHLDRLVSARSVSPTTEMVSNESVDYRATFPEDQFPNSSQNGSCRQVQYPLTDMSPILTSGDSDISSPLLQNTVHIDLSALNPELVQAVQHVVIGPSSLIVHFNEVIGRGHFGCVYHGTLLDNDGKKIHCAVKSLNRITDIGEVSQFLTEGIIMKDFSHPNVLSLLGICLRSEGSPLVVLPYMKHGDLRNFIRNETHNPTVKDLIGFGLQVAKGMKYLASKKFVHRDLAARNCMLDEKFTVKVADFGLARDMYDKEYYSVHNKTGAKLPVKWMALESLQTQKFTTKSDVWSFGVLLWELMTRGAPPYPDVNTFDITVYLLQGRRLLQPEYCPDPLYEVMLKCWHPKAEMRPSFSELVSRISAIFSTFIGEHYVHVNATYVNVKCVAPYPSLLSSEDNADDEVDTRPASFWETS

SEQ ID NO: 29136 - protein, 13 aa, Homo sapiens
LSSKPLAVRTRRY

SEQ ID NO: 29137 - protein, 15 aa, Homo sapiens
KKIAILLILDFTMKL

SEQ ID NO: 29138 - protein, 13 aa, Homo sapiens
LPQLPKCISDCGS

SEQ ID NO: 29139 - protein, 20 aa, Homo sapiens
ILGPTCCLTIPEPRWEPWLR

SEQ ID NO: 29140 - protein, 20 aa, Homo sapiens
KNFTRLLTVPLKLLLCTHIS

SEQ ID NO: 29141 - protein, 31 aa, Homo sapiens
ICLLMKIHLCMVIFLNFMAQKEQEKQKCFIT

SEQ ID NO: 29142 - protein, 16 aa, Homo sapiens
LLPLNLSCVPLMLCLW

SEQ ID NO: 29143 - protein, 17 aa, Homo sapiens
LTRAQLMFVVLSLSVCQ

SEQ ID NO: 29144 - protein, 666 aa, Homo sapiens
TGRQTSTVAPTPATARSRGGRVPIFPCPHPAPTLLSTSRVVTPAVSGSLLVMKALRLSASALFCLLLINGLGAAPPGRPEAQPPPLSSEHKEPVAGDAVPGPKDGSAPEVRGARNSEPQDEGELFQGVDPRALAAVLLQALDRPASPPAPSGSQQGPEEEAAEALLTETVRSQTHSLPAPESPEPAAPPRPQTPENGPEASDPSEELEALASLLQELRDFSPSSAKRQQETAAAETETRTHTLTRVNLESPGPERVWRASWGEFQARVPERAPLPPPAPSQFQARMPDSGPLPETHKFGEGVSSPKTHLGEALAPLSKAYQGVAAPFPKARRPESALLGGSEAGERLLQQGLAQVEAGRRQAEATRQAAAQEERLADLASDLLLQYLLQGGARQRGLGGRGLQEAAEERESAREEEEAEQERRGGEERVGEEDEEAAEAEAEAEEAERARQNALLFAEEEDGEAGAEDKRSQEETPGHRRKEAEGTEEGGEEEDDEEMDPQTIDSLIELSTKLHLPADDVVSIIEEVEEKRKRKKNAPPEPVPPPRAAPAPTHVRSPQPPPPAPAPARDELPDWNEVLPPWDREEDEVYPPGPYHPFPNYIRPRTLQPPSALRRRHYHHALPPSRHYPGREAQARRAQEEAEAEERRLQEQEELENYIEHVLLRRP

SEQ ID NO: 29145 - protein, 195 aa, Homo sapiens
TGRGRERGGGDTMSSPSPGKRRMDTDVVKLIESKHEVTILGGLNEFVVKFYGPQGTPYEGGVWKVRVDLPDKYPFKSPSIGFMNKIFHPNIDEASGTVCLDVINQTWTALYDLTNIFESFLPQLLAYPNPIDPLNGDAAAMYLHRPEEYKQKIKEYIQKYATEEALKEQEEGTGDSSSESSMSDFSEDEAQDMEL

SEQ ID NO: 29146 - protein, 22 aa, Homo sapiens
MLQINIILLLFCLLSMRVMFPV

SEQ ID NO: 29147 - protein, 10 aa, Homo sapiens
RRTWRWQFWR

SEQ ID NO: 29148 - protein, 21 aa, Homo sapiens
IVLLQLLRIKLLQLLLVIHSG

SEQ ID NO: 29149 - protein, 23 aa, Homo sapiens
LVTILLMNFRLVRRKQYCVTLAL

SEQ ID NO: 29150 - protein, 10 aa, Homo sapiens
ILIAQGYRIY

SEQ ID NO: 29151 - protein, 35 aa, Homo sapiens
RTCALRAERRVKMAAIVWVLLCSAWRNLCKAQCQI

SEQ ID NO: 29152 - protein, 7 aa, Homo sapiens
MRAVRVV

SEQ ID NO: 29153 - protein, 20 aa, Homo sapiens
IWNFLLLVMLTLIQGKHQAT

SEQ ID NO: 29154 - protein, 29 aa, Homo sapiens
MCCYVCLKKYLKCKFGETLPYKCLAGLSA

SEQ ID NO: 29155 - protein, 11 aa, Homo sapiens
LVIVWIKWSLL

SEQ ID NO: 29156 - protein, 59 aa, Homo sapiens
VAVGGRSVARAGSVEGGEAMSRWQPGWAGRAGSNGTSPRSFFPRIQCGPSGGRGAALRS

SEQ ID NO: 29157 - protein, 778 aa, Homo sapiens
VYPRALKEVRQPSPAPADRAMAQRKNAKSSGNSSSSGSGSGSTSAGSSSPGARRETKHGGHKNGRKGGLSGTSFFTWFMVIALLGVWTSVAVVWFDLVDYEEVLGKLGIYDADGDGDFDVDDAKVLLGLKERSTSEPAVPPEEAEPHTEPEEQVPVEAEPQNIEDEAKEQIQSLLHEMVHAEHVEGEDLQQEDGPTGEPQQEDDEFLMATDVDDRFETLEPEVSHEETEHSYHVEETVSQDCNQDMEEMMSEQENPDSSEPVVEDERLHHDTDDVTYQVYEEQAVYEPLENEGIEITEVTAPPEDNPVEDSQVIVEEVSIFPVEEQQEVPPETNRKTDDPEQKAKVKKKKPKLLNKFDKTIKAELDAAEKLRKRGKIEEAVNAFKELVRKYPQSPRARYGKAQCEDDLAEKRRSNEVLRGAIETYQEVASLPDVPADLLKLSLKRRSDRQQFLGHMRGSLLTLQRLVQLFPNDTSLKNDLGVGYLLIGDNDNAKKVYEEVLSVTPNDGFAKVHYGFILKAQNKIAESIPYLKEGIESGDPGTDDGRFYFHLGDAMQRVGNKEAYKWYELGHKRGHFASVWQRSLYNVNGLKAQPWWTPKETGYTELVKSLERNWKLIRDEGLAVMDKAKGLFLPEDENLREKGDWSQFTLWQQGRRNENACKGAPKTCTLLEKFPETTGCRRGQIKYSIMHPGTHVWPHTGPTNCRLRMHLGLVIPKEGCKIRCANETKTWEEGKVLIFDDSFEHEVWQDASSFRLIFIVDVWHPELTPQQRRSLPAI

SEQ ID NO: 29158 - protein, 26 aa, Homo sapiens
LQGLAGGRSGPILKRTESGFHNGRDQ

SEQ ID NO: 29159 - protein, 13 aa, Homo sapiens
MDWEILGLLGLLH

SEQ ID NO: 29160 - protein, 12 aa, Homo sapiens
VTAGTCLGRCRM

SEQ ID NO: 29161 - protein, 12 aa, Homo sapiens
RIIRNVLIAFSL

SEQ ID NO: 29162 - protein, 17 aa, Homo sapiens
LRTFIMTGCFALRGHWT

SEQ ID NO: 29163 - protein, 52 aa, Homo sapiens
IPPKKRRRFTRLFGPLSHGELSDQVYNYPEGLGEVLYREQFDFNAEPPWEPS

SEQ ID NO: 29164 - protein, 7 aa, Homo sapiens
RLLPIKL

SEQ ID NO: 29165 - protein, 90 aa, Homo sapiens
TLVLRLAYVSRTVTTMAPEVLPKPRMRGLLARRLRNHMAVAFVLSLGVAALYKFRVADQRKKAYADFYRNYDVMKDFEEMRKAGIFQSVK

SEQ ID NO: 29166 - protein, 8 aa, Homo sapiens
MRPRGADP

SEQ ID NO: 29167 - protein, 122 aa, Homo sapiens
IAAAMASQSQGIQQLLQAEKRAAEKVSEARKRKNRRLKQAKEEAQAEIEQYRLQREKEFKAKEAAALGSRGSCSTEVEKETQEKMTILQTYFRQNRDEVLDNLLAFVCDIRPEIHENYRING

SEQ ID NO: 29168 - protein, 24 aa, Homo sapiens
TAVVFPKTWALPWAICSLEALASC

SEQ ID NO: 29169 - protein, 267 aa, Homo sapiens
KMPKGKKAKGKKVAPAPAVVKKQEAKKVVNPLFEKRPKNFGIGQDIQPKRDLTRFVKWPRYIRLQRQRAILYKRLKVPPAINQFTQALDRQTATQLLKLAHKYRPETKQEKKQRLLARAEKKAAGKGDVPTKRPPVLRAGVNTVTTLVENKKAQLVVIAHDVDPIELVVFLPALCRKMGVPYCIIKGKARLGRLVHRKTCTTVAFTQVNSEDKGALAKLVEAIRTNYNDRYDEIRRHWGGNVLGPKSVARIAKLEKAKAKELATKLG

SEQ ID NO: 29170 - protein, 26 aa, Homo sapiens
IFCMMTVPFFLHLGMFQNRKDIVATT

SEQ ID NO: 29171 - protein, 11 aa, Homo sapiens
ILLQSIFLMWN

SEQ ID NO: 29172 - protein, 36 aa, Homo sapiens
LPIPRSRKKKGGAKPAMTRTIPRIKPSLKTQKPACS

SEQ ID NO: 29173 - protein, 31 aa, Homo sapiens
VWATRVLLSSGAARNGGSHLASAAGMDQTAS

SEQ ID NO: 29174 - protein, 14 aa, Homo sapiens
RRISLKILTIFLKL

SEQ ID NO: 29175 - protein, 27 aa, Homo sapiens
VRASIWAMDGGDLMSFFLLASLTDLLP

SEQ ID NO: 29176 - protein, 2224 aa, Homo sapiens
ILLKVRYPRALEPQQHPAKPTSTMGAMTQLLAGVFLAFLALATEGGVLKKVIRHKRQSGVNATLPEENQPVVFNHVYNIKLPVGSQCSVDLESASGEKDLAPPSEPSESFQEHTVDGENQIVFTHRINIPRRACGCAAAPDVKELLSRLEELENLVSSLREQCTAGAGCCLQPATGRLDTRPFCSGRGNFSTEGCGCVCEPGWKGPNCSEPECPGNCHLRGRCIDGQCICDDGFTGEDCSQLACPSDCNDQGKCVNGVCICFEGYAGADCSREICPVPCSEEHGTCVDGLCVCHDGFAGDDCNKPLCLNNCYNRGRCVENECVCDEGFTGEDCSELICPNDCFDRGRCINGTCYCEEGFTGEDCGKPTCPHACHTQGRCEEGQCVCDEGFAGVDCSEKRCPADCHNRGRCVDGRCECDDGFTGADCGELKCPNGCSGHGRCVNGQCVCDEGYTGEDCSQLRCPNDCHSRGRCVEGKCVCEQGFKGYDCSDMSCPNDCHQHGRCVNGMCVCDDGYTGEDCRDRQCPRDCSNRGLCVDGQCVCEDGFTGPDCAELSCPNDCHGQGRCVNGQCVCHEGFMGKDCKEQRCPSDCHGQGRCVDGQCICHEGFTGLDCGQHSCPSDCNNLGQCVSGRCICNEGYSGEDCSEVSPPKDLVVTEVTEETVNLAWDNEMRVTEYLVVYTPTHEGGLEMQFRVPGDQTSTIIQELEPGVEYFIRVFAILENKKSIPVSARVATYLPAPEGLKFKSIKETSVEVEWDPLDIAFETWEIIFRNMNKEDEGEITKSLRRPETSYRQTGLAPGQEYEISLHIVKNNTRGPGLKRVTTTRLDAPSQIEVKDVTDTTALITWFKPLAEIDGIELTYGIKDVPGDRTTIDLTEDENQYSIGNLKPDTEYEVSLISRRGDMSSNPAKETFTTGLDAPRNLRRVSQTDNSITLEWRNGKAAIDSYRIKYAPISGGDHAEVDVPKSQQATTKTTLTGLRPGTEYGIGVSAVKEDKESNPATINAATELDTPKDLQVSETAETSLTLLWKTPLAKFDRYRLNYSLPTGQWVGVQLPRNTTSYVLRGLEPGQEYNVLLTAEKGRHKSKPARVKASTEQAPELENLTVTEVGWDGLRLNWTAADQAYEHFIIQVQEANKVEAARNLTVPGSLRAVDIPGLKAATPYTVSIYGVIQGYRTPVLSAEASTGETPNLGEVVVAEVGWDALKLNWTAPEGAYEYFFIQVQEADTVEAAQNLTVPGGLRSTDLPGLKAATHYTITIRGVTQDFSTTPLSVEVLTEEVPDMGNLTVTEVSWDALRLNWTTPDGTYDQFTIQVQEADQVEEAHNLTVPGSLRSMEIPGLRAGTPYTVTLHGEVRGHSTRPLAVEVVTEDLPQLGDLAVSEVGWDGLRLNWTAADNAYEHFVIQVQEVNKVEAAQNLTLPGSLRAVDIPGLEAATPYRVSIYGVIRGYRTPVLSAEASTAKEPEIGNLNVSDITPESFNLSWMATDGIFETFTIEIIDSNRLLETVEYNISGAERTAHISGLPPSTDFIVYLSGLAPSIRTKTISATATTEALPLLENLTISDINPYGFTVSWMASENAFDSFLVTVVDSGKLLDPQEFTLSGTQRKLELRGLITGIGYEVMVSGFTQGHQTKPLRAEIVTEAEPEVDNLLVSDATPDGFRLSWTADEGVFDNFVLKIRDTKKQSEPLEITLLAPERTRDITGLREATEYEIELYGISKGRRSQTVSAIATTAMGSPKEVIFSDITENSATVSWRAPTAQVESFRITYVPITGGTPSMVTVDGTKTQTRLVKLIPGVEYLVSIIAMKGFEESEPVSGSFTTALDGPSGLVTANITDSEALARWQPAIATVDSYVISYTGEKVPEITRTVSGNTVEYALTDLEPATEYTLRIFAEKGPQKSSTITAKFTTDLDSPRDLTATEVQSETALLTWRPPRASVTGYLLVYESVDGTVKEVIVGPDTTSYSLADLSPSTHYTAKIQALNGPLRSNMIQTIFTTIGLLYPFPKDCSQAMLNGDTTSGLYTIYLNGDKAEALEVFCDMTSDGGGWIVFLRRKNGRENFYQNWKAYAAGFGDRREEFWLGLDNLNKITAQGQYELRVDLRDHGETAFAVYDKFSVGDAKTRYKLKVEGYSGTAGDSMAYHNGRSFSTFDKDTDSAITNCALSYKGAFWYRNCHRVNLMGRYGDNNHSQGVNWFHWKGHEHSIQFAEMKLRPSNFRNLEGRRKRA

SEQ ID NO: 29177 - protein, 9 aa, Homo sapiens
ILFSALILR

SEQ ID NO: 29178 - protein, 408 aa, Homo sapiens
ILSADFEMMGLGNGRRSMKSPPLVLAALVACIIVLGFNYWIASSRSVDLQTRIMELEGRVRRAAAERGAVELKKNEFQGELEKQREQLDKIQSSHNFQLESVNKLYQDEKAVLVNNITTGERLIRVLQDQLKTLQRNYGRLQQDVLQFQKNQTNLERKFSYDLSQCINQMKEVKEQCEERIEEVTKKGNEAVASRDLSENNDQRQQLQALSEPQPRLQAAGLPHTEVPQGKGNVLGNSKSQTPAPSSEVVLDSKRQVEKEETNEIQVVNEEPQRDRLPQEPGREQVVEDRPVGGRGFGGAGELGQTPQVQAALSVSQENPEMEGPERDQLVIPDGQEEEQEAAGEGRNQQKLRGEDDYNMDENEAESETDKQAALAGNDRNIDVFNVEDQKRDTINLLDQREKRNHTL

SEQ ID NO: 29179 - protein, 17 aa, Homo sapiens
LIINQLLQSRSMKVKDP

SEQ ID NO: 29180 - protein, 12 aa, Homo sapiens
MGPSVCAPSPGD

SEQ ID NO: 29181 - protein, 18 aa, Homo sapiens
LGKHGSMYPGFSLTLVLL

SEQ ID NO: 29182 - protein, 189 aa, Homo sapiens
IPLLGAPPPPPPRPGAMLPPPPRQPPPQARAARGAVRLQRPFLRSPLGVLRLLQLLAGAAFWITIATSKYQGPVHFALFVSVLFWLLTLGLYFLTLLGKHELVPVLGSRWLMVNVAHDVLAAALYGAATGIMSDQMQRHSYCNLKDYPLPCAYHAFLAAAVCGGVCHGLYLLSALYGCGRRCQGKQEVA

SEQ ID NO: 29183 - protein, 454 aa, Homo sapiens
IFGPATSEQPWQEERRSAGGGLKKRSGAQWLYPCSCPTLPPPSRSQRPGRMQTSEREGSGPELSPSVMPEAPLESPPFPTKSPAFDLFNLVLSYKRLEIYLEPLKDAGDGVRYLLRWQMPLCSLLTCLGLNVLFLTLNEGAWYSVGALMISVPALLGYLQEVCRARLPDSELMRRKYHSVRQEDLQRGRLSRPEAVAEVKSFLIQLEAFLSRLCCTCEAAYRVLHWENPVVSSQFYGALLGTVCMLYLLPLCWVLTLLNSTLFLGNVEFFRVVSEYRASLQQRMNPKQEEHAFESPPPPDVGGKDGLMDSTPALTPTEDLTPGSVEEAEEAEPDEEFKDAIEEDDEGAPCPAEDELALQDNGFLSKNEVLRSKVSRLTERLRKRYPTNNFGNCTGCSATFSVLKKRRSCSNCGNSFCSRCCSFKVPKSSMGATAPEAQRETVFVCASCNQTLSK

SEQ ID NO: 29184 - protein, 15 aa, Homo sapiens
ISAAEDEPKAGRACL

SEQ ID NO: 29185 - protein, 348 aa, Homo sapiens
IEMDWVMKHNGPNDASDGTVRLRGLPFGCSKEEIVQFFQGLEIVPNGITLTMDYQGRSTGEAFVQFASKEIAENALGKHKERIGHRYIEIFRSSRSEIKGFYDPPRRLLGQRPGPYDRPIGGRGGYYGAGRGSMYDRMRRGGDGYDGGYGGFDDYGGYNNYGYGNDGFDDRMRDGRGMGGHGYGGAGDASSGFHGGHFVHMRGLPFRATENDIANFFSPLNPIRVHIDIGADGRATGEADVEFVTHEDAVAAMSKDKNNMQHRYIELFLNSTPGGGSGMGGSGMGGYGRDGMDNQGGYGSVGRMGMGNNYSGGYGTPDGLGGYGRGGGGSGGYYGQGGMSGGGWRGMY

SEQ ID NO: 29186 - protein, 14 aa, Homo sapiens
LPSFMVLMVWFLGH

SEQ ID NO: 29187 - protein, 29 aa, Homo sapiens
MILLGENLKKRRRDPKSSYLRSSFFTHLC

SEQ ID NO: 29188 - protein, 26 aa, Homo sapiens
LTASMKMTQNTLGRGTCLLIYDKTST

SEQ ID NO: 29189 - protein, 30 aa, Homo sapiens
RVFGSQKEKEETEEKKGETKFRRHQVRLGI

SEQ ID NO: 29190 - protein, 18 aa, Homo sapiens
LVSACRFFLCLFSALPRP

SEQ ID NO: 29191 - protein, 1020 aa, Homo sapiens
TRTGPLAVFFQGTRGHSLALRLGFWRPSLKPRLRLTKGSRRCRRPSHPGIRVPAEREGEGQRGRGRSRRGAHLELKPSPGLRAGAPTDRGRGGPAEVAAAGGRRMVQKESQATLEERESELSSNPAASAGASLEPPAAPAPGEDNPAGAGGAAVAGAAGGARRFLCGVVEGFYGRPWVMEQRKELFRRLQKWELNTYLYAPKDDYKHRMFWREMYSVEEAEQLMTLISAAREYEIEFIYAISPGLDITFSNPKEVSTLKRKLDQVSQFGCRSFALLFDDIDHNMCAADKEVFSSFAHAQVSITNEIYQYLGEPETFLFCPTEYCGTFCYPNVSQSPYLRTVGEKLLPGIEVLWTGPKVVSKEIPVESIEEVSKIIKRAPVIWDNIHANDYDQKRLFLGPYKGRSTELIPRLKGVLTNPNCEFEANYVAIHTLATWYKSNMNGVRKDVVMTDSEDSTVSIQIKLENEGSDEDIETDVLYSPQMALKLALTEWLQEFGVPHQYSSRQVAHSGAKASVVDGTPLVAAPSLNATTVVTTVYQEPIMSQGAALSGEPTTLTKEEEKKQPDEEPMDMVVEKQEETDHKNDNQILSEIVEAKMAEELKPMDTDKESIAESKSPEMSMQEDCISDIAPMQTDEQTNKEQFVPGPNEKPLYTAEPVTLEDLQLLADLFYLPYEHGPKGAQMLREFQWLRANSSVVSVNCKGKDSEKIEEWRSRAAKFEEMCGLVMGMFTRLSNCANRTILYDMYSYVWDIKSIMSMVKSFVQWLGCRSHSSAQFLIGDQEPWAFRGGLAGEFQRLLPIDGANDLFFQPPPLTPTSKVYTIRPYFPKDEASVYKICREMYDDGVGLPFQSQPDLIGDKLVGGLLSLSLDYCFVLEDEDGICGYALGTVDVTPFIKKCKISWIPFMQEKYTKPNGDKELSEAEKIMLSFHEEQEVLPETFLANFPSLIKMDIHKKVTDPSVAKSMMACLLSSLKANGSRGAFCEVRPDDKRILEFYSKLGCFEIAKMEGFPKDVVILGRSL

SEQ ID NO: 29192 - protein, 799 aa, Homo sapiens
KMNLQPIFWIGLISSVCCVFAQTDENRCLKANAKSCGECIQAGPNCGWCTNSTFLQEGMPTSARCDDLEALKKKGCPPDDIENPRGSKDIKKNKNVTNRSKGTAEKLKPEDITQIQPQQLVLRLRSGEPQTFTLKFKRAEDYPIDLYYLMDLSYSMKDDLENVKSLGTDLMNEMRRITSDFRIGFGSFVEKTVMPYISTTPAKLRNPCTSEQNCTSPFSYKNVLSLTNKGEVFNELVGKQRISGNLDSPEGGFDAIMQVAVCGSLIGWRNVTRLLVFSTDAGFHFAGDGKLGGIVLPNDGQCHLENNMYTMSHYYDYPSIAHLVQKLSENNIQTIFAVTEEFQPVYKELKNLIPKSAVGTLSANSSNVIQLIIDAYNSLSSEVILENGKLSEGVTISYKSYCKNGVNGTGENGRKCSNISIGDEVQFEISITSNKCPKKDSDSFKIRPLGFTEEVEVILQYICECECQSEGIPESPKCHEGNGTFECGACRCNEGRVGRHCECSTDEVNSEDMDAYCRKENSSEICSNNGECVCGQCVCRKRDNTNEIYSGKFCECDNFNCDRSNGLICGGNGVCKCRVCECNPNYTGSACDCSLDTSTCEASNGQICNGRGICECGVCKCTDPKFQGQTCEMCQTCLGVCAEHKECVQCRAFNKGEKKDTCTQECSYFNITKVESRDKLPQPVQPDPVSHCKEKDVDDCWFYFTYSVNGNNEVMVHVVENPECPTGPDIIPIVAGVVAGIVLIGLALLLIWKLLMIIHDRREFAKFEKEKMNAKWDTGENPIYKSAVTTVVNPKYEGK

SEQ ID NO: 29193 - protein, 395 aa, Homo sapiens
IPAVLTSRLFFCAGGLPAVMKDVPGFLQQSQNSGPGQPAVWHRLEELYTKKLWHQLTLQVLDFVQDPCFAQGDGLIKLYENFISEFEHRVNPLSLVEIILHVVRQMTDPNVALTFLEKTREKVKSSDEAVILCKTAIGALKLNIGDLQVTKETIEDVEEMLNNLPGVTSVHSRFYDLSSKYYQTIGNHASYYKDALRFLGCVDIKDLPVSEQQERAFTLGLAGLLGEGVFNFGELLMHPVLESLRNTDRQWLIDTLYAFNSGNVERFQTLKTAWGQQPDLAANEAQLLRKIQLLCLMEMTFTRPANHRQLTFEEIAKSAKITVNEVELLVMKALSVGLVKGSIDEVDKRVHMTWVQPRVLDLQQIKGMKDRLEFWCTDVKSMEMLVEHQAHDILT

SEQ ID NO: 29194 - protein, 248 aa, Homo sapiens [sequence omitted]

SEQ ID NO: 29195 - protein, 12 aa, Homo sapiens
LLSPPLTILVLV

SEQ ID NO: 29196 - protein, 13 aa, Homo sapiens
RPCWFLCGLLSGW

SEQ ID NO: 29197 - protein, 8 aa, Homo sapiens
LRRPGVRL

SEQ ID NO: 29198 - protein, 12 aa, Homo sapiens
MWGLAGLVYSAV

SEQ ID NO: 29199 - protein, 7 aa, Homo sapiens
MHRKSNN

SEQ ID NO: 29200 - protein, 17 aa, Homo sapiens
VQLRVTPPALFLKDCSF

SEQ ID NO: 29201 - protein, 7 aa, Homo sapiens
IEINTTT

SEQ ID NO: 29202 - protein, 18 aa, Homo sapiens
IWSGRAGWGTDRCRRESD

SEQ ID NO: 29203 - protein, 10 aa, Homo sapiens
VVYSVPSCPS

SEQ ID NO: 29204 - protein, 26 aa, Homo sapiens
LDFHVAISPITIVVVCLVEAPVVLEA

SEQ ID NO: 29205 - protein, 161 aa, Homo sapiens
KKNRIAIYELLFKEGVMVAKKDVHMPKHPELADKNVPNLHVMKAMQSLKSRGYVKEQFAWRHFYWYLTNEGIQYLRDYLHLPPEIVPAILRRSRPETGRPRPKGLEGERPARLTRGEADRDTYRRSAVPPGADKKAEAGAGSATEFQFRGGFGRGRGQPPQ

SEQ ID NO: 29206 - protein, 28 aa, Homo sapiens
VAAAEFSVKVFHFSCPLPSPPHLLILFF

SEQ ID NO: 29207 - protein, 17 aa, Homo sapiens
MSNSLCLELLYVWVACS

SEQ ID NO: 29208 - protein, 26 aa, Homo sapiens
LAMDMWFIWPLQVRSQELVQPVSCPP

SEQ ID NO: 29209 - protein, 39 aa, Homo sapiens
LTRPRFFLFLDSIFAVAGTAVQSPICSSLSAPRSYTPSR

SEQ ID NO: 29210 - protein, 19 aa, Homo sapiens
VILFVLSSTLYFVMRKLKG

SEQ ID NO: 29211 - protein, 16 aa, Homo sapiens
MRKQFHTDKLHLISQK

SEQ ID NO: 29212 - protein, 19 aa, Homo sapiens
LALMLTLNLCLEINLQMLL

SEQ ID NO: 29213 - protein, 14 aa, Homo sapiens
VWLSLMVSSRCSTT

SEQ ID NO: 29214 - protein, 21 aa, Homo sapiens
IPGVVISWLIMTQTETRLRSS

SEQ ID NO: 29215 - protein, 24 aa, Homo sapiens
VDALSRPPSPDPSDLRSLTMSSLH

SEQ ID NO: 29216 - protein, 11 aa, Homo sapiens
KLQVFFWVVYL

SEQ ID NO: 29217 - protein, 8 aa, Homo sapiens
MTTLRDLE

SEQ ID NO: 29218 - protein, 16 aa, Homo sapiens
VAQFFLALLLQVNWWI

SEQ ID NO: 29219 - protein, 8 aa, Homo sapiens
ICGFYLIF

SEQ ID NO: 29220 - protein, 16 aa, Homo sapiens
LTVLLLSLLIPNMIRY

SEQ ID NO: 29221 - protein, 224 aa, Homo sapiens
TMSDEEARQSGGSSQAGVVTVSDVQELMRRKEEIEAQIKANYDVLESQKGIGMNEPLVDCEGYPRSDVDLYQVRTARHNIICLQNDHKAVMKQVEEALHQLHARDKEKQARDMAEAHKEAMSRKLGQSESQGPPRAFAKVNSISPGSPASIAGLQVDDEIVEFGSVNTQNFQSLHNIGSVVQHSEGKPLNVTVIRRGEKHQLRLVPTRWAGKGLLGCNIIPLQR

SEQ ID NO: 29222 - protein, 44 aa, Homo sapiens
KHLEDERGLFLGVQEIHLLVALLAAGAQIHPWSLNEDHLISCLP

SEQ ID NO: 29223 - protein, 19 aa, Homo sapiens
MFLLCCLKTLLLMPGKVEN

SEQ ID NO: 29224 - protein, 169 aa, Homo sapiens
TFLMSTVGLFHFPTPLTRICPAPWGLRLWEKLTLLSPGIAVTPVQMAGKKDYPALLSLDENELEEQFVKGHGPGGQATNKTSNCVVLKHIPSGIVVKCHQTRSVDQNRKLARKILQEKVDVFYNGENSPVHKEKREAAKKKQERKKRAKETLEKKKLLKELWESSKKVH

SEQ ID NO: 29225 - protein, 116 aa, Homo sapiens
KMTKKRRNNGRAKKGRGHVQPIRCTNCARCVPKDKAIKKFVIRNIVEAAAVRDISEASVFDAYVLPKLYVKLHYCVSCAIHSKVVRNRSREARKDRTPPPRFRPAGAAPRPPPKPM

SEQ ID NO: 29226 - protein, 19 aa, Homo sapiens
MIGVTMAPLEGKWILQERH

SEQ ID NO: 29227 - protein, 438 aa, Homo sapiens
IPAIMSIEKIWAREILDSRGNPTVEVDLYTAKGLFRAAVPSGASTGIYEALELRDGDKQRYLGKGVLKAVDHINSTIAPALISSGLSVVEQEKLDNLMLELDGTENKSKFGANAILGVSLAVCKAGAAERELPLYRHIAQLAGNSDLILPVPAFNVINGGSHAGNKLAMQEFMILPVGAESFRDAMRLGAEVYHTLKGVIKDKYGKDATNVGDEGGFAPNILENSEALELVKEAIDKAGYTEKIVIGMDVAASEFYRDGKYDLDFKSPTDPSRYITGDQLGALYQDFVRDYPVVSIEDPFDQDDWAAWSKFTANVGIQIVGDDLTVTNPKRIERAVEEKACNCLLLKVNQIGSVTEAIQACKLAQENGWGVMVSHRSGETEDTFIADLVVGLCTGQIKTGAPCRSERLAKYNQLMRIEEELGDEARFAGHNFRNPSVL

SEQ ID NO: 29228 - protein, 42 aa, Homo sapiens
RRQTATLCCRGREEEGKARHTGVVQLRKDSVSCRGRRDLTAR

SEQ ID NO: 29229 - protein, 12 aa, Homo sapiens
LTWLQLLLQIFQ

SEQ ID NO: 29230 - protein, 16 aa, Homo sapiens
MWIGVVLSIWKLLLEI

SEQ ID NO: 29231 - protein, 13 aa, Homo sapiens
LRLGTEQTILLLK

SEQ ID NO: 29232 - protein, 17 aa, Homo sapiens
RRQLRRGRILMYLASWW

SEQ ID NO: 29233 - protein, 15 aa, Homo sapiens
KWEKLLLLYLPLDLM

SEQ ID NO: 29234 - protein, 217 aa, Homo sapiens
ITAGLDPEMALLAEHLLKPLPADKQIETGPFLEAVSHLPPFFDCLGSPVFTPIKADISGNITKIKAVYDTNPAKFRTLQNILEVEKEMYGAEWPKVGATLALMWLKRGLRFIQVFLQSICDGERDENHPNLIRVNATKAYEMALKKYHGWIVQKIFQAALYAAPYKSDFLKALSKGQNVTEEECLEKIRLFLVNYTATIDVIYEMYTQMNAELNYKV

SEQ ID NO: 29235 - protein, 17 aa, Homo sapiens
MVIFLIIPVVLECTHLR

SEQ ID NO: 29236 - protein, 14 aa, Homo sapiens
ILVLQIWFTFCLLH

SEQ ID NO: 29237 - protein, 20 aa, Homo sapiens
ILFHAGGLATKACLLAAAIC

SEQ ID NO: 29238 - protein, 16 aa, Homo sapiens
LSAFLLMPACLMLSLH

SEQ ID NO: 29239 - protein, 10 aa, Homo sapiens
MENLIELRKQ

SEQ ID NO: 29240 - protein, 24 aa, Homo sapiens
VEFFLLILSSWWSHSSLFLASWQP

SEQ ID NO: 29241 - protein, 11 aa, Homo sapiens
IWVAVLVCGSL

SEQ ID NO: 29242 - protein, 21 aa, Homo sapiens
MERGILWMLVLLNPLPAGPPG

SEQ ID NO: 29243 - protein, 12 aa, Homo sapiens
LFLHFLLCWLVH

SEQ ID NO: 29244 - protein, 73 aa, Homo sapiens
IQMLSSGPAWLAIVLLVTISLLPDVLKKVLCRQLWPTATERVQRGVKHKAPVQAAQSSDGPLLKDLLRRPRRS

SEQ ID NO: 29245 - protein, 18 aa, Homo sapiens
RPVKDHIPLTSHQKYNSC

SEQ ID NO: 29246 - protein, 664 aa, Homo sapiens
IMSARLPVLSPPRWPRLLLLSLLLLGAVPGPRRSGAFYLPGLAPVNFCDEEKKSDECKAEIELFVNRLDSVESVLPYEYTAFDFCQASEGKRPSENLGQVLFGERIEPSPYKFTFNKKETCKLVCTKTYHTEKAEDKQKLEFLKKSMLLNYQHHWIVDNMPVTWCYDVEDGQRFCNPGFPIGCYITDKGHAKDACVISSDFHERDTFYIFNHVDIKIYYHVVETGSMGARLVAAKLEPKSFKHTHIDKPDCSGPPMDISNKASGEIKIAYTYSVSFEEDDKIRWASRWDYILESMPHTHIQWFSIMNSLVIVLFLSGMVAMIMLRTLHKDIARYNQMDSTEDAQEEFGWKLVHGDIFRPPRKGMLLSVFLGSGTQILIMTFVTLFFACLGFLSPANRGALMTCAVVLWVLLGTPAGYVAARFYKSFGGEKWKTNVLLTSFLCPGIVFADFFIMNLILWGEGSSAAIPFGTLVAILALWFCISVPLTFIGAYFGFKKNAIEHPVRTNQIPRQIPEQSFYTKPLPGIIMGGILPFGCIFIQLFFILNSIWSHQMYYMFGFLFLVFIILVITCSEATILLCYFHLCAEDYHWQWRSFLTSGFTAVYFLIYAVHYFFSKLQITGTASTILYFGYTMIMVLIFFLFTGTIGFFACFWFVTKIYSVVKVD

SEQ ID NO: 29247 - protein, 300 aa, Homo sapiens
IAYHLVQAKSNQQLDRKRMALKQISSNKCFGGLQKVFEHDSVELNCKMKFAVYLPPKAETGKCPALYWLSGLTCTEQNFISKSGYHQSASEHGLVVIAPDTSPRGCNIKGEDESWDFGTGAGFYVDATEDPWKTNYRMYSYVTEELPQLINANFPVDPQRMSIFGHSMGGHGALICALKNPGKYKSVSAFAPICNPVLCPWGKKAFSGYLGTDQSKWKAYDATHLVKSYPGSQLDILIDQGKDDQFLLDGQLLPDNFIAACTEKKIPVVFRLQEGYDHSYYFIATFITDHIRHHAKYLNA

SEQ ID NO: 29248 - protein, 198 aa, Homo sapiens
IMIIYRDLISHDEMFSDIYKIREIADGLCLEVEGKMVSRTEGNIDDSLIGGNASAEGPEGEGTESTVITGVDIVMNHHLQETSFTKEAYKKYIKDYMKSIKGKLEEQRPERVKPFMTGAAEQIKHILANFKNYQFFIGENMNPDGMVALLDYREDGVTPYMIFFKDGLEMEKCDAKERNPCAFCLSLWRPRLNWGIHL

SEQ ID NO: 29249 - protein, 621 aa, Homo sapiens
IQVQCLPKTKAPRGSGGATPGRGPGRGAHTARLTRWSRTMSPAPRPPRCLLLPLLTLGTALASLGSAQSSSFSPEAWLQQYGYLPPGDLRTHTQRSPQSLSAAIAAMQKFYGLQVTGKADADTMKAMRRPRCGVPDKFGAEIKANVRRKRYAIQGLKWQHNEITFCIQNYTPKVGEYATYEAIRKAFRVWESATPLRFREVPYAYIREGHEKQADIMIFFAEGFHGDSTPFDGEGGFLAHAYFPGPNIGGDTHFDSAEPWTVRNEDLNGNDIFLVAVHELGHALGLEHSSDPSAIMAPFYQWMDTENFVLPDDDRRGIQQLYGGESGFPTKMPPQPRTTSRPSVPDKPKNPTYGPNICDGNFDTVAMLRGEMFVFKERWFWRVRNNQVMDGYPMPIGQFWRGLPASINTAYERKDGKFVFFKGDKHWVFDEASLEPGYPKHIKELGRGLPTDKIDAALFWMPNGKTYFFRGNKYYRFNEELRAVDSEYPKNIKVWEGIPESPRGSFMGSDEVFTYFYKGNKYWKFNNQKLKVEPGYPKSALRDWMGCPSGGRPDEGTEEETEVIIIEVDEEGGGAVSAAAVVLPVLLLLLVLAVGLAVFFFRRHGTPRRLLYCQRSLLDKV

SEQ ID NO: 29250 - protein, 843 aa, Homo sapiens
KFGPKRKWSQTPAGGDQARPGALAACGRAVGEGAPQCRDPGLQEPAPGEKSAAADGENNSKVGERHRPYSRAAAASPPPALASRVRVEPGPWSPPGEAAPGSLGARGSAATPSGRPQKLRDPSGTSGQPRMLLATLLLLLLGGALAHPDRIIFPNHACEDPPAVLLEVQGTLQRPLVRDSRTSPANCTWLILGSKEQTVTIRFQKLHLACGSERLTLRSPLQPLISLCEAPPSPLQLPGGNVTITYSYAGARAPMGQGFLLSYSQDWLMCLQEEFQCLNHRCVSAVQRCDGVDACGDGSDEAGCSSDPFPGLTPRPVPSLPCNVTLEDFYGVFSSPGYTHLASVSHPQSCHWLLDPHDGRRLAVRFTALDLGFGDAVHVYDGPGPPESSRLLRSLTHFSNGKAVTVETLSGQAVVSYHTVAWSNGRGFNATYHVRGYCLPWDRPCGLGSGLGAGEGLGERCYSEAQRCDGSWDCADGTDEEDCPGCPPGHFPCGAAGTSGATACYLPADRCNYQTFCADGADERRCRHCQPGNFRCRDEKCVYETWVCDGQPDCADGSDEWDCSYVLPRKVITAAVIGSLVCGLLLVIALGCTCKLYAIRTQEYSIFAPLSRMEAEIVQQQAPPSYGQLIAQGAIPPVEDFPTENPNDNSVLGNLRSLLQILRQDMTPGGGPGARRRQRGRLMRRLVRRLRRWGLLPRTNTPARASEARSQVTPSAAPLEALDGGTGPAREGGAVGGQDGEQAPPLPIKAPLPSASTSPAPTTVPEAPGPLPSLPLEPSLLSGVVQALRGRLLPSLGPPGPTRSPPGPHTAVLALEDEDDVLLVPLAEPGVWVAEAEDEPLLT

SEQ ID NO: 29251 - protein, 363 aa, Homo sapiens
IGPVQIRGCSFAHKRGFAGSLNGNAVKILLRWVTRYSCPRAFVTGMPKRGKKGAVAEDGDELRTEPEAKKSKTAAKKNDKEAAGEGPALYEDPPDQKTSPSGKPATLKICSWNVDGLRAWIKKKGLDWVKEEAPDILCLQETKCSENKLPAELQELPGLSHQYWSAPSDKEGYSGVGLLSRQCPLKVSYGIGDEEHDQEGRVIVAEFDSFVLVTAYVPNAGRGLVRLEYRQRWDEAFRKFLKGLASRKPLVLCGDLNVAHEEIDLRNPKGNKKNAGFTPQERQGFGELLQAVPLADSFRHLYPNTPYAYTFWTYMMNARSKNVGWRLDYFLLSHSLLPALCDSKIRSKALGSDHCPITLYLAL

SEQ ID NO: 29252 - protein, 49 aa, Homo sapiens
IGSERIGAHRSRLIEKASARPWRTDTPMKIIRTLQNGFCLTLSTDLKLQ

SEQ ID NO: 29253 - protein, 42 aa, Homo sapiens
MPPAPAPPTRWGRCYPKSSGTRKCGSSCWAWTRPARQQSCTS

SEQ ID NO: 29254 - protein, 63 aa, Homo sapiens
IRWIMIASGMLALTGRHPSGCCAVGPWCATMARRGGRRTTTTFQQALWTNTRFRRSTPPTLVS

SEQ ID NO: 29255 - protein, 29 aa, Homo sapiens
IHWFITCLMRTLGMFLILRLEGYQNRSGN

SEQ ID NO: 29256 - protein, 8 aa, Homo sapiens
LLVPPSRD

SEQ ID NO: 29257 - protein, 25 aa, Homo sapiens
RFANRIILLPSCLGLLILLERQKIF

SEQ ID NO: 29258 - protein, 12 aa, Homo sapiens
MKGWLSLPLMVT

SEQ ID NO: 29259 - protein, 66 aa, Homo sapiens
VEELPAAAAQVAKARWVKVRVVVMVLEVARRMTRTRKRNMNLLYQLEWGKRRRKQRDQMLPANCHW

SEQ ID NO: 29260 - protein, 12 aa, Homo sapiens
VSLWLFVMLPKI

SEQ ID NO: 29261 - protein, 893 aa, Homo sapiens
IMDHYDSQQTNDYMQPEEDWDRDLLLDPAWEKQQRKTFTAWCNSHLRKAGTQIENIEEDFRDGLKLMLLLEVISGERLAKPERGKMRVHKISNVNKALDFIASKGVKLVSIGAEEIVDGNVKMTLGMIWTIILRFAIQDISVEETSAKEGLLLWCQRKTAPYKNVNIQNFHISWKDGLGFCALIHRHRPELIDYGKLRKDDPLTNLNTAFDVAEKYLDIPKMLDAEDIVGTARPDEKAIMTYVSSFYHAFSGAQKAETAANRICKVLAVNQENEQLMEDYEKLASDLLEWIRRTIPWLENRVPENTMHAMQQKLEDFRDYRRLHKPPKVQEKCQLEINFNTLQTKLRLSNRPAFMPSEGRMVSDINNAWGCLEQVEKGYEEWLLNEIRRLERLDHLAEKFRQKASIHEAWTDGKEAMLRQKDYETATLSEIKALLKKHEAFESDLAAHQDRVEQIAAIAQELNELDYYDSPSVNARCQKICDQWDNLGALTQKRREALERTEKLLETIDQLYLEYAKRAAPFNNWMEGAMEDLQDTFIVHTIEEIQGLTTAHEQFKATLPDADKERLAILGIHNEVSKIVQTYHVNMAGTNPYTTITPQEINGKWDHVRQLVPRRDQALTEEHARQQHNERLRKQFGAQANVIGPWIQTKMEEIGRISIEMHGTLEDQLSHLRQYEKSIVNYKPKIDQLEGDHQLIQEALIFDNKHTNYTMEHIRVGWEQLLTTIARTINEVENQILTRDAKGISQEQMNEFRASFNHFDRDHSGTLGPEEFKACLISLGYDIGNDPQGEAEFARIMSIVDPNRLGVVTFQAFIDFMSRETADTDTADQVMASFKILAGDKNYITMDELRRELPPDQAEYCIARMAPYTGPDSVPGALDYMSFSTALYGESDL

SEQ ID NO: 29262 - protein, 19 aa, Homo sapiens
LASLLNIYALLNLLWTNHQ

SEQ ID NO: 29263 - protein, 37 aa, Homo sapiens
TRPSFAIRGARGPLGTRPATRSSGTRLSHPAGRRGPA

SEQ ID NO: 29264 - protein, 22 aa, Homo sapiens
RDPSPACCHVPLSRQVPGPPGR

SEQ ID NO: 29265 - protein, 63 aa, Homo sapiens
MRQEKEMRIRMKVKLLHPLVMRLRYRSATRKKLRDSHLAMSPKQGEGARLSVWTLTHSRIIQR

SEQ ID NO: 29266 - protein, 7 aa, Homo sapiens
MDQPHNF

SEQ ID NO: 29267 - protein, 16 aa, Homo sapiens
VRGLWLLFLKIIYRSN

SEQ ID NO: 29268 - protein, 14 aa, Homo sapiens
KICFSITCAFTLST

SEQ ID NO: 29269 - protein, 17 aa, Homo sapiens
IWRKTSLWCFIAVHWLG

SEQ ID NO: 29270 - protein, 29 aa, Homo sapiens
LANPAQDVELAVPDGASDAELGGVESRGR

SEQ ID NO: 29271 - protein, 673 aa, Homo sapiens
TGSRARERVRNRVSAPCGQDSRRCDPEVLRGRSPGLGLAEMPSCGACTCGAAAVRLITSSLASAQRGISGGRIHMSVLGRLGTFETQILQRAPLRSFTETPAYFASKDGISKDGSGDGNKKSASEGSSKKSGSGNSGKGGNQLRCPKCGDLCTHVETFVSSTRFVKCEKCHHFFVVLSEADSKKSIIKEPESAAEAVKLAFQQKPPPPPKKIYNYLDKYVVGQSFAKKVLSVAVYNHYKRIYNNIPANLRQQAEVEKQTSLTPRELEIRRREDEYRFTKLLQIAGISPHGNALGASMQQQVNQQIPQEKRGGEVLDSSHDDIKLEKSNILLLGPTGSGKTLLAQTLAKCLDVPFAICDCTTLTQAGYVGEDIESVIAKLLQDANYNVEKAQQGIVFLDEVDKIGSVPGIHQLRDVGGEGVQQGLLKLLEGTIVNVPEKNSRKLRGETVQVDTTNILFVASGAFNGLDRIISRRKNEKYLGFGTPSNLGKGRRAAAAADLANRSGESNTHQDIEEKDRLLRHVEARDLIEFGMIPEFVGRLPVVVPLHSLDEKTLVQILTEPRNAVIPQYQALFSMDKCELNVTEDALKAIARLALERKTGARGLRSIMEKLLLEPMFEVPNSDIVCVEVDKEVVEGKKEPGYIRAPTKESSEEEYDSGVEEEGWPRQADAANS

SEQ ID NO: 29272 - protein, 44 aa, Homo sapiens
MPSAWMCAGGVTSLLLWCCAGSSRICSAPWPLCVTAWRGAVGSP

SEQ ID NO: 29273 - protein, 583 aa, Homo sapiens
RKPSERGLEDLATLSSPSGSPGPPPEHSGAMDSPGYNCFVDKDKMDAAIQDLGPKELSCTELQELKQLARQGYWAQSHALRGKVYQRLIRDIPCRTVTPDASVYSDIVGKIVGKHSSSCLPLPEFVDNTQVPSYCLNARGEGAVRKILLCLANQFPDISFCPALPAVVALLLHYSIDEAECFEKACRILACNDPGRRLIDQSFLAFESSCMTFGDLVNKYCQAAHKLMVAVSEDVLQVYADWQRWLFGELPLCYFARVFDVFLVEGYKVLYRVALAILKFFHKVRAGQPLESDSVKQDIRTFVRDIAKTVSPEKLLEKAFAIRLFSRKEIQLLQMANEKALKQKGITVKQKRQFVHLAVHAENFRSEIVSVREMRDIWSWVPERFALCQPLLLFSSLQHGYSLARFYFQCEGHEPTLLLIKTTQKEVCGAYLSTDWSERNKFGGKLGFFGTGECFVFRLQPEVQRYEWVVIKHPELTKPPPLMAAEPTAPLSHSASSDPADRLSPFLAARHFNLPSKTESMFMAGGSDCLIVGGGGGQALYIDGDLNRGRTSHCDTFNNQPLCSENFLIAAVEAWGFQDPDTQ

SEQ ID NO: 29274 - protein, 829 aa, Homo sapiens
TAVAQGSASPMDTEGFGELLQQAEQLAAETEGISELPHVERNLQEIQQAGERLRSRTLTRTSQETADVKASVLLGSRGLDISHISQRLESLSAATTFEPLEPVKDTDIQGFLKNEKDNALLSAIEESRKRTFGMAEEYHRESMLVEWEQVKQRILHTLLASGEDALDFTQESEPSYISDVGPPGRSSLDNIEMAYARQIYIYNEKIVNGHLQPNLVDLCASVAELDDKSISDMWTMVKQMTDVLLTPATDALKNRSSVEVRMEFVRQALAYLEQSYKNYTLVTVFGNLHQAQLGGVPGTYQLVRSFLNIKLPAPLPGLQDGEVEGHPVWALIYYCMRCGDLLAASQVVNRAQHQLGEFKTWFQEYMNSKDRRLSPATENKLRLHYRRALRNNTDPYKRAVYCIIGRCDVTDNQSEVADKTEDYLWLKLNQVCFDDDGTSSPQDRLTLSQFQKQLLEDYGESHFTVNQQPFLYFQVLFLTAQFEAAVAFLFRMERLRCHAVHVALVLFELKLLLKSSGQSAQLLSHEPGDPPCLRRLNFVRLLMLYTRKFESTDPREALQYFYFLRDEKDSQGENMFLRCVSELVIESREFDMILGKLENDGSRKPGVIDKFTSDTKPIINKVASVAENKGLFEEAAKLYDLAKNADKVLELMNKLLSPVVPQISAPQSNKERLKNMALSIAERYRAQGISANKFVDSTFYLLLDLITFFDEYHSGHIDRAFDIIERLKLVPLNQESVEERVAAFRNFSDEIRHNLSEVLLATMNILFTQFKRLKGTSPSSSSRPQRVIEDRDSQLRSQARTLITFAGMIPYRTSGDTNARLVQMEVLMN

SEQ ID NO: 29275 - protein, 17 aa, Homo sapiens
TSIIVVILIELLISLSA

SEQ ID NO: 29276 - protein, 35 aa, Homo sapiens
VMLLLIYLGSWLAGEAEPLLKAWLPRKICSVQPRA

SEQ ID NO: 29277 - protein, 89 aa, Homo sapiens
VRARRWRRRGKQREQPEDRGVPMKRAAMALHSPQYIFGDFSPDEFNQFFVTPRSSVEDKNIRELSLVSMKSLNPVTLCREPPATVFQAH

SEQ ID NO: 29278 - protein, 40 aa, Homo sapiens
ILPLGRRWRTRPSTVAPVASESWWCRPSSRGNRCFRDTGW

SEQ ID NO: 29279 - protein, 11 aa, Homo sapiens
LPSWVWFLWCF

SEQ ID NO: 29280 - protein, 439 aa, Homo sapiens
IISPRIKKLFDFPKEGHTTISDKLDITAKMVLSQRQRDELNRAIADYLRSNGYEEAYSVFKKEAELDVNEELDKKYAGLLEKKWTSVIRLQKKVMELESKLNEAKEEFTSGGPLGQKRDPKEWIPRPPEKYALSGHRSPVTRVIFHPVFSVMVSASEDATIKVWDYETGDFERTLKGHTDSVQDISFDHSGKLLASCSADMTIKLWDFQGFECIRTMHGHDHNVSSVAIMPNGDHIVSASRDKTIKMWEVQTGYCVKTFTGHREWVRMVRPNQDGTLIASCSNDQTVRVWVVATKECKAELREHEHVVECISWAPESSYSSISEATGSETKKSGKPGPFLLSGSRDKTIKMWDVSTGMCLMTLVGHDNWVRGVLFHSGGKFILSCADDKTLRVWDYKNKRCMKTLNAHEHFVTSLDFHKTAPYVVTGSVDQTVKVWECR

SEQ ID NO: 29281 - protein, 12 aa, Homo sapiens
LWIIPWALGSVM

SEQ ID NO: 29282 - protein, 37 aa, Homo sapiens
IFGLVSPASFLLPFTLPVEHSYGSQEEEAAEAVVLVL

SEQ ID NO: 29283 - protein, 11 aa, Homo sapiens
MGFKCLWLTEA

SEQ ID NO: 29284 - protein, 11 aa, Homo sapiens
TPGAAQAERRH

SEQ ID NO: 29285 - protein, 15 aa, Homo sapiens
LGQRFWEALVAGVVL

SEQ ID NO: 29286 - protein, 13 aa, Homo sapiens
VQWFTPIFLTLSG

SEQ ID NO: 29287 - protein, 14 aa, Homo sapiens
MKWQRMEKIVTRDV

SEQ ID NO: 29288 - protein, 46 aa, Homo sapiens
MWFTVAGVRGVMVSLQLWRRRSETHAGAQVKGCSPGQHIPDTNALV

SEQ ID NO: 29289 - protein, 10 aa, Homo sapiens
MLLFQFCQKT

SEQ ID NO: 29290 - protein, 1110 aa, Homo sapiens
VEEAPRTDFGRGRAGLSAAMSAKAISEQTGKELLYKFICTTSAIQNRFKYARVTPDTDWARLLQDHPWLLSQNLVVKPDQLIKRRGKLGLVGVNLTLDGVKSWLKPRLGQEATVGKATGFLKNFLIEPFVPHSQAEEFYVCIYATREGDYVLFHHEGGVDVGDVDAKAQKLLVGVDEKLNPEDIKKHLLVHAPEDKKEILASFISGLFNFYEDLYFTYLEINPLVVTKDGVYVLDLAAKVDATADYICKVKWGDIEFPPPFGREAYPEEAYIADLDAKSGASLKLTLLNPKGRIWTMVAGGGASVVYSDTICDLGGVNELANYGEYSGAPSEQQTYDYAKTILSLMTREKHPDGKILIIGGSIANFTNVAATFKGIVRAIRDYQGPLKEHEVTIFVRRGGPNYQEGLRVMGEVGKTTGIPIHVFGTETHMTAIVGMALGHRPIPNQPPTAAHTANFLLNASGSTSTPAPSRTASFSESRADEVAPAKKAKPAMPQGKSTTLFSRHTKAIVWGMQTRAVQGMLDFDYVCSRDEPSVAAMVYPFTGDHKQKFYWGHKEILIPVFKNMADAMRKHPEVDVLINFASLRSAYDSTMETMNYAQIRTIAIIAEGIPEALTRKLIKKADQKGVTIIGPATVGGIKPGCFKIGNTGGMLDNILASKLYRPGSVAYVSRSGGMSNELNNIISRTTDGVYEGVAIGGDRYPGSTFMDHVLRYQDTPGVKMIVVLGEIGGTEEYKICRGIKEGRLTKPIVCWCIGTCATMFSSEVQFGHAGACANQASETAVAKNQALKEAGVFVPRSFDELGEIIQSVYEDLVANGVIVPAQEVPPPTVPMDYSWARELGLIRKPASFMTSICDERGQELIYAGMPITEVFKEEMGIGGVLGLLWFQKRLPKYSCQFIEMCLMVTADHGPAVSGAHNTIICARAGKDLVSSLTSGLLTIGDRFGGALDAAAKMFSKAFDSGIIPMEFVNKMKKEGKLIMGIGHRVKSINNPDMRVQILKDYVRQHFPATPLLDYALEVEKITTSKKPNLILNVDGLIGVAFVDMLRNCGSFTREEADEYIDIGALNGIFVLGRSMGFIGHYLDQKRLKQGLYRHPWDDISYVLPEHMSM

SEQ ID NO: 29291 - protein, 153 aa, Homo sapiens
ITEAGAAKMKFNPFVTSDRSKNRKRHFNAPSHIRRKIMSSPLSKELRQKYNVRSMPIRKDDEVQVVRGHYKGQQIGKVVQVYRKKYVIYIERVQREKANGTTVHVGIHPSKVVITRLKLDKDRKKILERKAKSRQVGKEKGKYKEETIEKMQE

SEQ ID NO: 29292 - protein, 19 aa, Homo sapiens
LPLLVLLVCSFGADLVPLL

SEQ ID NO: 29293 - protein, 47 aa, Homo sapiens
VNTAGWSMAAGLPGPPALKRSALLSFLDCTALASPHLPMTSSMSLLM

SEQ ID NO: 29294 - protein, 11 aa, Homo sapiens
VFHLMIPKQGN

SEQ ID NO: 29295 - protein, 15 aa, Homo sapiens
RRTQIIRNKVWLLIL

SEQ ID NO: 29296 - protein, 17 aa, Homo sapiens
VKQLKVLIPFLFVIGMR

SEQ ID NO: 29297 - protein, 210 aa, Homo sapiens
IPLLHSQLLQLSRASMAAWKSWTALRLCATVVVLDMVVCKGFVEDLDESFKENRNDDIWLVDFYAPWCGHCKKLEPIWNEVGLEMKSIGSPVKVGKMDATSYSSIASEFGVRGYPTIKLLKGDLAYNYRGPRTKDDIIEFAHRVSGALIRPLPSQQMFEHMQKRHRVFFVYVGGESPLKEKYIDAASELIVYTYFFSASEEVVPEVIFKI

SEQ ID NO: 29298 - protein, 36 aa, Homo sapiens
VRASTLLLLALLAPRSLGNRLGTPPCHPLRPTSRKR

SEQ ID NO: 29299 - protein, 7 aa, Homo sapiens
LILFLSG

SEQ ID NO: 29300 - protein, 36 aa, Homo sapiens
LTGLVRPVWLLLWKQCCSYWKIKGKASPWWGKVWLR

SEQ ID NO: 29301 - protein, 566 aa, Homo sapiens
TASVLQSVSLEVTRATAGMVLAELYVSDREGSDATGDGTKEKPFKTGLKALMTVGKEPFPTIYVDSQKENERWNVISKSQLKNIKKMWHREQMKSESREKKEAEDSLRREKNLEEAKKITIKNDPSLPEPKCVKIGALEGYRGQRVKVFGWVHRLRRQGKNLMFLVLRDGTGYLQCVLADELCQCYNGVLLSTESSVAVYGMLNLTPKGKQAPGGHELSCDFWELIGLAPAGGADNLINEESDVDVQLNNRHMMIRGENMSKILKARSMVTRCFRDHFFDRGYYEVTPPTLVQTQVEGGATLFKLDYFGEEAFLTQSSQLYLETCLPALGDVFCIAQSYRAEQSRTRRHLAEYTHVEAECPFLTFDDLLNRLEDLVCDVVDRILKSPAGSIVHELNPNFQPPKRPFKRMNYSDAIVWLKEHDVKKEDGTFYEFGEDIPEAPERLMTDTINEPILLCRFPVEIKSFYMQRCPEDSRLTESVDVLMPNVGEIVGGSMRIFDSEEILAGYKREGIDPTPYYWYTDQRKYGTCPHGGYGLGLERFLTWILNRYHIRDVCLYPRFVQRCTP

SEQ ID NO: 29302 - protein, 56 aa, Homo sapiens
ISWRDPFRHSLQNRGGGCWLWRCREERRLPGMFATELPGADEWPENVPQKGAGQLE

SEQ ID NO: 29303 - protein, 36 aa, Homo sapiens
TTVGTLFLALGTLGSERLQVSPPELLSLCQLRCVPL

SEQ ID NO: 29304 - protein, 11 aa, Homo sapiens
ISPISNRISSA

SEQ ID NO: 29305 - protein, 18 aa, Homo sapiens
VVSLLRVTLSCRLNPGCL

SEQ ID NO: 29306 - protein, 79 aa, Homo sapiens
IRAPARMIEVVCNDRLGKKVRVKCNTDDTIGDLKKLIAAQTGTRWNKIVLKKWYTIFKDHVSLGDYEIHDGMNLELYYQ

SEQ ID NO: 29307 - protein, 11 aa, Homo sapiens
MPAVPAWGSGR

SEQ ID NO: 29308 - protein, 30 aa, Homo sapiens
ISSLFSFPFPFPKPEGAEVPTEKVEAVPGE

SEQ ID NO: 29309 - protein, 22 aa, Homo sapiens
LCTHCKCRRFWWLLLPLPWVTL

SEQ ID NO: 29310 - protein, 34 aa, Homo sapiens
IWKLEGTLVDGALCVACKMLKTQILETKCVSEEG

SEQ ID NO: 29311 - protein, 19 aa, Homo sapiens
VWADRLPARLCQDLVPLGP

SEQ ID NO: 29312 - protein, 12 aa, Homo sapiens
LVGKSGIPEREA

SEQ ID NO: 29313 - protein, 520 aa, Homo sapiens
TRGARRVVGVPGACPHGTQEGLARVPSAEPGGGGRGPGAAMGPGPPAAGAAPSPRPLSLVARLSYAVGHFLNDLCASMWFTYLLLYLHSVRAYSSRGAGLLLLLGQVADGLCTPLVGYEADRAASCCARYGPRKAWHLVGTVCVLLSFPFIFSPCLGCGAATPEWAALLYYGPFIVIFQFGWASTQISHLSLIPELVTNDHEKVELTALRYAFTVVANITVYGAAWLLLHLQGSSRVEPTQDISISDQLGGQDVPVFRNLSLLVVGVGAVFSLLFHLGTRERRRPHAEEPGEHTPLLAPATAQPLLLWKHWLREPAFYQVGILYMTTRLIVNLSQTYMAMYLTYSLHLPKKFIATIPLVMYLSGFLSSFLMKPINKCIGRNMTYFSGLLVILAFAAWVALAEGLGVAVYAAAVLLGAGCATILVTSLAMTADLIGPHTNSGAFVYGSMSFLDKVANGLAVMAIQSLHPCPSELCCRACVSFYHWAMVAVTGGVGVAAALCLCSLLLWPTRLRRWDRDARP

SEQ ID NO: 29314 - protein, 13 aa, Homo sapiens
IAADTAAVWLGLL

SEQ ID NO: 29315 - protein, 865 aa, Homo sapiens
IPAFACAAAFLLHLFSSASAGAMAKPLTDSEKRKQISVRGLAGLGDVAEVRKSFNRHLHFTLVKDRNVATPRDYFFALAHTVRDHLVGRWIRTQQHYYERDPKRIYYLSLEFYMGRTLQNTMVNLGLQNACDEAIYQLGLDLEELEEIEEDAGLGNGGLGRLAACFLDSMATLGLAAYGYGIRYEFGIFNQKIVNGWQVEEADDWLRYGNPWEKARPEYMLPVHFYGRVEHTPDGVKWLDTQVVLAMPYDTPVPGYKNNTVNTMRLWSAKAPNDFKLQDFNVGDYIEAVLDRNLAENISRVLYPNDNFFEGKELRLKQEYFVVAATLQDIIRRFKSSKFGCRDPVRTCFETFPDKVAIQLNDTHPALSIPELMRILVDVEKVDWDKAWEITKKTCAYTNHTVLPEALERWPVSMFEKLLPRHLEIIYAINQRHLDHVAALFPGDVDRLRRMSVIEEGDCKRINMAHLCVIGSHAVNGVARIHSEIVKQSVFKDFYELEPEKFQNKTNGITPRRWLLLCNPGLADTIVEKIGEEFLTDLSQLKKLLPLVSDEVFIRDVAKVKQENKLKFSAFLEKEYKVKINPSSMFDVHVKRIHEYKRQLLNCLHVVTLYNRIKRDPAKAFVPRTVMIGGKAAPGYHMAKLIIKLVTSIGDVVNHDPVVGDRLKVIFLENYRVSLAEKVIPAADLSQQISTAGTEASGTGNMKFMLNGALTIGTMDGANVEMAEEAGAENLFIFGLRVEDVEALDRKGYNAREYYDHLPELKQAVDQISSGFFSPKEPDCFKDIVNMLMHHDRFKVFADYEAYMQCQAQVDQLYRNPKEWTKKVIRNIACSGKFSSDRTITEYAREIWGVEPSDLQIPPPNIPRD

SEQ ID NO: 29316 - protein, 649 aa, Homo sapiens
TATRGSKMATAMDWLPWSLLLFSLMCETSAFYVPGVAPINFHQNDPVEIKAVKLTSSRTQLPYEYYSLPFCQPSKITYKAENLGEVLRGDRIVNTPFQVLMNSEKKCEVLCSQSNKPVTLTVEQSRLVAERITEDYYVHLIADNLPVATRLELYSNRDSDDKKKEKDVQFEHGYRLGFTDVNKIYLHNHLSFILYYHREDMEEDQEHTYRVVRFEVIPQSIRLEDLKADEKSSCTLPEGTNSSPQEIDPTKENQLYFTYSVHWEESDIKWASRWDTYLTMSDVQIHWFSIINSVVVVFFLSGILSMIIIRTLRKDIANYNKEDDIEDTMEESGWKLVHGDVFRPPQYPMILSSLLGSGIQLFCMILIVIFVAMLGMLSPSSRGALMTTACFLFMFMGVFGGFSAGRLYRTLKGHRWKKGAFCTATLYPGVVFGICFVLNCFIWGKHSSGAVPFPTMVALLCMWFGISLPLVYLGYYFGFRKQPYDNPVRTNQIPRQIPEQRWYMNRFVGILMAGILPFGAMFIELFFIFSAIWENQFYYLFGFLFLVFIILVVSCSQISIVMVYFQLCAEDYRWWWRNFLVSGGSAFYVLVYAIFYFVNKLDIVEFIPSLLYFGYTALMVLSFWLLTGTIGFYAAYMFVRKIYAAVKID

SEQ ID NO: 29317 - protein, 12 aa, Homo sapiens
LQSGFIRYCPAR

SEQ ID NO: 29318 - protein, 12 aa, Homo sapiens
ISSFWWLISGGT

SEQ ID NO: 29319 - protein, 300 aa, Homo sapiens
ISSVKTCTMKSEAKDGEEESLQTAFKKLRVDASGSVASLSVGEGTGVRAPVRTATDDTKPKTTCASKDSWHGSTRKSSRGAVRTQRRRRSKSPVLHPPKFIHCSTIASSSSSQLKHKSQTDSPDGSSGLGISSPKEFSAGESSTSLDANHTGAVVEPLRTSVPRLPSESKKEDSSDATQVPQASLKASDLSDFQSVSKLNQGKPCTCIGKECQCKRWHDMEVYSFSGLQSVPPLAPERRSTLEDYSQSLHARTLSGSPRSCSEQARVFVDDVTIEDLSGYMEYYLYIPKKMSHMAEMMYT

SEQ ID NO: 29320 - protein, 239 aa, Homo sapiens
IRAIRTATMTVGKSSKMLQHIDYRMRCILQDGRIFIGTFKAFDKHMNLILCDCDEFRKIKPKNSKQAEREEKRVLGLVLLRGENLVSMTVEGPPPKDTGIARVPLAGAAGGPGIGRAAGRGIPAGVPMPQAPAGLAGPVRGVGGPSQQVMTPQGRGTVAAAAAAATASIAGAPTQYPPGRGGPPPPMGRGAPPPGMMGPPPGMRPPMGPPMGIPPGRGTPMGMPPPGMRPPPPGMRGLL

SEQ ID NO: 29321 - protein, 248 aa, Homo sapiens
IRAIRTATMTVGKSSKMLQHIDYRMRCILQDGRIFIGTFKAFDKHMNLILCDCDEFRKIKPKNSKQAEREEKRVLGLVLLRGENLVSMTVEGPPPKDTGIARVPLAGAAGGPGIGRAAGRGIPAGVPMPQAPAGLAGPVRGVGGPSQQVMTPQGRGTVAAAAAAATASIAGAPTQYPPGRGGPPPPMGRGAPPPGMMGPPPGMRPPMGPPMGIPPGRGTPMGMPPPGMRPPPPGMRGPPPPGMRPPRP

SEQ ID NO: 29322 - protein, 68 aa, Homo sapiens
IAGVLAIRPDELRFRYSMVAYWRQAGLSYIRYSQICAKAVRDALKTEFKANAEKTSGSNVKIVKVKKE

SEQ ID NO: 29323 - protein, 26 aa, Homo sapiens
LLLFTLWVHTAFMSCNTDREDLQLHS

SEQ ID NO: 29324 - protein, 25 aa, Homo sapiens
LEPVTPWLVSLWMVVATEMAAQLEC

SEQ ID NO: 29325 - protein, 33 aa, Homo sapiens
LRGHGGDRAQEADGRVQTINTESSGRNCSRPHE

SEQ ID NO: 29326 - protein, 198 aa, Homo sapiens
KMHFRNFNYSFSSLIACVANSDIFSESETRAKFESLFRTYDKDITFQYFKSFKRVRINFSNPFSAADARLQLHKTEFLGKEMKLYFAQTLHIGSSHLAPPNPDKQFLISPPASPPVGWKQVEDATPVINYDLLYAISKLGPGEKYELHAATDTTPSVVVHVCESDQEKEEEEEMERMRRPKPKIIQTRRPEYTPIHLS

SEQ ID NO: 29327 - protein, 16 aa, Homo sapiens
LPAAPGYRGHGAASRA

SEQ ID NO: 29328 - protein, 8 aa, Homo sapiens
MAAGGTRR

SEQ ID NO: 29329 - protein, 29 aa, Homo sapiens
LHLQDRRMETSPLRLVNLNLAQGVTTSPA

SEQ ID NO: 29330 - protein, 9 aa, Homo sapiens
MADRVSAGF

SEQ ID NO: 29331 - protein, 15 aa, Homo sapiens
MDLTFLLGFSVIVSP

SEQ ID NO: 29332 - protein, 21 aa, Homo sapiens
LFTGLALLSPWLSAMLTCKSR

SEQ ID NO: 29333 - protein, 34 aa, Homo sapiens
VPDVWCLVFLPLWAADIPPCFGFLVGSEGQQEAG

SEQ ID NO: 29334 - protein, 31 aa, Homo sapiens
IAADPAPRETPENPPWPPLSPWLLASCCCCG

SEQ ID NO: 29335 - protein, 70 aa, Homo sapiens
ILMGDQPCASGRSTLPPGNAREAKPPKKRCLLAPRWDYPEGTPNGGSTTLPSAPPPASAGLKSHPPPPEK

SEQ ID NO: 29336 - protein, 9 aa, Homo sapiens
MWKNSLSLM

SEQ ID NO: 29337 - protein, 451 aa, Homo sapiens
ITMMLSTEGREGFVVKVRGLPWSCSADEVMRFFSDCKIQNGTSGIRFIYTREGRPSGEAFVELESEEEVKLALKKDRETMGHRYVEVFKSNSVEMDWVLKHTGPNSPDTANDGFVRLRGLPFGCSKEEIVQFFSGLEIVPNGMTLPVDFQGRSTGEAFVQFASQEIAEKALKKHKERIGHRYIEIFKSSRAEVRTHYDPPRKLMAMQRPGPYDRPGAGRGYNSIGRGAGFERMRRGAYGGGYGGYDDYGGYNDGYGFGSDRFGRDLNYCFSGMSDHRYGDGGSSFQSTTGHCVHMRGLPYRATENDIYNFFSPLNPMRVHIEIGPDGRVTGEADVEFATHEDAVAAMAKDKANMQHRYVELFLNSTAGTSGGAYDHSYVELFLNSTAGASGGAYGSQMMGGMGLSNQSSYGGPASQQLSGGYGGGYGGQSSMSGYDQVLQENSSDYQSNLA

SEQ ID NO: 29338 - protein, 16 aa, Homo sapiens
KVPSLRKLLILWDWPL

SEQ ID NO: 29339 - protein, 22 aa, Homo sapiens
LSGTMIWANLTLFSSAIPILLA

SEQ ID NO: 29340 - protein, 8 aa, Homo sapiens
MVLPRPPL

SEQ ID NO: 29341 - protein, 11 aa, Homo sapiens
LILLFVMKAIF

SEQ ID NO: 29342 - protein, 1595 aa, Homo sapiens
RKMAAAAVVVPAEWIKNWEKSGRGEFLHLCRILSENKSHDSSTYRDFQQALYELSYHVIKGNLKHEQASNVLSDISEFREDMPSILADVFCILDIETNCLEEKSKRDYFTQLVLACLYLVSDTVLKERLDPETLESLGLIKQSQQFNQKSVKIKTKLFYKQQKFNLLREENEGYAKLIAELGQDLSGSITSDLILENIKSLIGCFNLDPNRVLDVILEVFECRPEHDDFFISLLESYMSMCEPQTLCHILGFKFKFYQEPNGETPSSLYRVAAVLLQFNLIDLDDLYVHLLPADNCIMDEHKREIAEAKQIVRKLTMVVLSSEKMDEREKEKEKEEEKVEKPPDNQKLGLLEALLKIGDWQHAQNIMDQMPPYYAASHKLIALAICKLIHITIEPLYRRVGVPKGAKGSPVNALQNKRAPKQAESFEDLRRDVFNMFCYLGPHLSHDPILFAKVVRIGKSFMKEFQSDGSKQEDKEKTEVILSCLLSITDQVLLPSLSLMDCNACMSEELWGMFKTFPYQHRYRLYGQWKNETYNSHPLLVKVKAQTIDRAKYIMKRLTKENVKPSGRQIGKLSHSNPTILFDYILSQIQKYDNLITPVVDSLKYLTSLNYDVLAYCIIEALANPEKERMKHDDTTISSWLQSLASFCGAVFRKYPIDLAGLLQYVANQLKAGKSFDLLILKEVVQKMAGIEITEEMTMEQLEAMTGGEQLKAEGGYFGQIRNTKKSSQRLKDALLDHDLALPLCLLMAQQRNGVIFQEGGEKHLKLVGKLYDQCHDTLVQFGGFLASNLSTEDYIKRVPSIDVLCNEFHTPHDAAFFLSRPMYAHHISSKYDELKKSEKGSKQQHKVHKYITSCEMVMAPVHEAVVSLHVSKVWDDISPQFYATFWSLTMYDLAVPHTSYEREVNKLKVQMKAIDDNQEMPPNKKKKEKERCTALQDKLLEEEKKQMEHVQRVLQRLKLEKDNWLLAKSTKNETITKFLQLCIFPRCIFSAIDAVYCARFVELVHQQKTPNFSTLLCYDRVFSDIIYTVASCTENEASRYGRFLCCMLETVTRWHSDRATYEKECGNYPGFLTILRATGFDGGNKADQLDYENFRHVVHKWHYKLTKASVHCLETGEYTHIRNILIVLTKILPWYPKVLNLGQALERRVHKICQEEKEKRPDLYALAMGYSGQLKSRKSYMIPENEFHHKDPPPRNAVASVQNGPGGGPSSSSIGSASKSDESSTEETDKSRERSQCGVKAVNKASSTTPKGNSSNGNSGSNSNKAVKENDKEKGKEKEKEKKEKTPATTPEARVLGKDGKEKPKEERPNKDEKARETKERTPKSDKEKEKFKKEEKAKDEKFKTTVPNAESKSTQEREREKEPSRERDIAKEMKSKENVKGGEKTPVSGSLKSPVPRSDIPEPEREQKRRKIDTHPSPSHSSTVKDSLIELKESSAKLYINHTPPPLSKSKEREMDKKDLDKSRERSREREKKDEKDRKERKRDHSNNDREVPPDLTKRRKEENGTMGVSKHKSESPCESPYPNEKDKEKNKSKSSGKEKGSDSFKSEKMDKISSGGKKESRHDKEKIEKKEKRDSSGGKEEKKHHKSSDKHR

SEQ ID NO: 29343 - protein, 35 aa, Homo sapiens
ILLAGFPSCRSEPEAWSLLETGGLLPGDPPPKPTS

SEQ ID NO: 29344 - protein, 30 aa, Homo sapiens
ILDYIKDEIACIREQVQNRIIGSATNRRNY

SEQ ID NO: 29345 - protein, 252 aa, Homo sapiens
IAQAASEVPGSGGPRRGAVWCMCGNTMSVPLLTDAATVSGAERETAAVIFLHGLGDTGHSWADALSTIRLPHVKYICPHAPRIPVTLNMKMVMPSWFDLMGLSPDAPEDEAGIKKAAENIKALIEHEMKNGIPANRIVLGGFSQGGALSLYTALTCPHPLAGIVALSCWLPLHRAFPQAANGSAKDLAILQCHGELDPMVPVRFGALTAEKLRSVVTPARVQFKTYPGVMHSSCPQEMAAVKEFLEKLLPPV

SEQ ID NO: 29346 - protein, 29 aa, Homo sapiens
LWCLVGVLIPGLGALIPMLLQDHLEMTMI

SEQ ID NO: 29347 - protein, 35 aa, Homo sapiens
MTTALWSVLLIGLSPKLMISWPMRQREPKWWVPSP

SEQ ID NO: 29348 - protein, 80 aa, Homo sapiens
LMGFQEIKTTFKDGTRPWMGRQMYLSFSFLTVIMRIQTYLQSTKPIIDLYEEMGKVKKIDASKSVDEVFDEVVQIFDKEG

SEQ ID NO: 29349 - protein, 34 aa, Homo sapiens
VVMITWSMCGLVLLERVAGFLCRHSPSIKGLSRP

SEQ ID NO: 29350 - protein, 15 aa, Homo sapiens
MKKLPCSIVFSWTLM

SEQ ID NO: 29351 - protein, 613 aa, Homo sapiens
TSGSPDPPRPESRWRPPPGPAGPFILRSFVRLLWGFLIQAAKNFEVWKIATVFVSKGSSPDPASLITMKNQDKKNGAAKQSNPKSSPGQPEAGPEGAQERPSQAAPAVEAEGPGSSQAPRKPEGAQARTAQSGALRDVSEELSRQLEDILSTYCVDNNQGGPGEDGAQGEPAEPEDAEKSRTYVARNGEPEPTPVVNGEKEPSKGDPNTEEIRQSDEVGDRDHRRPQEKKKAKGLGKEITLLMQTLNTLSTPEEKLAALCKKYAELLEEHRNSQKQMKLLQKKQSQLVQEKDHLRGEHSKAVLARSKLESLCRELQRHNRSLKEEGVQRAREEEEKRKEVTSHFQVTLNDIQLQMEQHNERNSKLRQENMELAERLKKLIEQYELREEHIDKVFKHKDLQQQLVDAKLQQAQEMLKEAEERHQREKDFLLKEAVESQRMCELMKQQETHLKQQLALYTEKFEEFQNTLSKSSEVFTTFKQEMEKMTKKIKKLEKETTMYRSRWESSNKALLEMAEEKTVRDKELEGLQVKIQRLEKLCRALQTERNDLNKRVQDLSAGGQGSLTDSGPERRPEGPGAQAPSSPRVTEAPCYPGAPSTEASGQTGPQEPTSARA

SEQ ID NO: 29352 - protein, 42 aa, Homo sapiens
RNPPRGIQTQKRSGRVTRSETETIEGHRRRKKPRVWGRRSRC

SEQ ID NO: 29353 - protein, 27 aa, Homo sapiens
KLFQPALQVMDLRQILFLRRLRRNLKR

SEQ ID NO: 29354 - protein, 28 aa, Homo sapiens
ISGSPNNSERAMRAVGEMCKGPGAARAL

SEQ ID NO: 29355 - protein, 56 aa, Homo sapiens
VPFQWTWAVVAVVFLLSVQRWQVSKSPQKHAPDSVPLLSCNMLIRTTWHLPEQDFQ

SEQ ID NO: 29356 - protein, 251 aa, Homo sapiens
IGASMLRFIQKFSQASSKILKYSFPVGLRTSRTDILSLKMSLQQNFSPCPRPWLSSSFPAYMSKTQCYHTSPCSFKKQQKQALLARPSSTITYLTDSPKPALCVTLAGLIPFVAPPLVMLMTKTYIPILAFTQMAYGASFLSFLGGIRWGFALPEGSPAKPDYLNLASSAAPLFFSWFAFLISERLSEAIVTVIMGMGVAFHLELFLLPHYPNWFKALRIVVTLLATFSFIITLVVKSSFPEKGHKRPGQV

SEQ ID NO: 29357 - protein, 12 aa, Homo sapiens
MWLCSLMWIAWI

SEQ ID NO: 29358 - protein, 22 aa, Homo sapiens
LDLLFLTSRWLAIIPLSGSWTL

SEQ ID NO: 29359 - protein, 18 aa, Homo sapiens
LVLIIMCYPWTVLLFRHF

SEQ ID NO: 29360 - protein, 18 aa, Homo sapiens
VSQAVDPAVALRLLLACL

SEQ ID NO: 29361 - protein, 14 aa, Homo sapiens
LFLMLLQMSSLKTT

SEQ ID NO: 29362 - protein, 14 aa, Homo sapiens
IHCLNVLVTALLLE

SEQ ID NO: 29363 - protein, 628 aa, Homo sapiens
IPRSDSARPRSPRLPGASREPAGRRTPTPSSLCPSTRAPRPFRDPCPAGSAANLPAMETPSQRRATRSGAQASSTPLSPTRITRLQEKEDLQELNDRLAVYIDRVRSLETENAGLRLRITESEEVVSREVSGIKAAYEAELGDARKTLDSVAKERARLQLELSKVREEFKELKARNTKKEGDLIAAQARLKDLEALLNSKEAALSTALSEKRTLEGELHDLRGQVAKLEAALGEAKKQLQDEMLRRVDAENRLQTMKEELDFQKNIYSEELRETKRRHETRLVEIDNGKQREFESRLADALQELRAQHEDQVEQYKKELEKTYSAKLDNARQSAERNSNLVGAAHEELQQSRIRIDSLSAQLSQLQKQLAAKEAKLRDLEDSLARERDTSRRLLAEKEREMAEMRARMQQQLDEYQELLDIKLALDMEIHAYRKLLEGEEERLRLSPSPTSQRSRGRASSHSSQTQGGGSVTKKRKLESTESRSSFSQHARTSGRVAVEEVDEEGKFVRLRNKSNEDQSMGNWQIKRQNGDDPLLTYRFPPKFTLKAGQVVTIWAAGAGATHSPPTDLVWKAQNTWGCGNSLRTALINSTGEEVAMRKLVRSVTVVEDDEDEDGDDLLHHHHVSGSRR

SEQ ID NO: 29364 - protein, 40 aa, Homo sapiens
KAFFPCYLCRYFIFLAFLEITTSCGSVSGNFTDLSPPSHK

SEQ ID NO: 29365 - protein, 10 aa, Homo sapiens
LTETWRSQKD

SEQ ID NO: 29366 - protein, 9 aa, Homo sapiens
ILLSGSQGR

SEQ ID NO: 29367 - protein, 9 aa, Homo sapiens
MKRAKSNRP

SEQ ID NO: 29368 - protein, 25 aa, Homo sapiens
VLCTELPTITVAAAGSTGMGRESQR

SEQ ID NO: 29369 - protein, 7 aa, Homo sapiens
LWIAFLG

SEQ ID NO: 29370 - protein, 38 aa, Homo sapiens
LARLLVFVLFQAALSSGVTRCQSAEKFIVQHHHKLTME

SEQ ID NO: 29371 - protein, 18 aa, Homo sapiens
KFVAFLPISLLLSSLRKI

SEQ ID NO: 29372 - protein, 51 aa, Homo sapiens
IKQHLRLKSLIGSMNKRRTSHRIWKNKLPEYMRRPKGPVTKLWRSMPAWLS

SEQ ID NO: 29373 - protein, 13 aa, Homo sapiens
LILVLSWIVFGKI

SEQ ID NO: 29374 - protein, 60 aa, Homo sapiens
RWPRMLRRPLAGLAAAALGRAPPDGLLCSLPGVAVEDPVQDSAGFSFSLMDRPKHSRAAS

SEQ ID NO: 29375 - protein, 11 aa, Homo sapiens
LPHGVKKHASM

SEQ ID NO: 29376 - protein, 7 aa, Homo sapiens
MFFLWRH

SEQ ID NO: 29377 - protein, 22 aa, Homo sapiens
KKFLWMIINLALMNFIVNMEQT

SEQ ID NO: 29378 - protein, 34 aa, Homo sapiens
LLPEPPRGSDVCLSLFPSRPCVCSLPKKLVLSLC

SEQ ID NO: 29379 - protein, 35 aa, Homo sapiens
VTFVRPANLIKILLESALLVSYLCQISSWETAVTT

SEQ ID NO: 29380 - protein, 262 aa, Homo sapiens
IPVPDFIMGNSCYNIVATLLLVLNFERTRSLQDPCSNCPAGTFCDNNRNQICSPCPPNSFSSAGGQRTCDICRQCKGVFRTRKECSSTSNAECDCTPGFHCLGAGCSMCEQDCKQGQELTKKGCKDCCFGTFNDQKRGICRPWTNCSLDGKSVLVNGTKERDVVCGPSPADLSPGASSVTPPAPAREPGHSPQIISFFLALTSTALLFLLFFLTLRFSVVKRGRKKLLYIFKQPFMRPVQTTQEEDGCSCRFPEEEEGGCEL

SEQ ID NO: 29381 - protein, 11 aa, Homo sapiens
LYSYGDPKEKA

SEQ ID NO: 29382 - protein, 52 aa, Homo sapiens
RKGGMCTVLHAMMIMTDTDVLEAEVMKGGDQEVGLLITTIEDRIVLESKCAV

SEQ ID NO: 29383 - protein, 36 aa, Homo sapiens
MTYSLFCFTFWMNGFISSVLMNSSYPGDRVLLCCRG

SEQ ID NO: 29384 - protein, 10 aa, Homo sapiens
LTESLNYLHD

SEQ ID NO: 29385 - protein, 18 aa, Homo sapiens
RWPPRFLSVFFAFASTAP

SEQ ID NO: 29386 - protein, 12 aa, Homo sapiens
LAFRALVLLDLL

SEQ ID NO: 29387 - protein, 28 aa, Homo sapiens
TPTTTCREQPRPKPEQGPESRLEWGLRV

SEQ ID NO: 29388 - protein, 16 aa, Homo sapiens
MIWAFYLKMMYHIFWG

SEQ ID NO: 29389 - protein, 14 aa, Homo sapiens
MGCSSRMLTAVLLL

SEQ ID NO: 29390 - protein, 9 aa, Homo sapiens
LFLIYMIIS

SEQ ID NO: 29391 - protein, 20 aa, Homo sapiens
IAYGALACGMQTVLTTLEML

SEQ ID NO: 29392 - protein, 114 aa, Homo sapiens
TILSAGNWLLLVSLLLKFEMLYLIGLGLGDAKDITVKGLEVVRRCSRVYLEAYTSVLTVGKEALEEFYGRKLVVADREEVEQEADNILKDADISDVAFLVVGDPFGHLETRKLL

SEQ ID NO: 29393 - protein, 25 aa, Homo sapiens
MLISVMLHSLWLVIHLGPQHTVILF

SEQ ID NO: 29394 - protein, 38 aa, Homo sapiens
IVMTLAVLQPLLAVFRPPLHDPSGSDVPGNGFTRTESS

SEQ ID NO: 29395 - protein, 10 aa, Homo sapiens
VFLWLSFIQV

SEQ ID NO: 29396 - protein, 10 aa, Homo sapiens
LALWAGYWFV

SEQ ID NO: 29397 - protein, 28 aa, Homo sapiens
LWYLICVLQRTLLAANRKLVHPSSDNVF

SEQ ID NO: 29398 - protein, 17 aa, Homo sapiens
LEILLVLLMLQSDSPID

SEQ ID NO: 29399 - protein, 20 aa, Homo sapiens
TDMVLWSLMICVMQMMLFMN

SEQ ID NO: 29400 - protein, 8 aa, Homo sapiens
LNLYLILI

SEQ ID NO: 29401 - protein, 12 aa, Homo sapiens
RALILLTFLLLK

SEQ ID NO: 29402 - protein, 36 aa, Homo sapiens
LEALLDLDILWENFFGEMLRRSSMSQERIILIHMLD

SEQ ID NO: 29403 - protein, 17 aa, Homo sapiens
MRVMNIFMRLLTLSFSI

SEQ ID NO: 29404 - protein, 10 aa, Homo sapiens
LLAWLCWGAL

SEQ ID NO: 29405 - protein, 15 aa, Homo sapiens
IACTMTLCAFWMNTM

SEQ ID NO: 29406 - protein, 49 aa, Homo sapiens
KWSCAYLWYGLIIYVCSDHPFLPNAAQNPWQTSLLDQTVVGYLVWSKCT

SEQ ID NO: 29407 - protein, 44 aa, Homo sapiens
RVTREEVQRLHFKFWMTDLSGLSGPLSDKMGVFQRDHGSLQLGL

SEQ ID NO: 29408 - protein, 28 aa, Homo sapiens
IGVCLLLISLWGQQEPLSFFVFGDITKN

SEQ ID NO: 29409 - protein, 340 aa, Homo sapiens
VGATAGSITMKRLVCVLLVCSSAVAQLHKDPTLDHHWHLWKKTYGKQYKEKNEEAVRRLIWEKNLKFVMLHNLEHSMGMHSYDLGMNHLGDMTSEEVMSLMSSLRVPSQWQRNITYKSNPNRILPDSVDWREKGCVTEVKYQGSCGACWAFSAVGALEAQLKLKTGKLVSLSAQNLVDCSTEKYGNKGCNGGFMTTAFQYIIDNKGIDSDASYPYKAMDQKCQYDSKYRAATCSKYTELPYGREDVLKEAVANKGPVSVGVDARHPSFFLYRSGVYYEPSCTQNVNHGVLVVGYGDLNGKEYWLVKNSWGHNFGEEGYIRMARNKGNHCGIASFPSYPEI

SEQ ID NO: 29410 - protein, 14 aa, Homo sapiens
ITLIWPMSILCWSY

SEQ ID NO: 29411 - protein, 9 aa, Homo sapiens
LITINILVL

SEQ ID NO: 29412 - protein, 11 aa, Homo sapiens
ISLWMMPVLLA

SEQ ID NO: 29413 - protein, 19 aa, Homo sapiens
LGRTIQRKLMELWIVSAWL

SEQ ID NO: 29414 - protein, 125 aa, Homo sapiens
IQCEPLEAPELGTMDCTHPLGNFSFSSQCAFSCSEGTNLTGIEETTCGPFGNWSSPEPTCQVIQCEPLSAPDLGIMNCSHPLASFSFTSACTFICSEGTELIGKKKTICESSGIWSNPSPICQSE

SEQ ID NO: 29415 - protein, 12 aa, Homo sapiens
LCCLWSLWRVYL

SEQ ID NO: 29416 - protein, 16 aa, Homo sapiens
MVLLLVTFLSMDDLLG

SEQ ID NO: 29417 - protein, 39 aa, Homo sapiens
LLLLLGLFIGSGTLGEDTVGKISLGSWPLGPWRSQQSKR

SEQ ID NO: 29418 - protein, 28 aa, Homo sapiens
VRRSPARLNAPRSHRHPLEWPTGDLHMA

SEQ ID NO: 29419 - protein, 56 aa, Homo sapiens
MRRCRKLVLAYIPVSLCSITAVTPTVRLCSMGPTSYCEQSETSRWERSSPSATWIC

SEQ ID NO: 29420 - protein, 13 aa, Homo sapiens
TKLALKSVLLMLQ

SEQ ID NO: 29421 - protein, 44 aa, Homo sapiens
RPRWKCLTTCWTSRWPTVCSGEGLMIAARIPSMSTMRSSKLTLR

SEQ ID NO: 29422 - protein, 965 aa, Homo sapiens
IRVMASNSTKSFLADAGYGEQELDANSALMELDKGLRSGKLGEQCEAVVRFPRLFQKYPFPILINSAFLKLADVFRVGNNFLRLCVLKVTQQSEKHLEKILNVDEFVKRIFSVIHSNDPVARAITLRMLGSLASIIPERKNAHHSIRQSLDSHDNVEVEAAVFAAANFSAQSKDFAVGICNKISEMIQGLATPVDLKLKLIPILQHMHHDAILASSARQLLQQLVTSYPSTKMVIVSLHTFTLLAASSLVDTPKQIQLLLQYLKNDPRKAVKRLAIQDLKLLANKTPHTWSRENIQALCECALQTPYDSLKLGMLSVLSTLSGTIAIKHYFSIVPGNVSSSPRSSDLVKLAQECCYHNNRGIAAHGVRVLTNITVSCQEKDLLALEQDAVFGLESLLVLCSQDDSPGAQATLKIALNCMVKLAKGRPHLSQSVVETLLTQLHSAQDAARILMCHCLAAIAMQLPVLGDGMLGDLMELYKVIGRSATDKQQELLVSLATVIFVASQKALSVESKAVIKQQLESVSNGWTVYRIARQASRMGNHDMAKELYQSLLTQVASEHFYFWLNSLKEFSHAEQCLTGLQEENYSSALSCIAESLKFYHKGIASLTAASTPLNPLSFQCEFVKLRIDLLQAFSQLICTCNSLKTSPPPAIATTIAMTLGNDLQRCGRISNQMKQSMEEFRSLASRYGDLYQASFDADSATLRNVELQQQSCLLISHAIEALILDPESASFQEYGSTGTAHADSEYERRMMSVYNHVLEEVESLNRKYTPVSYMHTACLCNAIIALLKVPLSFQRYFFQKLQSTSIKLALSPSPRNPAEPIAVQNNQQLALKVEGVVQHGSKPGLFRKIQSVCLNVSSTLQSKSGQDYKIPIDNMTNEMEQRVEPHNDYFSTQFLLNFAILGTHNITVESSVKDANGIVWKTGPRTTIFVKSLEDPYSQQIRLQQQQAQQPLQQQQQRNAYTRF

SEQ ID NO: 29423 - protein, 20 aa, Homo sapiens
ILYFATWLELQLQLGYMALI

SEQ ID NO: 29424 - protein, 12 aa, Homo sapiens
VSVVVSLTDREV

SEQ ID NO: 29425 - protein, 60 aa, Homo sapiens
RIVKMKKKIIKMCANNGRRHLKQLLNRERCSWKMWAVRKNKKRRMRHHSRRKIPAAMKIS

SEQ ID NO: 29426 - protein, 29 aa, Homo sapiens
IIGMPLPVLLCLTLPMPLPSATARGGNRT

SEQ ID NO: 29427 - protein, 59 aa, Homo sapiens
VECPTEGTTTRTSEDEETIVATKINLRATTSGSRVNSGVRSHGVSIITKDIIEYPNKTN

SEQ ID NO: 29428 - protein, 45 aa, Homo sapiens
MLRGPRRDRQETLPKMPSSLPKRSFSRNYSTVNWLPKPLRSSRRQ

SEQ ID NO: 29429 - protein, 113 aa, Homo sapiens
TPSGGGRNRSASSSWVGTMAGITTIEAVKRKIQVLQQQADDAEERAERLQREVEGERRAREQAEAEVASLNRRIQLVEEELDRAQERLATALQKLEEAEKAADESERWMSRLD

SEQ ID NO: 29430 - protein, 52 aa, Homo sapiens
ISAPTCWICETLVRLSRVYAKHSLIPFWMAMKQPAMGQGSLARMSTYAIRRP

SEQ ID NO: 29431 - protein, 22 aa, Homo sapiens
LLIPGLPRDICKDSCLVFCFRL

SEQ ID NO: 29432 - protein, 22 aa, Homo sapiens
TWMAGILASGLARTLESLSPVA

SEQ ID NO: 29433 - protein, 8 aa, Homo sapiens
MAEKPPVL

SEQ ID NO: 29434 - protein, 14 aa, Homo sapiens
MNLSSWLVMGSGML

SEQ ID NO: 29435 - protein, 27 aa, Homo sapiens
RLPLELASLTRLLLTLSPWLVSLPTKP

SEQ ID NO: 29436 - protein, 38 aa, Homo sapiens
VVLVCHSLVAGSRCRVGAQFSGRHGWLRIREPGAAGWL

SEQ ID NO: 29437 - protein, 16 aa, Homo sapiens
REVRLLLRVLTAGVFS

SEQ ID NO: 29438 - protein, 7 aa, Homo sapiens
MPLPAWG

SEQ ID NO: 29439 - protein, 39 aa, Homo sapiens
MESCTVGCATASSWGCTSSFGRSMGPMCFLHSPQRSFSL

SEQ ID NO: 29440 - protein, 322 aa, Homo sapiens
IGRRGQALMLVSGRRRLLTVLLQAQKWPFQPSRDMRLVQFRAPHLVGPHLGLETGNGGGVINLNAFDPTLPKTMTQFLEQGEATLSVARRALAAQLPVLPRSEVTFLAPVTRPDKVVCVGMNYVDHCKEQNVPVPKEPIIFSKFASSIVGPYDEVVLPPQSQEVDWEVELAVVIGKKGKHIKATDAMAHVAGFTVAHDVSARDWQMRRNGKQWLLGKTFDTFCPLGPALVTKDSVADPHNLKICCRVNGEVVQSGNTNQMVFKTEDLIAWVSQFVTFYPGDVILTGTPPGVGVFRKPPVFLKKGDEVQCEIEELGVIINKVV

SEQ ID NO: 29441 - protein, 14 aa, Homo sapiens
ISISALGSLSGIWI

SEQ ID NO: 29442 - protein, 19 aa, Homo sapiens
MSFTAHSGWWVSLLFWVLD

SEQ ID NO: 29443 - protein, 74 aa, Homo sapiens
TCGVSGAAGGAVGGAGERTPSRRRSLRRREALVPAAGKESLCRQDGGRGAERGQPHHPAAGGTRMSSRKDCADD

SEQ ID NO: 29444 - protein, 82 aa, Homo sapiens
IPGIRGAGRSRPPGILVPACTSEGLQMWWRRQHLPWSISRSWTGTLSWAARSLSRTAQDSWWLPMGSLSPTPMWWLIGAESV

SEQ ID NO: 29445 - protein, 83 aa, Homo sapiens
ISESAGSGQPRAEGLGAGAAGPLRAMAAPVKGNRKQSTEGDALDPPASPKPAGKQNGIQNPISLELTCGRSTKQWRSWGPMSW

SEQ ID NO: 29446 - protein, 619 aa, Homo sapiens
ISESAGSGQPRAEGLGAGAAGPLRAMAAPVKGNRKQSTEGDALDPPASPKPAGKQNGIQNPISLEDSPEAGGEREEEQEREEEQAFLVSLYKFMKERHTPIERVPHLGFKQINLWKIYKAVEKLGAYELVTGRRLWKNVYDELGGSPGSTSAATCTRRHYERLVLPYVRHLKGEDDKPLPTSKPRKQYKMAKENRGDDGATERPKKAKEERRMDQMMPGKTKADAADPAPLPSQEPPRNSTEQQGLASGSSVSFVGASGCPEAYKRLLSSFYCKGTHGIMSPLAKKKLLAQVSKVEALQCQEEGCRHGAEPQASPAVHLPESPQSPKGLTENSRHRLTPQEGLQAPGGSLREEAQAGPCPAAPIFKGCFYTHPTEVLKPVSQHPRDFFSRLKDGVLLGPPGKEGLSVKEPQLVWGGDANRPSAFHKGGSRKGILYPKPKACWVSPMAKVPAESPTLPPTFPSSPGLGSKRSLEEEGAAHSGKRLRAVSPFLKEADAKKCGAKPAGSGLVSCLLGPALGPVPPEAYRGTMLHCPLNFTGTPGPLKGQAALPFSPLVIPAFPAHFLATAGPSPMAAGLMHFPPTSFDSALRHRLCPASSAWHAPPVTTYAAPHFFHLNTKL

SEQ ID NO: 29447 - protein, 48 aa, Homo sapiens
RAWPLGLLCPLWVPAAVLRPTSGSYPASTARGHTASCHHWPKRSSWPR

SEQ ID NO: 29448 - protein, 16 aa, Homo sapiens
KTWQNKHCKKLLFFLL

SEQ ID NO: 29449 - protein, 27 aa, Homo sapiens
MMMVLLFHRLLKWSWIVRSSCYCRILL

SEQ ID NO: 29450 - protein, 26 aa, Homo sapiens
MKAEVCAFFFFSFLVVCTSLGMEGNK

SEQ ID NO: 29451 - protein, 13 aa, Homo sapiens
IQLLSISLLQMWI

SEQ ID NO: 29452 - protein, 29 aa, Homo sapiens
VDERHVAFRSLLRRLWSGWIHLLFFYLPQ

SEQ ID NO: 29453 - protein, 16 aa, Homo sapiens
KRFQFGWCSLWLHSFL

SEQ ID NO: 29454 - protein, 13 aa, Homo sapiens
MVSLMSFLWLKGM

SEQ ID NO: 29455 - protein, 74 aa, Homo sapiens
ITSPRCPVIGKGPMMRAPAPAVAVQMRTSETQPLQSLKNKRKENLLPPSRRKTPNSLAKPLLSYPLVLKEFRRS

SEQ ID NO: 29456 - protein, 15 aa, Homo sapiens
MNLLQEFTRSDRCIC

SEQ ID NO: 29457 - protein, 18 aa, Homo sapiens
LEGVIFACIVMHFLLDLC

SEQ ID NO: 29458 - protein, 17 aa, Homo sapiens
MNLRPFSSPPWNSAPCF

SEQ ID NO: 29459 - protein, 30 aa, Homo sapiens
LILALLHILCNLGPLSALRAGREEVLFGPR

SEQ ID NO: 29460 - protein, 34 aa, Homo sapiens
KLVPVIPVMLSFFLYCQSLNSFNSRTWKRPLSAL

SEQ ID NO: 29461 - protein, 376 aa, Homo sapiens
ILRGKGHTLGLLTRPWRREEDVWVGSGVRGQRAAKWAERAGVGWRLRRLIVFRCRGAEGGTRVGRVRLWKRAAAAHNMHSLATAAPVPTTLAQVDREKIYQWINELSSPETRENALLELSKKRESVPDLAPMLWHSFGTIAALLQEIVNIYPSINPPTLTAHQSNRVCNALALLQCVASHPETRSAFLAAHIPLFLYPFLHTVSKTRPFEYLRLTSLGVIGALVKTDEQEVINFLLTTEIIPLCLRIMESGSELSKTVATFILQKILLDDTGLAYICQTYERFSHVAMILGKMVLQLSKEPSARLLKHVVRCYLRLSDNPRAREALRQCLPDQLKDTTFAQVLKDDTTTKRWLAQLVKNLQEGQVTDPRGIPLPPQ

SEQ ID NO: 29462 - protein, 16 aa, Homo sapiens
MWMLLFSVETWLWRTQ

SEQ ID NO: 29463 - protein, 18 aa, Homo sapiens
IIGCIVAFTLFHLLDMGK

SEQ ID NO: 29464 - protein, 20 aa, Homo sapiens
IIGCIVAFTLFHLLDMDLSP

SEQ ID NO: 29465 - protein, 87 aa, Homo sapiens
IFALFLIRLLARRSRLRRAPPPPPRTPAALSPESLNSRFLFNPLHRITGVPHHVRRSRRHQLRNHHQGLKGEEGSCGRGRKWKRRPC

SEQ ID NO: 29466 - protein, 10 aa, Homo sapiens
MDLIRSFLLT

SEQ ID NO: 29467 - protein, 17 aa, Homo sapiens
LIQHFFLLQSLISMPLA

SEQ ID NO: 29468 - protein, 10 aa, Homo sapiens
LEVVTLWVLL

SEQ ID NO: 29469 - protein, 54 aa, Homo sapiens
VAQARPRRPKGSSRPPGLPLRPLRDPETCRPHFCPPSTMSTSCARQRNPWPTST

SEQ ID NO: 29470 - protein, 19 aa, Homo sapiens
MIPIVTKNFFPCSWMPSCW

SEQ ID NO: 29471 - protein, 31 aa, Homo sapiens
LREKKRLPLGLSWLWSRLDDVTGSLGSLTWP

SEQ ID NO: 29472 - protein, 21 aa, Homo sapiens
IVTAVPRAHAEGFGIPGELPL

SEQ ID NO: 29473 - protein, 32 aa, Homo sapiens
MWVIGCSLKTWALTLLLLPLRSMASRGRRSTM

SEQ ID NO: 29474 - protein, 12 aa, Homo sapiens
MTLTSVMWSLMT

SEQ ID NO: 29475 - protein, 34 aa, Homo sapiens
LAAGKTSSLPPYFLLLLAAAISGDVKKGGERTGR

SEQ ID NO: 29476 - protein, 16 aa, Homo sapiens
LAAVCPMSMLNKRTYF

SEQ ID NO: 29477 - protein, 16 aa, Homo sapiens
VFVLAFLVCSTAVEKY

SEQ ID NO: 29478 - protein, 19 aa, Homo sapiens
RRSLGKQILLAASVQTRQL

SEQ ID NO: 29479 - protein, 19 aa, Homo sapiens
IKNCLIQDLHMIGGLHFKL

SEQ ID NO: 29480 - protein, 55 aa, Homo sapiens
LLNFFMYVTLLLKHQSFSQTYGMASSQIYLIKKKKLFYRNYSQRNLRIDLTHLKY

SEQ ID NO: 29481 - protein, 29 aa, Homo sapiens
KLDWGSLCALALEVILLMEQILLTASKSF

SEQ ID NO: 29482 - protein, 48 aa, Homo sapiens
MILLVWDLMEAMIKIGKPMPAKSSLLRRKEKLRHWMKKFTSNKIWIWI

SEQ ID NO: 29483 - protein, 8 aa, Homo sapiens
IMLLGLLT

SEQ ID NO: 29484 - protein, 20 aa, Homo sapiens
LLLLQVCQAFLVCSLTQLAV

SEQ ID NO: 29485 - protein, 20 aa, Homo sapiens
ISFKLKTISSTFLSPTCLVL

SEQ ID NO: 29486 - protein, 13 aa, Homo sapiens
IFCLMALLFITQA

SEQ ID NO: 29487 - protein, 13 aa, Homo sapiens
MSETILNFLLFII

SEQ ID NO: 29488 - protein, 13 aa, Homo sapiens
IFQIVIIFHLWIC

SEQ ID NO: 29489 - protein, 410 aa, Homo sapiens
TRPRRRRQQLQHHLHPPAMEDLDQSPLVSSSDSPPRPQPAFKYQFVREPEDEEEEEEEEEEDEDEDLEELEVLERKPAAGLSAAPVPTAPAAGAPLMDFGNDFVPPAPRGPLPAAPPVAPERQPSWDPSPVSSTVPAPSPLSAAAVSPSKLPEDDEPPARPPPPPPASVSPQAEPVWTPPAPAPAAPPSTPAAPKRRGSSGSVDETLFALPAASEPVIRSSAVVDLLYWRDIKKTGVVFGASLFLLLSLTVFSIVSVTAYIALALLSVTISFRIYKGVIQAIQKSDEGHPFRAYLESEVAISEELVQKYSNSALGHVNCTIKELRRLFLVDDLVDSLKFAVLMWVFTYVGALFNGLTLLILALISLFSVPVIYERHQAQIDHYLGLANKNVKDAMAKIQAKIPGLKRKAE

SEQ ID NO: 29490 - protein, 18 aa, Homo sapiens
MSQGVGLCSYSFSVGMHN

SEQ ID NO: 29491 - protein, 11 aa, Homo sapiens
IFWNLVFLMSC

SEQ ID NO: 29492 - protein, 18 aa, Homo sapiens
MPPLRSPEYLKIKLKLRD

SEQ ID NO: 29493 - protein, 53 aa, Homo sapiens
VQSNFELPLCSLKRQELRVVGLLTRTFPWASRVYSSPWLSSKHASTLITRNMP

SEQ ID NO: 29494 - protein, 23 aa, Homo sapiens
LEMSVSWILSLILKRLISSWTSL

SEQ ID NO: 29495 - protein, 19 aa, Homo sapiens
LLSKPLKTLICYRRQWKNT

SEQ ID NO: 29496 - protein, 10 aa, Homo sapiens
VKGLLARPPS

SEQ ID NO: 29497 - protein, 26 aa, Homo sapiens
KSLLILFDMMILKGLITSSKQMSSQS

SEQ ID NO: 29498 - protein, 26 aa, Homo sapiens
KILKLQSQLRMGAVMLACVACVRRPS

SEQ ID NO: 29499 - protein, 17 aa, Homo sapiens
VSLILFQLCLWLPGLYL

SEQ ID NO: 29500 - protein, 20 aa, Homo sapiens
TCCGEARSRKGIPPLHRWAV

SEQ ID NO: 29501 - protein, 44 aa, Homo sapiens
IRKKQKREGAGILFLYHLACLFCGNLRAVHFYQGISCFEKSLDS

SEQ ID NO: 29502 - protein, 15 aa, Homo sapiens
LYSFYCLLDFCLVFL

SEQ ID NO: 29503 - protein, 15 aa, Homo sapiens
MRQHLLIMWSACSFF

SEQ ID NO: 29504 - protein, 26 aa, Homo sapiens
MLCSQKDIRYFLLQLVMFLFELQLES

SEQ ID NO: 29505 - protein, 25 aa, Homo sapiens
MQDGGPSPAEHSRAEESAGFLCYSR

SEQ ID NO: 29506 - protein, 18 aa, Homo sapiens
MAAPGALPPRPPPPPPPL

SEQ ID NO: 29507 - protein, 21 aa, Homo sapiens
MDRPGFVAALVLLHFLSPMNM

SEQ ID NO: 29508 - protein, 10 aa, Homo sapiens
LLLRSLLGKK

SEQ ID NO: 29509 - protein, 16 aa, Homo sapiens
MLCSSDEIANKRTKLH

SEQ ID NO: 29510 - protein, 75 aa, Homo sapiens
LLPGAGPVGRRGDIVAVVFPPQSRGWRCRDSAFQRWRAAVTYLAYWTTTRSWPYATLSPTAWCSLRTAKMLFMQY

SEQ ID NO: 29511 - protein, 13 aa, Homo sapiens
IGSLDFLILRILF

SEQ ID NO: 29512 - protein, 32 aa, Homo sapiens
IQSFQCLHLPVLLLGMPSCWVCSLSEVSEKIH

SEQ ID NO: 29513 - protein, 20 aa, Homo sapiens
KVNRKISRALAELHLLAFLA

SEQ ID NO: 29514 - protein, 29 aa, Homo sapiens
LFVTISPRYVLWLCGALAPQVALRILSQA

SEQ ID NO: 29515 - protein, 10 aa, Homo sapiens
MSWTVAILLI

SEQ ID NO: 29516 - protein, 101 aa, Homo sapiens
LPSPGCAAGAGTRLRSPRRLHPRGRSSSRRPRAHHDEEREEVPQPEPGRVEALHLQPDHRRIPGAHRQELGFDLALLPSFLWVPGCTLLIHDVGYASDSQR

SEQ ID NO: 29517 - protein, 293 aa, Homo sapiens
IPAAAAPLAVRAHTMTKNEKKSLNQSLAEWKLFIYNPTTGEFLGRTAKSWGLILLFYLVFYGFLAALFSFTMWVMLQTLNDEVPKYRDQIPSPGLMVFPKPVTALEYTFSRSDPTSYAGYIEDLKKFLKPYTLEEQKNLTVCPDGALFEQKGPVYVACQFPISLLQACSGMNDPDFGYSQGNPCILVKMNRIIGLKPEGVPRIDCVSKNEDIPNVAVYPHNGMIDLKYFPYYGKKLHVGYLQPLVAVQVSFAPNNTGKEVTVECKIDGSANLKSQDDRDKFLGRVMFKITARA

SEQ ID NO: 29518 - protein, 18 aa, Homo sapiens
LKKVTVLWVTMWVLCQRN

SEQ ID NO: 29519 - protein, 93 aa, Homo sapiens
IACLIVAVAALPLLSQRERDTSGQAQPQPQQQPPRRHGGARHKERGCLRGGVGGSLCRMTIRGPAPAPPHLRLPTSKPRKKQTPPRRRRVKSA

SEQ ID NO: 29520 - protein, 19 aa, Homo sapiens
ISSARKSRRKKKIIFSILL

SEQ ID NO: 29521 - protein, 221 aa, Homo sapiens
IRVEEAEAMAETEERSLDNFFAKRDKKKKKERSNRAASAAGAAGSAGGSSGAAGAAGGGAGAGTRPGDGGTASAGAAGPGAATKAVTKDEDEWKELEQKEVDYSGLRVQAMQISSEKEEDDNEKRQDPGDNWEEGGGGGGGMEKSSGPWNKTAPVQAPPAPVIVTETPEPAMTSGVYRPPGARLTTTRKTPQGPPEIYSDTQFPSLQSTAKHVESRNRYLK

SEQ ID NO: 29522 - protein, 20 aa, Homo sapiens
IPAVNCQACRKPEILSLHKG

SEQ ID NO: 29523 - protein, 18 aa, Homo sapiens
KVFVQPVFLPLWVWLLGS

SEQ ID NO: 29524 - protein, 25 aa, Homo sapiens
TAQLVLLAMTFLSYSVLQEKKRLIP

SEQ ID NO: 29525 - protein, 15 aa, Homo sapiens
IQINSIFVVLIWDIF

SEQ ID NO: 29526 - protein, 9 aa, Homo sapiens
IFVLLPYLF

SEQ ID NO: 29527 - protein, 15 aa, Homo sapiens
VLYMVLCLPKRQFST

SEQ ID NO: 29528 - protein, 293 aa, Homo sapiens
IKFSRDKKKKKRKMPADIMEKNSSSPVAATPASVNTTPDKPKTASEHRKSSKPIMEKRRRARINESLSQLKTLILDALKKDSSRHSKLEKADILEMTVKHLRNLQRAQMTAALSTDPSVLGKYRAGFSECMNEVTRFLSTCEGVNTEVRTRLLGHLANCMTQINAMTYPGQPHPALQAPPPPPPGPGGPQHAPFAPPPPLVPIPGGAAPPPGGAPCKLGSQAGEAAKVFGGFQVVPAPDGQFAFLIPNGAFAHSGPVIPVYTSNSGTSVGPNAVSPSSGPSLTADSMWRPWRN

SEQ ID NO: 29529 - protein, 32 aa, Homo sapiens
LANIARAMPNRSARCQTKRKLTNFRKNFCTLS

SEQ ID NO: 29530 - protein, 30 aa, Homo sapiens
KLPFERPLLPLSRLTLHIKNNQVVQASMEK

SEQ ID NO: 29531 - protein, 52 aa, Homo sapiens
KEVKRKKRNGQKFLLHLILSTPSMLALMLLLENSLACQNSGLDYYRPPISPN

SEQ ID NO: 29532 - protein, 17 aa, Homo sapiens
LFLHQLVIHMLMVLPSL

SEQ ID NO: 29533 - protein, 11 aa, Homo sapiens
INKCGFVLLYF

SEQ ID NO: 29534 - protein, 31 aa, Homo sapiens
RHLMLTYLPLRCVTQILLCAMWTLPSHATTR

SEQ ID NO: 29535 - protein, 37 aa, Homo sapiens
RHLMLTYLPLRCVTQILLCAMWTLPSHATTRELTQWV

SEQ ID NO: 29536 - protein, 23 aa, Homo sapiens
ISAFIVFVISLSRKAFKIFLESI

SEQ ID NO: 29537 - protein, 46 aa, Homo sapiens
TGCAFLFFTLFHFQEGLVRTSETLFSYSIGDTVHTPSTSKPLKGFV

SEQ ID NO: 29538 - protein, 24 aa, Homo sapiens
VVSRDGIYWLLLEGRTVLMALSVA

SEQ ID NO: 29539 - protein, 24 aa, Homo sapiens
VAALDPASGRPGGRGGARVCQAGW

SEQ ID NO: 29540 - protein, 27 aa, Homo sapiens
VLSTSRRWKGEKEKEGILGIPACLDPL

SEQ ID NO: 29541 - protein, 46 aa, Homo sapiens
VTPDLGKVVPFAESLGLTGAHLTGWRPRTSGIPGACEGLAETYWFQ

SEQ ID NO: 29542 - protein, 14 aa, Homo sapiens
IVWFIFVFISFKIM

SEQ ID NO: 29543 - protein, 22 aa, Homo sapiens
IYGFLLIALLKIQLLILRLRKT

SEQ ID NO: 29544 - protein, 11 aa, Homo sapiens
MVFLKSSLLLL

SEQ ID NO: 29545 - protein, 15 aa, Homo sapiens
ILWTRGQWVMLLFLK

SEQ ID NO: 29546 - protein, 24 aa, Homo sapiens
IVSSVVIKFAIRLEKLNLKLSCLQ

SEQ ID NO: 29547 - protein, 16 aa, Homo sapiens
IYLIFCLIHISIYDLY

SEQ ID NO: 29548 - protein, 12 aa, Homo sapiens
IFILMGGVIILI

SEQ ID NO: 29549 - protein, 15 aa, Homo sapiens
ILFTVRLHFPRSGLL

SEQ ID NO: 29550 - protein, 23 aa, Homo sapiens
LSSSSCRTCLAARPQLPSSTTQT

SEQ ID NO: 29551 - protein, 16 aa, Homo sapiens
VTRSMTWWSSLLGTWT

SEQ ID NO: 29552 - protein, 34 aa, Homo sapiens
MSGPAGPGPRRRWRKVEAAVSDRMRRLRSPSLDP

SEQ ID NO: 29553 - protein, 13 aa, Homo sapiens
MYGLLAVCWLSCY

SEQ ID NO: 29554 - protein, 20 aa, Homo sapiens
ITSKWLKTNIYMTEEKDVIP

SEQ ID NO: 29555 - protein, 24 aa, Homo sapiens
LILMLSLTMQLEWCCLVSRQWWSF

SEQ ID NO: 29556 - protein, 646 aa, Homo sapiens
ISVCPRVRPVPACRTMESYHKPDQQKLQALKDTANRLRISSIQATTAAGSGHPTSCCSAAEIMAVLFFHTMRYKSQDPRNPHNDRFVLSKGHAAPILYAVWAEAGFLAEAELLNLRKISSDLDGHPVPKQAFTDVATGSLGQGLGAACGMAYTGKYFDKASLPSSWDYSYRVYCLLGDGELSEGSVWEAMAFASIYKLDNLVAILDINRLGQSDPAPLQHQMDIYQKRCEAFGWHAIIVDGHSVEELCKAFGQAKHQPTAIIAKTFKGRGITGVEDKESWHGKPLPKNMAEQIIQEIYSQIQSKKKILATPPQEDAPSVDIANIRMPSLPSYKVGDKIATRKAYGQALAKLGHASDRIIALDGDTKNSTFSEIFKKEHPDRFIECYIAEQNMVSIAVGCATRNRTVPFCSTFAAFFTRAFDQIRMAAISESNINLCGSHCGVSIGEDGPSQMALEDLAMFRSVPTSTVFYPSDGVATEKAVELAANTKGICFIRTSRPENAIIYNNNEDFQVGQAKVVLKSKDDQVTVIGAGVTLHEALAAAELLKKEKINIRVLDPFTIKPLDRKLILDSARATKGRILTVEDHYYEGGIGEAVSSAVVGEPGITVTHLAVNRVPRSGKPAELLKMFGIDRDAIAQAVRGLITKA

SEQ ID NO: 29557 - protein, 31 aa, Homo sapiens
VMTCLLSSGTGIKNGLAHKCLKDTPIMLCRL

SEQ ID NO: 29558 - protein, 22 aa, Homo sapiens
ILMGGLWWCVVMGSISSTQQWH

SEQ ID NO: 29559 - protein, 105 aa, Homo sapiens
LPPPGPTVVFAGAAVALGLGRGGGRGEEKAAAEAGERRKEAAARRAQQLRRRPGSWECRCGALVGADPAGPGRGKESPARPWRTTRNWTTNGSRISRTKAATWRL

SEQ ID NO: 29560 - protein, 11 aa, Homo sapiens
IGLLFGVLDFI

SEQ ID NO: 29561 - protein, 36 aa, Homo sapiens
VASDREVRLLFSPCFISVFFVSNSFITKKEKKYCSE

SEQ ID NO: 29562 - protein, 21 aa, Homo sapiens
LRGSSEQQHSASSPNRSSWMA

SEQ ID NO: 29563 - protein, 40 aa, Homo sapiens
IPALGREFHVIWPCVLLQVASFTAQCVMLELAKRWNSGSI

SEQ ID NO: 29564 - protein, 10 aa, Homo sapiens
MQNFVFLTVL

SEQ ID NO: 29565 - protein, 29 aa, Homo sapiens
LWLLYSLTFLLSRRHRHLPVSLQLLRFRI

SEQ ID NO: 29566 - protein, 19 aa, Homo sapiens
IGPFLILFCFQSLKQQPMS

SEQ ID NO: 29567 - protein, 17 aa, Homo sapiens
MDLWWWFSNWNIIFTCL

SEQ ID NO: 29568 - protein, 460 aa, Homo sapiens
VTHDLSSFHMLRFYLFISLLCLSRSDAEETCPSFTRLSFHSAVVGTGLNVRLMLYTRKNLTCAQTINSSAFGNLNVTKKTTFIVHGFRPTGSPPVWMDDLVKGLLSVEDMNVVVVDWNRGATTLIYTHASSKTRKVAMVLKEFIDQMLAEGASLDDIYMIGVSLGAHISGFVGEMYDGWLGRITGLDPAGPLFNGKPHQDRLDPSDAQFVDVIHSDTDALGYKEPLGNIDFYPNGGLDQPGCPKTILGGFQYFKCDHQRSVYLYLSSLRESCTITAYPCDSYQDYRNGKCVSCGTSQKESCPLLGYYADNWKDHLRGKDPPMTKAFFDTAEESPFCMYHYFVDIITWNKNVRRGDITIKLRDKAGNTTESKINHEPTTFQKYHQVSLLARFNQDLDKVAAISLMFSTGSLIGPRYKLRILRMKLRSLAHPERPQLCRYDLVLMENVETVFQPILCPELQL

SEQ ID NO: 29569 - protein, 11 aa, Homo sapiens
VRYFFLQVWLF

SEQ ID NO: 29570 - protein, 16 aa, Homo sapiens
IWIKRFLVSIPFISCV

SEQ ID NO: 29571 - protein, 15 aa, Homo sapiens
LVLWHPNMKVISSKA

SEQ ID NO: 29572 - protein, 43 aa, Homo sapiens
LRGGEAWRAAAAGQGTGAEPEPEPTGGGRTGTPESRALPTIRF

SEQ ID NO: 29573 - protein, 19 aa, Homo sapiens
MANFWPLLLLIPRKLFCVM

SEQ ID NO: 29574 - protein, 32 aa, Homo sapiens
LLLLNKFDFRSQSFYCQDISSAFCNSQPYWKW

SEQ ID NO: 29575 - protein, 30 aa, Homo sapiens
LLLLNKFDFRSQSFYCQDISSAFCNSFQHG

SEQ ID NO: 29576 - protein, 8 aa, Homo sapiens
KVFILRKH

SEQ ID NO: 29577 - protein, 49 aa, Homo sapiens
MLRPALPWLYLGLCSLLVGEAEAPSPVDPLERSRPYAVLRGQNLDQTLH

SEQ ID NO: 29578 - protein, 22 aa, Homo sapiens
LAALWRTTLVFFLAARGPRIHR

SEQ ID NO: 29579 - protein, 31 aa, Homo sapiens
ILKILVLGCTCYNHLWLSSLQMVSPEASQPP

SEQ ID NO: 29580 - protein, 17 aa, Homo sapiens
LHQAGHPGLVLLLAGMF

SEQ ID NO: 29581 - protein, 599 aa, Homo sapiens
IRTMSNYSVSLVGPAPWGFRLQGGKDFNMPLTISSLKDGGKAAQANVRIGDVVLSIDGINAQGMTHLEAQNKIKGCTGSLNMTLQRASAAPKPEPVPVQKGEPKEVVKPVPITSPAVSKVTSTNNMAYNKAPRPFGSVSSPKVTSIPSPSSAFTPAHATTSSHASPSPVAAVTPPLFAASGLHANANLSADQSPSALSAGKTAVNVPRQPTVTSVCSETSQELAEGQRRGSQGDSKQQNGPPRKHIVERYTEFYHVPTHSDASKKRLIEDTEDWRPRTGTTQSRSFRILAQITGTEHLKESEADNTKKANNSQEPSPQLASSVASTRSMPESLDSPTSGRPGVTSLTAAAAFKPVGSTGVIKSPSWQRPNQGVPSTGRISNSATYSGSVAPANSALGQTQPSDQDTLVQRAEHIPAGKRTPMCAHCNQVIRGPFLVALGKSWHPEEFNCAHCKNTMAYIGFVEEKGALYCELCYEKFFAPECGRCQRKILGEVISALKQTWHVSCFVCVACGKPIRNNVFHLEDGEPYCETDYYALFGTICHGCEFPIEAGDMFLEALGYTWHDTCFVCSVCCESLEGQTFFSKKDKPLCKKHAHSVNF

SEQ ID NO: 29582 - protein, 27 aa, Homo sapiens
LFSRLCHVAILSLLCRSCALAPREPSV

SEQ ID NO: 29583 - protein, 10 aa, Homo sapiens
IRCSRYLQFK

SEQ ID NO: 29584 - protein, 11 aa, Homo sapiens
KLLSSKNRMLH

SEQ ID NO: 29585 - protein, 55 aa, Homo sapiens
LVSVHLLFPFLIITSPLETHTSLLWVSRLWEFTSPTSMFAWTHWPMFSIILKSHL

SEQ ID NO: 29586 - protein, 88 aa, Homo sapiens
LVGVAIPAAIAQKRTRFPYRRVQYQQPDHHAAGCLWLALTSAFSTATLLSREVAASRPSPMSTATGVPRPVYHWDQELEPLEMQQRAR

SEQ ID NO: 29587 - protein, 15 aa, Homo sapiens
ILRGIGFILSTLLNQ

SEQ ID NO: 29588 - protein, 42 aa, Homo sapiens
INHGVNLVLIFLIILIMGLMKIPGKLTVKNKRGYEWDLKLYQ

SEQ ID NO: 29589 - protein, 39 aa, Homo sapiens
KLKSISMLEILKKLQGGWMRPRPWTQQTDLSTPNVQNTC

SEQ ID NO: 29590 - protein, 18 aa, Homo sapiens
ISFSLMLWLSCLLDMKRI

SEQ ID NO: 29591 - protein, 10 aa, Homo sapiens
ICFLPDKYNR

SEQ ID NO: 29592 - protein, 16 aa, Homo sapiens
RIPRMMNAQWLMHMLL

SEQ ID NO: 29593 - protein, 24 aa, Homo sapiens
ISILFCLTTWMATSMNLMDECLFR

SEQ ID NO: 29594 - protein, 21 aa, Homo sapiens
IIETFLGLIWFWFLSLHYTTG

SEQ ID NO: 29595 - protein, 11 aa, Homo sapiens
ILDYGVKRSTD

SEQ ID NO: 29596 - protein, 18 aa, Homo sapiens
KLSSGIKTISQNLLLICP

SEQ ID NO: 29597 - protein, 11 aa, Homo sapiens
IKKHFLLWLLN

SEQ ID NO: 29598 - protein, 11 aa, Homo sapiens
IHVFLGVAVAG

SEQ ID NO: 29599 - protein, 16 aa, Homo sapiens
KFSRTTMVKRVLLLTV

SEQ ID NO: 29600 - protein, 23 aa, Homo sapiens
ILAVGSGRTVWAVVAGGVGVLQS

SEQ ID NO: 29601 - protein, 12 aa, Homo sapiens
VMLSGKRMILLL

SEQ ID NO: 29602 - protein, 65 aa, Homo sapiens
LLYSALSARAAAASASALRCAPGPKTPRRQSTAAPSADPRALPLLKALNPVPDALTGQVQLKKMK

SEQ ID NO: 29603 - protein, 16 aa, Homo sapiens
IWMKNCVLWLSILCRH

SEQ ID NO: 29604 - protein, 380 aa, Homo sapiens
KDIMKFPGPLENQRLSFLLEKAITREAQMWKVNVRKMPSNQNVSPSQRDEVIQWLAKLKYQFNLYPETFALASSLLDRFLATVKAHPKYLSCIAISCFFLAAKTVEEDERIPVLKVLARDSFCGCSSSEILRMERIILDKLNWDLHTATPLDFLHIFHAIAVSTRPQLLFSLPKLSPSQHLAVLTKQLLHCMACNQLLQFRGSMLALAMVSLEMEKLIPDWLSLTIELLQKAQMDSSQLIHCRELVAHHLSTLQSSLPLNSVYVYRPLKHTLVTCDKGVFRLHPSSVPGPDFSKDNSKPEVPVRGTAAFYHHLPAASGCKQTSTKRKVEEMEVDDFYDGIKRLYNEDNVSENVGSVCGTDLSRQEGHASPCPPLQPVSVM

SEQ ID NO: 29605 - protein, 23 aa, Homo sapiens
IKPFRVMPACLLMVCKTITFLGS

SEQ ID NO: 29606 - protein, 16 aa, Homo sapiens
IKPFRVMPACLLMQLF

SEQ ID NO: 29607 - protein, 1088 aa, Homo sapiens
TPAGEEARREKRPQREPGHRGLPALGAEPPALGSPRGAGAGTDFFCRIILWNDIFIMSQQGYVATPPYSQPQPGIGLSPPHYGHYGDPSHTASPTGMMKPAGPLGATATRGMLPPGPPPPGPHQFGQNGAHATGHPPQRFPGPPPVNNVASSHAPYQPSAQSSYPGPISTSSVTQLGSQLSAMQINSYGSGMAPPSQGPPGPLSATSLQTPPRPPQPSILQPGSQVLPPPPTTLNGPGASPLPLPMYRPDGLSGPPPPNAQYQPPPLPGQTLGAGYPPQQANSGPQMAGAQLSYPGGFPGGPAQMAGPPQPQKKLDPDSIPSPIQVIENDRASRGGQVYATNTRGQIPPLVTTDCMIQDQGNASPRFIRCTTYCFPCTSDMAKQAQIPLAAVIKPFATIPSNESPLYLVNHGESGPVRCNRCKAYMCPFMQFIEGGRRYQCGFCNCVNDVPPFYFQHLDHIGRRLDHYEKPELSLGSYEYVATLDYCRKSKPPNPPAFIFMIDVSYSNIKNGLVKLICEELKTMLEKIPKEEQEETSAIRVGFITYNKVLHFFNVKSNLAQPQMMVVTDVGEVFVPLLDGFLVNYQESQSVIHNLLDQIPDMFADSNENETVFAPVIQAGMEALKAADCPGKLFIFHSSLPTAEAPGKLKNRDDKKLVNTDKEKILFQPQTNVYDSLAKDCVAHGCSVTLFLFPSQYVDVASLGLVPQLTGGTLYKYNNFQMHLDRQQFLNDLRNDIEKKIGFDAIMRVRTSTGFRATDFFGGILMNNTTDVEMAAIDCDKAVTVEFKHDDKLSEDSGALIQCAVLYTTISGQRRLRIHNLGLNCSSQLADLYKSCETDALINFFAKSAFKAVLHQPLKVIREILVNQTAHMLACYRKNCASPSAASQLILPDSMKVLPVYMNCLLKNCVLLSRPEISTDERAYQRQLVMTMGVADSQLFFYPQLLPIHTLDVKSTMLPAAVRCSESRLSEEGIFLLANGLHMFLWLGVSSPPELIQGIFNVPSFAHINTDMTLLPEVGNPYSQQLRMIMGIIQQKRPYSMKLTIVKQREQPEMVFRQFLVEDKGLYGGSSYVDFLCCVHKEICQLLN

SEQ ID NO: 29608 - protein, 12 aa, Homo sapiens
MDSDYTREKTRR

SEQ ID NO: 29609 - protein, 25 aa, Homo sapiens
LPWTSFRRNTVASQMLDANKIQKNC

SEQ ID NO: 29610 - protein, 18 aa, Homo sapiens
LMEVSFKIFPVIMLLLTH

SEQ ID NO: 29611 - protein, 26 aa, Homo sapiens
MSHEHRKSKRRNMMDEELCRCCIDTK

SEQ ID NO: 29612 - protein, 23 aa, Homo sapiens
LRVVVLFLVFSSRSPLPVWTSKV

SEQ ID NO: 29613 - protein, 37 aa, Homo sapiens
LDLFVMTIWQLFAVLIVLFAKSREISTEGEPCVLSKN

SEQ ID NO: 29614 - protein, 28 aa, Homo sapiens
KLMDISILIMSVWYLYRMEKKSQVHVPV

SEQ ID NO: 29615 - protein, 41 aa, Homo sapiens
RNRTEYKILSMRELLLCLLMEVFTAQGFLILIQEIRSWYGD

SEQ ID NO: 29616 - protein, 37 aa, Homo sapiens
LISLPMKLRDLMFSLMLLVLSIMELSWIVRRKTGTSR

SEQ ID NO: 29617 - protein, 24 aa, Homo sapiens
MEVNPSILIVSFMVMKLPKMCMKK

SEQ ID NO: 29618 - protein, 18 aa, Homo sapiens
RTSVTIRVIFQKRQEYFC

SEQ ID NO: 29619 - protein, 20 aa, Homo sapiens
ITGQMGIETSEQADGKQHGE

SEQ ID NO: 29620 - protein, 16 aa, Homo sapiens
IVFCLFSFLPNRALLY

SEQ ID NO: 29621 - protein, 24 aa, Homo sapiens
MAMSRLLVLLLNTWTRSAIASLLT

SEQ ID NO: 29622 - protein, 41 aa, Homo sapiens
RYYHVSALASGNGICLLLCLLHSTTERGTSTWCPVVSKEFE

SEQ ID NO: 29623 - protein, 26 aa, Homo sapiens
ILPQLLRALLLLLHSYPLSTLQVAFW

SEQ ID NO: 29624 - protein, 12 aa, Homo sapiens
IHFILSMILFTD

SEQ ID NO: 29625 - protein, 26 aa, Homo sapiens
LVTVFQLVVIFASPSPTPLLGFFSRN

SEQ ID NO: 29626 - protein, 16 aa, Homo sapiens
MLFRCEIFFLFLLFGS

SEQ ID NO: 29627 - protein, 12 aa, Homo sapiens
KLLGLYLMKFII

SEQ ID NO: 29628 - protein, 7 aa, Homo sapiens
VTFIWLI

SEQ ID NO: 29629 - protein, 15 aa, Homo sapiens
MEDMILVKSLTYMTV

SEQ ID NO: 29630 - protein, 24 aa, Homo sapiens
LSQMALTMLLGYGYLMVLQVKADF

SEQ ID NO: 29631 - protein, 11 aa, Homo sapiens
MTWLLVLMVVG

SEQ ID NO: 29632 - protein, 14 aa, Homo sapiens
LILDFLSSRTEIWC

SEQ ID NO: 29633 - protein, 199 aa, Homo sapiens
IMHSEAEESKEVATDVFNSKNLAVQAQKKILGKMVSKSIATTLIDDTSSEVLDELYRVTREYTQNKKEAEKIIKNLIKTVIKLAILYRNNQFNQDELALMEKFKKKVHQLAMTVVSFHQVDYTFDRNVLSRLLNECREMLHQIIQRHLTAKSHGRVNNVFDHFSDCEFLAALYNPFGNFKPHLQKLCDGINKMLDEENI

SEQ ID NO: 29634 - protein, 16 aa, Homo sapiens
LTLVVWWLKILSMAFI

SEQ ID NO: 29635 - protein, 28 aa, Homo sapiens
MHPCCGNQRTLQMLPLARERKASFAADD

SEQ ID NO: 29636 - protein, 61 aa, Homo sapiens
MLRPALPWLYLGLCSLLVGEAEAPSPVDPLERSRPYAVLRGQNLETTGERICLQLFAQHLT

SEQ ID NO: 29637 - protein, 9 aa, Homo sapiens
IIILKCLTF

SEQ ID NO: 29638 - protein, 11 aa, Homo sapiens
LTWNCVLLAVS

SEQ ID NO: 29639 - protein, 16 aa, Homo sapiens
LWPPVAWGECGAMPRA

SEQ ID NO: 29640 - protein, 13 aa, Homo sapiens
MLPLNLMWMLLGI

SEQ ID NO: 29641 - protein, 18 aa, Homo sapiens
LALRRRPWRITASLCLSL

SEQ ID NO: 29642 - protein, 39 aa, Homo sapiens
TGERRRFFLLLLFSFPRSAAAVTASGSAPSPAPGANNAD

SEQ ID NO: 29643 - protein, 37 aa, Homo sapiens
ILIKYCRRSRLTHCGSRDTGTTRSIARSSRNWQIVNC

SEQ ID NO: 29644 - protein, 34 aa, Homo sapiens
ILIKYCRRSRLTHCGSRDTGTTRSIARSSSFCRS

SEQ ID NO: 29645 - protein, 31 aa, Homo sapiens
ILIKYCRRSRLTHCGSRDTGTTRSIARSSRS

SEQ ID NO: 29646 - protein, 8 aa, Homo sapiens
VVLHESLR

SEQ ID NO: 29647 - protein, 19 aa, Homo sapiens
VNLLVSGRFSCLLLCGALG

SEQ ID NO: 29648 - protein, 27 aa, Homo sapiens
LPLTIALPLQLLLVTRIGELISPNLGR

SEQ ID NO: 29649 - protein, 32 aa, Homo sapiens
LGLCLLRIMILTPLLRCWSMTMMMKELLKKRK

SEQ ID NO: 29650 - protein, 41 aa, Homo sapiens
LLLLRLAGISAGAAAAAAAYAPWSIASWGPGRTELPGCFYF

SEQ ID NO: 29651 - protein, 14 aa, Homo sapiens
ILMDLVRLFLLWGL

SEQ ID NO: 29652 - protein, 30 aa, Homo sapiens
IFLFLMKTFRRWKMCLIFGVQVLRQTSYLN

SEQ ID NO: 29653 - protein, 12 aa, Homo sapiens
MMAMMKSMTVPF

SEQ ID NO: 29654 - protein, 19 aa, Homo sapiens
VELLLITMVVISSLNAGFI

SEQ ID NO: 29655 - protein, 28 aa, Homo sapiens
MQNEMCQWSRAVLSLVMSYTMCLTGAGH

SEQ ID NO: 29656 - protein, 15 aa, Homo sapiens
IVSSSLLALLAVTDT

SEQ ID NO: 29657 - protein, 9 aa, Homo sapiens
MFFLCGCIF

SEQ ID NO: 29658 - protein, 12 aa, Homo sapiens
ILSCFLYTCIIL

SEQ ID NO: 29659 - protein, 31 aa, Homo sapiens
IVLERRPMGIQMLSLFFQVFLLYWRSWEGDC

SEQ ID NO: 29660 - protein, 38 aa, Homo sapiens
LATPEKTSAPTGVFHRVAGSWKSQERLRALDLSFSAHG

SEQ ID NO: 29661 - protein, 61 aa, Homo sapiens
LGVTVISYSLLILVWPKSTETTGQGNTYHTEKIKTSLALPDMLASMHILVLSRVAEMTWNH

SEQ ID NO: 29662 - protein, 15 aa, Homo sapiens
RKIWRRWGLVFWICN

SEQ ID NO: 29663 - protein, 16 aa, Homo sapiens
LGPKGLFVLHLIQFLG

SEQ ID NO: 29664 - protein, 461 aa, Homo sapiens
KMASLLQSDRVLYLVQGEKKVRAPLSQLYFCRYCSELRSLECVSHEVDSHYCPSCLENMPSAEAKLKKNRCANCFDCPGCMHTLSTRATSISTQLPDDPAKTTMKKAYYLACGFCRWTSRDVGMADKSVASGGWQEPENPHTQRMNKLIEYYQQLAQKEKVERDRKKLARRRNYMPLAFSDKYGLGTRLQRPRAGASISTLAGLSLKEGEDQKEIKIEPAQAVDEVEPLPEDYYTRPVNLTEVTTLQQRLLQPDFQPVCASQLYPRHKHLLIKRSLRCRKCEHNLSKPEFNPTSIKFKIQLVAVNYIPEVRIMSIPNLRYMKESQVLLTLTNPVENLTHVTLFECEEGDPDDINSTAKVVVPPKELVLAGKDAAAEYDELAEPQDFQDDPDIIAFRKANKVGIFIKVTPQREEGEVTVCFKMKHDFKNLAAPIRPIEESDQGTEVIWLTQHVELSLGPLLP

SEQ ID NO: 29665 - protein, 20 aa, Homo sapiens
ILQAFYWPVIFLCVPYRPPP

SEQ ID NO: 29666 - protein, 26 aa, Homo sapiens
LYYIDVSRFKYIRKQPWRQPSSFWEK

SEQ ID NO: 29667 - protein, 19 aa, Homo sapiens
IGLALATQHWLLLVGSLAM

SEQ ID NO: 29668 - protein, 19 aa, Homo sapiens
IGLALATQHWLFLVGSLAM

SEQ ID NO: 29669 - protein, 27 aa, Homo sapiens
MAATWGPTDASSAGITSTRTTARITSP

SEQ ID NO: 29670 - protein, 17 aa, Homo sapiens
LAWFSLDLWSLELWLLL

SEQ ID NO: 29671 - protein, 22 aa, Homo sapiens
ILLSTAFLFLNLILWLQAFSSS

SEQ ID NO: 29672 - protein, 10 aa, Homo sapiens
ICFLFFLSSG

SEQ ID NO: 29673 - protein, 25 aa, Homo sapiens
LWTTLSSIWLLALPRCSSTFVLPSA

SEQ ID NO: 29674 - protein, 117 aa, Homo sapiens
LAFLQSPRAILPGNFFEKNAQIQGGPWGGGSGKTCAPGRSDPGWECGAGGGPGEAAGSRDRRSGGRVCGAPAEPTDFAASTAATGGTRGRAWDWGQARGAAGTHHAAGSKNASGWIR

SEQ ID NO: 29675 - protein, 13 aa, Homo sapiens
LRGQENYRKKMER

SEQ ID NO: 29676 - protein, 12 aa, Homo sapiens
MWLPCKSGTVEW

SEQ ID NO: 29677 - protein, 44 aa, Homo sapiens
MRLTGPWKLWLWMSIFLLPASTSVTVRDKTVNLAAAHSLGPHHL

SEQ ID NO: 29678 - protein, 16 aa, Homo sapiens
IFLLLPVVALVWRSWG

SEQ ID NO: 29679 - protein, 18 aa, Homo sapiens
KTKVPDESGIIPPDCLGS

SEQ ID NO: 29680 - protein, 11 aa, Homo sapiens
LLLLLYFNPVK

SEQ ID NO: 29681 - protein, 15 aa, Homo sapiens
LPQPLPSLASPSPVH

SEQ ID NO: 29682 - protein, 20 aa, Homo sapiens
LVVMIVYLILLLIWKNSLKL

SEQ ID NO: 29683 - protein, 51 aa, Homo sapiens
MMIWKRLIILKVLLNQTCQTVQTVTPTSWVFSNQAGMTQAFLFLECHYQTQ

SEQ ID NO: 29684 - protein, 13 aa, Homo sapiens
KKQRLWRKMFILM

SEQ ID NO: 29685 - protein, 13 aa, Homo sapiens
IWLSRLSFLASVC

SEQ ID NO: 29686 - protein, 63 aa, Homo sapiens
LLKRGFAMILGTGMMNGTILSKWLPQTHPWPEVDFSTTHWKKYTYLSFATSSEGQSLSFQTKC

SEQ ID NO: 29687 - protein, 8 aa, Homo sapiens
RILPEVFH

SEQ ID NO: 29688 - protein, 13 aa, Homo sapiens
IPTPASLPRQWGS

SEQ ID NO: 29689 - protein, 106 aa, Homo sapiens
VLVMSGRGKGGKGLGKGGAKRHRKVLRDNIQGITKPAIRRLARRGGVKRISGLIYEETRGVLKVFLENVIRDAVTYTEHAKRKTVTAMDVVYALKRQGRTLYGFGG

SEQ ID NO: 29690 - protein, 90 aa, Homo sapiens
LPALTLSPLLLATSRFLGCLCPLCGQRGRTFGPGPGGGGGSLRPPPLPLPPPYPPRSGKRRRLRHGLGSRRSRRGRWRQDPDAALPPGAN

SEQ ID NO: 29691 - protein, 23 aa, Homo sapiens
ILQIWCLIILFWAFSDFNKHWKF

SEQ ID NO: 29692 - protein, 36 aa, Homo sapiens
LFFLFFFFSPCCRCLRVLPLRCRPGRRARLWVPGGG

SEQ ID NO: 29693 - protein, 32 aa, Homo sapiens
LEPSIFLVTALLWMFTSTWNRPRFRVSPGYGW

SEQ ID NO: 29694 - protein, 52 aa, Homo sapiens
RFSQVWTSSGQTWNFSKSSLIALLRMCCIAQIVDLGPGCWSCVTKACLNAWP

SEQ ID NO: 29695 - protein, 37 aa, Homo sapiens
IGYLVLLWPLPLIHFGLAQPVRRPECVLPRDTAGDRS

SEQ ID NO: 29696 - protein, 36 aa, Homo sapiens
MRSTHSCYRMRQGRKPCSRNSDGSSSSSPPSFIGDP

SEQ ID NO: 29697 - protein, 31 aa, Homo sapiens
LMKVPRTMKKAPQPLLLSRERILPPKKTGEY

SEQ ID NO: 29698 - protein, 15 aa, Homo sapiens
IKRIYIMLMTVMSKI

SEQ ID NO: 29699 - protein, 27 aa, Homo sapiens
INRLLLVSGCLTFLFALLILSTEQICR

SEQ ID NO: 29700 - protein, 15 aa, Homo sapiens
IELADGYLLVLMTVL

SEQ ID NO: 29701 - protein, 12 aa, Homo sapiens
IGHLFVMPTILY

SEQ ID NO: 29702 - protein, 12 aa, Homo sapiens
LRVDDPANRAKT

SEQ ID NO: 29703 - protein, 269 aa, Homo sapiens
IFTEQSMITFLPLLLGLSLGCTGAGGFVAHVESTCLLDDAGTPKDFTYCISFNKDLLTCWDPEENKMAPCEFGVLNSLANVLSQHLNQKDTLMQRLRNGLQNCATHTQPFWGSLTNRTRPPSVQVAKTTPFNTREPVMLACYVWGFYPAEVTITWRKNGKLVMPHSSAHKTAQPNGDWTYQTLSHLALTPSYGDTYTCVVEHTGAPEPILRDWTPGLSPMQTLKVSVSAVTLGLGLIIFSLGVISWRRAGHSSYTPLPGSNYSEGWHIS

SEQ ID NO: 29704 - protein, 40 aa, Homo sapiens
IKTLLCLWLLQVMELQSVLPQGEIFTYLQTISARRWLLNS

SEQ ID NO: 29705 - protein, 10 aa, Homo sapiens
VFLWWLINFS

SEQ ID NO: 29706 - protein, 11 aa, Homo sapiens
TISVSGVFLFA

SEQ ID NO: 29707 - protein, 31 aa, Homo sapiens
KESPSPLSAAWLAAAASSVFLASFMRKLAEC

SEQ ID NO: 29708 - protein, 40 aa, Homo sapiens
KGAKMCKGIKTISFLFVLTGQPCLLFCDCSCTLPIYLHMI

SEQ ID NO: 29709 - protein, 13 aa, Homo sapiens
IVYQGQTLCLWLL

SEQ ID NO: 29710 - protein, 15 aa, Homo sapiens
MTGIKKLAILIISTL

SEQ ID NO: 29711 - protein, 28 aa, Homo sapiens
LVSKSMCQRLPGRRRLPESWIFLPSGNL

SEQ ID NO: 29712 - protein, 18 aa, Homo sapiens
LRSSYQATDSQDVDPSKT

SEQ ID NO: 29713 - protein, 10 aa, Homo sapiens
TGSDEQLGTG

SEQ ID NO: 29714 - protein, 12 aa, Homo sapiens
IILMVSIRCLVR

SEQ ID NO: 29715 - protein, 20 aa, Homo sapiens
LEGSAGLVPQALGVGASDRR

SEQ ID NO: 29716 - protein, 75 aa, Homo sapiens
VLRIQNGLMPASIFLIIIVIFLIMLVIHQILFGSELKPGLDKKNLPMQSQKNLLYAEMEKLDHLNWISERRRSKS

SEQ ID NO: 29717 - protein, 69 aa, Homo sapiens
ISLLRRCCCRHTRSPCLALLLEIVSLFSFAVPQSPTLHPLFSPILREPIQIPLPFFPCRPSYGRERCGQ

SEQ ID NO: 29718 - protein, 66 aa, Homo sapiens
LFLSLLSLPLFPSRRAPRPGRGSREAGGVVCYPVAPGTSLGYAPRRRSHCCGRRSAEGPRYWLPAV

SEQ ID NO: 29719 - protein, 18 aa, Homo sapiens
IRKKSSERRNIMTCLLLL

SEQ ID NO: 29720 - protein, 29 aa, Homo sapiens
IASTLSFLLCTQMGWLDESSSWLSKECTV

SEQ ID NO: 29721 - protein, 39 aa, Homo sapiens
RGTGREVAKVAAEAEAKGRREPGLARVCPGGLAQAAAVR

SEQ ID NO: 29722 - protein, 18 aa, Homo sapiens
ILPLLVFWAFDLYTRGAE

SEQ ID NO: 29723 - protein, 31 aa, Homo sapiens
LCFEEQYYSDLEAALYPRGTDPGDRLHHAHP

SEQ ID NO: 29724 - protein, 353 aa, Homo sapiens
IPFPVLLPSASGQGILASACGAGGTRFPPPRGSASGLVLSPAAPCRRSHRSSYRREWRADQGAAGLPSAIPVSLRPRGPPEPATMPLGLKPTCSVCKTTSSSMWKKGAQGEILCHHCTGRGGAGSGGAGSGAAGGTGGSGGGGFGAATFASTSATPPQSNGGGGGKQSKQEIHRRSARLRNTKYKSAPAAEKKVSTKGKGRRHIFKLKNPIKAPESVSTIITAESIFYKGVYYQIGDVVSVIDEQDGKPYYAQIRGFIQDQYCEKSAALTWLIPTLSSPRDQFDPASYIIGPEEDLPRKMEYLEFVCHAPSEYFKSRSSPFPTVPTRPEKGYIWTHVGPTPAITIKESVANHL

SEQ ID NO: 29725 - protein, 35 aa, Homo sapiens
VLPSRQRPGPQGPRAPEGGLEEAAHLHSGHVQHHG

SEQ ID NO: 29726 - protein, 32 aa, Homo sapiens
MSEPAGGRGSEKRIGSWASVMRQAHLSVLACC

SEQ ID NO: 29727 - protein, 12 aa, Homo sapiens
IMVISLLMCLHS

SEQ ID NO: 29728 - protein, 42 aa, Homo sapiens
LQKRRESCRRHRCPPPQSWRKLSIRFRAYKQPWKKLEQNYLT

SEQ ID NO: 29729 - protein, 29 aa, Homo sapiens
VLVTRKRLLWASYLVLIISLCHPGWNAVV

SEQ ID NO: 29730 - protein, 51 aa, Homo sapiens
VLVTRKRLLWASYLVLMQNLLVSPWLECSGVISAHYNLGLPGSSNSPASAS

SEQ ID NO: 29731 - protein, 12 aa, Homo sapiens
TAEAGFQWLLVL

SEQ ID NO: 29732 - protein, 11 aa, Homo sapiens
IITALFQFFVC

SEQ ID NO: 29733 - protein, 8 aa, Homo sapiens
IFPIFLAF

SEQ ID NO: 29734 - protein, 12 aa, Homo sapiens
VNKFGMVLYIFI

SEQ ID NO: 29735 - protein, 21 aa, Homo sapiens
RHRRFIWIQGWLSTVPAALSS

SEQ ID NO: 29736 - protein, 13 aa, Homo sapiens
IASLSLRVPLLLL

SEQ ID NO: 29737 - protein, 79 aa, Homo sapiens
LIFSGTMWSGRKSKPRRRREKSRRTVSSGCARRNKLIMRSMPTNTGMTSTKSTKMGFSRIDIGFLPNSLSWHLAKIKII

SEQ ID NO: 29738 - protein, 752 aa, Homo sapiens
TALVRWTGRDLASRRAPATAIPPRPVGSGGAEAAEPQEDLPPLSQSSRFFQEQQKMNKSLGPVSFKDVAVDFTQEEWQQLDPEQKITYRDVMLENYSNLVSVGYHIIKPDVISKLEQGEEPWIVEGEFLLQSYPDEVWQTDDLIERIQEEENKPSRQTVFIETLIEERGNVPGKTFDVETNPVPSRKIAYKNSLCDSCEKCLTSVSEYISSDGSYARMKADECSGCGKSLLHIKLEKTHPGDQAYEFNQNGEPYTLNEESLYQKIRILEKPFEYIECQKAFQKDTVFVNHMEEKPYKWNGSEIAFLQMSDLTVHQTSHMEMKPYECSECGKSFCKKSKFIIHQRTHTGEKPYECNQCGKSFCQKGTLTVHQRTHTGEKPYECNECGKNFYQKLHLIQHQRTHSGEKPYECSYCGKSFCQKTHLTQHQRTHSGERPYVCHDCGKTFSQKSALNDHQKIHTGVKLYKCSECGKCFCRKSTLTTHLRTHTGEKPYECNECGKFFSRLSYLTVHYRTHSGEKPYECNECGKTFYLNSALMRHQRVHTGEKPYECNECGKLFSQLSYLTIHHRTHSGVKPYECSECGKTFYQNSALCRHRRIHKGEKPYECYICGKFFSQMSYLTIHHRIHSGEKPYECSECGKTFCQNSALNRHQRTHTGEKAYECYECGKCFSQMSYLTIHHRIHSGEKPFECNECGKAFSRMSYLTVHYRTHSGEKPYECTECGKKFYHKSAFNSHQRIHRRGNMNVIDVGRLL

SEQ ID NO: 29739 - protein, 82 aa, Homo sapiens
MLWDPALPRLAVYASCLFFSCLDAHEGPVHGPRGRGEGGRGSERQRVRPGGGGGAGSVHIHLEEEDGAEDQDHRDEDWITKK

SEQ ID NO: 29740 - protein, 38 aa, Homo sapiens
LIFHSSFLCLVLTVFVYFKGEKTRGTKPAGSIHHRGWF

SEQ ID NO: 29741 - protein, 301 aa, Homo sapiens
IGPRAETCLLFSSGERLVDMSDVEENNFEGRESRSQSKSPTGTPARVKSESRSGSRSPSRVSKHSESHSRSRSKSRSRSRRHSHRRYTRSRSHSHSHRRRSRSRSYTPEYRRRRSRSHSPMSNRRRHTGSRANPDPNTCLGVFGLSLYTTERDLREVFSRYGPLSGVNVVYDQRTGRSRGFAFVYFERIDDSKEAMERANGMELDGRRIRVDYSITKRAHTPTPGIYMGRPTHSGGGGGGGGGGGGGGGGRRRDSYYDRGYDRGYDRYEDYDYRYRRRSPSPYYSRYRSRSRSRSYSPRRY

SEQ ID NO: 29742 - protein, 21 aa, Homo sapiens
IFLLITSLLVAEYILEESFSS

SEQ ID NO: 29743 - protein, 28 aa, Homo sapiens
RAASRWPRSMAGCWMLRCCWTVTASFCP

SEQ ID NO: 29744 - protein, 9 aa, Homo sapiens
MSMTAHSHG

SEQ ID NO: 29745 - protein, 7 aa, Homo sapiens
LVFFVFI

SEQ ID NO: 29746 - protein, 50 aa, Homo sapiens
RARGRAEAESAPRTWLEAKLERTVGRPRLRQYLAHRELGYSFLWAASTDT

SEQ ID NO: 29747 - protein, 40 aa, Homo sapiens
RHGGSLLIWGAHLLLILVLETTGSSVVGRALRQKALLNST

SEQ ID NO: 29748 - protein, 13 aa, Homo sapiens
LFYITFLIWEMKF

SEQ ID NO: 29749 - protein, 7 aa, Homo sapiens
LSLTPHR

SEQ ID NO: 29750 - protein, 142 aa, Homo sapiens
LGPEGPGAPGRRIWAPRRTPAWICPVGPARAPREQNSLGEVDRRGPREQTRAPATAARPGLSGAVGQRLRSPRRGPVSFKDVAVDFTQEEWRQLDPDEKITYGDVMLENYSHLVSLAYEVATSCTSEILKPSNLPKSFFFSH

SEQ ID NO: 29751 - protein, 44 aa, Homo sapiens
LERLRPHRRLLFFCTILCYLCSLCVPVLHCCPSALCWLHESVSG

SEQ ID NO: 29752 - protein, 672 aa, Homo sapiens
TGCRPDPEFSVRSAAADARRPRSAPATMRPRKAFLLLLLLGLVQLLAVAGAEGPDEDSSNRENAIEDEEEEEEEDDDEEEDDLEVKEENGVLVLNDANFDNFVADKDTVLLEFYAPWCGHCKQFAPEYEKIANILKDKDPPIPVAKIDATSASVLASRFDVSGYPTIKILKKGQAVDYEGSRTQEEIVAKVREVSQPDWTPPPEVTLVLTKENFDEVVNDADIILVEFYAPWCGHCKKLAPEYEKAAKELSKRSPPIPLAKVDATAETDLAKRFDVSGYPTLKIFRKGRPYDYNGPREKYGIVDYMIEQSGPPSKEILTLKQVQEFLKDGDDVIIIGVFKGESDPAYQQYQDAANNLREDYKFHHTFSTEIAKFLKVSQGQLVVMQPEKFQSKYEPRSHMMDVQGSTQDSAIKDFVLKYALPLVGHRKVSNDAKRYTRRPLVVVYYSVDFSFDYRAATQFWRSKVLEVAKDFPEYTFAIADEEDYAGEVKDLGLSESGEDVNAAILDESGKKFAMEPEEFDSDTLREFVTAFKKGKLKPVIKSQPVPKNNKGPVKVVVGKTFDSIVMDPKKDVLIEFYAPWCGHCKQLEPVYNSLAKKYKGQKGLVIAKMDATANDVPSDRYKVEGFPTIYFAPSGDKKNPVKFEGGDRDLEHLSKFIEEHATKLSRTKEEL

SEQ ID NO: 29753 - protein, 9 aa, Homo sapiens
IVGLYWSFF

SEQ ID NO: 29754 - protein, 14 aa, Homo sapiens
TAILIVIWTLSEKM

SEQ ID NO: 29755 - protein, 26 aa, Homo sapiens
VEALFFPSLQYILLLLSLGPRCFYEL

SEQ ID NO: 29756 - protein, 51 aa, Homo sapiens
LIAPFPRAELAGAPTGPGAAAPGRPGLSLELQLPTCTLPGFRPVPESPQNG

SEQ ID NO: 29757 - protein, 9 aa, Homo sapiens
MYLVGLVVV

SEQ ID NO: 29758 - protein, 32 aa, Homo sapiens
MLTPALRHLSGSILLSLAYMDTSAHRHVTAGC

SEQ ID NO: 29759 - protein, 15 aa, Homo sapiens
RTAFWISKRLLILWL

SEQ ID NO: 29760 - protein, 9 aa, Homo sapiens
IHRLLILWL

SEQ ID NO: 29761 - protein, 22 aa, Homo sapiens
MSRRALPPLQYPRPSSPTTMRS

SEQ ID NO: 29762 - protein, 64 aa, Homo sapiens
IFWIPKSSIVLSLSCMVMPPVTIPTIKIKVAVFLKNVYLQMKVLLRVLKKSYMCWRRSSILNKK

SEQ ID NO: 29763 - protein, 21 aa, Homo sapiens
VEWNFLLLVMLTLIQGKHQAT

SEQ ID NO: 29764 - protein, 15 aa, Homo sapiens
IWNLLILNFITPLSG

SEQ ID NO: 29765 - protein, 22 aa, Homo sapiens
KLFQLLTWLSMKSSLTVTLTQS

SEQ ID NO: 29766 - protein, 18 aa, Homo sapiens
RHWTNFSWLAILKALSHL

SEQ ID NO: 29767 - protein, 30 aa, Homo sapiens
KKVFCTGIETEQQKYESFVWTLYVGKSYCF

SEQ ID NO: 29768 - protein, 72 aa, Homo sapiens
TAILSRMKIFLPVLLAALLGVERASSLMCFSCLNQKSNLYCLKPTICSDQDNYCVTVSASAGIASFPMQGIS

SEQ ID NO: 29769 - protein, 38 aa, Homo sapiens
MLVWLPWASAAARAFCAISVRPMAGCGQASPCWVPGCC

SEQ ID NO: 29770 - protein, 27 aa, Homo sapiens
MTQKLSSWELACLALLWQLCFPEMEER

SEQ ID NO: 29771 - protein, 146 aa, Homo sapiens
TGVFPASGARRGARCGRTVRGGGRGGRSAGCRREEALHQGPRRHSFNHIRASAGNACWRLSPVPSILKGKKALPTHSPAPRSWSRRSRAHGVQPVADPVPRAVGEMDVVCGTRRGRRRGRGWRARGRPRGGGFASRDQILEFQLGF

SEQ ID NO: 29772 - protein, 146 aa, Homo sapiens
TGVFPASGARRGARCGRTVRGGGRGGRSAGCRREEALHQGPRRHSFNHIRASAGNACWRLSPVPSILKGKKALPTHSPAPRSWSRRSRAHGVQPVADPVPRAVGEMDVVCGTRRGRRRGRGWRARGRPRGGGFASRDQILEFQEWL

SEQ ID NO: 29773 - protein, 16 aa, Homo sapiens
IWKMILDLMCLMMAHS

SEQ ID NO: 29774 - protein, 15 aa, Homo sapiens
LHRSLGILIVLIFKN

SEQ ID NO: 29775 - protein, 21 aa, Homo sapiens
VLLALLFKWLFKGVWCESVQI

SEQ ID NO: 29776 - protein, 11 aa, Homo sapiens
MWLWIQTLLGW

SEQ ID NO: 29777 - protein, 13 aa, Homo sapiens
IRLPKRIPMIILL

SEQ ID NO: 29778 - protein, 20 aa, Homo sapiens
ILFIFLYTIFSLTNVEPSNR

SEQ ID NO: 29779 - protein, 8 aa, Homo sapiens
MVCGTNKL

SEQ ID NO: 29780 - protein, 69 aa, Homo sapiens
LTALFLLCRSAASLPRVPRAQAANTRYPWRSEVGCCTDSSAKCPPTPGAGCTRSWPRAQRRRRRRRRRG

SEQ ID NO: 29781 - protein, 39 aa, Homo sapiens
LHLISGMQSALVMLEIMKASRLKLQMHISSRSILRKQLN

SEQ ID NO: 29782 - protein, 11 aa, Homo sapiens
ISYFNCMLFLY

SEQ ID NO: 29783 - protein, 10 aa, Homo sapiens
MSLWLHALLV

SEQ ID NO: 29784 - protein, 17 aa, Homo sapiens
RFILGTLLFLLQCHQVI

SEQ ID NO: 29785 - protein, 83 aa, Homo sapiens
RRRCCCHDQCHRDPLGRGAGRAKKRTCKGRRRNPDSVSSVSSKREASSRDQAETWNQFSTGTKTEHCQRVARRDSNICLQEDI

SEQ ID NO: 29786 - protein, 18 aa, Homo sapiens
MNSHRRHKIYPALILSCF

SEQ ID NO: 29787 - protein, 40 aa, Homo sapiens
IATRISKIRCSSRNMGVVLLARWCLVLLQSSGSQGMISSP

SEQ ID NO: 29788 - protein, 22 aa, Homo sapiens
LPLSLLLVRVADPCQHITEYFC

SEQ ID NO: 29789 - protein, 14 aa, Homo sapiens
MFLVWRKISKVLLL

SEQ ID NO: 29790 - protein, 116 aa, Homo sapiens
KMVAAKKTKKSLESINSRLQLVMKSGKYVLGYKQTLKMIRQGKAKLVILANNCPALRKSEIEYYAMLAKTGVHHYSGNNIELGTACGKYYRVCTLAIIDPGDSDIIRSMPEQTGEK

SEQ ID NO: 29791 - protein, 15 aa, Homo sapiens
MMVFMVLLQVNCLRT

SEQ ID NO: 29792 - protein, 12 aa, Homo sapiens
VILIAVVVRVTT

SEQ ID NO: 29793 - protein, 15 aa, Homo sapiens
MMSILMFFQFWMFAH

SEQ ID NO: 29794 - protein, 15 aa, Homo sapiens
LVEKSIGMILLFLIL

SEQ ID NO: 29795 - protein, 681 aa, Homo sapiens
IPVDFCPSALAPRSPPPGSGPQPRHSLSSSHGKVAACGPAGSRAEMNPSAPSYPMASLYVGDLHPDVTEAMLYEKFSPAGPILSIRVCRDMITRRSLGYAYVNFQQPADAERALDTMNFDVIKGKPVRIMWSQRDPSLRKSGVGNIFIKNLDKSIDNKALYDTFSAFGNILSCKVVCDENGSKGYGFVHFETQEAAERAIEKMNGMLLNDRKVFVGRFKSRKEREAELGARAKEFTNVYIKNFGEDMDDERLKDLFGKFGPALSVKVMTDESGKSKGFGFVSFERHEDAQKAVDEMNGKELNGKQIYVGRAQKKVERQTELKRKFEQMKQDRITRYQGVNLYVKNLDDGIDDERLRKEFSPFGTITSAKVMMEGGRSKGFGFVCFSSPEEATKAVTEMNGRIVATKPLYVALAQRKEERQAHLTNQYMQRMASVRAVPNPVINPYQPAPPSGYFMAAIPQTQNRAAYYPPSQIAQLRPSPRWTAQGARPHPFQNMPGAIRPAAPRPPFSTMRPASSQVPRVMSTQRVANTSTQTMGPRPAAAAAAATPAVRTVPQYKYAAGVRNPQQHLNAQPQVTMQQPAVHVQGQEPLTASMLASAPPQEQKQMLGERLFPLIQAMHPTLAGKITGMLLEIDNSELLHMLESPESLRSKVDEAVAVLQAHQAKEAAQKAVNSATGVPTV

SEQ ID NO: 29796 - protein, 17 aa, Homo sapiens
LILQNCRRIQHLWWRKC

SEQ ID NO: 29797 - protein, 14 aa, Homo sapiens
LAVVIWRLTLSLPV

SEQ ID NO: 29798 - protein, 17 aa, Homo sapiens
IHQYKQMHLFTLTLAFF

SEQ ID NO: 29799 - protein, 390 aa, Homo sapiens
TPAVHAFGPPWLTHRPGRRTMDAPRQVVNFGPGPAKLPHSVLLEIQKELLDYKGVGISVLEMSHRSSDFAKIINNTENLVRELLAVPDNYKVIFLQGGGCGQFSAVPLNLIGLKAGRCADYVVTGAWSAKAAEEAKKFGTINIVHPKLGSYTKIPDPSTWNLNPDASYVYYCANETVHGVEFDFIPDVKGAVLVCDMSSNFLSKPVDVSKFGVIFAGAQKNVGSAGVTVVIVRDDLLGFALRECPSVLEYKVQAGNSSLYNTPPCFSIYVMGLVLEWIKNNGGAAAMEKLSSIKSQTIYEIIDNSQGFYVCPVEPQNRSKMNIPFRIGNAKGDDALEKRFLDKALELNMLSLKGHRSVGGIRASLYNAVTIEDVQKLAAFMKKFLEMHQL

SEQ ID NO: 29800 - protein, 16 aa, Homo sapiens
VILLVYSTFLWQNHMY

SEQ ID NO: 29801 - protein, 23 aa, Homo sapiens
IMKKIKRKAFWKSAGSCLVILVD

SEQ ID NO: 29802 - protein, 10 aa, Homo sapiens
IFTRSFGKKD

SEQ ID NO: 29803 - protein, 40 aa, Homo sapiens
LLAGGLPDRKEDRPRTVQRGVQGHLPAGQEDSGSEEGADL

SEQ ID NO: 29804 - protein, 11 aa, Homo sapiens
LWMSLLLVSTA

SEQ ID NO: 29805 - protein, 40 aa, Homo sapiens
LRLQEQLHWHGRILFQAGLLLCSTVLVEEFYPVYCLQSLH

SEQ ID NO: 29806 - protein, 8 aa, Homo sapiens
LLLICHRS

SEQ ID NO: 29807 - protein, 18 aa, Homo sapiens
ISLDSAYLMFSILEVSLL

SEQ ID NO: 29808 - protein, 14 aa, Homo sapiens
VGYFAPNLARHVNS

SEQ ID NO: 29809 - protein, 22 aa, Homo sapiens
ILNNFLLIGSILTTTSQNRLCV

SEQ ID NO: 29810 - protein, 15 aa, Homo sapiens
KYTSFKEMLPLILML

SEQ ID NO: 29811 - protein, 56 aa, Homo sapiens
IQFSVSLVQMKKPTPMGERDLLKFTQDHRAGQQEGAQVHALHHLPLRFADSPDAVR

SEQ ID NO: 29812 - protein, 7 aa, Homo sapiens
IILKLME

SEQ ID NO: 29813 - protein, 7 aa, Homo sapiens
VGERPVR

SEQ ID NO: 29814 - protein, 17 aa, Homo sapiens
RESRGHQGPPKAVPGAG

SEQ ID NO: 29815 - protein, 13 aa, Homo sapiens
VLPDLPKWVAWID

SEQ ID NO: 29816 - protein, 30 aa, Homo sapiens
INQNLPSMMVLLLQLDCLTMDIYLRVQLKI

SEQ ID NO: 29817 - protein, 13 aa, Homo sapiens
MNANPCLFTTKPS

SEQ ID NO: 29818 - protein, 8 aa, Homo sapiens
MLMLFVLI

SEQ ID NO: 29819 - protein, 10 aa, Homo sapiens
MRLIMNTAKE

SEQ ID NO: 29820 - protein, 715 aa, Homo sapiens
IGVFRECEREAPRPVFLDLPFAWFVAPCDPGPLPPASRKLRCAPVLRPVAGLPAAAQLAGKMKLSLVAAMLLLLSAARAEEEDKKEDVGTVVGIDLGTTYSCVGVFKNGRVEIIANDQGNRITPSYVAFTPEGERLIGDAAKNQLTSNPENTVFDAKRLIGRTWNDPSVQQDIKFLPFKVVEKKTKPYIQVDIGGGQTKTFAPEEISAMVLTKMKETAEAYLGKKVTHAVVTVPAYFNDAQRQATKDAGTIAGLNVMRIINEPTAAAIAYGLDKREGEKNILVFDLGGGTFDVSLLTIDNGVFEVVATNGDTHLGGEDFDQRVMEHFIKLYKKKTGKDVRKDNRAVQKLRREVEKAKRALSSQHQARIEIESFYEGEDFSETLTRAKFEELNMDLFRSTMKPVQKVLEDSDLKKSDIDEIVLVGGSTRIPKIQQLVKEFFNGKEPSRGINPDEAVAYGAAVQAGVLSGDQDTGDLVLLDVCPLTLGIETVGGVMTKLIPRNTVVPTKKSQIFSTASDNQPTVTIKVYEGERPLTKDNHLLGTFDLTGIPPAPRGVPQIEVTFEIDVNGILRVTAEDKGTGNKNKITITNDQNRLTPEEIERMVNDAEKFAEEDKKLKERIDTRNELESYAYSLKNQIGDKEKLGGKLSSEDKETMEKAVEEKIEWLESHQDADIEDFKAKKKELEEIVQPIISKLYGSAGPPPTGEEDTAEKDEL

SEQ ID NO: 29821 - protein, 16 aa, Homo sapiens
MTRECVRWFSLIMMLT

SEQ ID NO: 29822 - protein, 14 aa, Homo sapiens
ISPNWMIFIRSMLI

SEQ ID NO: 29823 - protein, 32 aa, Homo sapiens
LFYSLFRMIVIIRLATFVMNKEEKAKQPLVLA

SEQ ID NO: 29824 - protein, 63 aa, Homo sapiens
IAPHVCALRGKGRADSTSSPGQRPGARVRQSAPRVAFPAGVSPPSRAPQRPAEQSRWVSQVKT

SEQ ID NO: 29825 - protein, 25 aa, Homo sapiens
VRLAGGGKGAGARRRQEVCAREQQK

SEQ ID NO: 29826 - protein, 22 aa, Homo sapiens
MWRLTEAWLLNLSIALLSKTPQ

SEQ ID NO: 29827 - protein, 31 aa, Homo sapiens
MWRDSLCAAAGYALGAGTRLRSVLSSRKLQP

SEQ ID NO: 29828 - protein, 17 aa, Homo sapiens
RAELGTLWAGLLPAWTL

SEQ ID NO: 29829 - protein, 13 aa, Homo sapiens
MNIILLMCLLLFI

SEQ ID NO: 29830 - protein, 9 aa, Homo sapiens
LKKNLKITW

SEQ ID NO: 29831 - protein, 10 aa, Homo sapiens
MSRRLLALML

SEQ ID NO: 29832 - protein, 15 aa, Homo sapiens
IFSLEWEILCLTSLL

SEQ ID NO: 29833 - protein, 52 aa, Homo sapiens
LVLTSMLKTRSPCAHCLHPLPLIATRTLKGLRRTPEAASGATRLLTSLAAPR

SEQ ID NO: 29834 - protein, 12 aa, Homo sapiens
MVELPMEVNLNA

SEQ ID NO: 29835 - protein, 14 aa, Homo sapiens
ILERWRLVPWKLRS

SEQ ID NO: 29836 - protein, 53 aa, Homo sapiens
IGTAVGVAISAGFLALKICMIRRHLFDDDSSDLKSTPGGLSGETTISPKEMHR

SEQ ID NO: 29837 - protein, 36 aa, Homo sapiens
MRKLIAGIIFLKIWTCTVRTSTDLMLSCLISGQVAV

SEQ ID NO: 29838 - protein, 16 aa, Homo sapiens
MKLVWKLLIVCLLLHF

SEQ ID NO: 29839 - protein, 10 aa, Homo sapiens
RTADPAKCHS

SEQ ID NO: 29840 - protein, 10 aa, Homo sapiens
LFLLLPSPFF

SEQ ID NO: 29841 - protein, 11 aa, Homo sapiens
MMKMIGMFLIY

SEQ ID NO: 29842 - protein, 40 aa, Homo sapiens
TPPAAARRSQVPACAAAAAIPHASRARPTLPIPGTKTGIL

SEQ ID NO: 29843 - protein, 12 aa, Homo sapiens
KILMWLLLFESW

SEQ ID NO: 29844 - protein, 23 aa, Homo sapiens
LSSGAVLLVLPLGMTAQHSRRSG

SEQ ID NO: 29845 - protein, 16 aa, Homo sapiens
IKHLLFRDLVMWAYTL

SEQ ID NO: 29846 - protein, 10 aa, Homo sapiens
VPALVLLFWF

SEQ ID NO: 29847 - protein, 38 aa, Homo sapiens
KPGFWWLQWWGWWLSCSTPPSTRLRRAIWLCTTGEELY

SEQ ID NO: 29848 - protein, 38 aa, Homo sapiens
LKHIPQPGADSDRRSCPLAPCRRTERPGCRRRACRAPG

SEQ ID NO: 29849 - protein, 12 aa, Homo sapiens
LGWPRHLCLFVL

SEQ ID NO: 29850 - protein, 7 aa, Homo sapiens
IVFIWMY

SEQ ID NO: 29851 - protein, 16 aa, Homo sapiens
RTLRLTVFSLLMMSSC

SEQ ID NO: 29852 - protein, 539 aa, Homo sapiens
IKSSKMIWYILIIGILLPQSLAHPGFFTSIGQMTDLIHTEKDLVTSLKDYIKAEEDKLEQIKKWAEKLDRLTSTATKDPEGFVGHPVNAFKLMKRLNTEWSELENLVLKDMSDGFISNLTIQRQYFPNDEDQVGAAKALLRLQDTYNLDTDTISKGNLPGVKHKSFLTAEDCFELGKVAYTEADYYHTELWMEQALRQLDEGEISTIDKVSVLDYLSYAVYQQGDLDKALLLTKKLLELDPEHQRANGNLKYFEYIMAKEKDVNKSASDDQSDQKTTPKKKGVAVDYLPERQKYEMLCRGEGIKMTPRRQKKLFCRYHDGNRNPKFILAPAKQEDEWDKPRIIRFHDIISDAEIEIVKDLAKPRLSRATVHDPETGKLTTAQYRVSKSAWLSGYENPVVSRINMRIQDLTGLDVSTAEELQVANYGVGGQYEPHFDFARKDEPDAFKELGTGNRIATWLFYMSDVSAGGATVFPEVGASVWPKKGTAVFWYNLFASGEGDYSTRHAACPVLVGNKWVSNKWLHERGQEFRRPCTLSELE

SEQ ID NO: 29853 - protein, 22 aa, Homo sapiens
IFGAFLLSFGFHLCVSYRNCCF

SEQ ID NO: 29854 - protein, 9 aa, Homo sapiens
MAYCLWILC

SEQ ID NO: 29855 - protein, 804 aa, Homo sapiens
IAPVGHLRQAPPSPGGVAESSQRSELEAHVGAVSGSEMPRQFPKLNISEVDEQVRLLAEKVFAKVLREEDSKDALSLFTVPEDCPIGQKEAKERELQKELAEQKSVETAKRKKSFKMIRSQSLSLQMPPQQDWKGPPAASPAMSPTTPVVTGATSLPTPAPYAMPEFQRVTISGDYCAGITLEDYEQAAKSLAKALMIREKYARLAYHRFPRITSQYLGHPRADTAPPEEGLPDFHPPPLPQEDPYCLDDAPPNLDYLVHMQGGILFVYDNKKMLEHQEPHSLPYPDLETYTVDMSHILALITDGPTKTYCHRRLNFLESKFSLHEMLNEMSEFKELKSNPHRDFYNVRKVDTHIHAAACMNQKHLLRFIKHTYQTEPDRTVAEKRGRKITLRQVFDGLHMDPYDLTVDSLDVHAGRQTFHRFDKFNSKYNPVGASELRDLYLKTENYLGGEYFARMVKEVARELEESKYQYSEPRLSIYGRSPEEWPNLAYWFIQHKVYSPNMRWIIQVPRIYDIFRSKKLLPNFGKMLENIFLPLFKATINPQDHRELHLFLKYVTGFDSVDDESKHSDHMFSDKSPNPDVWTSEQNPPYSYYLYYMYANIMVLNNLRRERGLSTFLFRPHCGEAGSITHLVSAFLTADNISHGLLLKKSPVLQYLYYLAQIPIAMSPLSNNSLFLEYSKNPLREFLHKGLHVSLSTDDPMQFHYTKEALMEEYAIAAQVWKLSTCDLCEIARNSVLQSGLSHQEKQKFLGQNYYKEGPEGNDIRKTNVAQIRMAFRYETLCNELSFLSDAMKSEEITALTN

SEQ ID NO: 29856 - protein, 15 aa, Homo sapiens
LMLGGAQRLVAFISG

SEQ ID NO: 29857 - protein, 30 aa, Homo sapiens
KEFFSMICGMLLLQTYGTGRFSRRRLQSMV

SEQ ID NO: 29858 - protein, 10 aa, Homo sapiens
IFLSLIFIRI

SEQ ID NO: 29859 - protein, 16 aa, Homo sapiens
LWGPVWTRMTFLLLAP

SEQ ID NO: 29860 - protein, 731 aa, Homo sapiens
IVRDRAGEIRESREEAGMSEEIITPVYCTGVSAQVQKQRARELGLGRHENAIKYLGQDYEQLRVRCLQSGTLFRDEAFPPVPQSLGYKDLGPNSSKTYGIKWKRPTELLSNPQFIVDGATRTDICQGALGDCWLLAAIASLTLNDTLLHRVVPHGQSFQNGYAGIFHFQLWQFGEWVDVVVDDLLPIKDGKLVFVHSAEGNEFWSALLEKAYAKVNGSYEALSGGSTSEGFEDFTGGVTEWYELRKAPSDLYQIILKALERGSLLGCSIDISSVLDMEAITFKKLVKGHAYSVTGAKQVNYRGQVVSLIRMRNPWGEVEWTGAWSDSSSEWNNVDPYERDQLRVKMEDGEFWMSFRDFMREFTRLEICNLTPDALKSRTIRKWNTTLYEGTWRRGSTAGGCRNYPATFWVNPQFKIRLDETDDPDDYGDRESGCSFVLALMQKHRRRERRFGRDMETIGFAVYEVPPELVGQPAVHLKRDFFLANASRARSEQFINLREVSTRFRLPPGEYVVVPSTFEPNKEGDFVLRFFSEKSAGTVELDDQIQANLPDEQVLSEEEIDENFKALFRQLAGEDMEISVKELRTILNRIISKHKDLRTKGFSLESCRSMVNLMDRDGNGKLGLVEFNILWNRIRNYLSIFRKFDLDKSGSMSAYEMRMAIESAGFKLNKKLYELIITRYSEPDLAVDFDNFVCCLVRLETMFRFFKTLDTDLDGVVTFDLFKWLQLTMFA

SEQ ID NO: 29861 - protein, 37 aa, Homo sapiens
MERMSRRRCTARSKTDTVLGPRAHVPGRRGSSINDQP

SEQ ID NO: 29862 - protein, 29 aa, Homo sapiens
LDPGQRPHRGELHRVHRELPRPLWFPRRI

SEQ ID NO: 29863 - protein, 12 aa, Homo sapiens
IYLYCYMGLSMA

SEQ ID NO: 29864 - protein, 10 aa, Homo sapiens
MWIASRIWIL

SEQ ID NO: 29865 - protein, 15 aa, Homo sapiens
VAPNLTGRRTSAGAR

SEQ ID NO: 29866 - protein, 20 aa, Homo sapiens
RMMSSLVFLAFWDRMESQTL

SEQ ID NO: 29867 - protein, 43 aa, Homo sapiens
IQVLLGLQVSLAVQVFIYDQESSPGIQEEIQVKVAIQEAPQVS

SEQ ID NO: 29868 - protein, 44 aa, Homo sapiens
RILFESTRVVQRVQSCSFCMEEVILPFLGLCSRQRLLVEFSVGL

SEQ ID NO: 29869 - protein, 35 aa, Homo sapiens
IIQIKLTGHLFLRKSIFLIFLPETYIGIMLIVCDG

SEQ ID NO: 29870 - protein, 22 aa, Homo sapiens
TELPSPCLAAWWRGGCSKKPER

SEQ ID NO: 29871 - protein, 38 aa, Homo sapiens
LWIQYANMDQGIDVANIMKIIASLIALKVSSECLAWGT

SEQ ID NO: 29872 - protein, 15 aa, Homo sapiens
VFSMMFSVLLGIKNL

SEQ ID NO: 29873 - protein, 11 aa, Homo sapiens
INPLQIKETCR

SEQ ID NO: 29874 - protein, 46 aa, Homo sapiens
LQVRVFIMWVTVMMSNAFAVMVDSGVGNLEMIHGFNMPSGFQGVST

SEQ ID NO: 29875 - protein, 75 aa, Homo sapiens
MTLSPQERDGGSLEAECRLRCPRRPSSVASNSSGQTCSYLSISSGPTYPRMVWSAAHTLVTEPPFWLQGCISPLD

SEQ ID NO: 29876 - protein, 49 aa, Homo sapiens
VLSMSLIRTLIIGLPGSWLRRGFINSITGLMTEPGTLWDESLEEQFTQV

SEQ ID NO: 29877 - protein, 15 aa, Homo sapiens
LLISTWSRHGEVMCS

SEQ ID NO: 29878 - protein, 70 aa, Homo sapiens
KTWARLVCALLWVLELLQWAQWAPLLQFCPWEPLFPGLVVPHRPLEMRTERWMTPLWAPRSPRLWRRSCS

SEQ ID NO: 29879 - protein, 222 aa, Homo sapiens
ILEREAEQSRLGATERAAAAAMNPEYDYLFKLLLIGDSGVGKSCLLLRFADDTYTESYISTIGVDFKIRTIELDGKTIKLQIWDTAGQERFRTITSSYYRGAHGIIVVYDVTDQESYANVKQWLQEIDRYASENVNKLLVGNKSDLTTKKVVDNTTAKEFADSLGIPFLETSAKNATNVEQAFMTMAAEIKKRMGPGAASGGERPNLKIDSTPVKPAGGGCC

SEQ ID NO: 29880 - protein, 40 aa, Homo sapiens
MPKIRVAAWSLALLGSPMTSSLFKFPLSPRKITVTYRLPK

SEQ ID NO: 29881 - protein, 17 aa, Homo sapiens
IGAIWMVLLPITWCLRM

SEQ ID NO: 29882 - protein, 15 aa, Homo sapiens
KRPPTTLLLSLCTCV

SEQ ID NO: 29883 - protein, 500 aa, Homo sapiens
ILDLIPPKKRPPGKERPGGEDSNGSHSRALGERPLFTSTMSLDIQSLDIQCEELSDARWAELLPLLQQCQVVRLDDCGLTEARCKDISSALRVNPALAELNLRSNELGDVGVHCVLQGLQTPSCKIQKLSLQNCCLTGAGCGVLSSTLRTLPTLQELHLSDNLLGDAGLQLLCEGLLDPQCRLEKLQLEYCSLSAASCEPLASVLRAKPDFKELTVSNNDINEAGVRVLCQGLKDSPCQLEALKLESCGVTSDNCRDLCGIVASKASLRELALGSNKLGDVGMAELCPGLLHPSSRLRTLWIWECGITAKGCGDLCRVLRAKESLKELSLAGNELGDEGARLLCETLLEPGCQLESLWVKSCSFTAACCSHFSSVLAQNRFLLELQISNNRLEDAGVRELCQGLGQPGSVLRVLWLADCDVSDSSCSSLAATLLANHSLRELDLSNNCLGDAGILQLVESVRQPGCLLEQLVLYDIYWSEEMEDRLQALEKDKPSLRVIS

SEQ ID NO: 29884 - protein, 27 aa, Homo sapiens
LLKQQAVYACLVLMLTVMTMTMMFPKN

SEQ ID NO: 29885 - protein, 18 aa, Homo sapiens
MRQPYLMMWTSLGMSYVL

SEQ ID NO: 29886 - protein, 26 aa, Homo sapiens
TGPGTGSLGPTADAPSTPCAKRPNRS

SEQ ID NO: 29887 - protein, 9 aa, Homo sapiens
ILSLVSLFC

SEQ ID NO: 29888 - protein, 61 aa, Homo sapiens
IRHPTGHGRERRRRSLRRRQGHRRLSRRRRRFRLQLLTGSSVFHNEPCLQPRAAWGSLWQP

SEQ ID NO: 29889 - protein, 39 aa, Homo sapiens
VEAQALRVRGPRYVCGSGSATLSFSSPGLGAECGRRERP

SEQ ID NO: 29890 - protein, 11 aa, Homo sapiens
IIWITALFSLV

SEQ ID NO: 29891 - protein, 13 aa, Homo sapiens
IPQSSKAKLATTS

SEQ ID NO: 29892 - protein, 12 aa, Homo sapiens
VSSFWIALGFLC

SEQ ID NO: 29893 - protein, 22 aa, Homo sapiens
MYWFLQLLHPAVSRVCPMWGQT

SEQ ID NO: 29894 - protein, 29 aa, Homo sapiens
LFEESKQPLADEVRAREPPRERCRCEVQH

SEQ ID NO: 29895 - protein, 31 aa, Homo sapiens
ILQKWKLLLILLRWQKISLQKLLYLPPSRVP

SEQ ID NO: 29896 - protein, 50 aa, Homo sapiens
MWIKLVGSVRCRSNGGAHNCHGYWQLVFGFGARGDSSQMPSHPHIPFHRF

SEQ ID NO: 29897 - protein, 40 aa, Homo sapiens
VPSGSGLVGRTRARVARLGIDVSEFRYNSSLLEGFLKIKS

SEQ ID NO: 29898 - protein, 16 aa, Homo sapiens
LICISKPPIFLCLMLI

SEQ ID NO: 29899 - protein, 17 aa, Homo sapiens
KWTLTHLMLMFMAQTGT

SEQ ID NO: 29900 - protein, 76 aa, Homo sapiens
LVILHLFSQLPAAWVLGPPCCSPPSCCFSPATAPCAATHLPTAPILTCWAPGSSRWAPAVPSAMSTARLWDHKKKK

SEQ ID NO: 29901 - protein, 72 aa, Homo sapiens
LVILHLFSQLPAAWVLGPPCCSPPSCCFSPATAPCAATHLPTAPILTCWAPGSSRTTRKKSSGVPSEAGYSI

SEQ ID NO: 29902 - protein, 13 aa, Homo sapiens
MSSYMVLMVQLLS

SEQ ID NO: 29903 - protein, 17 aa, Homo sapiens
ISGSHYRKAVGHLWKRG

SEQ ID NO: 29904 - protein, 17 aa, Homo sapiens
IYVFYSFCVFDVSLWKS

SEQ ID NO: 29905 - protein, 54 aa, Homo sapiens
IHPFRFLWRPSTVKEMKVENLEPASNDQALSLCLTTVFRCSCFYYPYFTTGEEI

SEQ ID NO: 29906 - protein, 43 aa, Homo sapiens
MILQILMTSLNLIFYNQCQIPQNRTTNPKTGFFSIIPIKGLKG

SEQ ID NO: 29907 - protein, 17 aa, Homo sapiens
LVLVLLYLCLRFHLSYW

SEQ ID NO: 29908 - protein, 16 aa, Homo sapiens
LGQIPDGRSKCVSWTH

SEQ ID NO: 29909 - protein, 11 aa, Homo sapiens
VMKIAMIMTMI

SEQ ID NO: 29910 - protein, 37 aa, Homo sapiens
IRGVSVLLILLFLQLVSGHPGGTRIYPRPGQSCYHFP

SEQ ID NO: 29911 - protein, 101 aa, Homo sapiens
MILPDKKLIQEKERRLTASEQNFEQQDFVFFASNCTLPLPTFKSEIPTLKTQTRQKDTFLVYFLRSKKRQCPGNRTRRIHQDSFLICSPIPYWPREELLRT

SEQ ID NO: 29912 - protein, 7 aa, Homo sapiens
MTFSPKR

SEQ ID NO: 29913 - protein, 7 aa, Homo sapiens
MIYFQPS

SEQ ID NO: 29914 - protein, 33 aa, Homo sapiens
LTSTAGLTFRLIFLVAPPLHSRPKSPRTFSSSC

SEQ ID NO: 29915 - protein, 10 aa, Homo sapiens
VGVIKRRKFR

SEQ ID NO: 29916 - protein, 25 aa, Homo sapiens
IILNSSLVLLVSWLLSMQILQVWNA

SEQ ID NO: 29917 - protein, 382 aa, Homo sapiens
IVKVSLHPAVMSKSESPKEPEQLRKLFIGGLSFETTDESLRSHFEQWGTLTDCVVMRDPNTKRSRGFGFVTYATVEEVDAAMNARPHKVDGRVVEPKRAVSREDSQRPGAHLTVKKIFVGGIKEDTEEHHLRDYFEQYGKIEVIEIMTDRGSGKKRGFAFVTFDDHDSVDKIVIQKYHTVNGHNCEVRKALSKQEMASASSSQRGRSGSGNFGGGRGGGFGGNDNFGRGGNFSGRGGFGGSRGGGGYGGSGDGYNGFGNDGGYGGGGPGYSGGSRGYGSGGQGYGNQGSGYGGSGSYDSYNNGGGGGFGGGSGSNFGGGGSYNDFGNYNNQSSNFGPMKGGNFGGRSSGPYGGGGQYFAKPRNQGGYGGSSSSSSYGSGRRF

SEQ ID NO: 29918 - protein, 17 aa, Homo sapiens
TKVSALMCFLPLMHWVS

SEQ ID NO: 29919 - protein, 73 aa, Homo sapiens
MLKSASLSGSPRAPRWASSSRWRRAASWTSTWRLQDQITKEFTKETENPVGNTHLLLTWMEHTNFVLVTGCPP

SEQ ID NO: 29920 - protein, 53 aa, Homo sapiens
RNQCKRLQKEEKENPEQQNQNNQWNPKNLLSQKNLASLQNQKKNKKKLQTHLK

SEQ ID NO: 29921 - protein, 29 aa, Homo sapiens
LQIIWCLILCCSGKTVVPDSGRQSQKHVE

SEQ ID NO: 29922 - protein, 12 aa, Homo sapiens
KKIKLLSFILMA

SEQ ID NO: 29923 - protein, 109 aa, Homo sapiens
VLAPPPGDRCSRPAPFSTVTMCDRKAVIKNADMSEEMQQDSVECATQALEKYNIEKDIAAHIKKEFDKKYNPTWHCIVGRNFGSYVTHETKHFIYFYLGQVAILLFKSG

SEQ ID NO: 29924 - protein, 22 aa, Homo sapiens
KIPSEGRSAALSHGARASVLCM

SEQ ID NO: 29925 - protein, 32 aa, Homo sapiens
TELRLSLGLSAIFLGECFLVPALGFRVQSIDI

SEQ ID NO: 29926 - protein, 12 aa, Homo sapiens
LYWGYLGLCSLL

SEQ ID NO: 29927 - protein, 62 aa, Homo sapiens
IILLIDKQSGRGGDSRRAVIAKPWETRRAPPGRSGSRSRPRMRVTGTVASAPSGTAPRPSSA

SEQ ID NO: 29928 - protein, 40 aa, Homo sapiens
TGPNPRVKGAVPKPERGRGGPAPPSDLQCRRPQDQTWPRT

SEQ ID NO: 29929 - protein, 12 aa, Homo sapiens
KLGLNMKRNSKP

SEQ ID NO: 29930 - protein, 54 aa, Homo sapiens
IVGSGSLGMNLLSAFKLTWSESLDEPVGPFLLARWFGTSGFGTVRGWTKILRGC

SEQ ID NO: 29931 - protein, 25 aa, Homo sapiens
RGFCFCFFLSFSCCRRVRRTFCLPP

SEQ ID NO: 29932 - protein, 70 aa, Homo sapiens [sequence omitted]

SEQ ID NO: 29933 - protein, 12 aa, Homo sapiens
IISLSILMSIVL

SEQ ID NO: 29934 - protein, 12 aa, Homo sapiens
ISSHIQWVFMLL

SEQ ID NO: 29935 - protein, 53 aa, Homo sapiens
MVMIMASVGFVWSSPGLMEVGVGGPVVGGMGLLQEDLISEFLFQKTIRKWLQS

SEQ ID NO: 29936 - protein, 12 aa, Homo sapiens
MTSAMMTSGFLV

SEQ ID NO: 29937 - protein, 20 aa, Homo sapiens
RTTISFLIVQVRLSCTLTCL

SEQ ID NO: 29938 - protein, 9 aa, Homo sapiens
LFYIQVLLC

SEQ ID NO: 29939 - protein, 21 aa, Homo sapiens
VRTPATWYSSSWMLIIACLPP

SEQ ID NO: 29940 - protein, 289 aa, Homo sapiens
KMAGEKVEKPDTKEKKPEAKKVDAGGKVKKGNLKAKKPKKGKPHCSRNPVLVRGIGRYSRSAMYSRKAMYKRKYSAAKSKVEKKKKEKVLATVTKPVGGDKNGGTRVVKLRKMPRYYPTEDVPRKLLSHGKKPFSQHVRKLRASITPGTILIILTGRHRGKRVVFLKQLASGLLLVTGPLVLNRVPLRRTHQKFVIATSTKIDISNVKIPKHLTDAYFKKKKLRKPRHQEGEIFDTEKEKYEITEQRKIDQKAVDSQILPKIKAIPQLQGYLRSVFALTNGIYPHKLVF

SEQ ID NO: 29941 - protein, 349 aa, Homo sapiens
TTVTEVSRAFSLLCKMATLKEKLIAPVAEEEATVPNNKITVVGVGQVGMACAISILGKSLADELALVDVLEDKLKGEMMDLQHGSLFLQTPKIVADKDYSVTANSKIVVVTAGVRQQEGESRLNLVQRNVNVFKFIIPQIVKYSPDCIIIVVSNPVDILTYVTWKLSGLPKHRVIGSGCNLDSARFRYLMAEKLGIHPSSCHGWILGEHGDSSVAVWSGVNVAGVSLQELNPEMGTDNDSENWKEVHKMVVESAYEVIKLKGYTNWAIGLSVADLIESMLKNLSRIHPVSTMVKGMYGIENEVFLSLPCILNARGLTSVINQKLKDDEVAQLKKSADTLWDIQKDLKDL

SEQ ID NO: 29942 - protein, 14 aa, Homo sapiens
TWAAPGAALVLVSF

SEQ ID NO: 29943 - protein, 37 aa, Homo sapiens
LTYIFGKVEAFGTEVLPGETKLLNGNVASAMGRMHSV

SEQ ID NO: 29944 - protein, 22 aa, Homo sapiens
IFLDSILWFGTVVLESRVVASF

SEQ ID NO: 29945 - protein, 21 aa, Homo sapiens
MLLHQRIMKNLRLHQGCCDYR

SEQ ID NO: 29946 - protein, 28 aa, Homo sapiens
VLVLSSLRVRRWLSWLRVLTVPCLEIPC

SEQ ID NO: 29947 - protein, 19 aa, Homo sapiens
MVLDCHLKKLLLVLAMIDY

SEQ ID NO: 29948 - protein, 33 aa, Homo sapiens
IRNPKKRRQRSRLLPQNGVTRRIGALFSILMSY

SEQ ID NO: 29949 - protein, 21 aa, Homo sapiens
LVTFLYMVRFYILIRPTPWDI

SEQ ID NO: 29950 - protein, 24 aa, Homo sapiens
MSKSVIWNALKTFHLLFLIDCLIP

SEQ ID NO: 29951 - protein, 17 aa, Homo sapiens
MLCLLNLYNLLQFLLQQ

SEQ ID NO: 29952 - protein, 14 aa, Homo sapiens
IGSKIYLIVHLLLS

SEQ ID NO: 29953 - protein, 11 aa, Homo sapiens
LRTLKEILLRG

SEQ ID NO: 29954 - protein, 685 aa, Homo sapiens
TVTLGSEGDGRPPTYHLEEMEQEPQNGEPAEIKIIREAYKKAFLFVNKGLNTDELGQKEEAKNYYKQGIGHLLRGISISSKESEHTGPGWESARQMQQKMKETLQNVRTRLEILEKGLATSLQNDLQEVPKLYPEFPPKDMCEKLPEPQSFSSAPQHAEVNGNTSTPSAGAVAAPASLSLPSQSCPAEAPPAYTPQAAEGHYTVSYGTDSGEFSSVGEEFYRNHSQPPPLETLGLDADELILIPNGVQIFFVNPAGEVSAPSYPGYLRIVRFLDNSLDTVLNRPPGFLQVCDWLYPLVPDRSPVLKCTAGAYMFPDTMLQAAGCFVGVVLSSELPEDDRELFEDLLRQMSDLRLQANWNRAEEENEFQIPGRTRPSSDQLKEASGTDVKQLDQGNKDVRHKGKRGKRAKDTSSEEVNLSHIVPCEPVPEEKPKELPEWSEKVAHNILSGASWVSWGLVKGAEITGKAIQKGASKLRERIQPEEKPVEVSPAVTKGLYIAKQATGGAAKVSQFLVDGVCTVANCVGKELAPHVKKHGSKLVPESLKKDKDGKSPLDGAMVVAASSVQGFSTVWQGLECAAKCIVNNVSAETVQTVRYKYGYNAGEATHHAVDSAVNVGVTAYNINNIGIKAMVKKTATQTGHTLLEDYQIVDNSQRENQEGAANVNVRGEKDEQTKEVKEAKKKDK

SEQ ID NO: 29955 - protein, 15 aa, Homo sapiens
VVSTLKMLLLSLLKQ

SEQ ID NO: 29956 - protein, 12 aa, Homo sapiens
VLFSLSFSLKSR

SEQ ID NO: 29957 - protein, 11 aa, Homo sapiens
LYIELRRINQF

SEQ ID NO: 29958 - protein, 36 aa, Homo sapiens
VDHFESPSCKCLALCYFIASFWRQFQHSPRPAEKGS

SEQ ID NO: 29959 - protein, 20 aa, Homo sapiens
ITPQTELRVFYPNQSLDFAA

SEQ ID NO: 29960 - protein, 9 aa, Homo sapiens
IFITFSVLG

SEQ ID NO: 29961 - protein, 18 aa, Homo sapiens
LQDLLPKAIKNGQRISVR

SEQ ID NO: 29962 - protein, 16 aa, Homo sapiens
MMPNHRAGMTDTVKAS

SEQ ID NO: 29963 - protein, 557 aa, Homo sapiens
VSSLSVTMSAAWIPALGLGVCLLLLPGPAGSEGAAPIAITCFTRGLDIRKEKADVLCPGGCPLEEFSVYGNIVYASVSSICGAAVHRGVISNSGGPVRVYSLPGRENYSSVDANGIQSQMLSRWSASFTVTKGKSSTQEATGQAVSTAHPPTGKRLKKTPEKKTGNKDCKADIAFLIDGSFNIGQRRFNLQKNFVGKVALMLGIGTEGPHVGLVQASEHPKIEFYLKNFTSAKDVLFAIKEVGFRGGNSNTGKALKHTAQKFFTVDAGVRKGIPKVVVVFIDGWPSDDIEEAGIVAREFGVNVFIVSVAKPIPEELGMVQDVTFVDKAVCRNNGFFSYHMPNWFGTTKYVKPLVQKLCTHEQMMCSKTCYNSVNIAFLIDGSSSVGDSNFRLMLEFVSNIAKTFEISDIGAKIAAVQFTYDQRTEFSFTDYSTKENVLAVIRNIRYMSGGTATGDAISFTVRNVFGPIRESPNKNFLVIVTDGQSYDDVQGPAAAAHDAGITIFSVGVAWAPLDDLKDMASKPKESHAFFTREFTGLEPIVSDVIRGICRDFLESQQ

SEQ ID NO: 29964 - protein, 27 aa, Homo sapiens
IYWNLCMLIWAYLGGGPLLHVQSLPAA

SEQ ID NO: 29965 - protein, 38 aa, Homo sapiens
ILSLTAATWPWCMASSTTSPAGALPLLCSTSGTVVTVT

SEQ ID NO: 29966 - protein, 98 aa, Homo sapiens
MFGAAARSADLVLLEKNLQAAHGYAQEDRERMHRNIVSLAQNLLNFMIGSILDLWQCFLWFYIGSSLNGTRGKRVPAHFSNTSLHYLNAAWQLLSPYL

SEQ ID NO: 29967 - protein, 14 aa, Homo sapiens
VSPLQVCGPVRDSR

SEQ ID NO: 29968 - protein, 17 aa, Homo sapiens
ISYKILLCWVGLYQHTR

SEQ ID NO: 29969 - protein, 9 aa, Homo sapiens
LALLPATLR

SEQ ID NO: 29970 - protein, 584 aa, Homo sapiens
IMTFYLFGIRSFPKLWKSPYLGLGPGHSYVSLFLADRCGIRNQQRLFSLKTMSPQNTKATNLIAKARYLRKDEGSNKQVYSVPHFFLAGAAKERSQMNSQTEDHALAPVRNTIQLPTQPLNSEEWDKLKEDLKENTGKTSFESWIISQMAGCHSSIDVAKSLLAWVAAKNNGIVSYDLLVKYLYLCVFHMQTSEVIDVFEIMKARYKTLEPRGYSLLIRGLIHSDRWREALLLLEDIKKVITPSKKNYNDCIQGALLHQDVNTAWNLYQELLGHDIVPMLETLKAFFDFGKDIKDDNYSNKLLDILSYLRNNQLYPGESFAHSIKTWFESVPGKQWKGQFTTVRKSGQCSGCGKTIESIQLSPEEYECLKGKIMRDVIDGGDQYRKTTPQELKRFENFIKSRPPFDVVIDGLNVAKMFPKVRESQLLLNVVSQLAKRNLRLLVLGRKHMLRRSSQWSRDEMEEVQKQASCFFADDISEDDPFLLYATLHSGNHCRFITRDLMRDHKACLPDAKTQRLFFKWQQGHQLAIVNRFPGSKLTFQRILSYDTVVQTTGDSWHIPYDEDLVERCSCEVPTKWLCLHQKT

SEQ ID NO: 29971 - protein, 20 aa, Homo sapiens
TDLSGSQPPKTPSGSTSRTS

SEQ ID NO: 29972 - protein, 24 aa, Homo sapiens
MMKIVVLLPLFLLATFPRKLQTCL

SEQ ID NO: 29973 - protein, 17 aa, Homo sapiens
IKRWLLIFLTFLLVHMR

SEQ ID NO: 29974 - protein, 209 aa, Homo sapiens
IGGTPAVAAPALVQPPSLPLLFLPSLAPWHPSLKEKSTLALLEVSSSLGWRHRFSGDQIMQADQLTEEQIAEFKEAFSLFDKDGDGTITTKELGTVMRSLGQNPTEAELQDMINEVDADGNGTIDFPEFLTMMARKMKDTDSEEEIREAFRVFDKDGNGYISAAELRHVMTNLGEKLTDEEVDEMIREADIDGDGQVNYEEFVQMMTAK

SEQ ID NO: 29975 - protein, 23 aa, Homo sapiens
MSWRVLISLLLCFWLSIKIDLPN

SEQ ID NO: 29976 - protein, 73 aa, Homo sapiens
VHLLLLSACLLPHRRVSGHPSFSAWGPHHHPQHCRCLFFTVSFSTHPLLSSLLPAPLNLPGPASPVMLGWSKH

SEQ ID NO: 29977 - protein, 36 aa, Homo sapiens
VDVFSSWQNWQKALESNCQALLLLLLPPPPRLLPCN

SEQ ID NO: 29978 - protein, 11 aa, Homo sapiens
MRFGLILRAVV

SEQ ID NO: 29979 - protein, 514 aa, Homo sapiens
TWGIGMVLWILWRPFGFSGRFLKLESHSITESKSLIPVAWTSLTQMLLEAPGIFLLGQRKRFSTMPETETHERETELFSPPSDVRGMTKLDRTAFKKTVNIPVLKVRKEIVSKLMRSLKRAALQRPGIRRVIEDPEDKESRLIMLDPYKIFTHDSFEKAELSVLEQLNVSPQISKYNLELTYEHFKSEEILRAVLPEGQDVTSGFSRIGHIAHLNLRDHQLPFKHLIGQVMIDKNPGITSAVNKINNIDNMYRNFQMEVLSGEQNMMTKVRENNYTYEFDFSKVYWNPRLSTEHSRITELLKPGDVLFDVFAGVGPFAIPVAKKNCTVFANDLNPESHKWLLYNCKLNKVDQKVKVFNLDGKDFLQGPVKEELMQLLGLSKERKPSVHVVMNLPAKAIEFLSAFKWLLDGQPCSSEFLPIVHCYSFSKDANPAEDVRQRAGAVLGISLEACSSVHLVRNVAPNKEMLCITFQIPASVLYKNQTRNPENHEDPPLKRQRTAEAFSDEKTQIVSNT

SEQ ID NO: 29980 - protein, 19 aa, Homo sapiens
RPILFFIFLTNSLMITLCH

SEQ ID NO: 29981 - protein, 8 aa, Homo sapiens
LVATFLSR

SEQ ID NO: 29982 - protein, 18 aa, Homo sapiens
MKSAKRLSYNVLSLFTLM

SEQ ID NO: 29983 - protein, 18 aa, Homo sapiens
LKIIWAWIWIFSTERVKG

SEQ ID NO: 29984 - protein, 20 aa, Homo sapiens
IFKNSSLKLLSVIYLGAQLE

SEQ ID NO: 29985 - protein, 58 aa, Homo sapiens
RLGGRSATPLQVGEVVPGYPASLARPRLLPPPPSRGGGNCWPRGLGNGPGPRPQVPGR

SEQ ID NO: 29986 - protein, 27 aa, Homo sapiens
VEALALPRLGRGSQLWRGRWRRRWGWR

SEQ ID NO: 29987 - protein, 239 aa, Homo sapiens
TSGPRFPTVARAVEEEVGLALKPDPDPVLCTLVGESPTRLARSADRRASTDLTRKMKPDETPMFDPSLLKEVDWSQNTATFSPAISPTHPGEGLVLRPLCTADLNRGFFKVLGQLTETGVVSPEQFMKSFEHMKKSGDYYVTVVEDVTLGQIVATATLIIEHKFIHSCAKRGRVEDVVVSDECRGKQLGKLLLSTLTLLSKKLNCYKITLECLPQNVGFYKKFGYTVSEENYMCRRFLK

SEQ ID NO: 29988 - protein, 37 aa, Homo sapiens
VMRKDRNSLTQKMLLYANMIRYTEVKTNGNFISRMAL

SEQ ID NO: 29989 - protein, 70 aa, Homo sapiens
RMAGGAGAGADGGAGGGGGGGDGSGPSGSSSGGRSLREMDEKRLLDPGLKVHKGLWDYTLKNPQTECLSD

SEQ ID NO: 29990 - protein, 50 aa, Homo sapiens
TELRKVIRAEKEVAQSGRWEFVGMSRRPSVGDCVTRGGPLVKFQARPLRF

SEQ ID NO: 29991 - protein, 17 aa, Homo sapiens
VALAGKSAGGRQRRPER

SEQ ID NO: 29992 - protein, 26 aa, Homo sapiens
LGCPSCRRRGVASPACLWKVRGESWV

SEQ ID NO: 29993 - protein, 8 aa, Homo sapiens
IIFSTISR

SEQ ID NO: 29994 - protein, 11 aa, Homo sapiens
KKTMLILLKLI

SEQ ID NO: 29995 - protein, 21 aa, Homo sapiens
LSVIRRLHMNTLLLMACLWKS

SEQ ID NO: 29996 - protein, 24 aa, Homo sapiens
MYSGALYFLMAVRRKSGASSLSFS

SEQ ID NO: 29997 - protein, 28 aa, Homo sapiens
MPVWKCLLWCTPLLRCTQLLLQLQSRCC

SEQ ID NO: 29998 - protein, 57 aa, Homo sapiens
IQNMFSRTLICSHDQFQFFYFLRAFAIKKKKLHLPETSTKIRLTLRNHVVLRRIGAK

SEQ ID NO: 29999 - protein, 16 aa, Homo sapiens
VCFYLYQGLGLKVLLI

SEQ ID NO: 30000 - protein, 9 aa, Homo sapiens
VHFLLILHF

SEQ ID NO: 30001 - protein, 38 aa, Homo sapiens
MWELPAFRTPRADRKRHAGLQAAAPLEDYSPGFPCPKQ

SEQ ID NO: 30002 - protein, 52 aa, Homo sapiens
MNFLILAWRALLERFLLLLSELLKERSLSCRRSSRVMGRLWRGSCRITLMAI

SEQ ID NO: 30003 - protein, 14 aa, Homo sapiens
LGFLFLLFINGQIY

SEQ ID NO: 30004 - protein, 32 aa, Homo sapiens
LQGFWIHLHRLLYALGATGPWTRAWVDGTDQP

SEQ ID NO: 30005 - protein, 11 aa, Homo sapiens
KICLLTMSLVL

SEQ ID NO: 30006 - protein, 9 aa, Homo sapiens
MKLAWWITL

SEQ ID NO: 30007 - protein, 26 aa, Homo sapiens
LDLTLLSLPGTVFLMWAWSVTSSSGS

SEQ ID NO: 30008 - protein, 7 aa, Homo sapiens
LWCHLAR

SEQ ID NO: 30009 - protein, 21 aa, Homo sapiens
LLQARLFFSFLVPLAIIMALQ

SEQ ID NO: 30010 - protein, 54 aa, Homo sapiens
LGPTSPPTRGPGLGLSLRRRAAAQTPAEDTCRHVLTPVISAPCLAPPQAWEPGP

SEQ ID NO: 30011 - protein, 15 aa, Homo sapiens
IWHIRLSMLFSSVAT

SEQ ID NO: 30012 - protein, 13 aa, Homo sapiens
LKTRGLVLLTTLL

SEQ ID NO: 30013 - protein, 12 aa, Homo sapiens
ISLTCGTGKRKH

SEQ ID NO: 30014 - protein, 558 aa, Homo sapiens
TRSDIAGVCGWLLLSGPCGVGLDLDSRLLGASAMRRSEVLAEESIVCLQKALNHLREIWELIGIPEDQRLQRTEVVKKHIKEEGETTILQLEKDLRTQVELMRKQKKERKQELKLLQEQDQELCEILCMPHYDIDSASVPSLEELNQFRQHVTTLRETKASRREEFVSIKRQIILCMEALDHTPDTSFERDVVCEDEDAFCLSLENIATLQKLLRQLEMQKSQNEAVCEGLRTQIRELWDRLQIPEEEREAVATIMSGSKAKVRKALQLEVDRLEELKMQNMKKVIEAIRVELVQYWDQCFYSQEQRQAFAPFCAEDYTESLLQLHDAEIVRLKNYYEVHKELFEGVQKWEETWRLFLEFERKASDPNRFTNRGGNLLKEEKQRAKLQKMLPKLEEELKARIELWEQEHSKAFMVNGQKFMEYVAEQWEMHRLEKERAKQERQLKNKKQTETEMLYGSAPRTPSKRRGLAPNTPGKARKLNTTTMSNATANSSIRPIFGGTVYHSPVSRLPPSGSKPVAASTCSGKKTPRTGRHGANKENLELNGSILSARTFKGFQI

SEQ ID NO: 30015 - protein, 10 aa, Homo sapiens
IFSVVLYYFQ

SEQ ID NO: 30016 - protein, 15 aa, Homo sapiens
IQGLFLRSFVFLIVM

SEQ ID NO: 30017 - protein, 35 aa, Homo sapiens
IRFLTRPVARGEELKGPWGISACCVLILFCVMGIQ

SEQ ID NO: 30018 - protein, 11 aa, Homo sapiens
LSPGILLFFFL

SEQ ID NO: 30019 - protein, 9 aa, Homo sapiens
LPYYAVSKM

SEQ ID NO: 30020 - protein, 8 aa, Homo sapiens
MSAILGKG

SEQ ID NO: 30021 - protein, 32 aa, Homo sapiens
IHHFYLLCGVLSICLPHSASAGVPAGLVLPLC

SEQ ID NO: 30022 - protein, 13 aa, Homo sapiens
IYLLGWLLVPMGS

SEQ ID NO: 30023 - protein, 36 aa, Homo sapiens
IMDYRLTLLFCHHRFSSKVTKTMKELVRFLNLNIAH

SEQ ID NO: 30024 - protein, 13 aa, Homo sapiens
LEGSGPPSMVAAS

SEQ ID NO: 30025 - protein, 57 aa, Homo sapiens
IFSGRVPGSSSSFLLFLLLLHLRLLGDHCPLSAADTGCSSRLGLFTYAPHRSLGRPT

SEQ ID NO: 30026 - protein, 21 aa, Homo sapiens
ILSFWSRAGWLLALPGSVLAS

SEQ ID NO: 30027 - protein, 683 aa, Homo sapiens
TSWSFGPMSRRALRRLRGEQRGQEPLGPGALHFDLRDDDDAEEEGPKRELGVRRPGGAGKEGVRVNNRFELINIDDLEDDPVVNGERSGCALTDAVAPGNKGRGQRGNTESKTDGDDTETVPSEQSHASGKLRKKKKKQKNKKSSTGEASENGLEDIDRILERIEDSTGLNRPGPAPLSSRKHVLYVEHRHLNPDTELKRYFGARAILGEQRPRQRQRVYPKCTWLTTPKSTWPRYSKPGLSMRLLESKKGLSFFAFEHSEEYQQAQHKFLVAVESMEPNNIVVLLQTSPYHVDSLLQLSDACRFQEDQEMARDLVERALYSMECAFHPLFSLTSGACRLDYRRPENRSFYLALYKQMSFLEKRGCPRTALEYCKLILSLEPDEDPLCMLLLIDHLALRARNYEYLIRLFQEWEAHRNLSQLPNFAFSVPLAYFLLSQQTDLPECEQSSARQKASLLIQQALTMFPGVLLPLLESCSVRPDASVSSHRFFGPNAEISQPPALSQLVNLYLGRSHFLWKEPATMSWLEENVHEVLQAVDAGDPAVEACENRRKVLYQRAPRNIHRHVILSEIKEAVAALPPDVTTQSVMGFDPLPPSDTIYSYVRPERLSPISHGNTIALFFRSLLPNYTMEGERPEEGVAGGLNRNQGLNRLMLAVRDMMANFHLNDLEAPHEDDAEGEGEWD

SEQ ID NO: 30028 - protein, 13 aa, Homo sapiens
IALLPLFYCFGHF

SEQ ID NO: 30029 - protein, 409 aa, Homo sapiens
TRRRRGPGDESRVLSLNPLASPPPSAAAPCTPAPLLCQELATTSTMPYQYPALTPEQKKELSDIAHRIVAPGKGILAADESTGSIAKRLQSIGTENTEENRRFYRQLLLTADDRVNPCIGGVILFHETLYQKADDGRPFPQVIKSKGGVVGIKVDKGVVPLAGTNGETTTQGLDGLSERCAQYKKDGADFAKWRCVLKIGEHTPSALAIMENANVLARYASICQQNGIVPIVEPEILPDGDHDLKRCQYVTEKVLAAVYKALSDHHIYLEGTLLKPNMVTPGHACTQKFSHEEIAMATVTALRRTVPPAVTGITFLSGGQSEEEASINLNAINKCPLLKPWALTFSYGRALQASALKAWGGKKENLKAAQEEYVKRALANSLACQGKYTPSGQAGAAASESLFVSNHAY

SEQ ID NO: 30030 - protein, 15 aa, Homo sapiens
VIHLPCAPKVLRLQA

SEQ ID NO: 30031 - protein, 20 aa, Homo sapiens
MRLGSLFVPTCRAAQGEWAS

SEQ ID NO: 30032 - protein, 18 aa, Homo sapiens
LGIPTDHRRGAKELLEQC

SEQ ID NO: 30033 - protein, 53 aa, Homo sapiens
MSSRVPCAECGARLGGYWRPRGLSPWTPMVGGRLRSKITGQLETYSSSPAVEE

SEQ ID NO: 30034 - protein, 13 aa, Homo sapiens
LFLSFFLSFFFLF

SEQ ID NO: 30035 - protein, 47 aa, Homo sapiens
LRWRFGVGAAEVRSSRLPRAGRLVVSLWMEGMMVTLLSKRGLCLRQN

SEQ ID NO: 30036 - protein, 164 aa, Homo sapiens
IPAAGQGRARPPRTVSRCGSAAMATKIDKEACRAAYNLVRDDGSAVIWVTFKYDGSTIVPGEQGAEYQHFIQQCTDDVRLFAFVRFTTGDAMSKRSKFALITWIGENVSGLQRAKTGTDKTLVKEVVQNFAKEFVISDRKELEEDFIKSELKKAGGANYDAQTE

SEQ ID NO: 30037 - protein, 10 aa, Homo sapiens
IPHFSVGLLL

SEQ ID NO: 30038 - protein, 170 aa, Homo sapiens
ISGGGSAMVGGGGVGGGLLENANPLIYQRSGERPVTAGEEDEQVPDSIDAREIFDLIRSINDPEHPLTLEELNVVEQVRVQVSDPESTVAVAFTPTIPHCSMATLIGLSIKVKLLRSLPQRFKMDVHITPGTHASEHAVNKQLADKERVAAALENTHLLEVVNQCLSARS

SEQ ID NO: 30039 - protein, 10 aa, Homo sapiens
VPLKLIWLCW

SEQ ID NO: 30040 - protein, 35 aa, Homo sapiens
VAFLRAVHEKVNIIPVIGKADALMPQETQALKQKV

SEQ ID NO: 30041 - protein, 40 aa, Homo sapiens
MPGDAGGPGHLGLGGEGVRLPRDRGPAAAAAGLRGSCPGR

SEQ ID NO: 30042 - protein, 674 aa, Homo sapiens
TPEPVGAVREAAAEARPQRREAWGPEVAAAAMPLLFLERFPWPSLRTYTGLSGLALLGTIISAYRALSQPEAGPGEPDQLTASLQPEPPAPARPSAGGPRARDVAQYLLSDSLFVWVLVNTACCVLMLVAKLIQCIVFGPLRVSERQHLKDKFWNFIFYKFIFIFGVLNVQTVEEVVMWCLWFAGLVFLHLMVQLCKDRFEYLSFSPTTPMSSHGRVLSLLVAMLLSCCGLAAVCSITGYTHGMHTLAFMAAESLLVTVRTAHVILRYVIHLWDLNHEGTWEGKGTYVYYTDFVMELTLLSLDLMHHIHMLLFGNIWLSMASLVIFMQLRYLFHEVQRRIRRHKNYLRVVGNMEARFAVATPEELAVNNDDCAICWDSMQAARKLPCGHLFHNSCLRSWLEQDTSCPTCRMSLNIADNNRVREEHQGENLDENLVPVAAAEGRPRLNQHNHFFHFDGSRIASWLPSFSVEVMHTTNILGITQASNSQLNAMAHQIQEMFPQVPYHLVLQDLQLTRSVEITTDNILEGRIQVPFPTQRSDSIRPALNSPVERPSSDQEEGETSAQTERVPLDLSPRLEETLDFGEVEVEPSEVEDFEARGSRFSKSADERQRMLVQRKDELLQQARKRFLNKSSEDDAASESFLPSEGASSDPVTLRRRMLAAAAERRLQKQQTS

SEQ ID NO: 30043 - protein, 22 aa, Homo sapiens
LWLSLWLLCGTAFPQARMETRF

SEQ ID NO: 30044 - protein, 11 aa, Homo sapiens
RFLWWMHWWYL

SEQ ID NO: 30045 - protein, 23 aa, Homo sapiens
LMERRRHMFDWLLITMLWMLPTK

SEQ ID NO: 30046 - protein, 46 aa, Homo sapiens
IMCVFPSLVCAFFLFVSENAVLRGFLEKTVGLGGCSTSNKGERFFR

SEQ ID NO: 30047 - protein, 90 aa, Homo sapiens
LAGGGGRNRDGASEARRWGRGRLGAQRGVRGRRLRGFGGGGGGDGFGRQIRRRELWRGWQLLGLLLLLRGGSGGGCGVTGEEAENGARPG

SEQ ID NO: 30048 - protein, 11 aa, Homo sapiens
LLLLTFLLQAS

SEQ ID NO: 30049 - protein, 26 aa, Homo sapiens
MTFFGCLWLCRAVWTKERSSLGLAVL

SEQ ID NO: 30050 - protein, 15 aa, Homo sapiens
IQLRILLSRSLFYLL

SEQ ID NO: 30051 - protein, 374 aa, Homo sapiens
IRRSPGGGEEEGEEGAEISGLGAGRRSAPIAVGLGFLGVGGRGGSDMEANGSQGTSGSANDSQHDPGKMFIGGLSWQTSPDSLRDYFSKFGEIRECMVMRDPTTKRSRGFGFVTFADPASVDKVLGQPHHELDSKTIDPKVAFPRRAQPKMVTRTKKIFVGGLSANTVVEDVKQYFEQFGKVEDAMLMFDKTTNRHRGFGFVTFENEDVVEKVCEIHFHEINNKMVECKKAQPKEVMFPPGTRGRARGLPYTMDAFMLGMGMLGYPNFVATYGRGYPGFAPSYGYQFPGFPAAAYGPVAAAAVAAARGSGSNPARPGGFPGANSPGPVADLYGPASQDSGVGNYISAASPQPGSGFGHGIAGPLIATAFTNGYH

SEQ ID NO: 30052 - protein, 620 aa, Homo sapiens
IRRAAWDRRDPGQPAMAGLYSLGVSVFSDQGGRKYMEDVTQIVVEPEPTAEEKPSPRRSLSQPLPPRPSPAALPGGEVSGKGPAVAAREARDPLPDAGASPAPSRCCRRRSSVAFFAVCDGHGGREAAQFAREHLWGFIKKQKGFTSSEPAKVCAAIRKGFLACHLAMWKKLAEWPKTMTGLPSTSGTTASVVIIRGMKMYVAHVGDSGVVLGIQDDPKDDFVRAVEVTQDHKPELPKERERIEGLGGSVMNKSGVNRVVWKRPRLTHNGPVRRSTVIDQIPFLAVARALGDLWSYDFFSGEFVVSPEPDTSVHTLDPQKHKYIILGSDGLWNMIPPQDAISMCQDQEEKKYLMGEHGQSCAKMLVNRALGRWRQRMLRADNTSAIVICISPEVDNQGNFTNEDELYLNLTDSPSYNSQETCVMTPSPCSTPPVKSLEEDPWPRVNSKDHIPALVRSNAFSENFLEVSAEIARENVQGVVIPSKDPEPLEENCAKALTLRIHDSLNNSLPIGLVPTNSTNTVMDQKNLKMSTPGQMKAQEIERTPPTNFKRTLEESNSGPLMKKHRRNGLSRSSGAQPASLPTTSQRKNSVKLTMRRRLRGQKKIGNPLLHQHRKTVCVC

SEQ ID NO: 30053 - protein, 9 aa, Homo sapiens
VFCLCSRPV

SEQ ID NO: 30054 - protein, 52 aa, Homo sapiens
TGREAVAVVAVAAAVVVVAAAAAKGAERKERGGTGPGQRVLWAPGFAPRPRL

SEQ ID NO: 30055 - protein, 33 aa, Homo sapiens
TEVSFFFVLFPGCCLLSWSAPEPSAPRRHASEN

SEQ ID NO: 30056 - protein, 283 aa, Homo sapiens
IGSELKGTQCRATAGSRGRRPPMTCWLRGVTATFGRPAEWPGYLSHLCGRSAAMDLGPMRKSYRGDREAFEETHLTSLDPVKQFAAWFEEAVQCPDIGEANAMCLATCTRDGKPSARMLLLKGFGKDGFRFFTNFESRKGKELDSNPFASLVFYWEPLNRQVRVEGPVKKLPEEEAECYFHSRPKSSQIGAVVSHQSSVIPDREYLRKKNEELEQLYQDQEVPKPKSWGGYVLYPQVMEFWQGQTNRLHDRIVFRRGLPTGDSPLGPMTHRGEEDWLYERLAP

SEQ ID NO: 30057 - protein, 30 aa, Homo sapiens
RIVGRWRERTTISNMHCGTKGLGHTVPWKL

SEQ ID NO: 30058 - protein, 457 aa, Homo sapiens
IGDGVARVFVGGCLGWWEQPPEGSTMISAAQLLDELMGRDRNLAPDEKRSNVRWDHESVCKYYLCGFCPAELFTNTRSDLGPCEKIHDENLRKQYEKSSRFMKVGYERDFLRYLQSLLAEVERRIRRGHARLALSQNQQSSGAAGPTGKNEEKIQVLTDKIDVLLQQIEELGSEGKVEEAQGMMKLVEQLKEERELLRSTTSTIESFAAQEKQMEVCEVCGAFLIVGDAQSRVDDHLMGKQHMGYAKIKATVEELKEKLRKRTEEPDRDERLKKEKQEREEREKEREREREERERKRRREEEEREKERARDRERRKRSRSRSRHSSRTSDRRCSRSRDHKRSRSRERRRSRSRDRRRSRSHDRSERKHRSRSRDRRRSKSRDRKSYKHRSKSRDREQDRKSKEKEKRGSDDKKSSVKSGSREKQSEDTNTESKESDTKNEVNGTSEDIKSEGDTQSN

SEQ ID NO: 30059 - protein, 514 aa, Homo sapiens
IGDGVARVFVGGCLGWWEQPPEGSTMISAAQLLDELMGRDRNLAPDEKRSNVRWDHESVCKYYLCGFCPAELFTNTRSDLGPCEKIHDENLRKQYEKSSRFMKVGYERDFLRYLQSLLAEVERRIRRGHARLALSQNQQSSGAAGPTGKNEEKIQVLTDKIDVLLQQIEELGSEGKVEEAQGMMKLVEQLKEERELLRSTTSTIESFAAQEKQMEVCEVCGAFLIVGDAQSRVDDHLMGKQHMGYAKIKATVEELKEKLRKRTEEPDRDERLKKEKQEREEREKEREREREERERKRRREEEEREKERARDRERRKRSRSRSRHSSRTSDRRCSRSRDHKRSRSRERRRSRSRDRRRSRSHDRSERKHRSRSRDRRRSKSRDRKSYKHRSKSRDREQDRKSKEKEKRGSDDKKSSVKSGSREKQSEDTNTESKESDTKNEVNGTSEDIKSEVQRKYAQMKMELSRVRRHTKASSEGKDSVVLQNILRYIVLSQLFCSRLVPPLVCLFGNYRPHL

SEQ ID NO: 30060 - protein, 22 aa, Homo sapiens
IRLLLLRIMQFITGVWKESLSQ

SEQ ID NO: 30061 - protein, 35 aa, Homo sapiens
RREERIPSGGCLRGQRDRTGSDVSGFRLSGAQRRV

SEQ ID NO: 30062 - protein, 426 aa, Homo sapiens
ILRSGAAGVGAAPQELLIYEMAENGKNCDQRRVAMNKEHHNGNFTDPSSVNEKKRREREERQNIVLWRQPLITLQYFSLEILVILKEWTSKLWHRQSIVVSFLLLLAVLIATYYVEGVHQQYVQRIEKQFLLYAYWIGLGILSSVGLGTGLHTFLLYLGPHIASVTLAAYECNSVNFPEPPYPDQIICPDEEGTEGTISLWSIISKVRIEACMWGIGTAIGELPPYFMARAARLSGAEPDDEEYQEFEEMLEHAESAQDFASRAKLAVQKLVQKVGFFGILACASIPNPLFDLAGITCGHFLVPFWTFFGATLIGKAIIKMHIQKIFVIITFSKHIVEQMVAFIGAVPGIGPSLQKPFQEYLEAQRQKLHHKSEMGTPQGENWLSWMFEKLVVVMVCYFILSIINSMAQSYAKRIQQRLNSEEKTK

SEQ ID NO: 30063 - protein, 11 aa, Homo sapiens
LGLMVLPLAFC

SEQ ID NO: 30064 - protein, 28 aa, Homo sapiens
IHFMALFPSVLSLISTCISNPKTRTSES

SEQ ID NO: 30065 - protein, 10 aa, Homo sapiens
VAFLKENINN

SEQ ID NO: 30066 - protein, 33 aa, Homo sapiens
IFHLTPSAKPPGPLVHPWWPLCLLCSVLPMAQT

SEQ ID NO: 30067 - protein, 8 aa, Homo sapiens
ILIFGWII

SEQ ID NO: 30068 - protein, 52 aa, Homo sapiens
MPGRMGSWPSSPSRKSLITSKGRYAVWRCVLWLGLWPTSGCWGWMSVRSRCR

SEQ ID NO: 30069 - protein, 20 aa, Homo sapiens
IVNVFALGHLHQLGPLLLTS

SEQ ID NO: 30070 - protein, 23 aa, Homo sapiens
RRWVLLALLWWTAPIGHTCPALQ

SEQ ID NO: 30071 - protein, 13 aa, Homo sapiens
TCFLSLCILSLYS

SEQ ID NO: 30072 - protein, 31 aa, Homo sapiens
MEETQLSSIKAVSCMRDRLTFLLLRMLLTRL

SEQ ID NO: 30073 - protein, 11 aa, Homo sapiens
LTVFFWSVATW

SEQ ID NO: 30074 - protein, 21 aa, Homo sapiens
IKESRKTDTKTSLPTNHPAKL

SEQ ID NO: 30075 - protein, 19 aa, Homo sapiens
IFSFFIFTRGITLVDVLIP

SEQ ID NO: 30076 - protein, 20 aa, Homo sapiens
LQRKHGWQGLLLLGLAGQYH

SEQ ID NO: 30077 - protein, 36 aa, Homo sapiens
VEAGENGGGGKGSFLGISAVLLCSMMCTLGEESACV

SEQ ID NO: 30078 - protein, 18 aa, Homo sapiens
MTTSVLSLNGTFLLFPWC

SEQ ID NO: 30079 - protein, 10 aa, Homo sapiens
LLCLGFMAAA

SEQ ID NO: 30080 - protein, 23 aa, Homo sapiens
IAQLRRSSLLVMGILPFIHISCT

SEQ ID NO: 30081 - protein, 42 aa, Homo sapiens
LAGPSRLTSPCRTQRVPLLHPRLPPPTSHVPGCRSRPGHPLS

SEQ ID NO: 30082 - protein, 57 aa, Homo sapiens
IFAARTRSERLRESETLSASIRRADPAGAAAAMDDREDLVYQAKLAEQAERYDVLWN

SEQ ID NO: 30083 - protein, 287 aa, Homo sapiens
IFAARTRSERLRESETLSASIRRADPAGAAAAMDDREDLVYQAKLAEQAERYDEMVESMKKVAGMDVELTVEERNLLSVAYKNVIGARRASWRIISSIEQKEENKGGEDKLKMIREYRQMVETELKLICCDILDVLDKHLIPAANTGESKVFYYKMKGDYHRYLAEFATGNDRKEAAENSLVAYKAASDIAMTELPPTHPIRLGLALNFSVFYYEILNSPDRACRLAKAAFDDAIAELDTLSEESYKDSTLIMQLLRDNLTLWTSDMQGDGEEQNKEALQDVEDENQ

SEQ ID NO: 30084 - protein, 329 aa, Homo sapiens
TRPGRQEPARRPRRGRRGRSRARRRRTGSRAGPGHGESGRRAAGGRPGGPRAATEPRSDMVLLKEYRVILPVSVDEYQVGQLYSVAEASKNETGGGEGVEVLVNEPYEKDGEKGQYTHKIYHLQSKVPTFVRMLAPEGALNIHEKAWNAYPYCRTVITNEYMKEDFLIKIETWHKPDLGTQENVHKLEPEAWKHVEAVYIDIADRSQVLSKDYKAEEDPAKFKSIKTGRGPLGPNWKQELVNQKDCPYMCAYKLVTVKFKWWGLQNKVENFIHKQERRLFTNFHRQLFCWLDKWVDLTMDDIRRMEEETKRQLDEMRQKDPVKGMTADD

SEQ ID NO: 30085 - protein, 38 aa, Homo sapiens
LRKLREVGRVSLRGQPRLARTRGRSGTRVSCRAAGARH

SEQ ID NO: 30086 - protein, 18 aa, Homo sapiens
MRPTSRFLLFDLVELLAW

SEQ ID NO: 30087 - protein, 11 aa, Homo sapiens
ILIHLLTLTVV

SEQ ID NO: 30088 - protein, 15 aa, Homo sapiens
MIIWRLILNNWQFQE

SEQ ID NO: 30089 - protein, 20 aa, Homo sapiens
MTSTWKVLWMFLNSWSIFHC

SEQ ID NO: 30090 - protein, 17 aa, Homo sapiens
MTVLMQLTLHVWVWLRR

SEQ ID NO: 30091 - protein, 38 aa, Homo sapiens
TLGVFLRPKPWLCHFLLAGLHYCVFVRPGVCPGHNQSS

SEQ ID NO: 30092 - protein, 38 aa, Homo sapiens
IQEVIRSIIHQKHHSSINLKKKVIYYFFKVLCDVLRAY

SEQ ID NO: 30093 - protein, 12 aa, Homo sapiens
KKVPILIPRGRV

SEQ ID NO: 30094 - protein, 21 aa, Homo sapiens
MILKKMALFHFVMLSFRMLTV

SEQ ID NO: 30095 - protein, 64 aa, Homo sapiens
KHLLRSILQITLTTAFHQTLQLLLALLHLSQQAQLFGLEMEDRPHRLLIMKDPYTLCKAELKIV

SEQ ID NO: 30096 - protein, 63 aa, Homo sapiens
KHLLRSILQITLTTAFHQTLQLLLALLHLSQAQLFGLEMEDRPHRLLIMKDPYTLCKAELKIV

SEQ ID NO: 30097 - protein, 35 aa, Homo sapiens
LWCRLRPRMLPHFSTWLLTLAVPWESILETMANML

SEQ ID NO: 30098 - protein, 40 aa, Homo sapiens
VDLGGPDGGIGGGCESGRGAGGERPAGDRAEEMERERLLG

SEQ ID NO: 30099 - protein, 58 aa, Homo sapiens
TPLFGCLLCLAGVLSELAPPHGPRHLRREACGPSARLHKRSGQCSVFTRPVSDRPPRG

SEQ ID NO: 30100 - protein, 39 aa, Homo sapiens
LVLAASCLLLQPLWPCDLQVLGDPQLRDPRKPRNGTIGI

SEQ ID NO: 30101 - protein, 36 aa, Homo sapiens
MWRDLSASLSLAAAGTPGLVFTALCPLLLEAQPLVL

SEQ ID NO: 30102 - protein, 19 aa, Homo sapiens
LITLLSFLPVLCWQGRVPK

SEQ ID NO: 30103 - protein, 45 aa, Homo sapiens
LLLHSFFTLLGILSSSSFKTPRTWTACSYDPLPVTYLGKPARRKG

SEQ ID NO: 30104 - protein, 9 aa, Homo sapiens
MLARLILNS

SEQ ID NO: 30105 - protein, 41 aa, Homo sapiens
TPLGQVSCEGHRAFRGPRRRAPGPCSYHQPPVLPPEGPCPE

SEQ ID NO: 30106 - protein, 32 aa, Homo sapiens
RRITLTWSSSIALLSTILWPRPMALHGCTGWG

SEQ ID NO: 30107 - protein, 484 aa, Homo sapiens
TTAAMAGAGPAPGLPGAGGPVVPGPGAGIPGKSGEERLKEMEAEMALFEQEVLGAPVPGIPTAVPAVPTVPTVPTVEAMQVPAAPVIRPIIATNTYQQVQQTLEARAAAAATVVPPMVGGPPFVGPVGFGPGDRSHLDSPEAREAMFLRRAAVAPQRAPILRPAFVPHVLQRADSALSSAAAGPRPMALRPPHQALVGPPLPGPPGPPMMLPPMARAPGPPLGSMAALRPPLEEPAAPRELGLGLGLGLKEKEEAVVAAAAGLEEASAAVAVGAGGAPAGPAVIGPSLPLALAMPLPEPEPLPLPLEVVRGLLPPLRIPELLSLRPRPRPPRPEPPPGLMALEVPEPLGEDKKKGKPEKLKRCIRTAAGSSWEDPSLLEWDADDFRIFCGDLGNEVNDDILARAFSRFPSFLKAKVIRDKRTGKTKGYGFVSFKDPSDYVRAMREMNGKYVGSRPIKLRKSMWKDRNLDVVRKKQKEKKKLGLR

SEQ ID NO: 30108 - protein, 18 aa, Homo sapiens
VFSIAFRKKGIWERDACS

SEQ ID NO: 30109 - protein, 47 aa, Homo sapiens
LHSSVLEVRWPSGLRQRLRRARLSPQDVLPGRVSLPRWEVHLSAVRL

SEQ ID NO: 30110 - protein, 32 aa, Homo sapiens
LPHQHQQAALAAVLLSLPLRLLCLSLPLQWAV

SEQ ID NO: 30111 - protein, 20 aa, Homo sapiens
IFPKTFGQSRTLKILFKKRF

SEQ ID NO: 30112 - protein, 10 aa, Homo sapiens
LPKTFGQSRA

SEQ ID NO: 30113 - protein, 44 aa, Homo sapiens
LILVLGAKRDSWKMEINRRARSWLPRETQSVLNLDPSILPQGLQ

SEQ ID NO: 30114 - protein, 57 aa, Homo sapiens
VLRRLRRIFHPRRRRSSPRSCHRRRVHPQRHRHAGDRAPAGRPVRQPDRGQVLGGYQ

SEQ ID NO: 30115 - protein, 24 aa, Homo sapiens
MRFPPLAALARSPSLSLCLFWAPC

SEQ ID NO: 30116 - protein, 250 aa, Homo sapiens
RVPLPSPQPSYPFRPAASGGTPPPACLPPAQPCQGSPAMNLFRFLGDLSHLLAIILLLLKIWKSRSCAGISGKSQVLFAVVFTARYLDLFTNYISLYNTCMKVVYIACSFTTVWLIYSKFKATYDGNHDTFRVEFLVVPTAILAFLVNHDFTPLEILWTFSIYLESVAILPQLFMVSKTGEAETITSHYLFALGVYRTLYLFNWIWRYHFEGFFDLIAIVAGLVQTVLYCDFFYLYITKVLKGKKLSLPA

SEQ ID NO: 30117 - protein, 11 aa, Homo sapiens
ILFFFFLPIQV

SEQ ID NO: 30118 - protein, 18 aa, Homo sapiens
LSGRCCSHCRRLCPCSRC

SEQ ID NO: 30119 - protein, 28 aa, Homo sapiens
VSSAILRVELGACRHFPNLGGPGLDFHE

SEQ ID NO: 30120 - protein, 270 aa, Homo sapiens
TPKSRALMAGLEVLFASAAPAITCRQDALVCFLHWEVVTHGYFGLGVGDQPGPNDKKSELLPAGWNNNKDLYVLRYEYKDGSRKLLVKAITVESSMILNVLEYGSQQVADLTLNLDDYIDAEHLGDFHRTYKNSEELRSRIVSGIITPIHEQWEKANVSSPHREFPPATAREVDPLRIPPHHPHTSRQPPWCDPLGPFVVGGEDLDPFGPRRGGMIVDPLRSGFPRALIDPSSGLPNRLPPGAVPPGARFDPFGPIGTSPPGPRPDRRGQ

SEQ ID NO: 30121 - protein, 20 aa, Homo sapiens
LPAPAASLLARGDVGPIFPG

SEQ ID NO: 30122 - protein, 20 aa, Homo sapiens
LFMMKPHQARPRSLLSSVDQ

SEQ ID NO: 30123 - protein, 15 aa, Homo sapiens
MPCFLSLVMWWTLWL

SEQ ID NO: 30124 - protein, 24 aa, Homo sapiens
LVLFTVFVLITFGWVILIVRDEEE

SEQ ID NO: 30125 - protein, 12 aa, Homo sapiens
IMCAILSWPALF

SEQ ID NO: 30126 - protein, 61 aa, Homo sapiens
LTTLTTKRQKKKILWNNPFRQMLVLPWKLRQPYQEKLQPSLREDLLGFLLRRIWNRKKSIM

SEQ ID NO: 30127 - protein, 37 aa, Homo sapiens
LDLAVGAGACLLQLWVRTALASSLLDYGDIPGVHPAE

SEQ ID NO: 30128 - protein, 19 aa, Homo sapiens
RLFFLLQERPLLLWSCVCV

SEQ ID NO: 30129 - protein, 14 aa, Homo sapiens
LMKVKHFIILFLFV

SEQ ID NO: 30130 - protein, 18 aa, Homo sapiens
ITEQCLWIALFLLAQVLQ

SEQ ID NO: 30131 - protein, 34 aa, Homo sapiens
LIILPGKGIKETLKVTSTMTSSGRVSSAPLWAWR

SEQ ID NO: 30132 - protein, 14 aa, Homo sapiens
LLLWTSGRTLSLRR

SEQ ID NO: 30133 - protein, 64 aa, Homo sapiens
MWRPSSLSMAVWPAVLCTRAMPLFSTPMSAMPGQLCWERMGGCWPGRPWTSTWLESLSLTDPRG

SEQ ID NO: 30134 - protein, 15 aa, Homo sapiens
LLLSVLLLQLLLREV

SEQ ID NO: 30135 - protein, 54 aa, Homo sapiens
LVSPRYGSSASAVRPLGLLADRCPSRTTHCMQRKTVPNKQSVLFFVPARTETGE

SEQ ID NO: 30136 - protein, 24 aa, Homo sapiens
LDLQGSHVQTSTTFDLLTKTGDGI

SEQ ID NO: 30137 - protein, 25 aa, Homo sapiens
ITNQRRDSVSEQVFWTMDWLSPSLL

SEQ ID NO: 30138 - protein, 21 aa, Homo sapiens
IIAVCILAAAGAILEINIFLQ

SEQ ID NO: 30139 - protein, 27 aa, Homo sapiens
IIAVCILAAAGAILVVKFKSFESLPNV

SEQ ID NO: 30140 - protein, 443 aa, Homo sapiens
TRLAGRVSVASRPCRGPAVGGLLVERSKARRPLLESRVAMAAVPELLQQQEEDRSKLRSVSVDLNVDPSLQIDIPDALSERDKVKFTVHTKTTLPTFQSPEFSVTRQHEDFVWLHDTLIETTDYAGLIIPPAPTKPDFDGPREKMQKLGEGEGSMTKEEFAKMKQELEAEYLAVFKKTVSSHEVFLQRLSSHPVLSKDRNFHVFLEYDQDLSVRRKNTKEMFGGFFKSVVKSADEVLFTGVKEVDDFFEQEKNFLINYYNRIKDSCVKADKMTRSHKNVADDYIHTAACLHSLALEEPTVIKKYLLKVAELFEKLRKVEGRVSSDEDLKLTELLRYYMLNIEAAKDLLYRRTKALIDYENSNKALDKARLKSKDVKLAEAHQQECCQKFEQLSESAKEELINFKRKRVAAFRKNLIEMSELEIKHARNNVSLLQSCIDLFKNN

SEQ ID NO: 30141 - protein, 33 aa, Homo sapiens
IKIVMCWLVIKLCIGSALPWPSFSLSFLCSCSK

SEQ ID NO: 30142 - protein, 44 aa, Homo sapiens
TATPPLPSLRPFFLSLFSFFLPLLAATAQDRRPGDELGAAARVY

SEQ ID NO: 30143 - protein, 63 aa, Homo sapiens
TATPPLPSLRPFFLSLFSFFLPLLAATAQDRRPGDELGAAARKHNPYCRTKCTVHETWKKTNV

SEQ ID NO: 30144 - protein, 46 aa, Homo sapiens
MALYFLFQISLQTLVFSGTSLQRCLSTSASSLYVCFRSTSSSTPSP

SEQ ID NO: 30145 - protein, 22 aa, Homo sapiens
IQHLPLSSMVTTRTVTVARTSP

SEQ ID NO: 30146 - protein, 586 aa, Homo sapiens
ILSGLAVLGTRYSGWAVPRPGPRGLTVATEAAAAAAAAAAAAISSRTRAPQAPEGRNRRLEKMADDIDIEAMLEAPYKKDENKLSSANGHEERSKKRKKSKSRSRSHERKRSKSKERKRSRDRERKKSKSRERKRSRSKERRRSRSRSRDRRFRGRYRSPYSGPKFNSAIRGKIGLPHSIKLSRRRSRSKSPFRKDKSPVREPIDNLTPEERDARTVFCMQLAARIRPRDLEEFFSTVGKVRDVRMISDRNSRRSKGIAYVEFVDVSSVPLAIGLTGQRVLGVPIIVQASQAEKNRAAAMANNLQKGSAGPMRLYVGSLHFNITEDMLRGIFEPFGRIESIQLMMDSETGRSKGYGFITFSDSECAKKALEQLNGFELAGRPMKVGHVTERTDASSASSFLDSDELERTGIDLGTTGRLQLMARLAEGTGLQIPPAAQQALQMSGSLAFGAVADLQTRLSQQTEASALAAAASVQPLATQCFQLSNMFNPQTEEEVGWDTEIKDDVIEECNKHGGVIHIYVDKNSAQGNVYVKCPSIAAAIAAVNALHGRWFAGKMITAAYVPLPTYHNLFPDSMTATQLLVPSRR

SEQ ID NO: 30147 - protein, 570 aa, Homo sapiens
ILSGLAVLGTRYSGWAVPRPGPRGLTVATEAAAAAAAAAAAAISSRTRAPQAPEGRNRRLEKMADDIDIEAMLEAPYKKDENKLSSANGHEERSKKRKKSKSRSRSHERKRSKSKERKRSRDRERKKSKSRERKRSRSKERRRSRSRSRDRRFRGRYRSPYRRRSRSKSPFRKDKSPVREPIDNLTPEERDARTVFCMQLAARIRPRDLEEFFSTVGKVRDVRMISDRNSRRSKGIAYVEFVDVSSVPLAIGLTGQRVLGVPIIVQASQAEKNRAAAMANNLQKGSAGPMRLYVGSLHFNITEDMLRGIFEPFGRIESIQLMMDSETGRSKGYGFITFSDSECAKKALEQLNGFELAGRPMKVGHVTERTDASSASSFLDSDELERTGIDLGTTGRLQLMARLAEGTGLQIPPAAQQALQMSGSLAFGAVAEFSFVIDLQTRLSQQTEASALAAAASVQPLATQCFQLSNMFNPQTEEEVGWDTEIKDDVIEECNKHGGVIHIYVDKNSAQGNVYVKCPSIAAAIAAVNALHGRWFAGKMITAAYVPLPTYHNLFPDSMTATQLLVPSRR

SEQ ID NO: 30148 - protein, 10 aa, Homo sapiens
IQGIWIYYIF

SEQ ID NO: 30149 - protein, 13 aa, Homo sapiens
LHRNGDSVKISLR

SEQ ID NO: 30150 - protein, 13 aa, Homo sapiens
MDNLLCSSSRVSS

SEQ ID NO: 30151 - protein, 21 aa, Homo sapiens
ILNVQRVFLLCFPGWSAMVPS

SEQ ID NO: 30152 - protein, 21 aa, Homo sapiens
LRSRRVPSPSPLARFPPSPPR

SEQ ID NO: 30153 - protein, 66 aa, Homo sapiens
ISRAPRLLLSEVSRGPSSPRPEVSAPRGLRGPRSPPAPCGWAVLDCSSCSSAAFELILRRRKSERW

SEQ ID NO: 30154 - protein, 9 aa, Homo sapiens
ILLLETHLR

SEQ ID NO: 30155 - protein, 24 aa, Homo sapiens
RGAAVSPASSSPFPRSRDHVRAGG

SEQ ID NO: 30156 - protein, 296 aa, Homo sapiens
TNEPSTGRMERPQPDSMPQDLSEALKEATKEVHTQAENAEFMRNFQKGQVTRDGFKLVMASLYHIYVALEEEIERNKESPVFAPVYFPEELHRKAALEQDLAFWYGPRWQEVIPYTPAMQRYVKRLHEVGRTEPELLVAHAYTRYLGDLSGGQVLKKIAQKALDLPSSGEGLAFFTFPNIASATKFKQLYRSRMNSLEMTPAVRQRVIEEAKTAFLLNIQLFEELQELLTHDTKDQSPSRAPGLRQRASNKVQDSAPVETPRGKPPLNTRSQAPLLRWVLTLSFLVATVAVGLYAM

SEQ ID NO: 30157 - protein, 13 aa, Homo sapiens
ISARKLIALFWAH

SEQ ID NO: 30158 - protein, 38 aa, Homo sapiens
IFRSGPKRRKVGQSRTLFLPRCLLVCRLKYCMRPRATL

SEQ ID NO: 30159 - protein, 11 aa, Homo sapiens
KPYFLRRILLL

SEQ ID NO: 30160 - protein, 10 aa, Homo sapiens
MNYLSWLRRK

SEQ ID NO: 30161 - protein, 14 aa, Homo sapiens
RKSLPDISRGTLCF

SEQ ID NO: 30162 - protein, 9 aa, Homo sapiens
ILLWTLWGL

SEQ ID NO: 30163 - protein, 18 aa, Homo sapiens
RAPTAWCALLMIMSTKFE

SEQ ID NO: 30164 - protein, 57 aa, Homo sapiens
LGACTLGAPARLQSLGPARVGSVDTSAAPRFSLLRGREGAGRCSGRASGRGRRPWSG

SEQ ID NO: 30165 - protein, 47 aa, Homo sapiens
IWWTLLLAVRSSGALTLYSAPCEPPRLNQTQEAAPPTSLAEAEALEQ

SEQ ID NO: 30166 - protein, 25 aa, Homo sapiens
LLAEAAESVRLQVGSRGRDVSGVGC

SEQ ID NO: 30167 - protein, 12 aa, Homo sapiens
LLGITVLWTAGV

SEQ ID NO: 30168 - protein, 12 aa, Homo sapiens
LVELRSIMEIVK

SEQ ID NO: 30169 - protein, 18 aa, Homo sapiens
LFFRVSLCLAAVTAKRVL

SEQ ID NO: 30170 - protein, 23 aa, Homo sapiens
ISLFLQKGKLRPKEIEYLCKVTS

SEQ ID NO: 30171 - protein, 18 aa, Homo sapiens
LAWVWEQQLLWLGLPAVW

SEQ ID NO: 30172 - protein, 20 aa, Homo sapiens
ILHARIKRGNPWGRSSNRSP

SEQ ID NO: 30173 - protein, 31 aa, Homo sapiens
MFCHLWEIFLRFRLLMLLLGKTKKAERSQNI

SEQ ID NO: 30174 - protein, 12 aa, Homo sapiens
MSYFFSLFASSL

SEQ ID NO: 30175 - protein, 57 aa, Homo sapiens
LRLSPVSRRPVPCRPAVLRPPRHHGCVCRAPGVGGGTFLGQDSQWVTCFIVLGLPSW

SEQ ID NO: 30176 - protein, 33 aa, Homo sapiens
MLKSSLVIYKWALLPSALQLVVTLAGARVFMSL

SEQ ID NO: 30177 - protein, 35 aa, Homo sapiens
LWLTLLMYYLYPSGFTITSATTGLSREPFACSAST

SEQ ID NO: 30178 - protein, 32 aa, Homo sapiens
KTGLVIMTGIRTMMQRLRLSSIQVLGVIPPLK

SEQ ID NO: 30179 - protein, 23 aa, Homo sapiens
KTILLKRVIHSEYSLSPWIHRSN

SEQ ID NO: 30180 - protein, 11 aa, Homo sapiens
LVFLFLFFFFF

SEQ ID NO: 30181 - protein, 45 aa, Homo sapiens
MKLRGVSLAAGLFLLALSLWGQPAEAAMRKLQITDVEYIPRNPVM

SEQ ID NO: 30182 - protein, 15 aa, Homo sapiens
LLNFMVKSLVRRMSK

SEQ ID NO: 30183 - protein, 21 aa, Homo sapiens
LNRLFRSVVHHLQLMLVLNYL

SEQ ID NO: 30184 - protein, 13 aa, Homo sapiens
LSLYLLILVTRTL

SEQ ID NO: 30185 - protein, 13 aa, Homo sapiens
IDSFFSGPGMSRS

SEQ ID NO: 30186 - protein, 49 aa, Homo sapiens
TVCRLPRAILLMFLMWDCSNTQALQILPATCNSGPVAMCTSRPPPMDMD

SEQ ID NO: 30187 - protein, 11 aa, Homo sapiens
LILFSMMVTSV

SEQ ID NO: 30188 - protein, 674 aa, Homo sapiens
TASAGGGGDGGAAARGRAAARRRRRRRRRRRRRRRRRRRRLGLERPQPTSRGRAPGASRAEEKMEELVVEVRGSNGAFYKAFVKDVHEDSITVAFENNWQPDRQIPFHDVRFPPPVGYNKDINESDEVEVYSRANEKEPCCWWLAKVRMIKGEFYVIEYAACDATYNEIVTIERLRSVNPNKPATKDTFHKIKLDVPEDLRQMCAKEAAHKDFKKAVGAFSVTYDPENYQLVILSINEVTSKRAHMLIDMHFRSLRTKLSLIMRNEEASKQLESSRQLASRFHEQFIVREDLMGLAIGTHGANIQQARKVPGVTAIDLDEDTCTFHIYGEDQDAVKKARSFLEFAEDVIQVPRNLVGKVIGKNGKLIQEIVDKSGVVRVRIEAENEKNVPQEEEIMPPNSLPSNNSRVGPNAPEEKKHLDIKENSTHFSQPNSTKVQRGMVPFVFVGTKDSIANATVLLDYHLNYLKEVDQLRLERLQIDEQLRQIGASSRPPPNRTDKEKSYVTDDGQGMGRGSRPYRNRGHGRRGPGYTSGTNSEASNASETESDHRDELSDWSLAPTEEERESFLRRGDGRRRGGGGRGQGGRGRGGGFKGNDDHSRTDNRPRNPREAKGRTTDGSLQIRVDCNNERSVHTKTLQNTSSEGSRLRTGKDRNQKKEKPDSVDGQQPLVNGVP

SEQ ID NO: 30189 - protein, 488 aa, Homo sapiens
ITRAQVPATTTHSARRSGRGAAAEAAASAAGGRQKGPDRKAWEGRRTTPGGRSQSEPKAPPPQKRSEAAFASMAHSPVAVQVPGMQNNIADPEELFTKLERIGKGSFGEVFKGIDNRTQQVVAIKIIDLEEAEDEIEDIQQEITVLSQCDSSYVTKYYGSYLKGSKLWIIMEYLGGGSALDLLRAGPFDEFQIATMLKEILKGLDYLHSEKKIHRDIKAANVLLSEQGDVKLADFGVAGQLTDTQIKRNTFVGTPFWMAPEVIQQSAYDSKADIWSLGITAIELAKGEPPNSDMHPMRVLFLIPKNNPPTLVGDFTKSFKEFIDACLNKDPSFRPTAKELLKHKFIVKNSKKTSYLTELIDRFKRWKAEGHSDDESDSEGSDSESTSRENNTHPEWSFTTVRKKPDPKKVQNGAEQDLVQTLSCLSMIITPAFAELKQQDENNASRNQAIEELEKSIAVAEAACPGITDKMVKKLIEKFQKCSADESP

SEQ ID NO: 30190 - protein, 110 aa, Homo sapiens
MLTLSITRCMMTIFCLLLKRSARIGNAPCTAGTVPTRASRTTALFQPPGAPWTCPIILLPPPPLLCPPHHLPLHGSPAVPSGLKTVLLGLGWARIARSRSGASCCFSWSL

SEQ ID NO: 30191 - protein, 15 aa, Homo sapiens
LFWAGILIFEVNLML

SEQ ID NO: 30192 - protein, 12 aa, Homo sapiens
MFPLLTVLATIF

SEQ ID NO: 30193 - protein, 55 aa, Homo sapiens
ISERLVKISGKSIGWLVHLSVWSVAVFLPDQMSRLVSEGQCEKKIVSELEKLLED

SEQ ID NO: 30194 - protein, 13 aa, Homo sapiens
MILIHALNIMLAG

SEQ ID NO: 30195 - protein, 44 aa, Homo sapiens
VLVTCRRILTSLLQKHHLLMCWFLTIQNTLLNQTQVENVILISD

SEQ ID NO: 30196 - protein, 18 aa, Homo sapiens
KKAKLWMLKPSLLATQLL

SEQ ID NO: 30197 - protein, 9 aa, Homo sapiens
LLLLHVDVK

SEQ ID NO: 30198 - protein, 10 aa, Homo sapiens
IFTTWIWVFT

SEQ ID NO: 30199 - protein, 46 aa, Homo sapiens
IWQRILHLSLLPVITKWLLLSTTAKPCERLQTAHHFCPVSVNTFCS

SEQ ID NO: 30200 - protein, 60 aa, Homo sapiens
TQAYKRRFLMLLCLLTPLFSCFQQVFLPPVPQLLLLLRRSDLPLMVIPAPLRPPLPRRES

SEQ ID NO: 30201 - protein, 17 aa, Homo sapiens
KELGLISAIILLWKLKY

SEQ ID NO: 30202 - protein, 32 aa, Homo sapiens
IHTLTSLPLLSSLFYTIWPATMLVVKPWSPVE

SEQ ID NO: 30203 - protein, 17 aa, Homo sapiens
LLPLLLVYYFLQAGGLS

SEQ ID NO: 30204 - protein, 431 aa, Homo sapiens
TPARRPALASLPTGPTAPPPRPRCARPVRCTPACWRLRRRARPGLLLRATMSSRIARALALVVTLLHLTRLALSTCPAACHCPLEAPKCAPGVGLVRDGCGCCKVCAKQLNEDCSKTQPCDHTKGLECNFGASSTALKGICRAQSEGRPCEYNSRIYQNGESFQPNCKHQCTCIDGAVGCIPLCPQELSLPNLGCPNPRLVKVTGQCCEEWVCDEDSIKDPMEDQDGLLGKELGFDASEVELTRNNELIAVGKGSSLKRLPVFGMEPRILYNPLQGQKCIVQTTSWSQCSKTCGTGISTRVTNDNPECRLVKETRICEVRPCGQPVYSSLKKGKKCSKTKKSPEPVRFTYAGCLSVKKYRPKYCGSCVDGRCCTPQLTRTVKMRFRCEDGETFSKNVMMIQSCKCNYNCPHANEAAFPFYRLFNDIHKFRD

SEQ ID NO: 30205 - protein, 191 aa, Homo sapiens
IKMASKRALVILAKGAEEMETVIPVDVMRRAGIKVTVAGLAGKDPVQCSRDVVICPDASLEDAKKEGPYDVVVLPGGNLGAQNLSESAAVKEILKEQENRKGLIAAICAGPTALLAHEIGFGSKVTTHPLAKDKMMNGGHYTYSENRVEKDGLILTSRGPGTSFEFALAIVEALNGKEVAAQVKAPLVLKD

SEQ ID NO: 30206 - protein, 7 aa, Homo sapiens
KMAALLF

SEQ ID NO: 30207 - protein, 19 aa, Homo sapiens
LACILNLKLIITTLALELL

SEQ ID NO: 30208 - protein, 20 aa, Homo sapiens
ITSPPSRWAMCLSSWALLSW

SEQ ID NO: 30209 - protein, 37 aa, Homo sapiens
VARWCWKALWCVWTTVSICGMETSYPPGCRPSRMLST

SEQ ID NO: 30210 - protein, 9 aa, Homo sapiens
LYWGYFFGF

SEQ ID NO: 30211 - protein, 16 aa, Homo sapiens
VWPSVIMTLFWLRTRR

SEQ ID NO: 30212 - protein, 21 aa, Homo sapiens
MSSLYSLIMRPLLEVSILLLL

SEQ ID NO: 30213 - protein, 1034 aa, Homo sapiens
RTRRRALSTATMGKGVGRDKYEPAAVSEQGDKKGKKGKKDRDMDELKKEVSMDDHKLSLDELHRKYGTDLSRGLTSARAAEILARDGPNALTPPPTTPEWIKFCRQLFGGFSMLLWIGAILCFLAYSIQAATEEEPQNDNLYLGVVLSAVVIITGCFSYYQEAKSSKIMESFKNMVPQQALVIRNGEKMSINAEEVVVGDLVEVKGGDRIPADLRIISANGCKVDNSSLTGESEPQTRSPDFTNENPLETRNIAFFSTNCVEGTARGIVVYTGDRTVMGRIATLASGLEGGQTPIAAEIEHFIHIITGVAVFLGVSFFILSLILEYTWLEAVIFLIGIIVANVPEGLLATVTVCLTLTAKRMARKNCLVKNLEAVETLGSTSTICSDKTGTLTQNRMTVAHMWFDNQIHEADTTENQSGVSFDKTSATWLALSRIAGLCNRAVFQANQENLPILKRAVAGDASESALLKCIELCCGSVKEMRERYAKIVEIPFNSTNKYQLSIHKNPNTSEPQHLLVMKGAPERILDRCSSILLHGKEQPLDEELKDAFQNAYLELGGLGERVLGFCHLFLPDEQFPEGFQFDTDDVNFPIDNLCFVGLISMIDPPRAAVPDAVGKCRSAGIKVIMVTGDHPITAKAIAKGVGIISEGNETVEDIAARLNIPVSQVNPRDAKACVVHGSDLKDMTSEQLDDILKYHTEIVFARTSPQQKLIIVEGCQRQGAIVAVTGDGVNDSPALKKADIGVAMGIAGSDVSKQAADMILLDDNFASIVTGVEEGRLIFDNLKKSIAYTLTSNIPEITPFLIFIIANIPLPLGTVTILCIDLGTDMVPAISLAYEQAESDIMKRQPRNPKTDKLVNERLISMAYGQIGMIQALGGFFTYFVILAENGFLPIHLLGLRVDWDDRWINDVEDSYGQQWTYEQRKIVEFTCHTAFFVSIVVVQWADLVICKTRRNSVFQQGMKNKILIFGLFEETALAAFLSYCPGMGVALRMYPLKPTWWFCAFPYSLLIFVYDEVRKLIIRRRPGGWVEKETYY

SEQ ID NO: 30214 - protein, 32 aa, Homo sapiens
VWLCSWVCLSSSFLSSLSTPGLRLSSSSSVSS

SEQ ID NO: 30215 - protein, 13 aa, Homo sapiens
KWPTIKKWEERAI

SEQ ID NO: 30216 - protein, 17 aa, Homo sapiens
LWAPGMVLPVLCAAFTH

SEQ ID NO: 30217 - protein, 19 aa, Homo sapiens
MQARWRKGELVVLLLGVGA

SEQ ID NO: 30218 - protein, 510 aa, Homo sapiens
VAAWLHTWAAVGIPTGNSSYWCAAATLKDRVAAEAKDRELMEFAAENEGKSGGGLHSVAEGVRLSPEPGREGVRDLAGAEEFGGGEEGTGLTGIKEIGDGEEGSGQRPEEIPMDLTVVKQEIIDWPGTEGRLAGQWVEQEVEDRPEVKDENAGVLEVKQETDSSLVVKEAKVGEPEVKEEKVKEEVMDWSEVKEEKDNLEIKQEEKFVGQCIKEELMHGECVKEEKDFLKKEIVDDTKVKEEPPINHPVGCKRKLAMSRCETCGTEEAKYRCPRCMRYSCSLPCVKKHKAELTCNGVRDKTAYISIQQFTEMNLLSDYRFLEDVARTADHISRDAFLKRPISNKYMYFMKNRARRQGINLKLLPNGFTKRKENSTFFDKKKQQFCWHVKLQFPQSQAEYIEKRVPDDKTINEILKPYIDPEKSDPVIRQRLKAYIRSQTGVQILMKIEYMQQNLVRYYELDPYKSLLDNLRNKVIIEYPTLHVVLKGSNNDMKVLHQVKSESTKNVGNEN

SEQ ID NO: 30219 - protein, 55 aa, Homo sapiens
RRTRVVVAGKVTSSPSLSARDENTATLPPGCQRSLGGDVGRRCPRPAGHLPPAPR

SEQ ID NO: 30220 - protein, 12 aa, Homo sapiens
LMFRGLVLVHLS

SEQ ID NO: 30221 - protein, 101 aa, Homo sapiens
RVLMAAEPLTELEESIETVVTTFFTFARQEGRKDSLSVNEFKELVTQQLPHLLKDVGSLDEKMKSLDVNQDSELKFNEYWRLIGELAKEIRKKKDLKIRKK

SEQ ID NO: 30222 - protein, 79 aa, Homo sapiens
LPGPASTLLLFYHAAFLLEPEQLPEKRRTSKAFWNSPRRSGWRVPLKWTGPTISQSWPFTSCPLSSGEPHVWKSCGGCW

SEQ ID NO: 30223 - protein, 22 aa, Homo sapiens
IQGPILFFLRTALWEALWPPKT

SEQ ID NO: 30224 - protein, 372 aa, Homo sapiens
IPDLVLMLPRLLLLICAPLCEPAELFLIASPSHPTEGSPVTLTCKMPFLQSSDAQFQFCFFRDTRALGPGWSSSPKLQIAAMWKEDTGSYWCEAQTMASKVLRSRRSQINVHRVPVADVSLETQPPGGQVMEGDRLVLICSVAMGTGDITFLWYKGAVGLNLQSKTQRSLTAEYEIPSVRESDAEQYYCVAENGYGPSPSGLVSITVRIPVSRPILMLRAPRAQAAVEDVLELHCEALRGSPPILYWFYHEDITLGSRSAPSGGGASFNLSLTEEHSGNYSCEANNGLGAQRSEAVTLNFTGRRSARDPLRSLPSPLPQEFTYLNSPTPGQLQPIYENEPREQSVAVHGRQQHSSEQKAQKPWGHIWRTRFP

SEQ ID NO: 30225 - protein, 435 aa, Homo sapiens
IPDLVLMLPRLLLLICAPLCEPAELFLIASPSHPTEGSPVTLTCKMPFLQSSDAQFQFCFFRDTRALGPGWSSSPKLQIAAMWKEDTGSYWCEAQTMASKVLRSRRSQINVHRVPVADVSLETQPPGGQVMEGDRLVLICSVAMGTGDITFLWYKGAVGLNLQSKTQRSLTAEYEIPSVRESDAEQYYCVAENGYGPSPSGLVSITVRIPVSRPILMLRAPRAQAAVEDVLELHCEALRGSPPILYWFYHEDITLGSRSAPSGGGASFNLSLTEEHSGNYSCEANNGLGAQRSEAVTLNFTVPTGARSNHLTSGVIEGLLSTLGPATVALLFCYGLKRKIGRRSARDPLRSLPSPLPQEFTYLNSPTPGQLQPIYENVNVVSGDEVYSLAYYNQPEQESVAAETLGTHMEDKVSLDIYSRLRKANITDVDYEDAM

SEQ ID NO: 30226 - protein, 70 aa, Homo sapiens
TRPPGEVGERLQQQRTFPAGRTGDKWQSPGANFCKPFLRLRLLHGGKDQKAAESHAREEGRALSFARTGC

SEQ ID NO: 30227 - protein, 13 aa, Homo sapiens
MSWTCSGWLISMF

SEQ ID NO: 30228 - protein, 11 aa, Homo sapiens
LFALPLCILSM

SEQ ID NO: 30229 - protein, 117 aa, Homo sapiens
RAREVCLAGVACSGSDPSWKCICTLSGFHSRTIYDIAWCQLTGALATACGDDAIRVFQEDPNSDPQQPTFSLTAHLHQAHSQDVNCVAWNPKEPGLLASCSDDGEVAFWKYQRPEGL

SEQ ID NO: 30230 - protein, 65 aa, Homo sapiens
KDFSTTSSQMWWRRQHLPWSISRSWTGTLSWAARSLSRTAQDSWWLPMGSLSPTPMWWLIGAESV

SEQ ID NO: 30231 - protein, 33 aa, Homo sapiens
MSEVIRKCIFSSDSINEEETGREAITRIKTSEH

SEQ ID NO: 30232 - protein, 138 aa, Homo sapiens
KRAITTLMAGILRLVVQWPPGRLQTVTKGVESLICTDWIRHKFTRSRIPEKVFQASPEDHEKYGGDPQNPHKLHIVTRIKSTRRRPYWEKDIIKMLGLEKAHTPQVHKNIPSVNAKLKVVKHLIRFVVSSQLFLKCIA

SEQ ID NO: 30233 - protein, 18 aa, Homo sapiens
VERLSMMKVSFLFLLTVT

SEQ ID NO: 30234 - protein, 19 aa, Homo sapiens
LILWLSMALFVPRTLHIKR

SEQ ID NO: 30235 - protein, 34 aa, Homo sapiens
IGERSGRGWHLSLLLALVPVAEETPPQLPGVFYE

SEQ ID NO: 30236 - protein, 17 aa, Homo sapiens
IGDFWLFPLRLKFGCLL

SEQ ID NO: 30237 - protein, 32 aa, Homo sapiens
KPPGLRRETLTIRNLCIRRCKEENKREKNTKI

SEQ ID NO: 30238 - protein, 45 aa, Homo sapiens
TRPLRRRRMLPLLACGPGIFLRQGPRRPPGHPKKGQAQLLPRFLL

SEQ ID NO: 30239 - protein, 22 aa, Homo sapiens
LPGPGAQRGRTGIFAVLCKELC

SEQ ID NO: 30240 - protein, 21 aa, Homo sapiens
IRLREWLIMPVFFLPSLFLCL

SEQ ID NO: 30241 - protein, 42 aa, Homo sapiens
RWRKKTLPPPKAEEGEDRQERRRRVPNGRCPRLRQRGRSSPV

SEQ ID NO: 30242 - protein, 8 aa, Homo sapiens
LIWTILVL

SEQ ID NO: 30243 - protein, 14 aa, Homo sapiens
ILIQAGARGPSPPL

SEQ ID NO: 30244 - protein, 356 aa, Homo sapiens
TKQRSEDSMYTAIPQSGSPFPGSVQDPGLHVWRVEKLKPVPVAQENQGVFFSGDSYLVLHNGPEEVSHLHLWIGQQSSRDEQGACAVLAVHLNTLLGERPVQHREVQGNESDLFMSYFPRGLKYQEGGVESAFHKTSTGAPAAIKKLYQVKGKKNIRATERALNWDSFNTGDCFILDLGQNIFAWCGGKSNILERNKARDLALAIRDSERQGKAQVEIVTDGEEPAEMIQVLGPKPALKEGNPEEDLTADKANAQAAALYKVSDATGQMNLTKVADSSPFALELLISDDCFVLDNGLCGKIYIWKGRKANEKERQAALQVAEGFISRMQYAPNTQVEILPQGHESPIFKQFFKDWK

SEQ ID NO: 30245 - protein, 38 aa, Homo sapiens
LLPPSVRCPGSLRPALPPLPDPGARAPRGNCTSAELNE

SEQ ID NO: 30246 - protein, 16 aa, Homo sapiens
IIWFGIFWTIYKQHSF

SEQ ID NO: 30247 - protein, 13 aa, Homo sapiens
VKTLLICFWKREK

SEQ ID NO: 30248 - protein, 32 aa, Homo sapiens
IVYIGKHQSGVTGKQGQGLTMSPRLVLNSWLK

SEQ ID NO: 30249 - protein, 17 aa, Homo sapiens
MLPLTSSLSMKLILLSW

SEQ ID NO: 30250 - protein, 20 aa, Homo sapiens
IFHLTPLLLLGFNYANVGGE

SEQ ID NO: 30251 - protein, 914 aa, Homo sapiens
KSLASLLSKTIDLSKLGPGMRMSVGLSLLLPLSGRTFLLLLSVVMAQSHWPSEPSEAVRDWENQLEASMHSVLSDLHEAVPTVVGIPDGTAVVGRSFRVTIPTDLIASSGDIIKVSAAGKEALPSWLHWDSQSHTLEGLPLDTDKGVHYISVSATRLGANGSHIPQTSSVFSIEVYPEDHSELQSVRTASPDPGEVVSSACAADEPVTVLTVILDADLTKMTPKQRIDLLHRMRSFSEVELHNMKLVPVVNNRLFDMSAFMAGPGNAKKVVENGALLSWKLGCSLNQNSVPDIHGVEAPAREGAMSAQLGYPVVGWHIANKKPPLPKRVRRQIHATPTPVTAIGPPTTAIQEPPSRIVPTPTSPAIAPPTETMAPPVRDPVPGKPTVTIRTRGAIIQTPTLGPIQPTRVSEAGTTVPGQIRPTMTIPGYVEPTAVATPPTTTTKKPRVSTPKPATPSTDSTTTTTRRPTKKPRTPRPVPRVTTKVSITRLETASPPTRIRTTTSGVPRGGEPNQRPELKNHIDRVDAWVGTYFEVKIPSDTFYDHEDTTTDKLKLTLKLREQQLVGEKSWVQFNSNSQLMYGLPDSSHVGKHEYFMHATDKGGLSAVDAFEIHVHRRPQGDRAPARFKAKFVGDPALVLNDIHKKIALVKKLAFAFGDRNCSTITLQNITRGSIVVEWTNNTLPLEPCPKEQIAGLSRRIAEDDGKPRPAFSNALEPDFKATSITVTGSGSCRHLQFIPVVPPRRVPSEAPPTEVPDRDPEKSSEDDVYLHTVIPAVVVAAILLIAGIIAMICYRKKRKGKLTLEDQATFIKKGVPIIFADELDDSKPPPSSSMPLILQEEKAPLPPPEYPNQSVPETTPLNQDTMGEYTPLRDEDPNAPPYQPPPPFTAPMEGKGSRPKNMTPYRSPPPYVPP

SEQ ID NO: 30252 - protein, 16 aa, Homo sapiens
TALFWVALLFQIPVVT

SEQ ID NO: 30253 - protein, 21 aa, Homo sapiens
LGALGARTPGNILATTKGHPK

SEQ ID NO: 30254 - protein, 19 aa, Homo sapiens
LRRRGVPVERRRPRRAPAS

SEQ ID NO: 30255 - protein, 35 aa, Homo sapiens
ISAQYPVVDHEFDAVVVGAGGAGFASCIWPFRGRV

SEQ ID NO: 30256 - protein, 11 aa, Homo sapiens
VISVDMSKDTV

SEQ ID NO: 30257 - protein, 15 aa, Homo sapiens
KVSLGLLFSFWVQMI

SEQ ID NO: 30258 - protein, 23 aa, Homo sapiens
KCCIKSANYVKLAYLPLLCLSLA

SEQ ID NO: 30259 - protein, 30 aa, Homo sapiens
LRRPGGEAEEKQLCPGEEKLAHSRLGTSFQ

SEQ ID NO: 30260 - protein, 31 aa, Homo sapiens
IWAGRKRRSCFPGRRCREGLQGVRETRGPAS

SEQ ID NO: 30261 - protein, 343 aa, Homo sapiens
IEKMSELEQLRQEAEQLRNQIQDARKACNDATLVQITSNMDSVGRIQMRTRRTLRGHLAKIYAMHWGYDSRLLVSASQDGKLIIWDSYTTNKMHAIPLRSSWVMTCAYAPSGNYVACGGLDNICSIYNLKTREGNVRVSRELPGHTGYLSCCRFLDDSQIVTSSGDTTCALWDIETAQQTTTFTGHSGDVMSLSLSPDMRTFVSGACDASSKLWDIRDGMCRQSFTGHVSDINAVSFFPNGYAFATGSDDATCRLFDLRADQELLLYSHDNIICGITSVAFSKSGRLLLAGYDDFNCNVWDTLKGDRAGVLAGHDNRVSCLGVTDDGMAVATGSWDSFLRIWN

SEQ ID NO: 30262 - protein, 638 aa, Homo sapiens
ISVCPRVRPVPACRTMESYHKPDQQKLQALKDTANRLRISSIQATTAAGSGHPTSCCSAAEIMAVLFFHTMRYKSQDPRNPHNDRFVLSKGHAAPILYAVWAEAGFLAEAELLNLRKISSDLDGHPVPKQAFTDVATGSLGQGLGAACGMAYTGKYFDKASYRVYCLLGDGELSEGSVWEAMAFASIYKLDNLVAILDINRLGQSDPAPLQHQMDIYQKRCEAFGWHAIIVDGHSVEELCKAFGQAKHQPTAIIAKTFKGRGITGVEDKESWHGKPLPKNMAEQIIQEIYSQIQSKKKILATPPQEDAPSVDIANIRMPSLPSYKVGDKIATRKAYGQALAKLGHASDRIIALDGDTKNSTFSEIFKKEHPDRFIECYIAEQNMVSIAVGCATRNRTVPFCSTFAAFFTRAFDQIRMAAISESNINLCGSHCGVSIGEDGPSQMALEDLAMFRSVPTSTVFYPSDGVATEKAVELAANTKGICFIRTSRPENAIIYNNNEDFQVGQAKVVLKSKDDQVTVIGAGVTLHEALAAAELLKKEKINIRVLDPFTIKPLDRKLILDSARATKGRILTVEDHYYEGGIGEAVSSAVVGEPGITVTHLAVNRVPRSGKPAELLKMFGIDRDAIAQAVRGLITKA

SEQ ID NO: 30263 - protein, 11 aa, Homo sapiens
IILVFTSVLCE

SEQ ID NO: 30264 - protein, 233 aa, Homo sapiens
IAEGGGGGGRGGGGGGGRSGGGGGGYESAAGGDMANIAVQRIKREFKEVLKSEETSKNQIKVDLVDENFTELRGEIAGPPDTPYEGGRYQLEIKIPETYPFNPPKVRFITKIWHPNISSVTGAICLDILKDQWAAAMTLRTVLLSLQALLAAAEPDDPQDAVVANQYKQNPEMFKQTARLWAHVYAGAPVSSPEYTKKIENLCAMGFDRNAVIVALSSKSWDVETATELLLSN

SEQ ID NO: 30265 - protein, 24 aa, Homo sapiens
VGVLLWALFSILDEMAITTDDWEV

SEQ ID NO: 30266 - protein, 16 aa, Homo sapiens
LLQIFLMILILMKKQN

SEQ ID NO: 30267 - protein, 43 aa, Homo sapiens
ILVLDKKQEMNPKEKKRRKKRKKSRRRKKTHILLLRLMTVNMT

SEQ ID NO: 30268 - protein, 18 aa, Homo sapiens
ILLKTFGLCTTISSCLVI

SEQ ID NO: 30269 - protein, 93 aa, Homo sapiens
ILSQATRHFLLGTLFTNCLCGTFCFPCLGCQVAADMNECCLCGTSVAMRTLYRTRYGIPGSICDDYMATLCCPHCTLCQIKRDINRRRAMRTF

SEQ ID NO: 30270 - protein, 8 aa, Homo sapiens
ILRFCVLI

SEQ ID NO: 30271 - protein, 590 aa, Homo sapiens
KTPNTSNMKLLHVFLLFLCFHLRFCKVTYTSQEDLVEKKCLAKKYTHLSCDKVFCQPWQRCIEGTCVCKLPYQCPKNGTAVCATNRRSFPTYCQQKSLECLHPGTKFLNNGTCTAEGKFSVSLKHGNTDSEGIVEVKLVDQDKTMFICKSSWSMREANVACLDLGFQQGADTQRRFKLSDLSINSTECLHVHCRGLETSLAECTFTKRRTMGYQDFADVVCYTQKADSPMDDFFQCVNGKYISQMKACDGINDCGDQSDELCCKACQGKGFHCKSGVCIPSQYQCNGEVDCITGEDEVGCAGFASVTQEETEILTADMDAERRRIKSLLPKLSCGVKNRMHIRRKRIVGGKRAQLGDLPWQVAIKDASGITCGGIYIGGCWILTAAHCLRASKTHRYQIWTTVVDWIHPDLKRIVIEYVDRIIFHENYNAGTYQNDIALIEMKKDGNKKDCELPRSIPACVPWSPYLFQPNDTCIVSGWGREKDNERVFSLQWGEVKLISNCSKFYGNRFYEKEMECAGTYDGSIDACKGDSGGPLVCMDANNVTYVWGVVSWGENCGKPEFPGVYTKVANYFDWISYHVGRPFISQYNV

SEQ ID NO: 30272 - protein, 607 aa, Homo sapiens
RMPYEIKKVFASLPQVERGVSKIIGGDPKGNNFLYTNGKCVILRNIDNPALADIYTEHAHQVVVAKYAPSGFYIASGDVSGKLRIWDTTQKEHLLKYEYQPFAGKIKDIAWTEDSKRIAVVGEGREKFGAVFLWDSGSSVGEITGHNKVINSVDIKQSRPYRLATGSDDNCAAFFEGPPFKFKFTIGDHSRFVNCVRFSPDGNRFATASADGQIYIYDGKTGEKVCALGGSKAHDGGIYAISWSPDSTHLLSASGDKTSKIWDVSVNSVVSTFPMGSTVLDQQLGCLWQKDHLLSVSLSGYINYLDRNNPSKPLHVIKGHSKSIQCLTVHKNGGKSYIYSGSHDGHINYWDSETGENDSFAGKGHTNQVSRMTVDESGQLISCSMDDTVRYTSLMLRDYSGQGVVKLDVQPKCVAVGPGGYAVVVCIGQIVLLKDQRKCFSIDNPGYEPEVVAVHPGGDTVAIGGVDGNVRLYSILGTTLKDEGKLLEAKGPVTDVAYSHDGAFLAVCDASKVVTVFSVADGYSENNVFYGHHAKIVCLAWSPDNEHFASGGMDMMVYVWTLSDPETRVKIQDAHRLHHVSSLAWLDEHTLVTTSHDASVKEWTITY

SEQ ID NO: 30273 - protein, 13 aa, Homo sapiens
KHMIKLWLHLSML

SEQ ID NO: 30274 - protein, 23 aa, Homo sapiens
VAIILAIIWVSDKIKKKEGAHIP

SEQ ID NO: 30275 - protein, 111 aa, Homo sapiens
KMACAAARSPADQDRFICIYPAYLNNKKTIAEGRRIPISKAVENPTATEIQDVCSAVGLNVFLEKNKMYSREWNRDVQYRGRVRVQLKQEDGSLCLVQFPSHYTLSLTSGS

SEQ ID NO: 30276 - protein, 9 aa, Homo sapiens
LFFVWTLLG

SEQ ID NO: 30277 - protein, 8 aa, Homo sapiens
MIIWMLLT

SEQ ID NO: 30278 - protein, 30 aa, Homo sapiens
RAGGRSGGPSGRLRRAAEAVALGGGTKSSD

SEQ ID NO: 30279 - protein, 42 aa, Homo sapiens
VTLSCPGLRGVGLWVFETRKLRAFSHSSGCSWRLCGRHHATE

SEQ ID NO: 30280 - protein, 81 aa, Homo sapiens
ILPAPVPAAARSRGQRPSGGHRGARWKRRGENTPSAVTTLTPLTVMRHLHPHQDAPNCPAAPSRAGPDRTKRSPPRFSGQT

SEQ ID NO: 30281 - protein, 32 aa, Homo sapiens
KSRVLPFLFEKHPRGKKLRGEFLKCREPEKPK

SEQ ID NO: 30282 - protein, 120 aa, Homo sapiens
ICALYVICQFILIRSGVNISMEQVTVVDASFFLKSTQNGILTMIQDTQWVIHSCCSSLQIQHQEFWDLHLPHFILGDQQLDQEEIWVLEMETCKDLDTCRKAEWKLAELFTSWIFNEGKT

SEQ ID NO: 30283 - protein, 16 aa, Homo sapiens
KLQRILIAAAFLIIRN

SEQ ID NO: 30284 - protein, 617 aa, Homo sapiens
RSDRVPAVPSPRLGPAAGAAMGKKHKKHKAEWRSSYEDYADKPLEKPLKLVLKVGGSEVTELSGSGHDSSYYDDRSDHERERHKEKKKKKKKKSEKEKHLDDEERRKRKEEKKRKREREHCDTEGEADDFDPGKKVEVEPPPDRPVRACRTQPAENESTPIQQLLEHFLRQLQRKDPHGFFAFPVTDAIAPGYSMIIKHPMDFGTMKDKIVANEYKSVTEFKADFKLMCDNAMTYNRPDTVYYKLAKKILHAGFKMMSKQAALLGNEDTAVEEPVPEVVPVQVETAKKSKKPSREVISCMFEPEGNACSLTDSTAEEHVLALVEHAADEARDRINRFLPGGKMGYLKRNGDGSLLYSVVNTAEPDADEEETHPVDLSSLSSKLLPGFTTLGFKDERRNKVTFLSSATTALSMQNNSVFGDLKSDEMELLYSAYGDETGVQCALSLQEFVKDAGSYSKKVVDDLLDQITGGDHSRTLFQLKQRRNVPMKPPDEAKVGDTLGDSSSSVLEFMSMKSYPDVSVDISMLSSLGKVKKELDPDDSHLNLDETTKLLQDLHEAQAERGGSRPSSNLSSLSNASERDQHHLGSPSRLSVGEQPDVTHDPYEFLQSPEPAASAKT

SEQ ID NO: 30285 - protein, 27 aa, Homo sapiens
IGRRDVSSVLCGPAGLLLWVCRLLSLL

SEQ ID NO: 30286 - protein, 28 aa, Homo sapiens
IRWDRPGGMEGARFYNPPGTPKRRPRAT

SEQ ID NO: 30287 - protein, 514 aa, Homo sapiens
KWTAGMAERAALEELVKLQGERVRGLKQQKASAELIEEEVAKLLKLKAQLGPDESKQKFVLKTPKGTRDYSPRQMAVREKVFDVIIRCFKRHGAEVIDTPVFELKETLMGKYGEDSKLIYDLKDQGGELLSLRYDLTVPFARYLAMNKLTNIKRYHIAKVYRRDNPAMTRGRYREFYQCDFDIAGNFDPMIPDAECLKIMCEILSSLQIGDFLVKVNDRRILDGMFAICGVSDSKFRTICSSVDKLDKVSWEEVKNEMVGEKGLAPEVADRIGDYVQQHGGVSLVEQLLQDPKLSQNKQALEGLGDLKLLFEYLTLFGIDDKISFDLSLARGLDYYTGVIYEAVLLQTPAQAGEEPLGVGSVAAGGRYDGLVGMFDPKGRKVPCVGLSIGVERIFSIVEQRLEALEEKIRTTETQVLVASAQKKLLEERLKLVSELWDAGIKAELLYKKNPKLLNQLQYCEEAGIPLVAIIGEQELKDGVIKLRSVTSREEVDVRREDLVEEIKRRTGQPLCIC

SEQ ID NO: 30288 - protein, 445 aa, Homo sapiens
IWAVCATRVGGAVGGTAKKPRSPEPRVTLLSQSKSGFWFGAERPGGLAFPRKAPPCPWPREQTKSTAGPITLGALRPAMVMEVGTLDAGGLRALLGERAAQCLLLDCRSFFAFNAGHIAGSVNVRFSTIVRRRAKGAMGLEHIVPNAELRGRLLAGAYHAVVLLDERSAALDGAKRDGTLALAAGALCREARAAQVFFLKGGYEAFSASCPELCSKQSTPMGLSLPLSTSVPDSAESGCSSCSTPLYDQGGPVEILPFLYLGSAYHASRKDMLDALGITALINVSANCPNHFEGHYQYKSIPVEDNHKADISSWFNEAIDFIDSIKNAGGRVFVHCQAGISRSATICLAYLMRTNRVKLDEAFEFVKQRRSIISPNFSFMGQLLQFESQVLAPHCSAEAGSPAMAVLDRGTSTTTVFNFPVSIPVHSTNSALSYLQSPITTSPSC

SEQ ID NO: 30289 - protein, 489 aa, Homo sapiens
IAEDGTPGQRSRMANMQGLVERLERAVSRLESLSAESHRPPGNCGEVNGVIAGVAPSVEAFDKLMDSMVAEFLKNSRILAGDVETHAEMVHSAFQAQRAFLLMASQYQQPHENDVAALLKPISEKIQEIQTFRERNRGSNMFNHLSAVSESIPALGWIAVSPKPGPYVKEMNDAATFYTNRVLKDYKHSDLRHVDWVKSYLNIWSELQAYIKEHHTTGLTWSKTGPVASTVSAFSVLSSGPGLPPPPPPLPPPGPPPLFENEGKKEESSPSRSALFAQLNQGEAITKGLRHVTDDQKTYKNPSLRAQGGQTQSPTKSHTPSPTSPKSYPSQKHAPVLELEGKKWRVEYQEDRNDLVISETELKQVAYIFKCEKSTIQIKGKVNSIIIDNCKKLGLVFDNVVGIVEVINSQDIQIQVMGRVPTISINKTEGCHIYLSEDALDCEIVSAKSSEMNILIPQDGDYREFPIPEQFKTAWDGSKLITEPAEIMA

SEQ ID NO: 30290 - protein, 462 aa, Homo sapiens
TQPGVGLVGAKVQGDRGGRSLERRSASLPLAGLAPVAGAHPAAAADSSRARGSLRGRGSRTCAGDQRKVPARLGGQQGPGRGCGCRRGPHRATFLPGGCRWKMSQERPTFYRQELNKTIWEVPERYQNLSPVGSGAYGSVCAAFDTKTGLRVAVKKLSRPFQSIIHAKRTYRELRLLKHMKHENVIGLLDVFTPARSLEEFNDVYLVTHLMGADLNNIVKCQKLTDDHVQFLIYQILRGLKYIHSADIIHRDLKPSNLAVNEDCELKILDFGLARHTDDEMTGYVATRWYRAPEIMLNWMHYNQTVDIWSVGCIMAELLTGRTLFPGTDHIDQLKLILRLVGTPGAELLKKISSESARNYIQSLTQMPKMNFANVFIGANPLAVDLLEKMLVLDSDKRITAAQALAHAYFAQYHDPDDEPVADPYDQSFESRDLLIDEWKSLTYDEVISFVPPPLDQEEMES

SEQ ID NO: 30291 - protein, 18 aa, Homo sapiens
LIPVFLSIGTKEMKKAQR

SEQ ID NO: 30292 - protein, 34 aa, Homo sapiens
LGQSLVIHLLLVFFQSLLVTGWEALLKIPTKTGS

SEQ ID NO: 30293 - protein, 261 aa, Homo sapiens
RQTHRVGSGLQPGREEGPGLRSGDSGPRRGAHTQAGRPGVRGLCAADQAPRASAPPMAEPLQPDPGAAEDAAAQAVETPGWKAPEDAGPQPGSYEIRHYGPAKWVSTSVESMDWDSAIQTGFTKLNSYIQGKNEKEMKIKMTAPVTSYVEPGSGPFSESTITISLYIPSEQQFDPPRPLESDVFIEDRAEMTVFVRSFDGFSSAQKNQEQLLTLASILREDGKVFDEKVYYTAGYNSPVKLLNRNNEVWLIQKNEPTKENE

SEQ ID NO: 30294 - protein, 69 aa, Homo sapiens
LIRLIWLARRVSPSSLTAPCASLPKLRARSKRTTIPDRGGPVFGQGYTSSCAPLLEPPNKLSRSICRRT

SEQ ID NO: 30295 - protein, 15 aa, Homo sapiens
ISILSVVWLTLRICP

SEQ ID NO: 30296 - protein, 11 aa, Homo sapiens
LHDTSAYCPSH

SEQ ID NO: 30297 - protein, 16 aa, Homo sapiens
ITTRMWPRLFISMATC

SEQ ID NO: 30298 - protein, 57 aa, Homo sapiens
RAWPRDPVHCCCARDRGNRRPGRTSTLSSISVYTTPRAPSRLPSGGIPGAPPHHTAR

SEQ ID NO: 30299 - protein, 72 aa, Homo sapiens
LPSVFPSVLILSPSALLCVPPLPLHFLSSHPQSHPRAVSLSGASPSCSLSPVLPTLTSRRPWPPSQTGSYSC

SEQ ID NO: 30300 - protein, 13 aa, Homo sapiens
VCSGGHREDSETG

SEQ ID NO: 30301 - protein, 14 aa, Homo sapiens
IRVLLLIIFAWEVE

SEQ ID NO: 30302 - protein, 13 aa, Homo sapiens
LEKILQLLLLILD

SEQ ID NO: 30303 - protein, 49 aa, Homo sapiens
ILSVSAALVTLWRWGASWGCAPWRAGYHVCVEVPRVCYADAVLVETTPL

SEQ ID NO: 30304 - protein, 52 aa, Homo sapiens
VCVWLWVSCAVLLEHRGKAVDAGSQLAETCRPWSLMIVPVPLWRSLTAWRCW

SEQ ID NO: 30305 - protein, 26 aa, Homo sapiens
IKGRTLLAGVCWTLSFHLLTKRIPIP

SEQ ID NO: 30306 - protein, 396 aa, Homo sapiens
TAAAPADSPETTARRVPVPTSDHRQRSRPRRSPLAATAPSAPPAVPTMTAASMGPVRVAFVVLLALCSRPAVGQNCSGPCRCPDEPAPRCPAGVSLVLDGCGCCRVCAKQLGELCTERDPCDPHKGLFCHFGSPANRKIGVCTAKDGAPCIFGGTVYRSGESFQSSCKYQCTCLDGAVGCMPLCSMDVRLPSPDCPFPRRVKLPGKCCEEWVCDEPKDQTVVGPALAAYRLEDTFGPDPTMIRANCLVQTTEWSACSKTCGMGISTRVTNDNASCRLEKQSRLCMVRPCEADLEENIKKGKKCIRTPKISKPIKFELSGCTSMKTYRAKFCGVCTDGRCCTPHRTTTLPVEFKCPDGEVMKKNMMFIKTCACHYNCPGDNDIFESLYYRKMYGDMA

SEQ ID NO: 30307 - protein, 614 aa, Homo sapiens
RMCCWPLLLLWGLLPGTAAGGSGRTYPHRTLLDSEGKYWLGWSQRGSQIAFRLQVRTAGYVGFGFSPTGAMASADIVVGGVAHGRPYLQDYFTNANRELKKDAQQDYHLEYAMENSTHTIIEFTRELHTCDINDKSITDSTVRVIWAYHHEDAGEAGPKYHDSNRGTKSLRLLNPEKTSVLSTALPYFDLVNQDVPIPNKDTTYWCQMFKIPVFQEKHHVIKVEPVIQRGHESLVHHILLYQCSNNFNDSVLESGHECYHPNMPDAFLTCETVIFAWAIGGEGFSYPPHVGLSLGTPLDPHYVLLEVHYDNPTYEEGLIDNSGLRLFYTMDIRKYDAGVIEAGLWVSLFHTIPPGMPEFQSEGHCTLECLEEALEAEKPSGIHVFAVLLHAHLAGRGIRLRHFRKGKEMKLLAYDDDFDFNFQEFQYLKEEQTILPGDNLITECRYNTKDRAEMTWGGLSTRSEMCLSYLLYYPRINLTRCASIPDIMEQLQFIGVKEIYRPVTTWPFIIKSPKQYKNLSFMDAMNKFKWTKKEGLSFNKLVLSLPVNVRCSKTDNAEWSIQGMTALPPDIERPYKAEPLVCGTSSSSSLHRDFSINLLVCLLLLSCTLSTKSL

SEQ ID NO: 30308 - protein, 59 aa, Homo sapiens
LGIPTSLIWGVKGPGQYSILLSVWRSSTQAGASGTGEDPRTLEELVQGTELPASLQSRA

SEQ ID NO: 30309 - protein, 21 aa, Homo sapiens
LSETCLLLWPLVLSCSPAWCV

SEQ ID NO: 30310 - protein, 29 aa, Homo sapiens
LLLLLLLPLLLHESPQPPALRVVATSSDR

SEQ ID NO: 30311 - protein, 15 aa, Homo sapiens
ISAFGTDDQTEIYFD

SEQ ID NO: 30312 - protein, 62 aa, Homo sapiens
TNPPGGTNNSRCAALGAVTLTAKICSFTPEPARPRTPPEGRNSGHAAFKNYNTHGEGPRLHS

SEQ ID NO: 30313 - protein, 27 aa, Homo sapiens
LLLRRGASTAAPWFLCGFLLLESGTLE

SEQ ID NO: 30314 - protein, 23 aa, Homo sapiens
MIKLLLFMEVLVVCMTLGQLAVL

SEQ ID NO: 30315 - protein, 24 aa, Homo sapiens
MPIPTRMCSFASRKPQRQVPSRRA

SEQ ID NO: 30316 - protein, 2742 aa, Homo sapiens
IAQTAALAPAAPPARASMMNNSGYSDAGLGLGDETDEMPSTEKDLAEDAPWKKIQQNTFTRWCNEHLKCVGKRLTDLQRDLSDGLRLIALLEVLSQKRMYRKFHPRPNFRQMKLENVSVALEFLEREHIKLVSIDSKAIVDGNLKLILGLIWTLILHYSISMPMWEDEDDEDARKQTPKQRLLGWIQNKVPQLPITNFNRDWQDGKALGALVDNCAPGLCPDWEAWDPNQPVENAREAMQQADDWLGVPQVIAPEEIVDPNVDEHSVMTYLSQFPKAKLKPGAPVRSKQLNPKKAIAYGPGIEPQGNTVLQPAHFTVQTVDAGVGEVLVYIEDPEGHTEEAKVVPNNDKDRTYAVSYVPKVAGLHKVTVLFAGQNIERSPFEVNVGMALGDANKVSARGPGLEPVGNVANKPTYFDIYTAGAGTGDVAVVIVDPQGRRDTVEVALEDKGDSTFRCTYRPAMEGPHTVHVAFAGAPITRSPFPVHVSEACNPNACRASGRGLQPKGVRVKEVADFKVFTKGAGSGELKVTVKGPKGTEEPVKVREAGDGVFECEYYPVVPGKYVVTITWGGYAIPRSPFEVQVSPEAGVQKVRAWGPGLETGQVGKSADFVVEAIGTEVGTLGFSIEGPSQAKIECDDKGDGSCDVRYWPTEPGEYAVHVICDDEDIRDSPFIAHILPAPPDCFPDKVKAFGPGLEPTGCIVDKPAEFTIDARAAGKGDLKLYAQDADGCPIDIKVIPNGDGTFRCSYVPTKPIKHTIIISWGGVNVPKSPFRVNVGEGSHPERVKVYGPGVEKTGLKANEPTYFTVDCSEAGQGDVSIGIKCAPGVVGPAEADIDFDIIKNDNDTFTVKYTPPGAGRYTIMVLFANQEIPASPFHIKVDPSHDASKVKAEGPGLNRTGVEVGKPTHFTVLTKGAGKAKLDVQFAGTAKGEVVRDFEIIDNHDYSYTVKYTAVQQGNMAVTVTYGGDPVPKSPFVVNVAPPLDLSKIKVQGLNSKVAVGQEQAFSVNTRGAGGQGQLDVRMTSPSRRPIPCKLEPGGGAEAQAVRYMPPEEGPYKVDITYDGHPVPGSPFAVEGVLPPDPSKVCAYGPGLKGGLVGTPAPFSIDTKGAGTGGLGLTVEGPCEAKIECQDNGDGSCAVSYLPTEPGEYTINILFAEAHIPGSPFKATIRPVFDPSKVRASGPGLERGKVGEAATFTVDCSEAGEAELTIEILSDAGVKAEVLIHNNADGTYHITYSPAFPGTYTITIKYGGHPVPKFPTRVHVQPAVDTSGVKVSGPGVEPHGVLREVTTEFTVDARSLTATGGNHVTARVLNPSGAKTDTYVTDNGDGTYRVQYTAYEEGVHLVEVLYDEVAVPKSPFRVGVTEGCDPTRVRAFGPGLEGGLVNKANRFTVETRGAGTGGLGLAIEGPSEAKMSCKDNKDGSCTVEYIPFTPGDYDVNITFGGRPIPGSPFRVPVKDVVDPGKVKCSGPGLGAGVRARVPQTFTVDCSQAGRAPLQVAVLGPTGVAEPVEVRDNGDGTHTVHYTPATDGPYTVAVKYADQEVPRSPFKIKVLPAHDASKVRASGPGLNASGIPASLPVEFTIDARDAGEGLLTVQILDPEGKPKKANIRDNGDGTYTVSYLPDMSGRYTITIKYGGDEIPYSPFRIHALPTGDASKCLVTVSIGGHGLGACLGPRIQIGQETVITVDAKAAGEGKVTCTVSTPDGAELDVDVVENHDGTFDIYYTAPEPGKYVITIRFGGEHIPNSPFHVLACDPLPHEEEPSEVPQLRQPYAPPRPGARPTHWATEEPVVPVEPMESMLRPFNLVIPFAVQKGELTGEVRMPSGKTARPNITDNKDGTITVRYAPTEKGLHQMGIKYDGNHIPGSPLQFYVDAINSRHVSAYGPGLSHGMVNKPATFTIVTKDAGEGGLSLAVEGPSKAEITCKDNKDGTCTVSYLPTAPGDYSIIVRFDDKHIPGSPFTAKITGDDSMRTSQLNVGTSTDVSLKITESDLSQLTASIRAPSGNEEPCLLKRLPNRHIGISFTPKEVGEHVVSVRKSGKHVTNSPFKILVGPSEIGDASKVRVWGKGLSEGHTFQVAEFIVDTRNAGYGGLGLSIEGPSKVDINCEDMEDGTCKVTYCPTEPGTYIINIKFADKHVPGSPFTVKVTGEGRMKESITRRRQAPSIATIGSTCDLNLKIPGNWFQMVSAQERLTRTFTRSSHTYTRTERTEISKTRGGETKREVRVEESTQVGGDPFPAVFGDFLGRERLGSFGSITRQQEGEASSQDMTAQVTSPSGKVEAAEIVEGEDSAYSVRFVPQEMGPHTVAVKYRGQHVPGSPFQFTVGPLGEGGAHKVRAGGTGLERGVAGVPAEFSIWTREAGAGGLSIAVEGPSKAEIAFEDRKDGSCGVSYVVQEPGDYEVSIKFNDEHIPDSPFVVPVASLSDDARRLTVTSLQETGLKVNQPASFAVQLNGARGVIDARVHTPSGAVEECYVSELDSDKHTIRFIPHENGVHSIDVKFNGAHIPGSPFKIRVGEQSQAGDPGLVSAYGPGLEGGTTGVSSEFIVNTLNAGSGALSVTIDGPSKVQLDCRECPEGHVVTYTPMAPGNYLIAIKYGGPQHIVGSPFKAKVTGPRLSGGHSLHETSTVLVETVTKSSSSRGSSYSSIPKFSSDASKVVTRGPGLSQAFVGQKNSFTVDCSKAGTNMMMVGVHGPKTPCEEVYVKHMGNRVYNVTYTVKEKGDYILIVKWGDESVPGSPFKVKVP

SEQ ID NO: 30317 - protein, 30 aa, Homo sapiens
LCGPGGGSSGDPRARPPEPTALGPKGPAGR

SEQ ID NO: 30318 - protein, 42 aa, Homo sapiens
TTRASGALDAGGDAGETPAGGRRGLCQQSEQPRGPIPHILQV

SEQ ID NO: 30319 - protein, 43 aa, Homo sapiens
VVFVHLEFLYLFVVGMRDDHIYFSQIHLELTLPGKLQQWERTM

SEQ ID NO: 30320 - protein, 22 aa, Homo sapiens
VSLDLESGDVRLRSGSVRCASD

SEQ ID NO: 30321 - protein, 45 aa, Homo sapiens
LLPPGNNRLPLLAGCYCPEPALQGTAGQTKPIEPWRLPLLPSRPL

SEQ ID NO: 30322 - protein, 487 aa, Homo sapiens
TRRRWSRNGSREGTRAEADQGQACVRSLAGAGVPMWSPEREAEAPAGGDPAGLLPPEWEEDEERMSFLFSAFKRSREVNSTDWDSKMGFWAPLVLSHSRRQGVVRLRLRDLQEAFQRKGSVPLGLATVLQDLLRRGELQRESDFMASVDSSWISWGVGVFLLKPLKWTLSNMLGDNKVPAEEVLVAVELLKEKAEEVYRLYQNSPLSSHPVVALSELSTLCANSCPDERTFYLVLLQLQKEKRVTVLEQNGEKIVKFARGPRAKVSPVNDVDVGVYQLMQSEQLLSRKVESLSQEAERCKEEARRACRAGKKQLALRSLKAKQRTEKRIEALHAKLDTVQGILDRIYASQTDQMVFNAYQAGVGALKLSMKDVTVEKAESLVDQIQELCDTQDEVSQTLAGGVTNGLDFDSEELEKELDILLQDTTKEPLDLPDNPRNRHFTNSVPNPRISDAELEAELEKLSLSEGGLVPSSKSPKRQLEPTLKPL

SEQ ID NO: 30323 - protein, 240 aa, Homo sapiens
IAAVLCSGFVCAGCAERWAGGFVLPWLQAAAGSSRSLGNMRRAWILLTLGLVACVSAESRAELTSDKDMYLDNSSIEEASGVYPIDDDDYASASGSGADEDVESPELTTSRPLPKILLTSAAPKVETTTLNIQNKIPAQTKSPEETDKEKVHLSDSERKMDPAEEDTNVYTEKHSDSLFKRTEVLAAVIAGGVIGFLFAIFLILLLVYRMRKKDEGSYDLGERKPSSAAYQKAPTKEFYA

SEQ ID NO: 30324 - protein, 32 aa, Homo sapiens
LRPHREGRRPRRTQRRLPAGGSAPPGPPTALV

SEQ ID NO: 30325 - protein, 17 aa, Homo sapiens
MPSLENLSAVNTVTRNM

SEQ ID NO: 30326 - protein, 14 aa, Homo sapiens
KCGRGPGAGDGRAL

SEQ ID NO: 30327 - protein, 14 aa, Homo sapiens
KSLLLMIFLDTILI

SEQ ID NO: 30328 - protein, 31 aa, Homo sapiens
ICCRKIISVLAFSLTMQDVARTLRGPTFCQC

SEQ ID NO: 30329 - protein, 214 aa, Homo sapiens
RSSARRGGRSEPGRAAGGGAAEDTRRRAGDMDRGEQGLLRTDPVPEEGEDVAATISATETLSEEEQEELRRELAKVEEEIQTLSQVLAAKEKHLAEIKRKLGINSLQELKQNIAKGWQDVTATSAYKKTSETLSQAGQKASAAFSSVGSVITKKLEDVKNSPTFKSFEEKVENLKSKVGGTKPAGGDFGEVLNSAANASATTTEPLPEKTQESL

SEQ ID NO: 30330 - protein, 314 aa, Homo sapiens
VYPRALKEVRQPSPAPADRAMAQRKNAKSSGNSSSSGSGSGSTSAGSSSPGARRETKHGGHKNGRKGGLSGTSFFTWFMVIALLGVWTSVAVVWFDLVDYEEVLGKLGIYDADGDGDFDVDDAKVLLGLKERSTSEPAVPPEEAEPHTEPEEQVPVEAEPQNIEDEAKEQIQSLLHEMVHAEHVEGEDLQQEDGPTGEPQQEDDEFLMATDVDDRFETLEPEVSHEETEHSYHVEETDSSEPVVEDERLHHDTDDVTYQVYEEQAVYEPLENEGIEITEVTAPPEDNPVEDSQVIVEEVSIFPVEEQQEVPPDT

SEQ ID NO: 30331 - protein, 24 aa, Homo sapiens
ILWLLRILLLHRGCVTNGGRLQCC

SEQ ID NO: 30332 - protein, 38 aa, Homo sapiens
IWSIYISYISILRDLKQELLMGGQQTIYSCSSLTGFAS

SEQ ID NO: 30333 - protein, 37 aa, Homo sapiens
VFPLSAALVNRTRRHGPCDPWTEEGRRVCVPRAREAP

SEQ ID NO: 30334 - protein, 12 aa, Homo sapiens
VVGSWSCGLLLA

SEQ ID NO: 30335 - protein, 29 aa, Homo sapiens
RVSVVLVGLLVLLVLLKDRCSGKLGGLSH

SEQ ID NO: 30336 - protein, 15 aa, Homo sapiens
MLFLLSVFMSSALSV

SEQ ID NO: 30337 - protein, 8 aa, Homo sapiens
LGPALQRG

SEQ ID NO: 30338 - protein, 17 aa, Homo sapiens
LAAADPAKGADRALGWR

SEQ ID NO: 30339 - protein, 87 aa, Homo sapiens
VEGLDCLSLLTFIFPLCWMPPALKHQTPGSSAFGLLDLPPEWFARGSQAFGYRLRAALSAFLLLRFWDFTGFLAPQLADGLLWDLTL

SEQ ID NO: 30340 - protein, 22 aa, Homo sapiens
MKQVWATKVWPLLRRRWCLRRL

SEQ ID NO: 30341 - protein, 18 aa, Homo sapiens
MRRRVILALSVSLGWAHL

SEQ ID NO: 30342 - protein, 20 aa, Homo sapiens
VMSCSLELKSLLMTVPMSDS

SEQ ID NO: 30343 - protein, 25 aa, Homo sapiens
MVLLMVWVVMAVVVEAVEVTMGKAA

SEQ ID NO: 30344 - protein, 22 aa, Homo sapiens
MTTLGLLTGICPQTARTWVNMD

SEQ ID NO: 30345 - protein, 26 aa, Homo sapiens
LATLEIGCFLKLKEKPMKRWWILTEF

SEQ ID NO: 30346 - protein, 11 aa, Homo sapiens
VCACLMSLVFV

SEQ ID NO: 30347 - protein, 617 aa, Homo sapiens
IMSSLAVRDPAMDRSLRSVFVGNIPYEATEEQLKDIFSEVGSVVSFRLVYDRETGKPKGYGFCEYQDQETALSAMRNLNGREFSGRALRVDNAASEKNKEELKSLGPAAPIIDSPYGDPIDPEDAPESITRAVASLPPEQMFELMKQMKLCVQNSHQEARNMLLQNPQLAYALLQAQVVMRIMDPEIALKILHRKIHVTPLIPGKSQSVSVSGPGPGPGPGLCPGPNVLLNQQNPPAPQPQHLARRPVKDIPPLMQTPIQGGIPAPGPIPAAVPGAGPGSLTPGGAMQPQLGMPGVGPVPLERGQVQMSDPRAPIPRGPVTPGGLPPRGLLGDAPNDPRGGTLLSVTGEVEPRGYLGPPHQGPPMHHASGHDTRGPSSHEMRGGPLGDPRLLIGEPRGPMIDQRGLPMDGRGGRDSRAMETRAMETEVLETRVMERRGMETCAMETRGMEARGMDARGLEMRGPVPSSRGPMTGGIQGPGPINIGAGGPPQGPRQVPGISGVGNPGAGMQGTGIQGTGMQGAGIQGGGMQGAGIQGVSIQGGGIQGGGIQGASKQGGSQPSSFSPGQSQVTPQDQEKAALIMQVLQLTADQIAMLPPEQRQSILILKEQIQKSTGAS

SEQ ID NO: 30348 - protein, 19 aa, Homo sapiens
VLTLSTSSQKKEGRITPWG

SEQ ID NO: 30349 - protein, 16 aa, Homo sapiens
VPGSLAMKILWCLELI

SEQ ID NO: 30350 - protein, 28 aa, Homo sapiens
LSWLKGLKCFLPWVLWLPSPSVLALWPN

SEQ ID NO: 30351 - protein, 9 aa, Homo sapiens
VILLPRPPE

SEQ ID NO: 30352 - protein, 55 aa, Homo sapiens
RLPQSRGLGAGTLLWTTFSLSAGRATQSPFACGWTTRRTTSTRAIAVQGRHQCSE

SEQ ID NO: 30353 - protein, 26 aa, Homo sapiens
MMILMRLRLLSTTRLLWTSSFLRNQG

SEQ ID NO: 30354 - protein, 23 aa, Homo sapiens
LGAAAPAAAAAAARARTRTRGRL

SEQ ID NO: 30355 - protein, 122 aa, Homo sapiens
TAGAERAAPGPRGTATGGRRAGPGAGRLRAAALDPTRRERPRDAEQEEEVQRAVPAGADQEDHADGRRDWEGGGGGACHHLPGARALPRVAVEEGLPGDPVAEREDHDHIPPEAVHRAGAAV

SEQ ID NO: 30356 - protein, 16 aa, Homo sapiens
LVLLLVVYTLFSWLYL

SEQ ID NO: 30357 - protein, 13 aa, Homo sapiens
RKEKEGSAPVVQK

SEQ ID NO: 30358 - protein, 25 aa, Homo sapiens
MARKCSVPLVMAWLTWTTSRAPLPH

SEQ ID NO: 30359 - protein, 496 aa, Homo sapiens
IATMASGILVNVKEEVTCPICLELLTQPLSLDCGHSFCQACLTANHKKSMLDKGESSCPVCRISYQPENIRPNRHVANIVEKLREVKLSPEGQKVDHCARHGEKLLLFCQEDGKVICWLCERSQEHRGHHTFLTEEVAREYQVKLQAALEMLRQKQQEAEELEADIREEKASWKTQIQYDKTNVLADFEQLRDILDWEESNELQNLEKEEEDILKSLTNSETEMVQQTQSLRELISDLEHRLQGSVMELLQGVDGVIKRTENVTLKKPETFPKNQRRVFRAPDLKGMLEVFRELTDVRRYWVDVTVAPNNISCAVISEDKRQVSSPKPQIIYGARGTRYQTFVNFNYCTGILGSQSITSGKHYWEVDVSKKTAWILGVCAGFQPDAMCNIEKNENYQPKYGYWVIGLEEGVKCSAFQDSSFHTPSVPFIVPLSVIICPDRVGVFLDYEACTVSFFNITNHGFLIYKFSHCSFSQPVFPYLNPRKCGVPMTLCSPSS

SEQ ID NO: 30360 - protein, 51 aa, Homo sapiens
VVVPGVRGAPLTPCPTEAAVPWGLETQFPVNDNKSLLPLPQTSTQRNRAWP

SEQ ID NO: 30361 - protein, 7 aa, Homo sapiens
ILLFHCK

SEQ ID NO: 30362 - protein, 19 aa, Homo sapiens
LFETKHPVAAATHLLLWVC

SEQ ID NO: 30363 - protein, 13 aa, Homo sapiens
MQNEGRLLSLLLL

SEQ ID NO: 30364 - protein, 475 aa, Homo sapiens
RRRPGALFASLGVLLGPRPPPGIPRTRACSMGGVGEPGPREGPAQPGAPLPTFCWEQIRAHDQPGDKWLVIERRVYDISRWAQRHPGGSRLIGHHGAEDATDAFRAFHQDLNFVRKFLQPLLIGELAPEEPSQDGPLNAQLVEDFRALHQAAEDMKLFDASPTFFAFLLGHILAMEVLAWLLIYLLGPGWVPSALAAFILAISQAQSWCLQHDLGHASIFKKSWWNHVAQKFVMGQLKGFSAHWWNFRHFQHHAKPNIFHKDPDVTVAPVFLLGESSVEYGKKKRRYLPYNQQHLYFFLIGPPLLTLVNFEVENLAYMLVCMQWADLLWAASFYARFFLSYLPFYGVPGVLLFFVAVRVLESHWFVWITQMNHIPKEIGHEKHRDWVSSQLAATCNVEPSLFTNWFSGHLNFQIEHHLFPRMPRHNYSRVAPLVKSLCAKHGLSYEVKPFLTALVDIVRSLKKSGDIWLDAYLHQ

SEQ ID NO: 30365 - protein, 52 aa, Homo sapiens
MISTCLGMRCWFTLYQTLEPMVSRSICLAKGRCGMTFKATRSIMVPRPCTCL

SEQ ID NO: 30366 - protein, 87 aa, Homo sapiens
LRQPSLQTLGGRRHLAHGPRGGSVLLGRQGLKPRRDTHLVRRLLQGALPHPARLLRAGLAAAHELPVLLRRGLGDPQHPIAGTYLEP

SEQ ID NO: 30367 - protein, 8 aa, Homo sapiens
TSGKAKGQ

SEQ ID NO: 30368 - protein, 10 aa, Homo sapiens
IRATAPRDVR

SEQ ID NO: 30369 - protein, 60 aa, Homo sapiens
REGARFGHRRRLPGLSMSPRRTLPRPLSLCLSLCLCLCLAAALGSAQSALAPVLCFSFCW

SEQ ID NO: 30370 - protein, 32 aa, Homo sapiens
IFSSEDTKFYLKTKFNMATGLMGHEGVATVIW

SEQ ID NO: 30371 - protein, 10 aa, Homo sapiens
KTVGKISIGR

SEQ ID NO: 30372 - protein, 9 aa, Homo sapiens
IWNKLFFLL

SEQ ID NO: 30373 - protein, 7 aa, Homo sapiens
LDPPMGL

SEQ ID NO: 30374 - protein, 10 aa, Homo sapiens
IILNSMEKLK

SEQ ID NO: 30375 - protein, 26 aa, Homo sapiens
LQNHETKVAMAVPAAAVAMAVAEDFN

SEQ ID NO: 30376 - protein, 29 aa, Homo sapiens
LARFLLRVMLFLDYSLIWSYWAPGHQGCF

SEQ ID NO: 30377 - protein, 27 aa, Homo sapiens
VRIRTQGWGVEAAPAIEGDLRLTGRTP

SEQ ID NO: 30378 - protein, 32 aa, Homo sapiens
IKQFWILLWFCLKQQRFGQGIFYQTLKHMEIE

SEQ ID NO: 30379 - protein, 20 aa, Homo sapiens
RMGSDFPWLLHAGTLQVWLL

SEQ ID NO: 30380 - protein, 25 aa, Homo sapiens
LAWRALRTSGTLLRVERLLLEGTTS

SEQ ID NO: 30381 - protein, 62 aa, Homo sapiens
KGPAVKGAGLYRIYNSSSSSVYGALTLRGVISCISSFRLYKVAVWRRERLGLSTLPRLLSNP

SEQ ID NO: 30382 - protein, 24 aa, Homo sapiens
VTLSAGACRCKCEAGEQSVSGGWW

SEQ ID NO: 30383 - protein, 12 aa, Homo sapiens
VTLSAGACRYIY

SEQ ID NO: 30384 - protein, 38 aa, Homo sapiens
KERASLCSCVSFSSLALIPCLASSKWPGPWAVKKCKVQ

SEQ ID NO: 30385 - protein, 13 aa, Homo sapiens
MVTCVMLRILLAQ

SEQ ID NO: 30386 - protein, 68 aa, Homo sapiens
TVAPVWEAGGVAASGRRCPLLGSSPPSPFCCYRERGGHGTLPGAARGRTRRAAFTQRSVPPLGFGWIK

SEQ ID NO: 30387 - protein, 50 aa, Homo sapiens
RQRTAGPGATRHFQVAPPEAQGEEKERDKRALRGESPHPPRPRTRPGSYS

SEQ ID NO: 30388 - protein, 12 aa, Homo sapiens
RNMNITGRYHWL

SEQ ID NO: 30389 - protein, 40 aa, Homo sapiens
IVAVALVVVVRVEVGVGAGDIIEIESTEGAWIGREGILQD

SEQ ID NO: 30390 - protein, 45 aa, Homo sapiens
KLGCGVIPVCLLPAFLGFFRRRGASLRNSRPLRATALAVSFASSS

SEQ ID NO: 30391 - protein, 304 aa, Homo sapiens
KMCHGRIAPKSTSVFAVASVGHGVFLPLVILCTLLGDGLASVCPLPPEPENGGYICHPRPCRDPLTAGSVIEYLCAEGYMLKGDYKYLTCKNGEWKPAMEISCRLNEDKDTHTSLGVPTLSIVASTASSVALILLLVVLFVLLQPKLKSFHHSRRDQGVSGDQVSIMVDGVQVALPSYEEAVYGSSGHCVPPADPRVQIVLSEGSGPSGRSVPREQQLPDQGACSSAGGEDEAPGQSGLCEAWGSRASETVMVHQATTSSWVAGSGNRQLAHKETADSENSDIQSLLSLTSEEYTDDIPLLKEA

SEQ ID NO: 30392 - protein, 11 aa, Homo sapiens
KWSVWGMILLG

SEQ ID NO: 30393 - protein, 29 aa, Homo sapiens
LENEKDLAKFHRIFCQARDRESRVKPSGC

SEQ ID NO: 30394 - protein, 16 aa, Homo sapiens
IPEATVFLLLSVWVSN

SEQ ID NO: 30395 - protein, 35 aa, Homo sapiens
RWAFRLERTLPRLRKSLVLGGGGAAVAVMATGLGG

SEQ ID NO: 30396 - protein, 9 aa, Homo sapiens
VIWVTLRVL

SEQ ID NO: 30397 - protein, 506 aa, Homo sapiens
RWGAAGAGPHGLHLRAHGPRPSVRTGLPSVGRQAAGAAMGRGWGFLFGLLGAVWLLSSGHGEEQPPETAAQRCFCQVSGYLDDCTCDVETIDRFNNYRLFPRLQKLLESDYFRYYKVNLKRPCPFWNDISQCGRRDCAVKPCQSDEVPDGIKSASYKYSEEANNLIEECEQAERLGAVDESLSEETQKAVLQWTKHDDSSDNFCEADDIQSPEAEYVDLLLNPERYTGYKGPDAWKIWNVIYEENCFKPQTIKRPLNPLASGQGTSEENTFYSWLEGLCVEKRAFYRLISGLHASINVHLSARYLLQETWLEKKWGHNITEFQQRFDGILTEGEGPRRLKNLYFLYLIELRALSKVLPFFERPDFQLFTGNKIQDEENKMLLLEILHEIKSFPLHFDENSFFAGDKKEAHKLKEDFRLHFRNISRIMDCVGCFKCRLWGKLQTQGLGTALKILFSEKLIANMPESGPSYEFHLTRQEIVSLFNAFGRISTSVKELENFRNLLQNIH

SEQ ID NO: 30398 - protein, 8 aa, Homo sapiens
MSLSIRQQ

SEQ ID NO: 30399 - protein, 14 aa, Homo sapiens
LRLSCAASGFTFSR

SEQ ID NO: 30400 - protein, 40 aa, Homo sapiens
VATGWEWLRGYLLLAACQREEGGGKKKGGGVEGGGPGPGE

SEQ ID NO: 30401 - protein, 20 aa, Homo sapiens
MRSLFGARPGRRLADAEPRG

SEQ ID NO: 30402 - protein, 55 aa, Homo sapiens
MDPGRAAAFVIPRPGPRPLTSSAGAPPAVGSGCDRAEVLSGTLGSQPGDSEPRGR

SEQ ID NO: 30403 - protein, 22 aa, Homo sapiens
LIKEFWLLIRMPVLWLVVCHHQ

SEQ ID NO: 30404 - protein, 27 aa, Homo sapiens
MGHSRARAISSYNISILSWSCRCLIGL

SEQ ID NO: 30405 - protein, 14 aa, Homo sapiens
KVLGPSEEAKAALG

SEQ ID NO: 30406 - protein, 10 aa, Homo sapiens
MDMIFFIILL

SEQ ID NO: 30407 - protein, 7 aa, Homo sapiens
MFWWVLC

SEQ ID NO: 30408 - protein, 47 aa, Homo sapiens
LFCHSIKLFSILLSLHLSAIPHLPGRRTRTQDPPGGLTFRRGASWTA

SEQ ID NO: 30409 - protein, 111 aa, Homo sapiens
TSKGRKAGKGGRKRTRGREVPVLEELGALPAPEVEREGGASPFLLPGEVPASRGGSGPSPFSFSLRIDVLLLTREEAAAAAAAAEDGVAESVNSAPLLGGGDGRSVWESFK

SEQ ID NO: 30410 - protein, 47 aa, Homo sapiens
TARGAATRSDIAGVCGWLLLSGPCGVGLDLDSRLLGASAMRRRNSWI

SEQ ID NO: 30411 - protein, 18 aa, Homo sapiens
LPAVPRRLPRADADTDAG

SEQ ID NO: 30412 - protein, 34 aa, Homo sapiens
LGVSAIKDDPGLLLGRGQFCLPDGGRLGPGRERA

SEQ ID NO: 30413 - protein, 16 aa, Homo sapiens
LGVSAIKDDPGRTSFC

SEQ ID NO: 30414 - protein, 12 aa, Homo sapiens
LPLILVFVMWKE

SEQ ID NO: 30415 - protein, 17 aa, Homo sapiens
LSFLGLSCFQFVSYWLR

SEQ ID NO: 30416 - protein, 75 aa, Homo sapiens
VVRFGGFGAHHLRPNPNPNVSPGRITSTVTSDKCTQQNGPSNVRNVRQLSPRRIGCGRTQYDTRRKCHVTCVARC

SEQ ID NO: 30417 - protein, 20 aa, Homo sapiens
LWLGLPWGREVVRDPLKNLM

SEQ ID NO: 30418 - protein, 40 aa, Homo sapiens
KAAAEVVAWMIFSLTFLVGDCSASWAIRVEVEMAEEEERT

SEQ ID NO: 30419 - protein, 21 aa, Homo sapiens
LLVAAAGLCVGGGNPRTSGRV

SEQ ID NO: 30420 - protein, 23 aa, Homo sapiens
MDMMDPRMYSREPGGPTAVDRKG

SEQ ID NO: 30421 - protein, 23 aa, Homo sapiens
KEVAGSLCVLQIVTLMVAPVFHD

SEQ ID NO: 30422 - protein, 12 aa, Homo sapiens
VRSFFLFLRMLC

SEQ ID NO: 30423 - protein, 8 aa, Homo sapiens
ILLPRPPE

SEQ ID NO: 30424 - protein, 86 aa, Homo sapiens
IRREAGIEGDSAAKGARPGQAGGRLPGAGTAATRPLGRQEDRPTDLRKGSESAAVKLAGAGGTKPISATERSGRRVPVSSGGAGSR

SEQ ID NO: 30425 - protein, 9 aa, Homo sapiens
LVLLVQRSQ

SEQ ID NO: 30426 - protein, 48 aa, Homo sapiens
RILIWGLGVRFLTIVTARRSRMWRRSCEMEASRTPGQARARKLWHGTC

SEQ ID NO: 30427 - protein, 15 aa, Homo sapiens
VDPGDGRRELDAGAE

SEQ ID NO: 30428 - protein, 38 aa, Homo sapiens
RLVAFWCLRLLWPLLSLWRQMMLEIDFGFSWSWNLCNV

SEQ ID NO: 30429 - protein, 23 aa, Homo sapiens
MILLVSLHLWTVSIKTVEIINLR

SEQ ID NO: 30430 - protein, 12 aa, Homo sapiens
INIYRMWTLSLM

SEQ ID NO: 30431 - protein, 20 aa, Homo sapiens
ILNRAAEPSGVPTQAKLEHG

SEQ ID NO: 30432 - protein, 15 aa, Homo sapiens
VQTTTFFRLWMCVMT

SEQ ID NO: 30433 - protein, 29 aa, Homo sapiens
MATTLGTSGTLRPWRPRRRLLGPQPRPLW

SEQ ID NO: 30434 - protein, 75 aa, Homo sapiens
LVVRWAVLVFRSSTAALPRAAEAARRSEKWPKTSALGERKWPEPSRLLVSPPVGKPPANSWPRKPPGKALPLPAG

SEQ ID NO: 30435 - protein, 19 aa, Homo sapiens
MKGWKNYKIRHCCLSVPRM

SEQ ID NO: 30436 - protein, 36 aa, Homo sapiens
LRGTRSLLRSFCLSIACAVSWTAHGSSAGDAGISGS

SEQ ID NO: 30437 - protein, 35 aa, Homo sapiens
KVPGKEKSHPGGGGERPGLAGQGEPDHPAGARDGR

SEQ ID NO: 30438 - protein, 272 aa, Homo sapiens
IGIMAAALFVLLGFALLGTHGASGAAGTVFTTVEDLGSKILLTCSLNDSATEVTGHRWLKGGVVLKEDALPGQKTEFKVDSDDQWGEYSCVFLPEPMGTANIQLHGPPRVKAVKSSEHINEGETAMLVCKSESVPPVTDWAWYKITDSEDKALMNGSESRFFVSSSQGRSELHIENLNMEADPGQYRCNGTSSKGSDQAIITLRVRSHLAALWPFLGIVAEVLVLVTIIFIYEKRRKPEDVLDDDDAGSAPLKSSGQHQNDKGKNVRQRNSS

SEQ ID NO: 30439 - protein, 88 aa, Homo sapiens
IGPHRVARGPPAGPSPLPGPPWPGPLPSCRRDRRRRRCCGRCCCCCSWKPEPRMCEFKCYPRCEASSGAPWSCRATCCHLFLDCTSPW

SEQ ID NO: 30440 - protein, 46 aa, Homo sapiens
RLAPRHDTMHLLGPWLLLLVNGFLSTLKPSTPGRGPASGSPAPTEP

SEQ ID NO: 30441 - protein, 759 aa, Homo sapiens
RLAPRHDTMHLLGPWLLLLVLEYLAFSDSSKWVFEHPETLYAWEGACVWIPCTYRALDGDLESFILFHNPEYNKNTSKFDGTRLYESTKDGKVPSEQKRVQFLGDKNKNCTLSIHPVHLNDSGQLGLRMESKTEKWMERIHLNVSERPFPPHIQLPPEIQESQEVTLTCLLNFSCYGYPIQLQWLLEGVPMRQAAVTSTSLTIKSVFTRSELKFSPQWSHHGKIVTCQLQDADGKFLSNDTVQLNVKHTPKLEIKVTPSDAIVREGDSVTMTCEVSSSNPEYTTVSWLKDGTSLKKQNTFTLNLREVTKDQSGKYCCQVSNDVGPGRSEEVFLQVQYAPEPSTVQILHSPAVEGSQVEFLCMSLANPLPTNYTWYHNGKEMQGRTEEKVHIPKILPWHAGTYSCVAENILGTGQRGPGAELDVQYPPKKVTTVIQNPMPIREGDTVTLSCNYNSSNPSVTRYEWKPHGAWEEPSLGVLKIQNVGWDNTTIACAACNSWCSWASPVALNVQYAPRDVRVRKIKPLSEIHSGNSVSLQCDFSSSHPKEVQFFWEKNGRLLGKESQLNFDSISPEDAGSYSCWVNNSIGQTASKAWTLEVLYAPRRLRVSMSPGDQVMEGKSATLTCESDANPPVSHYTWFDWNNQSLPYHSQKLRLEPVKVQHSGAYWCQGTNSVGKGRSPLSTLTVYYSPETIGRRVAVGLGSCLAILILAICGLKLQRRWKRTQSQQGLQENSSGQSFFVRNKKRCRVLRDAETSPGLR

SEQ ID NO: 30442 - protein, 322 aa, Homo sapiens
ITGRKMKVLWAALLVTFLAGCQAKVEQAVETEPEPELRQQTEWQSGQRWELALGRFWDYLRWVQTLSEQVQEELLSSQVTQELRALMDETMKELKAYKSELEEQLTPVAEETRARLSKELQAAQARLGADMEDVCGRLVQYRGEVQAMLGQSTEELRVRLASHLRKLRKRLLRDADDLQKRLAVYQAGAREGAERGLSAIRERLGPLVEQGRVRAATVGSLAGQPLQERAQAWGERLRARMEEMGSRTRDRLDEVKEQVAEVRAKLEEQAQQIRLQAEAFQARLKSWFEPLVEDMQRQWAGLVEKVQAAVGTSAAPVPSDNH

SEQ ID NO: 30443 - protein, 143 aa, Homo sapiens
TDSSLIPGGARGRDPEISGKSRRPGRLGLSEVADCLDRAGGEDRSKSVEEAKDWDGLNCWKNPNSQRGLGAVAHEDTRKPPNVEEIISEKLRKPGKSAKPYVRVFSEAAEAAACFAFVQYPEIAEALRSQARGEGQARGRAGG

SEQ ID NO: 30444 - protein, 37 aa, Homo sapiens
LDTGPGLLRSLGRVTCQAQHQWHNSSRGIRHGARRVL

SEQ ID NO: 30445 - protein, 11 aa, Homo sapiens
VFVFVCVCSFY

SEQ ID NO: 30446 - protein, 65 aa, Homo sapiens
VGVALAAEGALVTVVVVEALEVVDEEEVEAAAAVEEEEEVVEASILVATGVVVGEEKEETSRGRM

SEQ ID NO: 30447 - protein, 41 aa, Homo sapiens
VGVALAAEGALVTVVVVEASILVATGVVVGEEKEETSRGRM

SEQ ID NO: 30448 - protein, 630 aa, Homo sapiens
RKESPRSSLRPQSLRRAAAAPATAGRRGRRSGRRDELVGRRGKKLLRLFRCRWEPEARGPLGATLPREEAGLGDPRPPPFAAGDACSLPAPYTASLRRPHSGPALGSRRPGLPQRLFPRPRAHPLHAAFIPGLSPEPPRILDPFSSRRRISLRPATDPLFKTTHLLVPDRAHLGYFRGILRHPRSKPPLHHCALLPEDLSFPSRPSYLLPGDPQPLQGRGLPTTPALFALSAVPGGAASPMPPSGLRLLPLLLPLLWLLVLTPGRPAAGLSTCKTIDMELVKRKRIEAIRGQILSKLRLASPPSQGEVPPGPLPEAVLALYNSTRDRVAGESAEPEPEPEADYYAKEVTRVLMVETHNEIYDKFKQSTHSIYMFFNTSELREAVPEPVLLSRAELRLLRLKLKVEQHVELYQKYSNNSWRYLSNRLLAPSDSPEWLSFDVTGVVRQWLSRGGEIEGFRLSAHCSCDSRDNTLQVDINGFTTGRRGDLATIHGMNRPFLLLMATPLERAQHLQSSRHRRALDTNYCFSSTEKNCCVRQLYIDFRKDLGWKWIHEPKGYHANFCLGPCPYIWSLDTQYSKVLALYNQHNPGASAAPCCVPQALEPLPIVYYVGRKPKVEQLSNMIVRSCKCS

SEQ ID NO: 30449 - protein, 198 aa, Homo sapiens
VFGSPAITAPQMGPGRCLLTALLLLALAPPPEASQYCGRLEYWNPDNKCCSSCLQRFGPPPCPGALETGDTWKEASLLPLLSRELSSLASQPLSRLLDELEVLEELIVLLDPEPGPGGGMAHGTTRHLAARYGLPAAWSTFAYSLRPSRSPLRALIEMVVAREPSASLGQLGTHLAQLGRADALRVLSKLGSSGVCWA

SEQ ID NO: 30450 - protein, 80 aa, Homo sapiens
LPSESEALGQAGAGLREPRRAARWARRGAERRGRPGGWRQQRRRPQLRVRGAEATRAAAGGRVAGVPGPAAAAAAAAAAG

SEQ ID NO: 30451 - protein, 149 aa, Homo sapiens
RPVDRTIMSDSLVVCEVDPELTEKLRKFRFRKETDNAAIIMKVDKDRQMVVLEEEFQNISPEELKMELPERQPRFVVYSYKYVHDDGRVSYPLCFIFSSPVGCKPEQQMMYAGSKNRLVQTAELTKVFEIRTTDDLTEAWLQEKLSFFR

SEQ ID NO: 30452 - protein, 77 aa, Homo sapiens
ILGATRFFRFYLGESTAIRHHGELHGRPDPRHHGQEGQHPQHVCHRPRGPWQVHADRLPGVQGGHHRLGPGRGDTLH

SEQ ID NO: 30453 - protein, 13 aa, Homo sapiens
MTLLWIMMLMKRT

SEQ ID NO: 30454 - protein, 24 aa, Homo sapiens
VVLPPGLTSLWFVCLCSASSGAAC

SEQ ID NO: 30455 - protein, 63 aa, Homo sapiens
LSRAPGPKFGGGSGRQSGLPGRLPGPSRVLAPDPWAAGGNGSRGRANSEAGTPRRELEMKQQS

SEQ ID NO: 30456 - protein, 333 aa, Homo sapiens
RPGRDPEREPARDLGLGAGSGAGPRSRRGAMARRGPGWRPLLLLVLLAGAAQGGLYFRRGQTCYRPLRGDGLAPLGRSTYPRPHEYLSPADLPKSWDWRNVDGVNYASITRNQHIPQYCGSCWAHASTSAMADRINIKRKGAWPSTLLSVQNVIDCGNAGSCEGGNDLSVWDYAHQHGIPDETCNNYQAKDQECDKFNQCGTCNEFKECHAIRNYTLWRVGDYGSLSGREKMMAEIYANGPISCGIMATERLANYTGGIYAEYQDTTYINHVVSVAGWGISDGTEYWIVRNSWGEPWGERGWLRIVTSTYKDGKGARYNLAIEEHCTFGDPIV

SEQ ID NO: 30457 - protein, 21 aa, Homo sapiens
LVLILAPPIVLLGCFFLAQEK

SEQ ID NO: 30458 - protein, 32 aa, Homo sapiens
TPEGSQPLLLLLGLRWTFLFLLFFFVFPLSSF

SEQ ID NO: 30459 - protein, 18 aa, Homo sapiens
LPTTSGVLSLRLNIYSCF

SEQ ID NO: 30460 - protein, 14 aa, Homo sapiens
MAFLSWLTTFTPWA

SEQ ID NO: 30461 - protein, 35 aa, Homo sapiens
ILVFVWSGCTLPIAQRARGPVAWGKEDEVLPGSQQ

SEQ ID NO: 30462 - protein, 1095 aa, Homo sapiens
ILGGPGGGEEEKEEGGGRAWLRLLEELAAARPGEPALMSSSPLSKKRRVSGPDPKPGSNCSPAQSVLSEVPSVPTNGMAKNGSEADIDEGLYSRQLYVLGHEAMKRLQTSSVLVSGLRGLGVEIAKNIILGGVKAVTLHDQGTAQWADLSSQFYLREEDIGKNRAEVSQPRLAELNSYVPVTAYTGPLVEDFLSGFQVVVLTNTPLEDQLRVGEFCHNRGIKLVVADTRGLFGQLFCDFGEEMILTDSNGEQPLSAMVSMVTKDNPGVVTCLDEARHGFESGDFVSFSEVQGMVELNGNQPMEIKVLGPYTFSICDTSNFSDYIRGGIVSQVKVPKKISFKSLVASLAEPDFVVTDFAKFSRPAQLHIGFQALHQFCAQHGRPPRPRNEEDAAELVALAQAVNARALPAVQQNNLDEDLIRKLAYVAAGDLAPINAFIGGLAAQEVMKACSGKFMPIMQWLYFDALECLPEDKEVLTEDKCLQRQNRYDGQVAVFGSDLQEKLGKQKYFLVGAGAIGCELLKNFAMIGLGCGEGGEIIVTDMDTIEKSNLNRQFLFRPWDVTKLKSDTAAAAVRQMNPHIRVTSHQNRVGPDTERIYDDDFFQNLDGVANALDNVDARMYMDRRCVYYRKPLLESGTLGTKGNVQVVIPFLTESYSSSQDPPEKSIPICTLKNFPNAIEHTLQWARDEFEGLFKQPAENVNQYLTDPKFVERTLRLAGTQPLEVLEAVQRSLVLQRPQTWADCVTWACHHWHTQYSNNIRQLLHNFPPDQLTSSGAPFWSGPKRCPHPLTFDVNNPLHLDYVMAAANLFAQTYGLTGSQDRAAVATFLQSVQVPEFTPKSGVKIHVSDQELQSANASVDDSRLEELKATLPSPDKLPGFKMYPIDFEKDDDSNFHMDFIVAASNLRAENYDIPSADRHKSKLIAGKIIPAIATTTAAVVGLVCLELYKVVQGHRQLDSYKNGFLNLALPFFGFSEPLAAPRHQYYNQEWTLWDRFEVQGLQPNGEEMTLKQFLDYFKTEHKLEITMLSQGVSMLYSFFMPAAKLKERLDQPMTEIVSRVSKRKLGRHVRALVLELCCNDESGEDVEVPYVRYTIR

SEQ ID NO: 30463 - protein, 55 aa, Homo sapiens
KSSEMPSGRATRFCGSAARSFCISKPARGRRRSSSCASSRRPGNWWRDSAWRSSI

SEQ ID NO: 30464 - protein, 13 aa, Homo sapiens
LDGLLQLCVLCLL

SEQ ID NO: 30465 - protein, 13 aa, Homo sapiens
LYSLTLCSFEKQA

SEQ ID NO: 30466 - protein, 44 aa, Homo sapiens
ILLALVAGEAAGIMENISDDVIVGRCLAILKGIFGSSAVPQVSR

SEQ ID NO: 30467 - protein, 27 aa, Homo sapiens
KTQYSVAVMWSFVLMPALKMQKKSLLL

SEQ ID NO: 30468 - protein, 9 aa, Homo sapiens
MILNLLIFL

SEQ ID NO: 30469 - protein, 27 aa, Homo sapiens
LSRVDGTAASGCLEAVAVLFSWLKSGE

SEQ ID NO: 30470 - protein, 11 aa, Homo sapiens
MKTSLGFIVAF

SEQ ID NO: 30471 - protein, 13 aa, Homo sapiens
MRDCFLFPFLGLW

SEQ ID NO: 30472 - protein, 28 aa, Homo sapiens
LSILLFMILLTATSASQVQAILLPQPPK

SEQ ID NO: 30473 - protein, 13 aa, Homo sapiens
ICNLPNKLPNLLC

SEQ ID NO: 30474 - protein, 28 aa, Homo sapiens
LLLKEILWGKCLLLLLEMINKRRSIWGE

SEQ ID NO: 30475 - protein, 59 aa, Homo sapiens
IDTRFSFCAVATLALLGKLDAINVEKAIEFVLSCMNFDGGFGCRPGSESHAGQVIYEYR

SEQ ID NO: 30476 - protein, 16 aa, Homo sapiens
MIYSLLQILSMQLLVL

SEQ ID NO: 30477 - protein, 12 aa, Homo sapiens
LLPTSFIRQSMM

SEQ ID NO: 30478 - protein, 14 aa, Homo sapiens
LIVALILCPLSCMN

SEQ ID NO: 30479 - protein, 19 aa, Homo sapiens
MKFLRHINPVKLLLVLHMF

SEQ ID NO: 30480 - protein, 14 aa, Homo sapiens
MDPMNIDTGKRKNV

SEQ ID NO: 30481 - protein, 710 aa, Homo sapiens
KMATAGGGSGADPGSRGLLRLLSFCVLLAGLCRGNSVERKIYIPLNKTAPCVRLLNATHQIGCQSSISGDTGVIHVVEKEEDLQWVLTDGPNPPYMVLLESKHFTRDLMEKLKGRTSRIAGLAVSLTKPSPASGFSPSVQCPNDGFGVYSNSYGPEFAHCREIQWNSLGNGLAYEDFSFPIFLLEDENETKVIKQCYQDHNLSQNGSAPTFPLCAMQLFSHMHAVISTATCMRRSSIQSTFSINPEIVCDPLSDYNVWSMLKPINTTGTLKPDDRVVVAATRLDSRSFFWNVAPGAESAVASFVTQLAAAEALQKAPDVTTLPRNVMFVFFQGETFDYIGSSRMVYDMEKGKFPVQLENVDSFVELGQVALRTSLELWMHTDPVSQKNESVRNQVEDLLATLEKSGAGVPAVILRRPNQSQPLPPSSLQRFLRARNISGVVLADHSGAFHNKYYQSIYDTAENINVSYPEWLSPEEDLNFVTDTAKALADVATVLGRALYELAGGTNFSDTVQADPQTVTRLLYGFLIKANNSWFQSILRQDLRSYLGDGPLQHYIAVSSPTNTTYVVQYALANLTGTVVNLTREQCQDPSKVPSENKDLYEYSWVQGPLHSNETDRLPRCVRSTARLARALSPAFELSQWSSTEYSTWTESRWKDIRARIFLIASKELELITLTVGFGILIFSLIVTYCINAKADVLFIAPREPGAVSY

SEQ ID NO: 30482 - protein, 14 aa, Homo sapiens
MVKFKLITTLVTVM

SEQ ID NO: 30483 - protein, 13 aa, Homo sapiens
RFFSMNIMASIYL

SEQ ID NO: 30484 - protein, 11 aa, Homo sapiens
IKWLFFFGIGQ

SEQ ID NO: 30485 - protein, 11 aa, Homo sapiens
LLLPATRDKGV

SEQ ID NO: 30486 - protein, 8 aa, Homo sapiens
MSVPVCRQ

SEQ ID NO: 30487 - protein, 34 aa, Homo sapiens
LISLFKTILISYISEDLKIWTTVEEIPSKAHLYL

SEQ ID NO: 30488 - protein, 605 aa, Homo sapiens
RMRRCNSGSGPPPSLLLLLLWLLAVPGANAAPRSALYSPSDPLTLLQADTVRGAVLGSRSAWAVEFFASWCGHCIAFAPTWKALAEDVKAWRPALYLAALDCAEETNSAVCRDFNIPGFPTVRFFKAFTKNGSGAVFPVAGADVQTLRERLIDALESHHDTWPPACPPLEPAKLEEIDGFFARNNEEYLALIFEKGGSYLGREVALDLSQHKGVAVRRVLNTEANVVRKFGVTDFPSCYLLFRNGSVSRVPVLMESRSFYTAYLQRLSGLTREAAQTTVAPTTANKIAPTVWKLADRSKIYMADLESALHYILRIEVGRFPVLEGQRLVALKKFVAVLAKYFPGRPLVQNFLHSVNEWLKRQKRNKIPYSFFKTALDDRKEGAVLAKKVNWIGCQGSEPHFRGFPCSLWVLFHFLTVQAARQNVDHSQEAAKAKEVLPAIRGYVHYFFGCRDCASHFEQMAAASMHRVGSPNAAVLWLWSSHNRVNARLAGAPSEDPQFPKVQWPPRELCSACHNERLDVPVWDVEATLNFLKAHFSPSNIILDFPAAGSAARRDVQNVAAAPELAMGALELESRNSTLDPGKPEMMKSPTNTTPHVPAEGPELI

SEQ ID NO: 30489 - protein, 14 aa, Homo sapiens
MQMIILQNMKKNLN

SEQ ID NO: 30490 - protein, 27 aa, Homo sapiens
MNLPKKASYDIFKISSGLIHCKDRFQV

SEQ ID NO: 30491 - protein, 12 aa, Homo sapiens
RFVVSLGILHLM

SEQ ID NO: 30492 - protein, 32 aa, Homo sapiens
MAWIMLVILNWPRIRPRNLKRRSWNCISHTGP

SEQ ID NO: 30493 - protein, 11 aa, Homo sapiens
ILLSSLIIMFE

SEQ ID NO: 30494 - protein, 12 aa, Homo sapiens
LMPTLMPLKQPL

SEQ ID NO: 30495 - protein, 17 aa, Homo sapiens
MRLFPYLIIHVLLLIRH

SEQ ID NO: 30496 - protein, 11 aa, Homo sapiens
RSLLKGMMKNN

SEQ ID NO: 30497 - protein, 20 aa, Homo sapiens
IKTVMLTFFLMIITVLNSLR

SEQ ID NO: 30498 - protein, 13 aa, Homo sapiens
MKNQRNLTVLWIF

SEQ ID NO: 30499 - protein, 13 aa, Homo sapiens
IFLLMTPVKLSIK

SEQ ID NO: 30500 - protein, 14 aa, Homo sapiens
MQQERFDFLAFLAL

SEQ ID NO: 30501 - protein, 10 aa, Homo sapiens
MKIIKLLIIC

SEQ ID NO: 30502 - protein, 12 aa, Homo sapiens
VIPQGSRTRNTI

SEQ ID NO: 30503 - protein, 75 aa, Homo sapiens
LVLLAFRALVLLDLLGLLDLLASLVRLESEAPRGTLDQMDHRGPQDPLGNLVAREPSRVWKAVRISCVQPTVHPE

SEQ ID NO: 30504 - protein, 18 aa, Homo sapiens
IFTFTIFITLILPLKFKV

SEQ ID NO: 30505 - protein, 114 aa, Homo sapiens
KARELPTILSAVSLLLKFEMLYLIGLGLGDAKDITVKGLEVVRRCSRVYLEAYTSVLTVGKEALEEFYGRKLVVADREEVEQEADNILKDADISDVAFLVVGDPFGHLETRKLL

SEQ ID NO: 30506 - protein, 304 aa, Homo sapiens
KARELPTILSAVSLLLKFEMLYLIGLGLGDAKDITVKGLEVVRRCSRVYLEAYTSVLTVGKEALEEFYGRKLVVADREEVEQEADNILKDADISDVAFLVVGDPFGATTHSDLVLRATKLGIPYRVIHNASIMNAVGCCGLQLYKFGETVSIVFWTDTWRPESFFDKVKKNRQNGMHTLCLLDIKVKEQSLENLIKGRKIYEPPRYMSVNQAAQQLLEIVQNQRIRGEEPAVTEETLCVGLARVGADDQKIAAGTLRQMCTVDLGEPLHSLIITGGSIHPMEMEMLSLFSIPENSSESQSINGL

SEQ ID NO: 30507 - protein, 20 aa, Homo sapiens
VLNKSLAALLHVCVSLPILC

SEQ ID NO: 30508 - protein, 19 aa, Homo sapiens
LSLWGLRQPNTILKLLIRR

SEQ ID NO: 30509 - protein, 31 aa, Homo sapiens
LLLMGFKRIQKVVLDLMPELLLNHRPLGSKV

SEQ ID NO: 30510 - protein, 1208 aa, Homo sapiens
KRKRLVLCLLEAADMKCFFPVLSCLAVLGVVSAQRQVTVQEGPLYRTEGSHITIWCNVSGYQGPSEQNFQWSIYLPSSPEREVQIVSTMDSSFPYAIYTQRVRGGKIFIERVQGNSTLLHITDLQARDAGEYECHTPSTDKQYFGSYSAKMNLVVIPDSLQTTAMPQTLHRVEQDPLELTCEVASETIQHSHLSVAWLRQKVGEKPVEVISLSRDFMLHSSSEYAQRQSLGEVRLDKLGRTTFRLTIFHLQPSDQGEFYCEAAEWIQDPDGSWYAMTRKRSEGAVVNVQPTDKEFTVRLETEKRLHTVGEPVEFRCILEAQNVPDRYFAVSWAFNSSLIATMGPNAVPVLNSEFAHREARGQLKVAKESDSVFVLKIYHLRQEDSGKYNCRVTEREKTVTGEFIDKESKRPKNIPIIVLPLKSSISVEVASNASVILEGEDLRFSCSVRTAGRPQGRFSVIWQLVDRQNRRSNIMWLDRDGTVQPGSSYWERSSFGGVQMEQVQPNSFSLGIFNSRKEDEGQYECHVTEWVRAVDGEWQIVGERRASTPISITALEMGFAVTAISRTPGVTYSDSFDLQCIIKPHYPAWVPVSVTWRFQPVGTVEFHDLVTFTRDGGVQWGDRSSSFRTRTAIEKAESSNNVRLSISRASDTEAGKYQCVAELWRKNYNNTWTRLAERTSNLLEIRVLQPVTKLQVSKSKRTLTLVENKPIQLNCSVKSQTSQNSHFAVLWYVHKPSDADGKLILKTTHNSAFEYGTYAEEEGLRARLQFERHVSGGLFSLTVQRAEVSDSGSYYCHVEEWLLSPNYAWYKLAEEVSGRTEVTVKQPDSRLRLSQAQGNLSVLETRQVQLECVVLNRTSITSQLMVEWFVWKPNHPERETVARLSRDATFHYGEQAAKNNLKGRLHLESPSPGVYRLFIQNVAVQDSGTYSCHVEEWLPSPSGMWYKRAEDTAGQTALTVMRPDASLQVDTVVPNATVSEKAAFQLDCSIVSRSSQDSRFAVAWYSLRTKAGGKRSSPGLEEQEEEREEEEEEDDDDDDDPTERTALLSVGPDAVFGPEGSPWEGRLRFQRLSPVLYRLTVLQASPQDTGNYSCHVEEWLPSPQKEWYRLTEEESAPIGIRVLDTSPTLQSIICSNDALFYFVFFYPFPIFGILIITILLVRFKSRNSSKNSDGKNGVPLLWIKEPHLNYSPTCLEPPVLSIHPGAID

SEQ ID NO: 30511 - protein, 9 aa, Homo sapiens
LLLAFVLLP

SEQ ID NO: 30512 - protein, 14 aa, Homo sapiens
KWIILTLTAIQLDI

SEQ ID NO: 30513 - protein, 19 aa, Homo sapiens
KARRSCLLVIMLLTRTETV

SEQ ID NO: 30514 - protein, 17 aa, Homo sapiens
MSLYIARFLLGGKIASI

SEQ ID NO: 30515 - protein, 17 aa, Homo sapiens
MPWPILSLLLPPGLFCL

SEQ ID NO: 30516 - protein, 19 aa, Homo sapiens
TFFIITEFTLLPFSLNLLV

SEQ ID NO: 30517 - protein, 11 aa, Homo sapiens
LLNILLFSSAI

SEQ ID NO: 30518 - protein, 21 aa, Homo sapiens
ISKNHGKLKSLLGLLKHLLLM

SEQ ID NO: 30519 - protein, 56 aa, Homo sapiens
LVLLCCCMPCSTRYQEKVLPLMNPEGLPGQILKSSPIQAQPQTWRSCSQCMSMWAL

SEQ ID NO: 30520 - protein, 71 aa, Homo sapiens
LVLLCCCMPCSTRYQEKVLPLMNPEGLPGQILKSSPIQAQPQTWRSCSQCMSMQTSGHFWRTRTPKSSTLL

SEQ ID NO: 30521 - protein, 12 aa, Homo sapiens
MLGLFQSALTLV

SEQ ID NO: 30522 - protein, 33 aa, Homo sapiens
IEASKFLRQREREGQAVDASTSLSSDWNKNRVR

SEQ ID NO: 30523 - protein, 54 aa, Homo sapiens
ISKFKVMARFLWITGFVRETGDKGKMFISGNFIKSLLWLSHGREMVPSACFSIS

SEQ ID NO: 30524 - protein, 28 aa, Homo sapiens
IKTSQRIGSLTAVLFLTGTWAGPQTQEL

SEQ ID NO: 30525 - protein, 18 aa, Homo sapiens
LALASTVLALALNLTGVL

SEQ ID NO: 30526 - protein, 12 aa, Homo sapiens
VMRAIPAPASRE

SEQ ID NO: 30527 - protein, 13 aa, Homo sapiens
IRFLKVYRILVLG

SEQ ID NO: 30528 - protein, 9 aa, Homo sapiens
IIMLYLNYL

SEQ ID NO: 30529 - protein, 40 aa, Homo sapiens
MAPRQTTDCDKRCGVSYLYRLDSSQIHQIKNSRKSVSGLT

SEQ ID NO: 30530 - protein, 9 aa, Homo sapiens
MVCPGRNFT

SEQ ID NO: 30531 - protein, 10 aa, Homo sapiens
MTHINLILMI

SEQ ID NO: 30532 - protein, 21 aa, Homo sapiens
MCLWSQLLGRLRWEDPLNPGG

SEQ ID NO: 30533 - protein, 12 aa, Homo sapiens
KSVFMVAHFFII

SEQ ID NO: 30534 - protein, 20 aa, Homo sapiens
RMCKAGEKMIVVFPLLLELM

SEQ ID NO: 30535 - protein, 15 aa, Homo sapiens
LYMAVGFSLLLSEWL

SEQ ID NO: 30536 - protein, 11 aa, Homo sapiens
MKIKHILLLGV

SEQ ID NO: 30537 - protein, 22 aa, Homo sapiens
LRWQKLVEFSTKWNILKALVSE

SEQ ID NO: 30538 - protein, 19 aa, Homo sapiens
LAAILGGVPREPRIPGSWT

SEQ ID NO: 30539 - protein, 11 aa, Homo sapiens
IFFMVSLSLVH

SEQ ID NO: 30540 - protein, 16 aa, Homo sapiens
MVISGVLLTIIYTLRA

SEQ ID NO: 30541 - protein, 20 aa, Homo sapiens
MMFLILFSCSYSLMLFLRNH

SEQ ID NO: 30542 - protein, 408 aa, Homo sapiens
ILRGKGHTLGLLTRPWRREEDVWVGSGVRGQRAAKWAERAGVGWRLRRLIVFRCRGAEGGTRVGRVRLWKRAAAAHNMHSLATAAPVPTTLAQVDREKIYQWINELSSPETRENALLELSKKRESVPDLAPMLWHSFGTIAALLQEIVNIYPSINPPTLTAHQSNRVCNALALLQCVASHPETRSAFLAAHIPLFLYPFLHTVSKTRPFEYLRLTSLGVIVETGFHHVGQADLELPTSSDLPASASQSAGITGALVKTDEQEVINFLLTTEIIPLCLRIMESGSELSKTVATFILQKILLDDTGLAYICQTYERFSHVAMILGKMVLQLSKEPSARLLKHVVRCYLRLSDNPRAREALRQCLPDQLKDTTFAQVLKDDTTTKRWLAQLVKNLQEGQVTDPRGIPLPPQ

SEQ ID NO: 30543 - protein, 20 aa, Homo sapiens
LDVKMNTLENWMMEQTVKIS

SEQ ID NO: 30544 - protein, 25 aa, Homo sapiens
MKPSFLPRMVIETFLLMGLLLVIEP

SEQ ID NO: 30545 - protein, 10 aa, Homo sapiens
LVWLMIQFGL

SEQ ID NO: 30546 - protein, 8 aa, Homo sapiens
IMIFKLLH

SEQ ID NO: 30547 - protein, 20 aa, Homo sapiens
MFLATMLYRSFLSLGVWIKN

SEQ ID NO: 30548 - protein, 14 aa, Homo sapiens
KIMINLLVSTVPMV

SEQ ID NO: 30549 - protein, 9 aa, Homo sapiens
VILLPWPPE

SEQ ID NO: 30550 - protein, 22 aa, Homo sapiens
IPMKVQHMQLFLLMVLPLKVML

SEQ ID NO: 30551 - protein, 13 aa, Homo sapiens
LCILLVLLRLQRQ

SEQ ID NO: 30552 - protein, 34 aa, Homo sapiens
LCILLVLLRLQRNCLLFGLEKRLWRHGNKQQRPA

SEQ ID NO: 30553 - protein, 13 aa, Homo sapiens
TCPSTILTWWLTF

SEQ ID NO: 30554 - protein, 7 aa, Homo sapiens
ILHLFLV

SEQ ID NO: 30555 - protein, 12 aa, Homo sapiens
MMKLFFLLRLVS

SEQ ID NO: 30556 - protein, 32 aa, Homo sapiens
LNLENSTRLIQKSMNIQIPGKRVSSSCIKVHM

SEQ ID NO: 30557 - protein, 33 aa, Homo sapiens
MHPRRGGLHCPRCQHLRVSPKTLHTSRRGLLLV

SEQ ID NO: 30558 - protein, 16 aa, Homo sapiens
LVIHWLLVVCIVMLVE

SEQ ID NO: 30559 - protein, 45 aa, Homo sapiens
IVRFRRMWISVLFTRSLQMRCLVQASLASFMEENIERLGGMWLLK

SEQ ID NO: 30560 - protein, 12 aa, Homo sapiens
LGFRLVSLWGVF

SEQ ID NO: 30561 - protein, 46 aa, Homo sapiens
MEDMIRLSFVLKRDIVYLKIFMFEEMVPEHISLQKGKSTVCSAKPV

SEQ ID NO: 30562 - protein, 15 aa, Homo sapiens
MKMRLCFLLSMTKFF

SEQ ID NO: 30563 - protein, 16 aa, Homo sapiens
IFLRQSSLTWLIWLSV

SEQ ID NO: 30564 - protein, 21 aa, Homo sapiens
LRRMRICCCVLLLVLGRPTWP

SEQ ID NO: 30565 - protein, 17 aa, Homo sapiens
RKNLSSLLLLSLQFCLT

SEQ ID NO: 30566 - protein, 12 aa, Homo sapiens
REKTAMVTLLGL

SEQ ID NO: 30567 - protein, 30 aa, Homo sapiens
RRLNTSVPLELLLALLQPASPAAYPQQGLG

SEQ ID NO: 30568 - protein, 19 aa, Homo sapiens
MCLLVCQEILRLYQSIVSI

SEQ ID NO: 30569 - protein, 19 aa, Homo sapiens
MTLTLSMLSLVIILGRSPC

SEQ ID NO: 30570 - protein, 11 aa, Homo sapiens
LDSSLTLFCKD

SEQ ID NO: 30571 - protein, 20 aa, Homo sapiens
LVSAMFLLKMILLLWMSELV

SEQ ID NO: 30572 - protein, 20 aa, Homo sapiens
LILLVVLLTGELNMYLQESG

SEQ ID NO: 30573 - protein, 24 aa, Homo sapiens
VDYVDSLGLPALYEKGFARSAGDG

SEQ ID NO: 30574 - protein, 15 aa, Homo sapiens
KCTFQKFLLNAYVFL

SEQ ID NO: 30575 - protein, 91 aa, Homo sapiens
MEMSFMVSQTQVLPVKGVQVLGALNKELDKTHKQSKKRKKQQKQRCIENENTLHRVGAGRASSSRAQLQNFLGFKYPLEVSIGYLVYTLCI

SEQ ID NO: 30576 - protein, 29 aa, Homo sapiens
MHFFYFANAIALLYVRNTPGLITEVLPRY

SEQ ID NO: 30577 - protein, 18 aa, Homo sapiens
LCLLTMWKGKTVLGKHLL

SEQ ID NO: 30578 - protein, 618 aa, Homo sapiens
IMDFSKLPKILDEDKESTFGYVHGVSGPVVTACDMAGAAMYELVRVGHSELVGEIIRLEGDMATIQVYEETSGVSVGDPVLRTGKPLSVELGPGIMGAIFDGIQRPLSDISSQTQSIYIPRGVNVSALSRDIKWDFTPCKNLRVGSHITGGDIYGIVSENSLIKHKIMLPPRNRGTVTYIAPPGNYDTSDVVLELEFEGVKEKFTMVQVWPVRQVRPVTEKLPANHPLLTGQRVLDALFPCVQGGTTAIPGAFGCGKTVISQSLSKYSNSDVIIYVGCGERGNEMSEVLRDFPELTMEVDGKVESIMKRTALVANTSNMPVAAREASIYTGITLSEYFRDMGYHVSMMADSTSRWAEALREISGRLAEMPADSGYPAYLGARLASFYERAGRVKCLGNPEREGSVSIVGAVSPPGGDFSDPVTSATLGIVQVFWGLDKKLAQRKHFPSVNWLISYSKYMRALDEYYDKHFTEFVPLRTKAKEILQEEEDLAEIVQLVGKASLAETDKITLEVAKLIKDDFLQQNGYTPYDRFCPFYKTVGMLSNMIAFYDMARRAVETTAQSDNKITWSIIREHMGDILYKLSSMKFKDPLKDGEAKIKSDYAQLLEDMQNAFRSLED

SEQ ID NO: 30579 - protein, 18 aa, Homo sapiens
LHDDPGGQQAAGRGGWQP

SEQ ID NO: 30580 - protein, 26 aa, Homo sapiens
LCAMTSNLLLLTLLLKDTLRLVKVNR

SEQ ID NO: 30581 - protein, 16 aa, Homo sapiens
VPDTLTKLSFLWEQLK

SEQ ID NO: 30582 - protein, 11 aa, Homo sapiens
VVLLITLLLKF

SEQ ID NO: 30583 - protein, 17 aa, Homo sapiens
RAKRFLIYFRFLATTAS

SEQ ID NO: 30584 - protein, 13 aa, Homo sapiens
IIPEIKCPQQLGK

SEQ ID NO: 30585 - protein, 18 aa, Homo sapiens
IATEEKMIVGLLILLTAQ

SEQ ID NO: 30586 - protein, 18 aa, Homo sapiens
MPQKKRFLMLFGLLMACL

SEQ ID NO: 30587 - protein, 17 aa, Homo sapiens
MWICALVFLSGLKNLLP

SEQ ID NO: 30588 - protein, 28 aa, Homo sapiens
LARTNPMMCELRTLMCLLAIEYCWLERM

SEQ ID NO: 30589 - protein, 8 aa, Homo sapiens
MAILILLT

SEQ ID NO: 30590 - protein, 27 aa, Homo sapiens
VWWSCCLVILSTTRWQASLIRPAHTSE

SEQ ID NO: 30591 - protein, 16 aa, Homo sapiens
LVPGVHPRAEMIMTQS

SEQ ID NO: 30592 - protein, 11 aa, Homo sapiens
LLGNGRSTWAA

SEQ ID NO: 30593 - protein, 12 aa, Homo sapiens
MQIMIWTLSLVW

SEQ ID NO: 30594 - protein, 13 aa, Homo sapiens
TQQQTISQSDCDM

SEQ ID NO: 30595 - protein, 15 aa, Homo sapiens
VILPSWPPKVLGLQA

SEQ ID NO: 30596 - protein, 38 aa, Homo sapiens
KKRGIQNHASLGLSVTSVWMGLSASRSVAGLNVGICHL

SEQ ID NO: 30597 - protein, 17 aa, Homo sapiens
ILLMQRLWWAWPGTWNH

SEQ ID NO: 30598 - protein, 37 aa, Homo sapiens
VGCPASGLLLLLVLLRRPAASPSRAGGESGCGFVLTN

SEQ ID NO: 30599 - protein, 18 aa, Homo sapiens
MFLPGFLLLLQLPPSSLA

SEQ ID NO: 30600 - protein, 17 aa, Homo sapiens
VQAPGPKGTSVLRDPPC

SEQ ID NO: 30601 - protein, 10 aa, Homo sapiens
KFLLILNLTL

SEQ ID NO: 30602 - protein, 19 aa, Homo sapiens
TIATLLCVTLKLKILSLQL

SEQ ID NO: 30603 - protein, 37 aa, Homo sapiens
IIFTKMERLLLSQKILILLYFLKGVSSQDIKTAAWQP

SEQ ID NO: 30604 - protein, 8 aa, Homo sapiens
ILALLFQL

SEQ ID NO: 30605 - protein, 353 aa, Homo sapiens
IDIIHVIKNMGFNLTFHLSYKFRLLLLLTLCLTVVGWATSNYFVGAIQEIPKAKEFMANFHKTLILGKGKTLTNEASTKKVELDNCPSVSPYLRGQSKLIFKPDLTLEEVQAENPKVSRGRYRPQECKALQRVAILVPHRNREKHLMYLLEHLHPFLQRQQLDYGIYVIHQAEGKKFNRAKLLNVGYLEALKEENWDCFIFHDVDLVPENDFNLYKCEEHPKHLVVGRNSTGYRLRYSGYFGGVTALSREQFFKVNGFSNNYWGWGGEDDDLRLRVELQRMKISRPLPEVGKYTMVFHTRDKGNEVNAERMKLLHQVSRVWRTDGLSSCSYKLVSVEHNPLYINITVDFWFGA

SEQ ID NO: 30606 - protein, 19 aa, Homo sapiens
MIINDVQPVWPTRVLLTLL

SEQ ID NO: 30607 - protein, 19 aa, Homo sapiens
MGFETWLSILVMMLSLRQV

SEQ ID NO: 30608 - protein, 16 aa, Homo sapiens
MAANARTFLLPGKKEG

SEQ ID NO: 30609 - protein, 161 aa, Homo sapiens
IYLPVRSTNSSVRKMAGNSILLAAVSILSACQQSYFALQVGKARLKYKVTPPAVTGSPEFERVFRAQQNCVEFYPIFIITLWMAGWYFNQVFATCLGLVYIYGRHLYFWGYSEAAKKRITGFRLSLGILALLTLLGALGIANSFLDEYLDLNIAKKLRRQF

SEQ ID NO: 30610 - protein, 13 aa, Homo sapiens
MRLTVGVLQLWRC

SEQ ID NO: 30611 - protein, 29 aa, Homo sapiens
ILICLLIVKMSFPQIAPIQFKRKHSTKIQ

SEQ ID NO: 30612 - protein, 14 aa, Homo sapiens
MMWHLKIIFMLVIF

SEQ ID NO: 30613 - protein, 19 aa, Homo sapiens
IRLLCLVTAMVSARAAQDL

SEQ ID NO: 30614 - protein, 40 aa, Homo sapiens
MAPQVPPGEKVEALCMEEEMVRVTQWPFNWRSRCFGILQK

SEQ ID NO: 30615 - protein, 22 aa, Homo sapiens
IIPLRSKVLMWAGGSILGLLKL

SEQ ID NO: 30616 - protein, 10 aa, Homo sapiens
IYSGYLFLLY

SEQ ID NO: 30617 - protein, 17 aa, Homo sapiens
VKWTCLVTMIALLKTPL

SEQ ID NO: 30618 - protein, 10 aa, Homo sapiens
LNFFIHVLCL

SEQ ID NO: 30619 - protein, 18 aa, Homo sapiens
LVFVLSLVYWIQRFHCFH

SEQ ID NO: 30620 - protein, 24 aa, Homo sapiens
ILLNLPWFAYFLFPFFFQMGKTCS

SEQ ID NO: 30621 - protein, 12 aa, Homo sapiens
KKINSYGKRLRV

SEQ ID NO: 30622 - protein, 19 aa, Homo sapiens
RRVMCSLLINMCCLLSANF

SEQ ID NO: 30623 - protein, 13 aa, Homo sapiens
MHLLVYLWRFLSL

SEQ ID NO: 30624 - protein, 9 aa, Homo sapiens
LVFLRILTF

SEQ ID NO: 30625 - protein, 108 aa, Homo sapiens
RSKQRINNWKESKHKVIMASASARGNQDKDAHFPPPSKQSLLFCPKSKLHIHRAEISKIMRECQEESFWKRALPFSLVSMLVTQGLVYQGYLAANSRFGSLPKVARKS

SEQ ID NO: 30626 - protein, 171 aa, Homo sapiens
RSKQRINNWKESKHKVIMASASARGNQDKDAHFPPPSKQSLLFCPKSKLHIHRAEISKIMRECQEESFWKRALPFSLVSMLVTQGLVYQGYLAANSRFGSLPKVALAGLLGFGLGKVSYIGVCQSKFHFFEDQLRGAGFGPQHNRHCLLTCEECKIKHGLSEKGDSQPSAS

SEQ ID NO: 30627 - protein, 14 aa, Homo sapiens
RKKVSGRELCLFLL

SEQ ID NO: 30628 - protein, 21 aa, Homo sapiens
IKLRNIYTGFMAGILPMFMVE

SEQ ID NO: 30629 - protein, 16 aa, Homo sapiens
ILVLWFLMTLNQFRES

SEQ ID NO: 30630 - protein, 24 aa, Homo sapiens
VNPVPLLGMRQLLHLIRVLPMIRS

SEQ ID NO: 30631 - protein, 13 aa, Homo sapiens
IRKGSVLITMKEV

SEQ ID NO: 30632 - protein, 16 aa, Homo sapiens
ITCIIAGINFKLLFLF

SEQ ID NO: 30633 - protein, 44 aa, Homo sapiens
LKTYRGRRTGIILFVSCFETSICKVSVESQILAPGTFYIHKYKN

SEQ ID NO: 30634 - protein, 85 aa, Homo sapiens
RATPAMEAAAADWRACWWVPLMLCWTPAPGSLLTESCTRLQTPWSTGPSPVVVPGKKSLNTGNGLSKISCRHSPSLKMRMISPHL

SEQ ID NO: 30635 - protein, 63 aa, Homo sapiens
MDITAKVTVVMEDMTTLVTTTTMDMVIIATSRVVMGRYPGEVVIKIATNHTKLFHLQLIPNRW

SEQ ID NO: 30636 - protein, 11 aa, Homo sapiens
RTTLKIGLLLI

SEQ ID NO: 30637 - protein, 18 aa, Homo sapiens
ICISMLAFLMRRLLWLGK

SEQ ID NO: 30638 - protein, 16 aa, Homo sapiens
IRWVKIIPSLWIQAII

SEQ ID NO: 30639 - protein, 11 aa, Homo sapiens
MNIIRLLLLYF

SEQ ID NO: 30640 - protein, 15 aa, Homo sapiens
VQPLEVDQTRTHMPY

SEQ ID NO: 30641 - protein, 14 aa, Homo sapiens
IALLGLGTFLLGAL

SEQ ID NO: 30642 - protein, 90 aa, Homo sapiens
RGNKEQRLRRQRSGGGGGAAAAGGTGMVVPQGRPRCTHREEEAAAAEEGGAPREACPKKNTSPLTLGGCIQLCLLRKQQMERNPTGQSLK

SEQ ID NO: 30643 - protein, 22 aa, Homo sapiens
IQILTVMAAFVLIFYDHSGLQH

SEQ ID NO: 30644 - protein, 9 aa, Homo sapiens
INFLWSALL

SEQ ID NO: 30645 - protein, 23 aa, Homo sapiens
VGWGTGSCEGNVRGRRSGDPRQA

SEQ ID NO: 30646 - protein, 115 aa, Homo sapiens
IFSCCCGPDMATPGPVIPEVPFEPSKPPVIEGLSPTVYRNPESFKEKFVRKTRENPVVPIGCLATAAALTYGLYSFHRGNSQRSQLMMRTRIAAQGFTVAAILLGLAVTAMKSRP

SEQ ID NO: 30647 - protein, 18 aa, Homo sapiens
LSLYLWISRNMLMVFLRI

SEQ ID NO: 30648 - protein, 11 aa, Homo sapiens
LGLLAGKAQNR

SEQ ID NO: 30649 - protein, 39 aa, Homo sapiens
LILVAFFLLFSVVCGFRCRANLRLVRVHVSGNRPCSWLS

SEQ ID NO: 30650 - protein, 29 aa, Homo sapiens
RNLYATISSLSFLLALEALVENGHQTKSR

SEQ ID NO: 30651 - protein, 22 aa, Homo sapiens
LGERYLSFSLSLSLRVVCWFSA

SEQ ID NO: 30652 - protein, 9 aa, Homo sapiens
LALPFLKQS

SEQ ID NO: 30653 - protein, 13 aa, Homo sapiens
LLSVMALLWKILW

SEQ ID NO: 30654 - protein, 11 aa, Homo sapiens
LLIVWAMIISG

SEQ ID NO: 30655 - protein, 21 aa, Homo sapiens
TRMISTALWPALTTLGISPLS

SEQ ID NO: 30656 - protein, 27 aa, Homo sapiens
LQVQLLPHASKGAGNVNKNRLFIPDGF

SEQ ID NO: 30657 - protein, 662 aa, Homo sapiens
VMAFDVSCFFWVVLFSAGCKVITSWDQMCIEKEANKTYNCENLGLSEIPDTLPNTTEFLEFSFNFLPTIHNRTFSRLMNLTFLDLTRCQINWIHEDTFQSHHQLSTLVLTGNPLIFMAETSLNGPKSLKHLFLIQTGISNLEFIPVHNLENLESLYLGSNHISSIKFPKDFPARNLKVLDFQNNAIHYISREDMRSLEQAINLSLNFNGNNVKGIELGAFDSTIFQSLNFGGTPNLSVIFNGLQNSTTQSLWLGTFEDIDDEDISSAMLKGLCEMSVESLNLQEHRFSDISSTTFQCFTQLQELDLTATHLKGLPSGMKGLNLLKKLVLSVNHFDQLCQISAANFPSLTHLYIRGNVKKLHLGVGCLEKLGNLQTLDLSHNDIEASDCCSLQLKNLSHLQTLNLSHNEPLGLQSQAFKECPQLELLDLAFTRLHINAPQSPFQNLHFLQVLNLTYCFLDTSNQHLLAGLPVLRHLNLKGNHFQDGTITKTNLLQTVGSLEVLILSSCGLLSIDQQAFHSLGKMSHVDLSHNSLTCDSIDSLSHLKGIYLNLAANSINIISPRLLPILSQQSTINLSHNPLDCTCSNIHFLTWYKENLHKLEGSEETTCANPPSLRGVKLSDVKLSCGITAIGIFFLIVFLLLLAILLFFAVKYLLRWKYQHI

SEQ ID NO: 30658 - protein, 13 aa, Homo sapiens
LIVAVCLIMAYVF

SEQ ID NO: 30659 - protein, 24 aa, Homo sapiens
MPPFIQLKRSYRQFRKLFLLLNVL

SEQ ID NO: 30660 - protein, 13 aa, Homo sapiens
VGLPELPKEHGGR

SEQ ID NO: 30661 - protein, 19 aa, Homo sapiens
LLRSGRCLMMFLMIRELVF

SEQ ID NO: 30662 - protein, 11 aa, Homo sapiens
MIKLGNFQYVK

SEQ ID NO: 30663 - protein, 27 aa, Homo sapiens
MKKFGPQILWLLSLVQMSSTFTQMWKT

SEQ ID NO: 30664 - protein, 21 aa, Homo sapiens
LTVLMTAMSLCILVGIPSQEG

SEQ ID NO: 30665 - protein, 18 aa, Homo sapiens
LHSSSGDRPRLFFDPGSR

SEQ ID NO: 30666 - protein, 28 aa, Homo sapiens
LLSNFPKVTNSKHLFQYSSQTTLKWIGC

SEQ ID NO: 30667 - protein, 99 aa, Homo sapiens
RRSSTSCQPHTATAFLLPSAPSPSPISHPVPHPMRPWCLALSSPLDKTNQVGTADNNAARPCCPISICQQGREVPGSGQKLDRSPFLTSQQPPTQGSKT

SEQ ID NO: 30668 - protein, 45 aa, Homo sapiens
MLGLSIILNLLFLRENTRFCWNCTLKNGPPWPVPMLLSCAPDCGL

SEQ ID NO: 30669 - protein, 33 aa, Homo sapiens
ISAFALVWLWLHSTGCFWWDRWLCKNRNLENCI

SEQ ID NO: 30670 - protein, 1456 aa, Homo sapiens
IQPPGTARRRHVAAAANPPRICNSFFFFWWGGGRAAKFCLRPPFSCPLPFASCICLSKKIEEFGEGQGAINQSWTCNNPHTYRATMTEESSDVPRELIESIKDVIGRKIKISVKKKVKLEVKGDKVENKVLVLTSCRAFLVTARIPTKLELTFSYLEIHGVVCSKSAQMIVETEKCSISMKMASPEDVSEVLAHIGTCLRKIFPGLSPVRIMKKVSMEPSERLASLQALWDSQTVAEQGPCGGFSQMYACVCDWLGFSYREEVQWDVDTIYLTQDTRELNLQDFSHLDHRDLIPIIAALEYNQWFTKLSSKDLKLSTDVCEQILRVVSRSNRLEELVLENAGLRTDFAQKLASALAHNPNSGLHTINLAGNPLEDRGVSSLSIQFAKLPKGLKHLNLSKTSLSPKGVNSLSQSLSANPLTASTLVHLDLSGNVLRGDDLSHMYNFLAQPNAIVHLDLSNTECSLDMVCGALLRGCLQYLAVLNLSRTVFSHRKGKEVPPSFKQFFSSSLALMHINLSGTKLSPEPLKALLLGLACNHNLKGVSLDLSNCELRSGGAQVLEGCIAEIHNITSLDISDNGLESDLSTLIVWLSKNRSIQHLALGKNFNNMKSKNLTPVLDNLVQMIQDEESPLQSLSLADSKLKTEVTIIINALGSNTSLTKVDISGNGMGDMGAKMLAKALQINTKLRTVIWDKNNITAQGFQDIAVAMEKNYTLRFMPIPMYDASQALKTNPEKTEDALQKIENYLLRNHETRKYLQEQAYRLQQGIVTSTTQQMIDRICVKVQDHLNSLRNCGGDAIQEDLKSAERLMRDAKNSKTLLPNLYHVGGASWAGASGLLSSPIQETLESMAGEVTRVVDEQLKALLESMVDAAENLCPNVMKKAHIRQDLIHASTEKISIPRTFVKNVLLEQSGIDILNKISEVKLTVASFLSDRIVDEILDALSHCHHKLADHFSRRGKTLPQQESLEIELAEEKPVKRSIITVEELTEIERLEDLDTCMMTPKSKRKSIHSRMLRPVSRAFEMEFDLDKALEEVPIHIEDPPFPSLRQEKRSSGFISELPSEEGKKLEHFTKLRPKRNKKQQPTQAAVCAANIVSQDGEQNGLMGRVDEGVDEFFTKKVTKMDSKKWSTRGSESHELNEGGDEKKKRDSRKSSGFLNLIKSRSKSERPPTILMTEEPSSPKGAVRSPPVDCPRKDTKAAEHNGNSERIEEIKTPDSFEESQGEEIGKVERSDSKSSPQAGRRYGVQVMGSGLLAEMKAKQEKRAACAQKKLGNDAVSQDSSSPALSGVERSDGGGAVPKLHPGLPENRFGLGTPEKNTKAEPKAEAGSRSRSSSSTPTSPKPLLQSPKPSLAARPVIPQKPRTASRPDDIPDSPSSPKVALLPPVLKKVPSDKERDGQSSPQPSPRTFSQEVSRRSWGQQAQEYQEQKQRSSSKDGHQGSKSNDSGEEAEKEFIFV

SEQ ID NO: 30671 - protein, 14 aa, Homo sapiens
LPLSCFLFFLLGGV

SEQ ID NO: 30672 - protein, 16 aa, Homo sapiens
IFLNSVVFLVTHLWSF

SEQ ID NO: 30673 - protein, 22 aa, Homo sapiens
ILTLKMLLMWMLESRPYEMQSV

SEQ ID NO: 30674 - protein, 23 aa, Homo sapiens
LSSFLQVLVASTLLLWLSTQTTS

SEQ ID NO: 30675 - protein, 11 aa, Homo sapiens
LTYTFWTLALV

SEQ ID NO: 30676 - protein, 45 aa, Homo sapiens
MKVLYSMNCLMTVLISSLITTSKSSSCPSWWAVPRKENESATLLC

SEQ ID NO: 30677 - protein, 18 aa, Homo sapiens
VEPELGADSPRHRGTQRR

SEQ ID NO: 30678 - protein, 7 aa, Homo sapiens
MVVLILI

SEQ ID NO: 30679 - protein, 21 aa, Homo sapiens
MLSWMMMMTRVSLILLETHKH

SEQ ID NO: 30680 - protein, 14 aa, Homo sapiens
IFYMDLVINLAMMT

SEQ ID NO: 30681 - protein, 41 aa, Homo sapiens
LNTLIWSAVMMKSLAPLILMCPIQQDSFVPEPHDHRKFVFS

SEQ ID NO: 30682 - protein, 18 aa, Homo sapiens
MVLLTVVVGRMLHVSKNS

SEQ ID NO: 30683 - protein, 12 aa, Homo sapiens
RNLHLFWLLQMW

SEQ ID NO: 30684 - protein, 12 aa, Homo sapiens
IVRSLLFNLYVW

SEQ ID NO: 30685 - protein, 95 aa, Homo sapiens
MFRCSVGLIQSGEGLKRKKDRPLPRTRESSNRYLWTGPCTISFPGFPASCLTLQLLDLLDLIITTQANPFKEVCLENLDKHKHLLRVPVQVLLTP

SEQ ID NO: 30686 - protein, 15 aa, Homo sapiens
MIPFQVKRVRLLLKK

SEQ ID NO: 30687 - protein, 18 aa, Homo sapiens
IKVFLAASLTSLALTREQ

SEQ ID NO: 30688 - protein, 23 aa, Homo sapiens
MEPSFYSSRRPWPLPRPGRAPTP

SEQ ID NO: 30689 - protein, 21 aa, Homo sapiens
VAGPASWKLFLMQVVLLPYAF

SEQ ID NO: 30690 - protein, 17 aa, Homo sapiens
ILILVLFSFPSRTRETS

SEQ ID NO: 30691 - protein, 20 aa, Homo sapiens
RLWLLLRSAMAFLWQPLRRP

SEQ ID NO: 30692 - protein, 11 aa, Homo sapiens
LPWRLGFLSWF

SEQ ID NO: 30693 - protein, 20 aa, Homo sapiens
VTSVIPAIAWFSFIQLSMDQ

SEQ ID NO: 30694 - protein, 37 aa, Homo sapiens
RTTVVKKQIPKEPNQNSSATPEFDSLTNFRKSLKRKY

SEQ ID NO: 30695 - protein, 12 aa, Homo sapiens
LIYSSMILVLPW

SEQ ID NO: 30696 - protein, 16 aa, Homo sapiens
LGLSWGIFDWINCILL

SEQ ID NO: 30697 - protein, 12 aa, Homo sapiens
LEIVILMFVCSV

SEQ ID NO: 30698 - protein, 23 aa, Homo sapiens
ILSFKMSHMEDAIPGSLNFHGCI

SEQ ID NO: 30699 - protein, 11 aa, Homo sapiens
IILLLCFEAVV

SEQ ID NO: 30700 - protein, 23 aa, Homo sapiens
LRKPKEVKGLLYLMMKTLQMILL

SEQ ID NO: 30701 - protein, 95 aa, Homo sapiens
IHILMIFWSFVAGVVTFYCSLGPDSLLPNIFFTIKYKPKQLGLQELFPQGHSCAVCGKVKCKRHRPSLLLENYQPWLDLKISSKVDASLSEGCDR

SEQ ID NO: 30702 - protein, 9 aa, Homo sapiens
LCSFLLWIS

SEQ ID NO: 30703 - protein, 12 aa, Homo sapiens
VCEIPAIPWKVP

SEQ ID NO: 30704 - protein, 19 aa, Homo sapiens
MNSMKLIVSSDASRMVPAK

SEQ ID NO: 30705 - protein, 8 aa, Homo sapiens
MVVLLFWI

SEQ ID NO: 30706 - protein, 18 aa, Homo sapiens
RLASLLLLLIVGLPMGIN

SEQ ID NO: 30707 - protein, 12 aa, Homo sapiens
RIMCVGVSWTLL

SEQ ID NO: 30708 - protein, 9 aa, Homo sapiens
VFTFYTLVM

SEQ ID NO: 30709 - protein, 15 aa, Homo sapiens
KPFRRLWFSFIKLMF

SEQ ID NO: 30710 - protein, 9 aa, Homo sapiens
VILLPRPSE

SEQ ID NO: 30711 - protein, 23 aa, Homo sapiens
RYCSSFLLIFAGQSMLYLNPTLI

SEQ ID NO: 30712 - protein, 24 aa, Homo sapiens
MFRKWTQSSFGRLWALNMHSWTLD

SEQ ID NO: 30713 - protein, 38 aa, Homo sapiens
VFLKVILTLLLISYLHEYFSLFSVSLKIELPTPKYEIG

SEQ ID NO: 30714 - protein, 156 aa, Homo sapiens
VPMVEKKTSVRSQDPGQRRVLDRAARQRRINRQLEALENDNFQDDPHAGLPQLGKRLPQFDDDADTGKKKKKTRGDHFKLRFRKNFQALLEEQNLSVAEGPNYLTACAGPPSRPQRPFCAVCGFPSPYTCVSCGARYCTVRCLGTHQETRCLKWTV

SEQ ID NO: 30715 - protein, 8 aa, Homo sapiens
LKLILFLL

SEQ ID NO: 30716 - protein, 9 aa, Homo sapiens
ILLLVGLSW

SEQ ID NO: 30717 - protein, 24 aa, Homo sapiens
VASLPAGIGRSTAKTPGPTGSLEM

SEQ ID NO: 30718 - protein, 37 aa, Homo sapiens
VASLPAGIGRSTAKTPGPTGSLEMLQELCLGSIHPVS

SEQ ID NO: 30719 - protein, 8 aa, Homo sapiens
IKIWMTLI

SEQ ID NO: 30720 - protein, 7 aa, Homo sapiens
MAAPRGC

SEQ ID NO: 30721 - protein, 15 aa, Homo sapiens
KISVDPILLMLLVWG

SEQ ID NO: 30722 - protein, 64 aa, Homo sapiens
MAFEKVCLIPGCFSWVSSSGTSSLSSQQECGTFYRLIKIKDMFFGQQPELKICWNRVRDHFSCS

SEQ ID NO: 30723 - protein, 10 aa, Homo sapiens
LKRKSLMISY

SEQ ID NO: 30724 - protein, 19 aa, Homo sapiens
LKHGSGVEKGFRTLLGIRH

SEQ ID NO: 30725 - protein, 24 aa, Homo sapiens
IYWLKLALVKMEVMLVLHMISSMV

SEQ ID NO: 30726 - protein, 17 aa, Homo sapiens
IPSLFLGMIFGTSFAIL

SEQ ID NO: 30727 - protein, 20 aa, Homo sapiens
ICLMMMTMMIAVTKDTFGSI

SEQ ID NO: 30728 - protein, 15 aa, Homo sapiens
MPVPMITFLCVLLTV

SEQ ID NO: 30729 - protein, 14 aa, Homo sapiens
IWKRGVSFSVLCSL

SEQ ID NO: 30730 - protein, 351 aa, Homo sapiens
VGPGDGGGGRGERRPGRGRGRVGRGEGGGRAGARDPHRDRAAMDDKAFTKELDQWVEQLNECKQLNENQVRTLCEKAKEILTKESNVQEVRCPVTVCGDVHGQFHDLMELFRIGGKSPDTNYLFMGDYVDRGYYSVETVTLLVALKVRYPERITILRGNHESRQITQVYGFYDECLRKYGNANVWKYFTDLFDYLPLTALVDGQIFCLHGGLSPSIDTLDHIRALDRLQEVPHEGPMCDLLWSDPDDRGGWGISPRGAGYTFGQDISETFNHANGLTLVSRAHQLVMEGYNWCHDRNVVTIFSAPNYCYRCGNQAAIMELDDTLKYSFLQFDPAPRRGEPHVTRRTPDYFL

SEQ ID NO: 30731 - protein, 9 aa, Homo sapiens
ISLVFLLRL

SEQ ID NO: 30732 - protein, 29 aa, Homo sapiens
MYVQRLKNNLERVHPSNSRESCSVTQAGV

SEQ ID NO: 30733 - protein, 31 aa, Homo sapiens
MYVQRLKNNLERVHPSNSRISLCHPGWSAVA

SEQ ID NO: 30734 - protein, 24 aa, Homo sapiens
IPLVLIQVRGKQVPRREGIMKIPC

SEQ ID NO: 30735 - protein, 14 aa, Homo sapiens
MSSVGIFLLTYLLE

SEQ ID NO: 30736 - protein, 54 aa, Homo sapiens
IVLLFLFRATHMLVYRFYLWLNPSNNRQYLSPPFHGPFYCLPFSTKYDRSYLRS

SEQ ID NO: 30737 - protein, 35 aa, Homo sapiens
LAMVQLLVLAVLLQDNKDMKIQDQGSGQAWELVEY

SEQ ID NO: 30738 - protein, 14 aa, Homo sapiens
VIPWMVTILLNAAP

SEQ ID NO: 30739 - protein, 18 aa, Homo sapiens
MATIFGLKTASCATKMAT

SEQ ID NO: 30740 - protein, 9 aa, Homo sapiens
MCYIVLLFC

SEQ ID NO: 30741 - protein, 21 aa, Homo sapiens
KMRRRLIWILFMIARPSFPII

SEQ ID NO: 30742 - protein, 16 aa, Homo sapiens
MGLPTTAILGTRMPRG

SEQ ID NO: 30743 - protein, 130 aa, Homo sapiens
LLPPNFLLGPTRGRVTMALEHLVVWHVHSEDQSFVVLKTDLGRRGCRPLRKTAPKAKEAPAPPKAEAKVKALKAKKAVLKGVRSHTQKRRSACHSPSGGPRHCDFGGSPDILGRAPPGETSLATMLSSFR

SEQ ID NO: 30744 - protein, 28 aa, Homo sapiens
VHLTTAFWLTLLDLTHTECSLSVRDKVS

SEQ ID NO: 30745 - protein, 19 aa, Homo sapiens
LRMTFTCFMMTKVLVWEKH

SEQ ID NO: 30746 - protein, 8 aa, Homo sapiens
IWILCWTV

SEQ ID NO: 30747 - protein, 20 aa, Homo sapiens
VSTMIIFLSWLVNKQYLLSN

SEQ ID NO: 30748 - protein, 7 aa, Homo sapiens
LWIAGML

SEQ ID NO: 30749 - protein, 29 aa, Homo sapiens
MTIWMRMIMYQWVGLIVLIQWIPLNQCQP

SEQ ID NO: 30750 - protein, 17 aa, Homo sapiens
IIQILLLLWIWHRPPRN

SEQ ID NO: 30751 - protein, 11 aa, Homo sapiens
ILTWAALVMIR

SEQ ID NO: 30752 - protein, 31 aa, Homo sapiens
RLFTGEFMTPLTLLLSQTLGNIPAAAFLTNC

SEQ ID NO: 30753 - protein, 35 aa, Homo sapiens
RMMSASRLAGTLIPAMAFLSCVRPESWEPCVETWP

SEQ ID NO: 30754 - protein, 33 aa, Homo sapiens
RMMSASRLAGTLIPAMAFLSCVRPESWEPCVEV

SEQ ID NO: 30755 - protein, 32 aa, Homo sapiens
LVSAERMVSMAWLRMTLIMHCATSPTISVPMP

SEQ ID NO: 30756 - protein, 11 aa, Homo sapiens
LADGAWINKKF

SEQ ID NO: 30757 - protein, 189 aa, Homo sapiens
VWHPKALGFPLQTKQVASVLLQCLAALLLLGDPLGLEGCQHSVQPQPLQALWARREAKCSERALQLPAQEDSGLGAAATPHPSARSRVRMPPLSDHCPNRLLVLGPRVADSLVLDQAQEGSALGQITRLSRVLVAGEAEGVSAGLSIPGTNRILSFFPEKCWSRLFRPTLPSKHIHPERNNRNQNSQGA

SEQ ID NO: 30758 - protein, 110 aa, Homo sapiens
IASFPLLTVIVAQQLTMPLPRYGSGQQPLILPQSIQLPPGQSLSVGAPRRIPPPGSQPPVLNTSREPSQMEMKGFHFADSKQNVPSGGPVPSPQTYRQNNEWMRNPAWEP

SEQ ID NO: 30759 - protein, 24 aa, Homo sapiens
IFEVHRNQMEIWKGFDETFESNAE

SEQ ID NO: 30760 - protein, 18 aa, Homo sapiens
VPPRWRTRTIRRKRWRRW

SEQ ID NO: 30761 - protein, 16 aa, Homo sapiens
VAQSILHRCGNSYVTP

SEQ ID NO: 30762 - protein, 16 aa, Homo sapiens
KSAFHIAMTCLLGSLI

SEQ ID NO: 30763 - protein, 25 aa, Homo sapiens
MMTMTLTGWDEDPGNWCKGFSATLP

SEQ ID NO: 30764 - protein, 9 aa, Homo sapiens
LLMMIAMLW

SEQ ID NO: 30765 - protein, 330 aa, Homo sapiens
RPESMELSGATMARGLAVLLVLFLHIKNLPAQAADTCPEVKVVGLEGSDKLTILRGCPGLPGAPGPKGEAGVIGERGERGLPGAPGKAGPVGPKGDRGEKGMRGEKGDAGQSQSCATGPRNCKDLLDRGYFLSGWHTIYLPDCRPLTVLCDMDTDGGGWTVFQRRMDGSVDFYRDWAAYKQGFGSQLGEFWLGNDNIHALTAQGSSELRVDLVDFEGNHQFAKYKSFKVADEAEKYKLVLGAFVGGSAGNSLTGHNNNFFSTKDQDNDVSSSNCAEKFQGAWWYADCHASNLNGLYLMGPHESYANGINWSAAKGYKYSYKVSEMKVRPA

SEQ ID NO: 30766 - protein, 43 aa, Homo sapiens
MLPTLRPVNFKQPTKTSATAWSVWLSTTKQEMNCHSCMRFYGN

SEQ ID NO: 30767 - protein, 19 aa, Homo sapiens
MDHLEQENQKLLLASSIVY

SEQ ID NO: 30768 - protein, 95 aa, Homo sapiens
KSEIALCSCATACGWTACCCPTGWQDEALPGGRDAAAAQRGAGRGGGQEGGRGHGGRHRPGDHLLLRRRVQERPRGDHRQRSGQPHHAVLCRLHS

SEQ ID NO: 30769 - protein, 37 aa, Homo sapiens
MAGLVWLQMMPVTELLQLLLLTQKMKRLLDWQQNKVE

SEQ ID NO: 30770 - protein, 16 aa, Homo sapiens
LRSYSRSLLPLLGSLL

SEQ ID NO: 30771 - protein, 13 aa, Homo sapiens
ILVYLIMSWFGLK

SEQ ID NO: 30772 - protein, 27 aa, Homo sapiens
LLISGDTRCSCRHPSLLLTLVYLGKMK

SEQ ID NO: 30773 - protein, 18 aa, Homo sapiens
IAFLVSPTLTFLLKWLSA

SEQ ID NO: 30774 - protein, 14 aa, Homo sapiens
LPLTASIWLGVTWL

SEQ ID NO: 30775 - protein, 16 aa, Homo sapiens
VASIRALYWLVLALRG

SEQ ID NO: 30776 - protein, 25 aa, Homo sapiens
KYLKNMKLALFPLFCFSRILRKSTD

SEQ ID NO: 30777 - protein, 19 aa, Homo sapiens
VNLKAFLIGLLMKTVYSVA

SEQ ID NO: 30778 - protein, 29 aa, Homo sapiens
LPLLLLLQLPMSLCTRMQDLICPRCQTIT

SEQ ID NO: 30779 - protein, 63 aa, Homo sapiens
LSFLFRCLVFLLSFNNVPDPVLGACSFTCPFHLFSGSSCVEHSCLQQVVFITLSFHYKLLLQL

SEQ ID NO: 30780 - protein, 11 aa, Homo sapiens
LIPLLPKLFKF

SEQ ID NO: 30781 - protein, 18 aa, Homo sapiens
MDSILWTFLMLTIQKMKK

SEQ ID NO: 30782 - protein, 20 aa, Homo sapiens
VLSLWTVLLWKVTKSAIGVL

SEQ ID NO: 30783 - protein, 12 aa, Homo sapiens
ILSPLFTFALIV

SEQ ID NO: 30784 - protein, 17 aa, Homo sapiens
MCLVSFLLRFLSYQTIF

SEQ ID NO: 30785 - protein, 15 aa, Homo sapiens
IQLLSIFFFFWFFAT

SEQ ID NO: 30786 - protein, 33 aa, Homo sapiens
ISRDLRTFGVPEGKHRDGVLLCCPDWSQTPGLK

SEQ ID NO: 30787 - protein, 12 aa, Homo sapiens
LLLGFFRVILDS

SEQ ID NO: 30788 - protein, 13 aa, Homo sapiens
IPGASVKRGYPSV

SEQ ID NO: 30789 - protein, 569 aa, Homo sapiens
IHLCSRFSIRDSSSMAARLLLLGILLLLLPLPVPAPCHTAARSECKRSHKFVPGAWLAGEGVDVTSLRRSGSFPVDTQRFLRPDGTCTLCENALQEGTLQRLPLALTNWRAQGSGCQRHVTRAKVSSTEAVARDAARSIRNDWKVGLDVTPKPTSNVHVSVAGSHSQAANFAAQKTHQDQYSFSTDTVECRFYSFHVVHTPPLHPDFKRALGDLPHHFNASTQPAYLRLISNYGTHFIRAVELGGRISALTALRTCELALEGLTDNEVEDCLTVEAQVNIGIHGSISAEAKACEEKKKKHKMTASFHQTYRERHSEVVGGHHTSINDLLFGIQAGPEQYSAWVNSLPGSPGLVDYTLEPLHVLLDSQDPRREALRRALSQYLTDRARWRDCSRPCPPGRQKSPRDPCQCVCHGSAVTTQDCCPRQRGLAQLEVTFIQAWGLWGDWFTATDAYVKLFFGGQELRTSTVWDNNNPIWSVRLDFGDVLLATGGPLRLQVWDQDSGRDDDLLGTCDQAPKSGSHEVRCNLNHGHLKFRYHARCLPHLGGGTCLDYVPQMLLGEPPGNRSGAVW

SEQ ID NO: 30790 - protein, 476 aa, Homo sapiens
RRGSGAESLTGTGVGIVSHLVTQAGVQWRNLSSLQRRSSSWAQAILLLHPPEYLGLQKMIHSLFLINCSGDIFLEKHWKSVVSQSVCDYFFEAQEKAADVENVPPVISTPHHYLISIYRDKLFFVSVIQTEVPPLFVIEFLHRVADTFQDYFGECSEAAIKDNVVIVYELLEEMLDNGFPLATESNILKELIKPPTILRSVVNSITGSSNVGDTLPTGQLSNIPWRRAGVKYTNNEAYFDVVEEIDAIIDKSGSTVFAEIQGVIDACIKLSGMPDLSLSFMNPRLLDDVSFHPCIRFKRWESERVLSFIPPDGNFRLISYRVSSQNLVAIPVYVKHSISFKENSSCGRFDITIGPKQNMGKTIEGITVTVHMPKVVLNMNLTPTQGSYTFDPVTKVLTWDVGKITPQKLPSLKGLVNLQSGAPKPEENPSLNIQFKIQQLAISGLKVNRLDMYGEKYKPFKGVKYVTKAGKFQVRT

SEQ ID NO: 30791 - protein, 31 aa, Homo sapiens
ISRAWWRAPVIPATREAEAGESLEPGEQRLQ

SEQ ID NO: 30792 - protein, 13 aa, Homo sapiens
KILPITSMCLLGI

SEQ ID NO: 30793 - protein, 29 aa, Homo sapiens
LLMIFTSCSWWLGVCLSVLVRQRCQENDG

SEQ ID NO: 30794 - protein, 56 aa, Homo sapiens
MTSMNCLACCVSTEEMGLRSTLTCFKRTGPRTSLPLSLLTVPRLKLQSFLVLQKTF

SEQ ID NO: 30795 - protein, 8 aa, Homo sapiens
KGLWILGF

SEQ ID NO: 30796 - protein, 28 aa, Homo sapiens
ITFMLMIMIRRDCFWARTKEDPQNSSHG

SEQ ID NO: 30797 - protein, 14 aa, Homo sapiens
RKYCQKLSLLISLL

SEQ ID NO: 30798 - protein, 14 aa, Homo sapiens
IIMIILLLLTLSRN

SEQ ID NO: 30799 - protein, 425 aa, Homo sapiens
TMRAPGCGRLVLPLLLLAAAALAEGDAKGLKEGETPGNFMEDEQWLSSISQYSGKIKHWNRFRDEVEDDYIKSWEDNQQGDEALDTTKDPCQKVKCSRHKVCIAQGYQRAMCISRKKLEHRIKQPTVKLHGNKDSICKPCHMAQLASVCGSDGHTYSSVCKLEQQACLSSKQLAVRCEGPCPCPTEQAATSTADGKPETCTGQDLADLGDRLRDWFQLLHENSKQNGSASSVAGPASGLDKSLGASCKDSIGWMFSKLDTSADLFLDQTELAAINLDKYEVCIRPFFNSCDTYKDGRVSTAEWCFCFWREKPPCLAELERIQIQEAAKKKPGIFIPSCDEDGYYRKMQCDQSSGDCWCVDQLGLELTGTRTHGSPDCDDIVGFSGDFGSGVGWEDEEEKETEEAGEEAEEEEGEAGEADDGGYIW

SEQ ID NO: 30800 - protein, 12 aa, Homo sapiens
VQERKNILVVLL

SEQ ID NO: 30801 - protein, 10 aa, Homo sapiens
VPGTVVFGRS

SEQ ID NO: 30802 - protein, 517 aa, Homo sapiens
IKMVSIPEYYEGKNVLLTGATGFLGKVLLEKLLRSCPKVNSVYVLVRQKAGQTPQERVEEVLSGKLFDRLRDENPDFREKIIAINSELTQPKLALSEEDKEVIIDSTNIIFHCAATVRFNENLRDAVQLNVIATRQLILLAQQMKNLEVFMHVSTAYAYCNRKHIDEVVYPPPVDPKKLIDSLEWMDDGLVNDITPKLIGDRPNTYIYTKALAEYVVQQEGAKLNVAIVRPSIVGASWKEPFPGWIDNFNGPSGLFIAAGKGILRTIRASNNALADLVPVDVVVNMSLAAAWYSGVNRPRNIMVYNCTTGSTNPFHWGEVEYHVISTFKRNPLEQAFRRPNVNLTSNHLLYHYWIAVSHKAPAFLYDIYLRMTGRSPRMMKTITRLHKAMVFLEYFTSNSWVWNTENVNMLMNQLNPEDKKTFNIDVRQLHWAEYIENYCLGTKKYVLNEEMSGLPAARKHLNKLRNIRYGFNTILVILIWRIFIARSQMARNIWYFVVSLCYKFLSYFRASSTMRY

SEQ ID NO: 30803 - protein, 12 aa, Homo sapiens
VRSYFIGIKQKN

SEQ ID NO: 30804 - protein, 24 aa, Homo sapiens
MQQVRTLLILFKVLDKKWKLIHPS

SEQ ID NO: 30805 - protein, 20 aa, Homo sapiens
MDNKYLWNYIMELLLCHLVG

SEQ ID NO: 30806 - protein, 44 aa, Homo sapiens
LPLFPARHGGDGRGRVRVASAGSLFGGMVLKKFLKVPAPKLQTS

SEQ ID NO: 30807 - protein, 36 aa, Homo sapiens
LPLFPARHGGDGRGRVRVASAGSLFGGMVLKKFLKG

SEQ ID NO: 30808 - protein, 27 aa, Homo sapiens
KKSLLEGDQGGKRRCFGPASKKREGIA

SEQ ID NO: 30809 - protein, 8 aa, Homo sapiens
RILWIATL

SEQ ID NO: 30810 - protein, 27 aa, Homo sapiens
IRWICCSSYTMSVCWLLSASGTASEVG

SEQ ID NO: 30811 - protein, 30 aa, Homo sapiens
LPSFAPKDLPRRELAVRSGKVAGPAPLFPV

SEQ ID NO: 30812 - protein, 46 aa, Homo sapiens
MTSLLLCIKFDSYFSIKKVCEKSRDLHSMIVFHLSDLDMKIQINHL

SEQ ID NO: 30813 - protein, 59 aa, Homo sapiens
RVTTMAPLRMFLDLPMVWLTALALGTSLTVTRGTTSSSGASPLARCGSCALPWAAPLNL

SEQ ID NO: 30814 - protein, 13 aa, Homo sapiens
MLLPKDAVLRLTD

SEQ ID NO: 30815 - protein, 29 aa, Homo sapiens
LGTHVTLLVMAWQSLICKSFFWIVPNDSL

SEQ ID NO: 30816 - protein, 17 aa, Homo sapiens
RSIRRFARAVRAGVLCL

SEQ ID NO: 30817 - protein, 12 aa, Homo sapiens
LLFESILRGTER

SEQ ID NO: 30818 - protein, 22 aa, Homo sapiens
LLFESILRGTEREPDSPFGSIL

SEQ ID NO: 30819 - protein, 17 aa, Homo sapiens
MCWSRLLLISVIPLRPL

SEQ ID NO: 30820 - protein, 12 aa, Homo sapiens
ISFLLLIVIQKI

SEQ ID NO: 30821 - protein, 537 aa, Homo sapiens
VCICGSDKCSKLISLASEGESEVMAAFKLDFLPEMMVDHCSLNSSPVSKKMNGTLDHPDQPDLDAIKMFVGQVPRTWSEKDLRELFEQYGAVYEINVLRDRSQNPPQSKGCCFVTFYTRKAALEAQNALHNMKVLPGMHHPIQMKPADSEKNNAVEDRKLFIGMISKKCTENDIRVMFSSFGQIEECRILRGPDGLSRGCAFVTFTTRAMAQTAIKAMHQAQTMEGCSSPMVVKFADTQKDKEQKRMAQQLQQQMQQISAASVWGNLAGLNTLGPQYLALYLQLLQQTASSGNLNTLSSLHPMGGLNAMQLQNLAALAAAASAAQNTPSGTNALTTSSSPLSVLTSSAGSSPSSSSSNSVNPIASLGALQTLAGATAGLNVGSLAGMAALNGGLGSSGLSNGTGSTMEALTQAYSGIQQYAAAALPTLYNQNLLTQQSIGAAGSQKEGPEGANLFIYHLPQEFGDQDLLQMFMPFGNVVSAKVFIDKQTNLSKCFGFVSYDNPVSAQAAIQSMNGFQIGMKRLKVQLKRSKNDSKPY

SEQ ID NO: 30822 - protein, 13 aa, Homo sapiens
ILYLKERRNLIKM

SEQ ID NO: 30823 - protein, 21 aa, Homo sapiens
ISPRKWFLSSPVWSLLTTLFS

SEQ ID NO: 30824 - protein, 24 aa, Homo sapiens
VIGLSSLKFSVISQSTLVLVSFHG

SEQ ID NO: 30825 - protein, 13 aa, Homo sapiens
RNGCRQIFVIIAL

SEQ ID NO: 30826 - protein, 86 aa, Homo sapiens
KNLLLMKKRKTVMMMLNLLLNLDLCLVINQRWRQCSLQCANARPCIQILRMRIQMTTMEKNMMWKHMNKDRGTSLHFTPMKKDYPI

SEQ ID NO: 30827 - protein, 18 aa, Homo sapiens
KGPLPMLLVMPLSTVLSW

SEQ ID NO: 30828 - protein, 30 aa, Homo sapiens
LGERAECNGVCITFGKKCESVTTGTAQTGH

SEQ ID NO: 30829 - protein, 37 aa, Homo sapiens
IGPALRSTRGRRQSAPCTLRRRCCPSCTGWARTATWW

SEQ ID NO: 30830 - protein, 41 aa, Homo sapiens
IMGIFFCLSGVGSLLGSSLVALLSLPGGWLHCPKDFAEEEL

SEQ ID NO: 30831 - protein, 10 aa, Homo sapiens
MFLILVLISF

SEQ ID NO: 30832 - protein, 19 aa, Homo sapiens
LYFLFPLPLPGLLVLALWQ

SEQ ID NO: 30833 - protein, 21 aa, Homo sapiens
MTMDHSKNLPLPGLLVLALWQ

SEQ ID NO: 30834 - protein, 25 aa, Homo sapiens
LTQDCALTLLLQLPLPGLLVLALWQ

SEQ ID NO: 30835 - protein, 24 aa, Homo sapiens
RHDLRNLWIFSLVQGLLSCRCWLY

SEQ ID NO: 30836 - protein, 7 aa, Homo sapiens
MILFSLL

SEQ ID NO: 30837 - protein, 40 aa, Homo sapiens
MRRNMMNPLTFMLLGCACLRWLHLNILTRSAKMLHRSTVA

SEQ ID NO: 30838 - protein, 26 aa, Homo sapiens
IAVLTTSVIALSIVLSEFPEKIQRPF

SEQ ID NO: 30839 - protein, 22 aa, Homo sapiens
LMMMMMKMMMMMMTRKLKKKRQ

SEQ ID NO: 30840 - protein, 39 aa, Homo sapiens
VTQSPFKSSITTSLLAWMPLLLIDSTSCERNIRRSSTAE

SEQ ID NO: 30841 - protein, 19 aa, Homo sapiens
MSPGSGLKAVRLTGNGQEQ

SEQ ID NO: 30842 - protein, 25 aa, Homo sapiens
IRVSTPLLSFLATLLQSSTNYPCPG

SEQ ID NO: 30843 - protein, 14 aa, Homo sapiens
KNMLQETLWFPLFL

SEQ ID NO: 30844 - protein, 28 aa, Homo sapiens
ISALQSARARAPHARCVEKSFLSIQTKP

SEQ ID NO: 30845 - protein, 38 aa, Homo sapiens
MIQIIITMMKMKMKMQWMLMVVMMMIKGVMMNTVMMMT

SEQ ID NO: 30846 - protein, 34 aa, Homo sapiens
KLCSTLFTSNYFLIHKLIFAIHNFKNTWTIGFNP

SEQ ID NO: 30847 - protein, 21 aa, Homo sapiens
IHYRLTIFVLWLKVIPLTIPK

SEQ ID NO: 30848 - protein, 16 aa, Homo sapiens
RPPGLLPGAGTVKMPG

SEQ ID NO: 30849 - protein, 26 aa, Homo sapiens
IWPLVIYPLVNWPLMIWPLVNWPLMS

SEQ ID NO: 30850 - protein, 19 aa, Homo sapiens
RLRQENCLNPGGRGCSEPR

SEQ ID NO: 30851 - protein, 16 aa, Homo sapiens
LVPGQFLLCLWCCYLE

SEQ ID NO: 30852 - protein, 92 aa, Homo sapiens
IPAIMSIEKIWAREILDSRGNPTVEVDLYTAKGLFRAAVPSGASTGIYEALELRDGDKQRYLGKGVLKAVDHINSTIAPALISSVRPALCWG

SEQ ID NO: 30853 - protein, 14 aa, Homo sapiens
VQLFLTLLILWYLC

SEQ ID NO: 30854 - protein, 10 aa, Homo sapiens
LLATIFFFFF

SEQ ID NO: 30855 - protein, 17 aa, Homo sapiens
MCQIALLLLLQRIILLI

SEQ ID NO: 30856 - protein, 16 aa, Homo sapiens
KNAFASILSMLGWTTT

SEQ ID NO: 30857 - protein, 19 aa, Homo sapiens
MPTTLHRLRLSGMIGPWNK

SEQ ID NO: 30858 - protein, 16 aa, Homo sapiens
KGGLATKACLLAAAIC

SEQ ID NO: 30859 - protein, 22 aa, Homo sapiens
RKSPILCALVLVPLWTKRCCPL

SEQ ID NO: 30860 - protein, 27 aa, Homo sapiens
LMNFSNIMKLFMMLVMTQVMEESLILL

SEQ ID NO: 30861 - protein, 16 aa, Homo sapiens
MYSKESLTMPSSAQLF

SEQ ID NO: 30862 - protein, 16 aa, Homo sapiens
LNMVLLLLSLILKRTW

SEQ ID NO: 30863 - protein, 15 aa, Homo sapiens
LNMVLLLLSLILKRT

SEQ ID NO: 30864 - protein, 33 aa, Homo sapiens
MIGLVSKTNAIISLKKKEIGIQVNTTVPLNMPT

SEQ ID NO: 30865 - protein, 18 aa, Homo sapiens
ISGESRKLLSYLQLVAIM

SEQ ID NO: 30866 - protein, 19 aa, Homo sapiens
IWFCWCHWWSFFLCRCLEI

SEQ ID NO: 30867 - protein, 83 aa, Homo sapiens
LVPRLPAPRPVMTLRPSLLPLHLLLLLLLSAAVCRAEAGLETESPVRTLQVETLSDRRWSPQNHVPSPLLLETRFTYTTREAW

SEQ ID NO: 30868 - protein, 9 aa, Homo sapiens
ILGISGLFC

SEQ ID NO: 30869 - protein, 55 aa, Homo sapiens
MSLDSGGGAAGSGFGAGRGCESRWSGPRKASSRRRRSPGDGSCVWARRRASRTSS

SEQ ID NO: 30870 - protein, 37 aa, Homo sapiens
IRWGSLIHGIRGCIQILLCCPGWSAVAQSQLTATSTS

SEQ ID NO: 30871 - protein, 25 aa, Homo sapiens
LIRRGSFSPLIKLWWITCFQIASCC

SEQ ID NO: 30872 - protein, 26 aa, Homo sapiens
LQQQCLPSRCNLCFQEHHFIQCPLSL

SEQ ID NO: 30873 - protein, 1903 aa, Homo sapiens
IVMATFRNNHMKTKASVRKSFSEDVFQSVKSLLQSQKELCSVTAEDCLQQDEHANLTEVTFLGFNEETDAAHIQDLAAVSLELPDILNSLHFCSLNENEIICMKNINKPLDISSDPLNQSHPSGMLCVMRVSPTSPRLRIDFIFSLLSKYATGIRYTLDTFLHQKHQLETTDEDDDDTNQSVSSIEDDFVTAFEHLEEEETSKPYNDGMNITVLRSQCDAASQTVTGHHLETHDLKILISSGQQKSLAKPSTSSVNVLGHKELPSVKTSVTTSISEPWTQRSFYRSSNASDKDSDLQKTFFSSSPAYSSESECSSPSPVIFLDEEGYQKSLKAKLELPKIPVMKDDIEDSDSEVSEFFDSFDQFDELEQTLETCLFNKDPVIGKSSQRKGHKHGKSCMNPQKFKFDRPALPANVRKPTPRKPESPYGNLCDAPDSPRPVKASREDSGLFSPIRSSAFSPLGGCTPAECFCQTDIGGDRIHENHDSVYYTYEDYAKSISCEVLGSVLRTHHTNTLSNINSIKHGENKTVTFKHGNLDQKNKSKNKSLMIKDSIQKFAADLVEKSFGSAFKDLQKGVSSCTNALYHLAIKLTSSVLQMAFDELRRQRAFSLKERAISGLANFLVSEALSNALKDLQYVKKQIFTNTVARFAADLAEELVFEGIMEVCQFSYPQTPASPQCGSFDFEDKVVKLYAKDLSESVIQEAFIELSQVDVTFTTKAAVSVSTDNIKYVSAESVVPSTQAVTFSPSFHNQAIMVTKPVQEYKKEYTVQQALFCTSGIVTSIPVPLAGSALLPYHISSTACQAKAHLSSDDSNSNGDSAQVHIATKNREEKAACLRNICLPSEHNPGNQNDFKPTNDDIEMQSSSKLPNDPAIISNFSAAVVHTIVNETLESMTSLEVTKMVDERTDYLTKSLKEKTPPFSHCDQAVLQCSEASSNKDMFADRLSKSIIKHSIDKSKSVIPNIDKNAVYKESLPVSGEESQLTPEKSPKFPDSQNQLTHCSLSAAKDCVPECKVSMVHGSSLETLPSCPAVTGQKSDLKESAKDQPLKKHNLNSTSLEALSFGQENPFPHSHTFSSTALTCVDGLHVEDKQKVRDRNVIPDTPPSTPLVPSRASSEWDIKKLTKKLKGELAKEFAPATPPSTPHNSSVGSLSENEQNTIEKEEFMLKLMRSLSEEVESSESGELPEVDVKSEHSGKKVQFAEALATHILSLATEMAASHLDNKIIQEPKVKNPCLNVQSQRSVSPTFLNPSDENLKTLCNFAGDLAAEVITEAEKIAKVRNCMLFKQKKNSCYADGDEDYKVEEKLDIEAVVHPREVDPFILSLPPSSCMSGLMYKYPSCESVTDEYAGHLIQILKQEGGNSELIMDQYANRLAYRSVKSGLQEAAKTTKVQCNSRMFPVPSSQVKTNKELLMFSNKEHHQEADKKRQSKRNEGYFCKNQTCERTLDPYRNEVSQLYSFSTSLVHSITKDAKEELTASLVGLPKSLTDSCLFEKSGYEEDNECHVTPELPKSLQPSSQNHRFYHSTGSLNGYGCGDNVVQAVEQYAKKVVDDTLELTLGSTVFRVSETTKSADRVTYAEKLSPLTGQACRYCDLKELHNCTGNSSQHFFRQGSLASSKPASNPKFSSRYQKSRIFHLSVPQIHVNLDKKAVLAEKIVAEAIEKAERELSSTSLAADSGIGQEGASFAESLATETMTAAVTNVGHAVSSSKEIEDFQSTESVSSQQMNLSIGDDSTGSWSNLSFEDEHQDESSSFHHLSESNGNSSSWSSLGLEGDLYEDNLSFPTSDSDGPDDKDEEHEDEVEGLGQDGKTLLITNIDMEPCTVDPQLRIILQWLIASEAEVAELYFHDSANKEFMLLSKQLQEKGWKVGDLLQAVLQYYEVMEKASSEERCKSLFDWLLENA

SEQ ID NO: 30874 - protein, 12 aa, Homo sapiens
IINITGLWIICL

SEQ ID NO: 30875 - protein, 13 aa, Homo sapiens
LLPVPGSSSPRAS

SEQ ID NO: 30876 - protein, 57 aa, Homo sapiens
ISSFGPLFYAIMYVIESARQRPPKRKYLSSGRKSVFQKLYDLYIEECEKEPEVKSIL

SEQ ID NO: 30877 - protein, 509 aa, Homo sapiens
ISSFGPLFYAIMYVIESARQRPPKRKYLSSGRKSVFQKLYDLYIEECEKEPEVKKLRRNVNLLEKLVMQETLSCLVVNLYPGNEGYSLMLRGKNGSDSETIRLPYEEGELLEYLDAEELPPILVDLLEKSQVNIFHCGCVIAEIRDYRQSSNMKSPGYQSRHILLRPTMQTLICDVHSITSDNHKWTQEDKLLLESQLILATAEPLCLDPSIAVTCTANRLLYNKQKMNTRPMKRCFKRYSRSSLNRQQDLSHCPPPPQLRLLDFLQKRKERKAGQHYDLKISKAGNCVDMWKRSPCNLAIPSEVDDVKDDYVFECEAGTQYQKTKLTILQSLGDPLYYGKIQPCKADEESDSQMSPSHSSTDDHSNWFIIGSKTDAERVVNQYQELVQNEAKCPVKMSHSSSGSASLSQVSPGKETDQTETVSVQSSVLGKGVKHRPPPIKLPSSSGNSSSGNYFTPQQTSSFLKSPTPPPSSKPSSIPRKSSVDLNQVSMLSPAALSPASSSQRHES

SEQ ID NO: 30878 - protein, 12 aa, Homo sapiens
MQKNYLLFWLIS

SEQ ID NO: 30879 - protein, 22 aa, Homo sapiens
LVGMHRLSPASLWAALKKGTNN

SEQ ID NO: 30880 - protein, 27 aa, Homo sapiens
LLLYGKNMAKLMQDGFILIQPLCLWKF

SEQ ID NO: 30881 - protein, 11 aa, Homo sapiens
ITATLTFPTRS

SEQ ID NO: 30882 - protein, 26 aa, Homo sapiens
MNILTVVRIGVVFIPLEMAAVCKIDM

SEQ ID NO: 30883 - protein, 189 aa, Homo sapiens
IMIIYRDLISHDEMFSDIYKIREIADGLCLEVEGKMVSRTEGNIDDSLIGGNASAEGPEGEGTESTVITGVDIVMNHHLQETSFTKEAYKKYIKDYMKSIKGKLEEQRPERVKPFMTGAAEQIKHILANFKNYQFFIGENMNPDGMVALLDYREDGVTPYMIFFKDGLEMEKCVSTRKWVKINNVKKTF

SEQ ID NO: 30884 - protein, 345 aa, Homo sapiens
TASLSNAVKILLRWVTRYSCPRAFVTGMPKRGKKGAVAEDGDELRTEPEAKKSKTAAKKNDKEAAGEGPALYEDPPDQKTSPSGKPATLKICSWNVDGLRAWIKKKGLDWVKEEAPDILCLQETKCSENKLPAELQELPGLSHQYWSAPSDKEGYSGVGLLSRQCPLKVSYGIGDEEHDQEGRVIVAEFDSFVLVTAYVPNAGRGLVRLEYRQRWDEAFRKFLKGLASRKPLVLCGDLNVAHEEIDLRNPKGNKKNAGFTPQERQGFGELLQAVPLADSFRHLYPNTPYAYTFWTYMMNARSKNVGWRLDYFLLSHSLLPALCDSKIRSKALGSDHCPITLYLAL

SEQ ID NO: 30885 - protein, 20 aa, Homo sapiens
TLLGGVFSPALAGFMISLRL

SEQ ID NO: 30886 - protein, 14 aa, Homo sapiens
RRSRALLVLLPPLL

SEQ ID NO: 30887 - protein, 8 aa, Homo sapiens
LLLWVLFL

SEQ ID NO: 30888 - protein, 1074 aa, Homo sapiens
IEQNSAMAPRKRGGRGISFIFCCFRNNDHPEITYRLRNDSNFALQTMEPALPMPPVEELDVMFSELVDELDLTDKHREAMFALPAEKKWQIYCSKKKDQEENKGATSWPEFYIDQLNSMAARKSLLALEKEEEEERSKTIESLKTALRTKPMRFVTRFIDLDGLSCILNFLKTMDYETSESRIHTSLIGCIKALMNNSQGRAHVLAHSESINVIAQSLSTENIKTKVAVLEILGAVCLVPGGHKKVLQAMLHYQKYASERTRFQTLINDLDKSTGRYRDEVSLKTAIMSFINAVLSQGAGVESLDFRLHLRYEFLMLGIQPVIDKLREHENSTLDRHLDFFEMLRNEDELEFAKRFELVHIDTKSATQMFELTRKRLTHSEAYPHFMSILHHCLQMPYKRSGNTVQYWLLLDRIIQQIVIQNDKGQDPDSTPLENFNIKNVVRMLVNENEVKQWKEQAEKMRKEHNELQQKLEKKERECDAKTQEKEEMMQTLNKMKEKLEKETTEHKQVKQQVADLTAQLHELSRRAVCASIPGGPSPGAPGGPFPSSVPGSLLPPPPPPPLPGGMLPPPPPPLPPGGPPPPPGPPPLGAIMPPPGAPMGLALKKKSIPQPTNALKSFNWSKLPENKLEGTVWTEIDDTKVFKILDLEDLERTFSAYQRQQKEADAIDDTLSSKLKVKELSVIDGRRAQNCNILLSRLKLSNDEIKRAILTMDEQEDLPKDMLEQLLKFVPEKSDIDLLEEHKHELDRMAKADRFLFEMSRINHYQQRLQSLYFKKKFAERVAEVKPKVEAIRSGSEEVFRSGALKQLLEVVLAFGNYMNKGQRGNAYGFKISSLNKIADTKSSIDKNITLLHYLITIVENKYPSVLNLNEELRDIPQAAKVNMTELDKEISTLRSGLKAVETELEYQKSQPPQPGDKFVSVVSQFITVASFSFSDVEDLLAEAKDLFTKAVKHFGEEAGKIQPDEFFGIFDQFLQAVSEAKQENENMRKKKEEEERRARMEAQLKEQRERERKMRKAKENSEESGEFDDLVSALRSGEVFDKDLSKLKRNRKRITNQMTDSSRERPITKLNF

SEQ ID NO: 30889 - protein, 10 aa, Homo sapiens
MIICVRIVIM

SEQ ID NO: 30890 - protein, 15 aa, Homo sapiens
KFFMSLLISCHFHIM

SEQ ID NO: 30891 - protein, 12 aa, Homo sapiens
MCCIHWLALWVL

SEQ ID NO: 30892 - protein, 10 aa, Homo sapiens
VLPLFSHGHK

SEQ ID NO: 30893 - protein, 28 aa, Homo sapiens
IPKKEAPPASVRCRMAPLLMRWTSREDK

SEQ ID NO: 30894 - protein, 13 aa, Homo sapiens
VPNMNGIFFCLMA

SEQ ID NO: 30895 - protein, 29 aa, Homo sapiens
LEFYYPWMLLLTWKRLRNNLLICTLLNVP

SEQ ID NO: 30896 - protein, 8 aa, Homo sapiens
ILLHKSDV

SEQ ID NO: 30897 - protein, 17 aa, Homo sapiens
MLLCRWTFLMLLVSGIK

SEQ ID NO: 30898 - protein, 46 aa, Homo sapiens
IRVLEMAAYWTHGFSSDLHLLLALLFMQEKSPEFTVCQNNFLTNIY

SEQ ID NO: 30899 - protein, 490 aa, Homo sapiens
RMTVVGNPRSWSCQWLPILILLLGTGHGPGVEGVTHYKAGDPVILYVNKVGPYHNPQETYHYYQLPVCCPEKIRHKSLSLGEVLDGDRMAESLYEIRFRENVEKRILCHMQLSSAQVEQLRQAIEELYYFEFVVDDLPIRGFVGYMEESGFLPHSHKIGLWTHLDFHLEFHGDRIIFANVSVRDVKPHSLDGLRPDEFLGLTHTYSVRWSETSVERRSDRRRGDDGGFFPRTLEIHWLSIINSMVLVFLLVGFVAVILMRVLRNDLARYNLDEETTSAGSGDDFDQGDNGWKIIHTDVFRFPPYRGLLCAVLGVGAQFLALGTGIIVMALLGMFNVHRHGAINSAAILLYALTCCISGYVSSHFYRQIGGERWVWNIILTTSLFSVPFFLTWSVVNSVHWANGSTQALPATTILLLLTVWLLVGFPLTVIGGIFGKNNASPFDAPCRTKNIAREIPPQPWYKSTVIHMTVGGFLPFRYPPFIPWLLLSGS

SEQ ID NO: 30900 - protein, 10 aa, Homo sapiens
MIQRTHCICK

SEQ ID NO: 30901 - protein, 38 aa, Homo sapiens
LEWVSYISSSGSTIYYADSVKGRFTISRDKPRTHCICK

SEQ ID NO: 30902 - protein, 20 aa, Homo sapiens
MKNTFKNQVRSLTSLLCLPL

SEQ ID NO: 30903 - protein, 14 aa, Homo sapiens
IGVLYLVLRTWALV

SEQ ID NO: 30904 - protein, 10 aa, Homo sapiens
IVKTSIFIWL

SEQ ID NO: 30905 - protein, 14 aa, Homo sapiens
LFLAPFFSMLLPFR

SEQ ID NO: 30906 - protein, 33 aa, Homo sapiens
MTTLRRSVSWGLAMAVWCSRSPTSLLAWSWPES

SEQ ID NO: 30907 - protein, 9 aa, Homo sapiens
RFYRQPSLQ

SEQ ID NO: 30908 - protein, 28 aa, Homo sapiens
VWWRAPVIPATREAEVGELLEPRRRRLQ

SEQ ID NO: 30909 - protein, 16 aa, Homo sapiens
IGLLVWTYYMDQSLSL

SEQ ID NO: 30910 - protein, 9 aa, Homo sapiens
LVFLSLVLH

SEQ ID NO: 30911 - protein, 11 aa, Homo sapiens
ILGIRLFGLFY

SEQ ID NO: 30912 - protein, 16 aa, Homo sapiens
LLVLMLASKAVFIWNL

SEQ ID NO: 30913 - protein, 25 aa, Homo sapiens
MLFLIGVLILIINPNVIRFSSLIHR

SEQ ID NO: 30914 - protein, 12 aa, Homo sapiens
LMSLLLSVTVQL

SEQ ID NO: 30915 - protein, 13 aa, Homo sapiens
VKGRFLLLMAPCA

SEQ ID NO: 30916 - protein, 40 aa, Homo sapiens
KNSEKIQIQRNAVLGMIVEKILILSERLVLVYLIVLNKSP

SEQ ID NO: 30917 - protein, 23 aa, Homo sapiens
VSLYMIRSSSLTLLMMLKIILET

SEQ ID NO: 30918 - protein, 23 aa, Homo sapiens
VFADSGGRNFFSSLTLLVFTVWN

SEQ ID NO: 30919 - protein, 20 aa, Homo sapiens
ILLTGRVDQGGRVETRWLQV

SEQ ID NO: 30920 - protein, 15 aa, Homo sapiens
KNKVDKMNLPIATKK

SEQ ID NO: 30921 - protein, 25 aa, Homo sapiens
IALWRLLLLEIYISEGTHSTEEDSK

SEQ ID NO: 30922 - protein, 11 aa, Homo sapiens
VVWIISVLCTP

SEQ ID NO: 30923 - protein, 23 aa, Homo sapiens
RGSHLAKMSLCLLYSRLLFDQIL

SEQ ID NO: 30924 - protein, 14 aa, Homo sapiens
KVFQRALLLLLTTL

SEQ ID NO: 30925 - protein, 12 aa, Homo sapiens
ITTDILVFLGIL

SEQ ID NO: 30926 - protein, 31 aa, Homo sapiens
RRRRKTSLWPPATSCRWPSCARCPWPIRSRS

SEQ ID NO: 30927 - protein, 11 aa, Homo sapiens
MVPLMRVSSRR

SEQ ID NO: 30928 - protein, 21 aa, Homo sapiens
LCLKFSIFVGCFLYMQKVISP

SEQ ID NO: 30929 - protein, 15 aa, Homo sapiens
MIWSILITCCCVLWT

SEQ ID NO: 30930 - protein, 17 aa, Homo sapiens
RCSQAAPNTPGPAPSHS

SEQ ID NO: 30931 - protein, 35 aa, Homo sapiens
IFSGRVPGSSSSFLLFLLLLHLRLLGDHCPLSAAE

SEQ ID NO: 30932 - protein, 7 aa, Homo sapiens
LILQVQK

SEQ ID NO: 30933 - protein, 13 aa, Homo sapiens
IVVVVLLLLWLQF

SEQ ID NO: 30934 - protein, 9 aa, Homo sapiens
IFDFCFILI

SEQ ID NO: 30935 - protein, 19 aa, Homo sapiens
LLWTVLLLTWMSSIQTPML

SEQ ID NO: 30936 - protein, 27 aa, Homo sapiens
IQLVVSLWMEGMMVTLLSKRGLCLRQN

SEQ ID NO: 30937 - protein, 27 aa, Homo sapiens
MPTATQTPGSYESAIGRLWCLGPGRKK

SEQ ID NO: 30938 - protein, 10 aa, Homo sapiens
LIVWTMLIKF

SEQ ID NO: 30939 - protein, 16 aa, Homo sapiens
MGNHAMILSGNILYLL

SEQ ID NO: 30940 - protein, 13 aa, Homo sapiens
LPSWVWFLWCFCK

SEQ ID NO: 30941 - protein, 12 aa, Homo sapiens
MPLIIHCTIRRV

SEQ ID NO: 30942 - protein, 15 aa, Homo sapiens
RTIVSWLAVLFRRLQ

SEQ ID NO: 30943 - protein, 3359 aa, Homo sapiens
MGRHVATSCHVAWLLVLISGCWGQVNRLPFFTNHFFDTYLLISEDTPVGSSVTQLLAQDMDNDPLVFGVSGEEASRFFAVEPDTGVVWLRQPLDRETKSEFTVEFSVSDHQGVITRKVNIQVGDVNDNAPTFHNQPYSVRIPEVGATGNTPVGTPIFIVNATDPDLGAGGSVLYSFQPPSQFFAIDSARGIVTVIRELDYETTQAYQLTVNATDQDKTRPLSTLANLAIIITDVQDMDPIFINLPYSTNIYEHSPPGTTVRIITAIDQDKGRPRGIGYTIVSGNTNSIFALDYISGVLTLNGLLDRENPLYSHGFILTVKGTELNDDRTPSDATVTTTFNILVIDINDNAPEFNSSEYSVAITELAQVGFALPLFIQVVDKDENLGLNSMFEVYLVGNNSHHFIISPTSVQGKADIRIRVAIPLDYETVDRYDFDLFANESVPDHVGYAKVKITLINENDNRPIFSQPLYNISLYENVTVGTSVLTVLATDNDAGTFGEVSYFFSDDPDRFSLDKDTGLIMLIARLDYELIQRFTLTIIARDGGGEETTGRVRINVLDVNDNVPTFQKDAYVGALRENEPSVTQLVRLRATDEDSPPNNQITYSIVSASAFGSYFDISLYEGYGVISVSRPLDYEQISNGLIYLTVMAMDAGNPPLNSTVPVTIEVFDENDNPPTFSKPAYFVSVVENIMAGATVLFLNATDLDRSREYGQESIIYSLEGSTQFRINARSGEITTTSLLDRETKSEYILIVRAVDGGVGHNQKTGIATVNITLLDINDNHPTWKDAPYYINLVEMTPPDSDVTTVVAVDPDLGENGTLVYSIQPPNKFYSLNSTTGKIRTTHAMLDRENPDPHEAELMRKIVVSVTDCGRPPLKATSSATVFVNLLDLNDNDPTFQNLPFVAEVLEGIPAGVSIYQVVAIDLDEGLNGLVSYRMPVGMPRMDFLINSSSGVVVTTTELDRERIAEYQLRVVASDAGTPTKSSTSTLTIHVLDVNDETPTFFPAVYNVSVSEDVPREFRVVWLNCTDNDVGLNAELSYFITGGNVDGKFSVGYRDAVVRTVVGLDRETTAAYMLILEAIDNGPVGKRHTGTATVFVTVLDVNDNRPIFLQSSYEASVPEDIPEGHSILQLKATDADEGEFGRVWYRILHGNHGNNFRIHVSNGLLMRGPRPLDRERNSSHVLIVEAYNHDLGPMRSSVRVIVYVEDINDEAPVFTQQQYSRLGLRETAGIGTSVIVVQATDRDSGDGGLVNYRILSGAEGKFEIDESTGLIITVNYLDYETKTSYMMNVSATDQAPPFNQGFCSVYITLLNELDEAVQFSNASYEAAILENLALGTEIVRVQAYSIDNLNQITYRFNAYTSTQAKALFKIDAITGVITVQGLVDREKGDFYTLTVVADDGGPKVDSTVKVYITVLDENDNSPRFDFTSDSAVSIPEDCPVGQRVATVKAWDPDAGSNGQVVFSLASGNIAGAFEIVTTNDSIGEVFVARPLDREELDHYILQVVASDRGTPPRKKDHILQVTILDINDNPPVIESPFGYNVSVNENVGGGTAVVQVRATDRDIGINSVLSYYITEGNKDMAFRMDRISGEIATRPAPPDRERQSFYHLVATVEDEGTPTLSATTHVYVTIVDENDNAPMFQQPHYEVLLDEGPDTLNTSLITIQALDLDEGPNGTVTYAIVAGNIVNTFRIDRHMGVITAAKELDYEISHGRYTLIVTATDQCPILSHRLTSTTTVLVNVNDINDNVPTFPRDYEGPFEVTEGQPGPRVWTFLAHDRDSGPNGQVEYSIMDGDPLGEFVISPVEGVLRVRKDVELDRETIAFYNLTICARDRGMPPLSSTMLVGIRVLDINDNDPVLLNLPMNITISENSPVSSFVAHVLASDADSGCNARLTFNITAGNRERAFFINATTGIVTVNRPLDRERIPEYKLTISVKDNPENPRIARRDYDLLLIFLSDENDNHPLFTKSTYQAEVMENSPAGTPLTVLNGPILALDADQDIYAVVTYQLLGAQSGLFDINSSTGVVTVRSGVIIDREAFSPPILELLLLAEDIGLLNSTAHLLITILDDNDNRPTFSPATLTVHLLENCPPGFSVLQVTATDEDSGLNGELVYRIEAGAQDRFLIHLVTGVIRVGNATIDREEQESYRLTVVATDRGTVPLSGTAIVTILIDDINDSRPEFLNPIQTVSVLESAEPGTVIANITAIDHDLNPKLEYHIVGIVAKDDTDRLVPNQEDAFAVNINTGSVMVKSPMNRELVATYEVTLSVIDNASDLPERSVSVPNAKLTVNVLDVNDNTPQFKPFGITYYMERILEGATPGTTLIAVAAVDPDKGLNGLVTYTLLDLVPPGYVQLEDSSAGKVIANRTVDYEEVHWLNFTVRASDNGSPPRAAEIPVYLEIVDINDNNPIFDQPSYQEAVFEDVPVGTIILTVTATDADSGNFALIEYSLGDGESKFAINPTTGDIYVLSSLDREKKDHYILTALAKDNPGDVASNRRENSVQVVIQVLDVNDCRPQFSKPQFSTSVYENEPAGTSVITMMATDQDEGPNGELTYSLEGPGVEAFHVDMDSGLVTTQRPLQSYEKFSLTVVATDGGEPPLWGTTMLLVEVIDVNDNRPVFVRPPNGTILHIREEIPLRSNVYEVYATDKDEGLNGAVRYSFLKTAGNRDWEFFIIDPISGLIQTAQRLDRESQAVYSLILVASDLGQPVPYETMQPLQVALEDIDDNEPLFVRPPKGSPQYQLLTVPEHSPRGTLVGNVTGAVDADEGPNAIVYYFIAAGNEEKNFHLQPDGCLLVLRDLDREREAIFSFIVKASSNRSWTPPRGPSPTLDLVADLTLQEVRVVLEDINDQPPRFTKAEYTAGVATDAKVGSELIQVLALDADIGNNSLVFYSILAIHYFRALANDSEDVGQVFTMGSMDGILRTFDLFMAYSPGYFVVDIVARDLAGHNDTAIIGIYILRDDQRVKIVINEIPDRVRGFEEEFIHLLSNITGAIVNTDNVQFHVDKKGRVNFAQTELLIHVVNRDTNRILDVDRVIQMIDENKEQLRNLFRNYNVLDVQPAISVRLPDDMSALQMAIIVLAILLFLAAMLFVLMNWYYRTVHKRKLKAIVAGSAGNRGFIDIMDMPNTNKYSFDGANPVWLDPFCRNLELAAQAEHEDDLPENLSEIADLWNSPTRTHGTFGREPAAVKPDDDRYLRAAIQEYDNIAKLGQIIREGPIKGSLLKVVLEDYLRLKKLFAQRMVQKASSCHSSISELIQTELDEEPGDHSPGQGSLRFRHKPPVELKGPDGIHVVHGSTGTLLATDLNSLPEEDQKGLGRSLETLTAAEATAFERNARTESAKSTPLHKLRDVIMETPLEITEL

SEQ ID NO: 30944 - protein, 359 aa, Homo sapiens
ISLHRRPGPTCSMESPASSQPASMPQSKGKSKRKKDLRISCMSKPPAPNPTPPRNLDSRTFITIGDRNFEVEADDLVTISELGRGAYGVVEKVRHAQSGTIMAVKRIRATVNSQEQKRLLMDLDINMRTVDCFYTVTFYGALFREGDVWICMELMDTSLDKFYRKVLDKNMTIPEDILGEIAVSIVRALEHLHSKLSVIHRDVKPSNVLINKEGHVKMCDFGISGYLVDSVAKTMDAGCKPYMAPERINPELNQKGYNVKSDVWSLGITMIEMAILRFPYESWGTPFQQLKQVVEEPSPQLPADRFSPEFVDFTAQCLRKNPAERMSYLELMEHPFFTLHKTKKTDIAAFVKEILGEDS

SEQ ID NO: 30945 - protein, 21 aa, Homo sapiens
IFFVVYFFLSQRTKTSNGAAS

SEQ ID NO: 30946 - protein, 19 aa, Homo sapiens
LKIAISRYVTLFSRISLIL

SEQ ID NO: 30947 - protein, 14 aa, Homo sapiens
MTFFGCLWLCRAVW

SEQ ID NO: 30948 - protein, 21 aa, Homo sapiens
ISSQHCSGSGRTERICYRGGC

SEQ ID NO: 30949 - protein, 23 aa, Homo sapiens
RRRKKMMRSQILTTSLWMMMDSL

SEQ ID NO: 30950 - protein, 12 aa, Homo sapiens
LRKILDLTGRAS

SEQ ID NO: 30951 - protein, 718 aa, Homo sapiens
IAIMVQKYQSPVRVYKYPFELIMAAYERRFPTCPLIPMFVGSDTVNEFKSEDGAIHVIERRCKLDVDAPRLLKKIAGVDYVYFVQKNSLNSRERTLHIEAYNETFSNRVIINEHCCYTVHPENEDWTCFEQSASLDIKSFFGFESTVEKIAMKQYTSNIKKGKEIIEYYLRQLEEEGITFVPRWSPPSITTSSETSSSSSKKQAASMAVVIPEAALKEGLSGDALSSPSAPEPVVGTPDDKLDADYIKRYLGDLTPLQESCLIRLRQWLQETHKGKIPKDEHILRFLRARDFNIDKAREIMCQSLTWRKQHQVDYILETWTPPQVLQDYYAGGWHHHDKDGRPLYVLRLGQMDTKGLVRALGEEALLRYVLSINEEGLRRCEENTKVFGRPISSWTCLVDLEGLNMRHLWRPGVKALLRIIEVVEANYPETLGRLLILRAPRVFPVLWTLVSPFIDDNTRRKFLIYAGNDYQGPGGLLDYIDKEIIPDFLSGECMCEVPEGGLVPKSLYRTAEELENEDLKLWTETIYQSASVFKGAPHEILIQIVDASSVITWDFDVCKGDIVFNIYHSKRSPQPPKKDSLGAHSITSPGGNNVQLIDKVWQLGRDYSMVESPLICKEGESVQGSHVTRWPGFYILQWKFHSMPACAASSLPRVDDVLASLQVSSHKCKVMYYTEVIGSEDFRGSMTSLESSHSGFSQLSAATTSSSQSHSSSMISR

SEQ ID NO: 30952 - protein, 722 aa, Homo sapiens
IAIMVQKYQSPVRVYKYPFELIMAAYERRFPTCPLIPMFVGSDTVNEFKSEDGAIHVIERRCKLDVDAPRLLKKIAGVDYVYFVQKNSLNSRERTLHIEAYNETFSNRVIINEHCCYTVHPENEDWTCFEQSASLDIKSFFGFESTVEKIAMKQYTSNIKKGKEIIEYYLRQLEEEGITFVPRWSPPSITTSSETSSSSSKKQAASMAVVIPEAALKEGLSGDALSSPSAPEPVVGTPDDKLDADYIKRYLGDLTPLQESCLIRLRQWLQETHKGKIPKDEHILRFLRARDFNIDKAREIMCQSLTWRKQHQVDYILETWTPPQVLQDYYAGGWHHHDKDGRPLYVLRLGQMDTKGLVRALGEEALLRYVLSINEEGLRRCEENTKVFGRPISSWTCLVDLEGLNMRHLWRPGVKALLRIIEVVEANYPETLGRLLILRAPRVFPVLWTLVSPFIDDNTRRKFLIYAGNDYQGPGGLLDYIDKEIIPDFLSGECMCEVPEGGLVPKSLYRTAEELENEDLKLWTETIYQSASVFKGAPHEILIQIVDASSVITWDFDVCKGDIVFNIYHSKRSPQPPKKDSLGAHSITSPGGNNVQLIDKVWQLGRDYSMVESPLICKEGESVQGSHVTRWPGFYILQWKFHSMPACAASSLPRVDDVLASLQVSSHKCKVMYYTEVIGSEDFRGSMTSLESSHSGFSQLSAATTSSSQSHSSSMISRWRFC

SEQ ID NO: 30953 - protein, 13 aa, Homo sapiens
IVLVLPQLLLVAP

SEQ ID NO: 30954 - protein, 1685 aa, Homo sapiens
ITPDSAMAQILPIRFQEHLQLQNLGINPANIGFSTLTMESDKFICIREKVGEQAQVVIIDMNDPSNPIRRPISADSAIMNPASKVIALKGIKESGKTLQIFNIEMKSKMKAHTMTDDVTFWKWISLNTVALVTDNAVYHWSMEGESQPVKMFDRHSSLAGCQIINYRTDAKQKWLLLTGISAQQNRVVGAMQLYSVDRKVSQPIEGHAASFAQFKMEGNAEESTLFCFAVRGQAGGKLHIIEVGTPPTGNQPFPKKAVDVFFPPEAQNDFPVAMQISEKHDVVFLITKYGYIHLYDLETGTCIYMNRISGETIFVTAPHEATAGIIGVNRKGQVLSVCVEEENIIPYITNVLQNPDLALRMAVRNNLAGAEELFARKFNALFAQGNYSEAAKVAANAPKGILRTPDTIRRFQSVPAQPGQTSPLLQYFGILLDQGQLNKYESLELCRPVLQQGRKQLLEKWLKEDKLECSEELGDLVKSVDPTLALSVYLRANVPNKVIQCFAETGQVQKIVLYAKKVGYTPDWIFLLRNVMRISPDQGQQFAQMLVQDEEPLADITQIVDVFMEYNLIQQCTAFLLDALKNNRPSEGPLQTRLLEMNLMHAPQVADAILGNQMFTHYDRAHIAQLCEKAGLLQRALEHFTDLYDIKRAVVHTHLLNPEWLVNYFGSLSVEDSLECLRAMLSANIRQNLQICVQVASKYHEQLSTQSLIELFESFKSFEGLFYFLGSIVNFSQDPDVHFKYIQAACKTGQIKEVERICRESNCYDPERVKNFLKEAKLTDQLPLIIVCDRFDFVHDLVLYLYRNNLQKYIEIYVQKVNPSRLPVVIGGLLDVDCSEDVIKNLILVVRGQFSTDELVAEVEKRNRLKLLLPWLEARIHEGCEEPATHNALAKIYIDSNNNPERFLRENPYYDSRVVGKYCEKRDPHLACVAYERGQCDLELINVCNENSLFKSLSRYLVRRKDPELWGSVLLESNPYRRPLIDQVVQTALSETQDPEEVSVTVKAFMTADLPNELIELLEKIVLDNSVFSEHRNLQNLLILTAIKADRTRVMEYINRLDNYDAPDIANIAISNELFEEAFAIFRKFDVNTSAVQVLIEHIGNLDRAYEFAERCNEPAVWSQLAKAQLQKGMVKEAIDSYIKADDPSSYMEVVQAANTSGNWEELVKYLQMARKKARESYVETELIFALAKTNRLAELEEFINGPNNAHIQQVGDRCYDEKMYDAAKLLYNNVSNFGRLASTLVHLGEYQAAVDGARKANSTRTWKEVCFACVDGKEFRLAQMCGLHIVVHADELEELINYYQDRGYFEELITMLEAALGLERAHMGMFTELAILYSKFKPQKMREHLELFWSRVNIPKVLRAAEQAHLWAELVFLYDKYEEYDNAIITMMNHPTDAWKEGQFKDIITKVANVELYYRAIQFYLEFKPLLLNDLLMVLSPRLDHTRAVNYFSKVKQLPLVKPYLRSVQNHNNKSVNESLNNLFITEEDYQALRTSIDAYDNFDNISLAQRLEKHELIEFRRIAAYLFKGNNRWKQSVELCKKDSLYKDAMQYASESKDTELAEELLQWFLQEEKRECFGACLFTCYDLLRPDVVLETAWRHNIMDFAMPYFIQVMKEYLTKVDKLDASESLRKEEEQATETQPIVYGQPQLMLTAGPSVAVPPQAPFGYGYTAPPYGQPQPGFGYSM

SEQ ID NO: 30955 - protein, 11 aa, Homo sapiens
ILSGIISIVCY

SEQ ID NO: 30956 - protein, 15 aa, Homo sapiens
RRRQAKNDSGISANG

SEQ ID NO: 30957 - protein, 11 aa, Homo sapiens
VGSCLGVLTIL

SEQ ID NO: 30958 - protein, 29 aa, Homo sapiens
LILSLFLTLFLKQRKGTSCQFQDIIEVSN

SEQ ID NO: 30959 - protein, 28 aa, Homo sapiens
LSSMMSWAWVAWKWSLIMLKMLPNGAVS

SEQ ID NO: 30960 - protein, 12 aa, Homo sapiens
MHHHARLIFLCF

SEQ ID NO: 30961 - protein, 11 aa, Homo sapiens
MIQLDLLDRKV

SEQ ID NO: 30962 - protein, 18 aa, Homo sapiens
LLLYSRTLFFKDQDYILN

SEQ ID NO: 30963 - protein, 41 aa, Homo sapiens
IQLSNFLFLVWLLWCAKLRTLLFCHTATPYRCGRCEICHQL

SEQ ID NO: 30964 - protein, 12 aa, Homo sapiens
RHMHILLLQLHL

SEQ ID NO: 30965 - protein, 11 aa, Homo sapiens
VMPTLLIFHLI

SEQ ID NO: 30966 - protein, 16 aa, Homo sapiens
MMTLHSMILLVVGTEI

SEQ ID NO: 30967 - protein, 14 aa, Homo sapiens
RDLLAWALVTCSLL

SEQ ID NO: 30968 - protein, 99 aa, Homo sapiens
INWQSLLVLLQHLAVRLRMRTAWTFPWTFLHPLAQAREGEGATYPRSLCRFFGIGCMSTVTMPILQSKKKRCCPSKHTCLRYRSVTGSSTPAAGSSLTC

SEQ ID NO: 30969 - protein, 23 aa, Homo sapiens
IVIFPILVLGASKLSSLLDNQPE

SEQ ID NO: 30970 - protein, 15 aa, Homo sapiens
MTMRQIVSFFFFSFY

SEQ ID NO: 30971 - protein, 16 aa, Homo sapiens
LRFRRCWMTITILFSV

SEQ ID NO: 30972 - protein, 17 aa, Homo sapiens
LPHTKPIKLNCQKTLKS

SEQ ID NO: 30973 - protein, 13 aa, Homo sapiens
MTFLGHLWIYREN

SEQ ID NO: 30974 - protein, 14 aa, Homo sapiens
MCSPPGMRLSSSLW

SEQ ID NO: 30975 - protein, 35 aa, Homo sapiens
LLLVLSYTQRVKTLPAQDRPSNGCVFKDCGSFAER

SEQ ID NO: 30976 - protein, 38 aa, Homo sapiens
ISETARGMNIRVFPAGDAAESPQQGASKGLAVDGTRIL

SEQ ID NO: 30977 - protein, 20 aa, Homo sapiens
LEQCGRMWNLALWLCSLGTP

SEQ ID NO: 30978 - protein, 18 aa, Homo sapiens
RTRAPRPGLPRWLGGLWL

SEQ ID NO: 30979 - protein, 14 aa, Homo sapiens
IVQIALVFNLLLLD

SEQ ID NO: 30980 - protein, 26 aa, Homo sapiens
KTRGNRLAPRHDTMHLLGPWLLLLAP

SEQ ID NO: 30981 - protein, 860 aa, Homo sapiens
KTRGNRLAPRHDTMHLLGPWLLLLVLEYLAFSDSSKWVFEHPETLYAWEGACVWIPCTYRALDGDLESFILFHNPEYNKNTSKFDGTRLYESTKDGKVPSEQKRVQFLGDKNKNCTLSIHPVHLNDSGQLGLRMESKTEKWMERIHLNVSERPFPPHIQLPPEIQESQEVTLTCLLNFSCYGYPIQLQWLLEGVPMRQAAVTSTSLTIKSVFTRSELKFSPQWSHHGKIVTCQLQDADGKFLSNDTVQLNVKHTPKLEIKVTPSDAIVREGDSVTMTCEVSSSNPEYTTVSWLKDGTSLKKQNTFTLNLREVTKDQSGKYCCQVSNDVGPGRSEEVFLQVQYAPEPSTVQILHSPAVEGSQVEFLCMSLANPLPTNYTWYHNGKEMQGRTEEKVHIPKILPWHAGTYSCVAENILGTGQRGPGAELDVQYPPKKVTTVIQNPMPIREGDTVTLSCNYNSSNPSVTRYEWKPHGAWEEPSLGVLKIQNVGWDNTTIACAACNSWCSWASPVALNVQYAPRDVRVRKIKPLSEIHSGNSVSLQCDFSSSHPKEVQFFWEKNGRLLGKESQLNFDSISPEDAGSYSCWVNNSIGQTASKAWTLEVLYAPRRLRVSMSPGDQVMEGKSATLTCESDANPPVSHYTWFDWNNQSLPYHSQKLRLEPVKVQHSGAYWCQGTNSVGKGRSPLSTLTVYYSPETIGRRVAVGLGSCLAILILAICGLKLQRRWKRTQSQQGLQENSSGQSFFVRNKKVRRAPLSEGPHSLGCYNPMMEDGISYTTLRFPEMNIPRTGDAESSEMQRPPPDCDDTVTYSALHKRQVGDYENVIPDFPEDEGIHYSELIQFGVGERPQAQENVDYVILKH

SEQ ID NO: 30982 - protein, 46 aa, Homo sapiens
IKGLSWELLYHSLLLMVLTPFKCKCLWFKTFVPHLLPECSYWRETL

SEQ ID NO: 30983 - protein, 50 aa, Homo sapiens
ICGEMVTSRAGAGIYKITLEQILTPEHEEIFEKGWGILTEHRRQTCMTSA

SEQ ID NO: 30984 - protein, 16 aa, Homo sapiens
LFQQKLWSSVGLSLLL

SEQ ID NO: 30985 - protein, 37 aa, Homo sapiens
LGPPGVRSPADLQLGTGRNARPATAGLGMGGTKHFAG

SEQ ID NO: 30986 - protein, 73 aa, Homo sapiens
MAVAGAAAGAGGRRTRMVPEPGDHAGVAAGEAAGRRAEASGEGAAHRRVHGQDATDDCELAAAAAGELGEGPG

SEQ ID NO: 30987 - protein, 32 aa, Homo sapiens
MGCDTLLFFFFLFFQSFLLAQLQCVPEWGRGG

SEQ ID NO: 30988 - protein, 41 aa, Homo sapiens
IWGSRFQSVFFQRCPEEQGSMAIVDVKAMFKICCLDMRPRS

SEQ ID NO: 30989 - protein, 92 aa, Homo sapiens
IKNRGGCLLLLVLHPSRHSAVSCLGVAAAMARKALPPTHLGQSWFCSCCRDTELAISALRARTATGSPGSCRCTAGPLPCASALESCCCRVT

SEQ ID NO: 30990 - protein, 12 aa, Homo sapiens
LVLRIIKLCVFF

SEQ ID NO: 30991 - protein, 19 aa, Homo sapiens
TSSNSQTTPGDCPDTATLP

SEQ ID NO: 30992 - protein, 106 aa, Homo sapiens
TPKSRALMAGLEVLFASAAPAITCRQDALVCFLHWEVVTHGYFGLGVGDQPGPNDKKSELLPAGWNNNKDLYVLRYEYKDGSRKLLVKAITVESSMILNVLDLQEQ

SEQ ID NO: 30993 - protein, 11 aa, Homo sapiens
MMWSLIICIWI

SEQ ID NO: 30994 - protein, 31 aa, Homo sapiens
LLLARLYFTWDMLLCWDSCMSTGLSSTCSRP

SEQ ID NO: 30995 - protein, 19 aa, Homo sapiens
LWSQLLGRLRWEDCLSLGG

SEQ ID NO: 30996 - protein, 16 aa, Homo sapiens
KMNLKMMAILFLLKRI

SEQ ID NO: 30997 - protein, 34 aa, Homo sapiens
TRKMMRKQMLSMQPWIKGWMKEEKKDGSKGRKKK

SEQ ID NO: 30998 - protein, 15 aa, Homo sapiens
MRTILATKRRKRDDL

SEQ ID NO: 30999 - protein, 1629 aa, Homo sapiens
IAGQPPLPPWATDAARARGAAAAPPPPPLSRQPVPACPPLLPGRTRDLARRRCHAPPPPPPPPQPRATAPARPARRSRVELPPPPGRRMKDKQKKKKERTWAEAARLVLENYSDAPMTPKQILQVIEAEGLKEMRSGTSPLACLNAMLHSNSRGGEGLFYKLPGRISLFTLKKDALQWSRHPATVEGEEPEDTADVESCGSNEASTVSGENDVSLDETSSNASCSTESQSRPLSNPRDSYRASSQANKQKKKTGVMLPRVVLTPLKVNGAHVESASGFSGCHADGESGSPSSSSSGSLALGSAAIRGQAEVTQDPAPLLRGFRKPATGQMKRNRGEEIDFETPGSILVNTNLRALINSRTFHALPSHFQQQLLFLLPEVDRQVGTDGLLRLSSSALNNEFFTHAAQSWRERLADGEFTHEMQVRIRQEMEKEKKVEQWKEKFFEDYYGQKLGLTKEESLQQNVGQEEAEIKSGLCVPGESVRIQRGPATRQRDGHFKKRSRPDLRTRARRNLYKKQESEQAGVAKDAKSVASDVPLYKDGEAKTDPAGLSSPHLPGTSSAAPDLEGPEFPVESVASRIQAEPDNLARASASPDRIPSLPQETVDQEPKDQKRKSFEQAASASFPEKKPRLEDRQSFRNTIESVHTEKPQPTKEEPKVPPIRIQLSRIKPPWVVKGQPTYQICPRIIPTTESSCRGWTGARTLADIKARALQVRGARGHHCHREAATTAIGGGGGPGGGGGGATDEGGGRGSSSGDGGEACGHPEPRGGPSTPGKCTSDLQRTQLLPPYPLNGEHTQAGTAMSRARREDLPSLRKEESCLLQRATVGLTDGLGDASQLPVAPTGDQPCQALPLLSSQTSVAERLVEQPQLHPDVRTECESGTTSWESDDEEQGPTVPADNGPIPSLVGDDTLEKGTGQALDSHPTMKDPVNVTPSSTPESSPTDCLQNRAFDDELGLGGSCPPMRESDTRQENLKTKALVSNSSLHWIPIPSNDEVVKQPKPESREHIPSVEPQVGEEWEKAAPTPPALPGDLTAEEGLDPLDSLTSLWTVPSRGGSDSNGSYCQQVDIEKLKINGDSEALSPHGESTDTASDFEGHLTEDSSEADTREAAVTKGSSVDKDEKPNWNQSAPLSKVNGDMRLVTRTDGMVAPQSWVSRVCAVRQKIPDSLLLASTEYQPRAVCLSMPGSSVEATNPLVMQLLQGSLPLEKVLPPAHDDSMSESPQVPLTKDQSHGSLRMGSLHGLGKNSGMVDGSSPSSLRALKEPLLPDSCETGTGLARIEATQAPGAPQKNCKAVPSFDSLHPVTNPITSSRKLEEMDSKEQFSSFSCEDQKEVRAMSQDSNSNAAPGKSPGDLTTSRTPRFSSPNVISFGPEQTGRALGDQSNVTGQGKKLFGSGNVAATLQRPRPADPMPLPAEIPPVFPSGKLGPSTNSMSGGVQTPREDWAPKPHAFVGSVKNEKTFVGGPLKANAENRKATGHSPLELVGHLEGMPFVMDLPFWKLPREPGKGLSEPLEPSSLPSQLSIKQAFYGKLSKLQLSSTSFNYSSSSPTFPKGLAGSVVQLSHKANFGASHSASLSLQMFTDSSTVESISLQCACSLKAMIMCQGCGAFCHDDCIGPSKLCVLCLVVR

SEQ ID NO: 31000 - protein, 11 aa, Homo sapiens
LLPSFHLRCGH

SEQ ID NO: 31001 - protein, 9 aa, Homo sapiens
ITAVTYLFF

SEQ ID NO: 31002 - protein, 17 aa, Homo sapiens
ISYFCLQGVFRTRQLCN

SEQ ID NO: 31003 - protein, 16 aa, Homo sapiens
RERHNWLQPFSCLFLL

SEQ ID NO: 31004 - protein, 10 aa, Homo sapiens
MLRPRVKILI

SEQ ID NO: 31005 - protein, 88 aa, Homo sapiens
IMYCLQWLLPVLLIPKPLNPALWFSHSMFMGFYLLSFLLERKPCTICALVFLAALFLICYSCWGNCFLYHCSDSPLPESAHDPGVVGT

SEQ ID NO: 31006 - protein, 18 aa, Homo sapiens
LVMLGLVCLQLETVVCLV

SEQ ID NO: 31007 - protein, 7 aa, Homo sapiens
MKITMTS

SEQ ID NO: 31008 - protein, 21 aa, Homo sapiens
KMLHLIKVTLLSQMLTLGMVI

SEQ ID NO: 31009 - protein, 46 aa, Homo sapiens
LLPALKIKMRTRMRSPGKLPGPLIRLPLIIIQDPLLQMKKQVRKWK

SEQ ID NO: 31010 - protein, 13 aa, Homo sapiens
MRFLRSIIVLLTP

SEQ ID NO: 31011 - protein, 40 aa, Homo sapiens
LMLLLLWLSCFRQLKANSFSRSFRLFNSLQNHSLLPLTML

SEQ ID NO: 31012 - protein, 11 aa, Homo sapiens
IRWIWSTTCLC

SEQ ID NO: 31013 - protein, 15 aa, Homo sapiens
TAFLISTCTCALLFS

SEQ ID NO: 31014 - protein, 487 aa, Homo sapiens
RVGMAAGGDHGSPDSYRSPLASRYASPEMCFVFSDRYKFRTWRQLWLWLAEAEQTLGLPITDEQIQEMKSNLENIDFKMAAEEEKRLRHDVMAHVHTFGHCCPKAAGIIHLGATSCYVGDNTDLIILRNALDLLLPKLARVISRLADFAKERASLPTLGFTHFQPAQLTTVGKRCCLWIQDLCMDLQNLKRVRDDLRFRGVKGTTGTQASFLQLFEGDDHKVEQLDKMVTEKAGFKRAFIITGQTYTRKVDIEVLSVLASLGASVHKICTDIRLLANLKEMEEPFEKQQIGSSAMPYKRNPMRSERCCSLARHLMTLVMDPLQTASVQWFERTLDDSANRRICLAEAFLTADTILNTLQNISEGLVVYPKVIERRIRQELPFMATENIIMAMVKAGGSRQDCHEKIRVLSQQAASVVKQEGGDNDLIERIQVDAYFSPIHSQLDHLLDPSSFTGRASQQVQRFLEEEVYPLLKPYESVMKVKAELCL

SEQ ID NO: 31015 - protein, 12 aa, Homo sapiens
LLLPWSLMGMVL

SEQ ID NO: 31016 - protein, 39 aa, Homo sapiens
MAAVWLSLLLLHTGLQPMACYLSQQKNQKINSEVNRMGK

SEQ ID NO: 31017 - protein, 12 aa, Homo sapiens
IKKIKKVFLCIF

SEQ ID NO: 31018 - protein, 15 aa, Homo sapiens
LHGWRVVPLILTLSL

SEQ ID NO: 31019 - protein, 16 aa, Homo sapiens
LRLSRMICGLTLYATT

SEQ ID NO: 31020 - protein, 11 aa, Homo sapiens
LLSIILTLSLF

SEQ ID NO: 31021 - protein, 27 aa, Homo sapiens
LSRTGRLSGPGVLVSSPSPTQSMLQLP

SEQ ID NO: 31022 - protein, 7 aa, Homo sapiens
IAITPPI

SEQ ID NO: 31023 - protein, 16 aa, Homo sapiens
MQHTLWIACGTVLLSC

SEQ ID NO: 31024 - protein, 7 aa, Homo sapiens
IWHFLIF

SEQ ID NO: 31025 - protein, 13 aa, Homo sapiens
MEIFQRLRCVMSM

SEQ ID NO: 31026 - protein, 27 aa, Homo sapiens
LETRMMILCTGRSTTSMRSKPRRKPTL

SEQ ID NO: 31027 - protein, 28 aa, Homo sapiens
LGIILLLTLCSLFQACTILINLRCSVMP

SEQ ID NO: 31028 - protein, 12 aa, Homo sapiens
LIASIRMEFISL

SEQ ID NO: 31029 - protein, 14 aa, Homo sapiens
ILVVKKEVLISLKN

SEQ ID NO: 31030 - protein, 22 aa, Homo sapiens
LIYCRRMRKKLKPHVVFLKKLD

SEQ ID NO: 31031 - protein, 19 aa, Homo sapiens
LIYCRRKLKPHVVFLKKLD

SEQ ID NO: 31032 - protein, 12 aa, Homo sapiens
VHLMTILFVCGI

SEQ ID NO: 31033 - protein, 12 aa, Homo sapiens
VILNVFILTFLT

SEQ ID NO: 31034 - protein, 20 aa, Homo sapiens
MSPSLYRFFTILLCQLLIPN

SEQ ID NO: 31035 - protein, 32 aa, Homo sapiens
IMFTKAFGSLVTSCAASAPMLCMSTSIVASSL

SEQ ID NO: 31036 - protein, 22 aa, Homo sapiens
MIKTMQVGLLFILRLLLAGMRL

SEQ ID NO: 31037 - protein, 23 aa, Homo sapiens
MLSILICQVILKNMCIVLAVQDV

SEQ ID NO: 31038 - protein, 16 aa, Homo sapiens
LKTLFLKWFVLMLLSN

SEQ ID NO: 31039 - protein, 29 aa, Homo sapiens
THTSKPHTQTHTHTPAPGSYVFSALSHPG

SEQ ID NO: 31040 - protein, 1124 aa, Homo sapiens
IMVSSGCRMRSLWFIIVISFLPNTEGFSRAALPFGLVRRELSCEGYSIDLRCPGSDVIMIESANYGRTDDKICDADPFQMENTDCYLPDAFKIMTQRCNNRTQCIVVTGSDVFPDPCPGTYKYLEVQYECVPYIFVCPGTLKAIVDSPCIYEAEQKAGAWCKDPLQAADKIYFMPWTPYRTDTLIEYASLEDFQNSRQTTTYKLPNRVDGTGFVVYDGAVFFNKERTRNIVKFDLRTRIKSGEAIINYANYHDTSPYRWGGKTDIDLAVDENGLWVIYATEQNNGMIVISQLNPYTLRFEATWETVYDKRAASNAFMICGVLYVVRSVYQDNESETGKNSIDYIYNTRLNRGEYVDVPFPNQYQYIAAVDYNPRDNQLYVWNNNFILRYSLEFGPPDPAQVPTTAVTITSSAELFKTIISTTSTTSQKGPMSTTVAGSQEGSKGTKPPPAVSTTKIPPITNIFPLPERFCEALDSKGIKWPQTQRGMMVERPCPKGTRGTASYLCMISTGTWNPKGPDLSNCTSHWVNQLAQKIRSGENAASLANELAKHTKGPVFAGDVSSSVRLMEQLVDILDAQLQELKPSEKDSAGRSYNKAIVDTVDNLLRPEALESWKHMNSSEQAHTATMLLDTLEEGAFVLADNLLEPTRVSMPTENIVLEVAVLSTEGQIQDFKFPLGIKGAGSSIQLSANTVKQNSRNGLAKLVFIIYRSLGQFLSTENATIKLGADFIGRNSTIAVNSHVISVSINKESSRVYLTDPVLFTLPHIDPDNYFNANCSFWNYSERTMMGYWSTQGCKLVDTNKTRTTCACSHLTNFAILMAHREIAYKDGVHELLLTVITWVGIVISLVCLAICIFTFCFFRGLQSDRNTIHKNLCINLFIAEFIFLIGIDKTKYAIACPIFAGLLHFFFLAAFAWMCLEGVQLYLMLVEVFESEYSRKKYYYVAGYLFPATVVGVSAAIDYKSYGTEKACWLHVDNYFIWSFIGPVTFIILLNIIFLVITLCKMVKHSNTLKPDSSRLENIKSWVLGAFALLCLLGLTWSFGLLFINEETIVMAYLFTIFNAFQGVFIFIFHCALQKKVRKEYGKCFRHSYCCGGLPTESPHSSVKASTTRTSARYSSGTQDIH

SEQ ID NO: 31041 - protein, 12 aa, Homo sapiens
VLILLVVIAPLQ

SEQ ID NO: 31042 - protein, 22 aa, Homo sapiens
RTEFIVWHLYLMPALFNTSPLR

SEQ ID NO: 31043 - protein, 14 aa, Homo sapiens
IHSIVCVVLVLCPN

SEQ ID NO: 31044 - protein, 31 aa, Homo sapiens
IKLEIVCRLISLLTCSSVSAMFEIFVLDGES

SEQ ID NO: 31045 - protein, 15 aa, Homo sapiens
ICNFVCILVDLSLVF

SEQ ID NO: 31046 - protein, 16 aa, Homo sapiens
MWAQLASFCFDLNIPI

SEQ ID NO: 31047 - protein, 168 aa, Homo sapiens
KMADEATRRVVSEIPVLKTNAGPRDRELWVQRLKEEYQSLIRYVENNKNADNDWFRLESNKEGTRWFGKCWYIHDLLKYEFDIEFDIPITYPTTAPEIAVPELDGKTAKMYRGGKICLTDHFKPLWARNVPKFGLAHLMALGLGPWLAVEIPDLIQKGVIQHKEKCNQ

SEQ ID NO: 31048 - protein, 15 aa, Homo sapiens
LILLSHPFFSLLLFA

SEQ ID NO: 31049 - protein, 14 aa, Homo sapiens
LSSLLWSAVLLALL

SEQ ID NO: 31050 - protein, 15 aa, Homo sapiens
ILGRGELDVVNRVSW

SEQ ID NO: 31051 - protein, 9 aa, Homo sapiens
IWMASVAFM

SEQ ID NO: 31052 - protein, 15 aa, Homo sapiens
LGPLSLSLCWLELVF

SEQ ID NO: 31053 - protein, 11 aa, Homo sapiens
ICAALILELWM

SEQ ID NO: 31054 - protein, 7 aa, Homo sapiens
ILLHYLK

SEQ ID NO: 31055 - protein, 13 aa, Homo sapiens
IQGNRMPSLVLLF

SEQ ID NO: 31056 - protein, 22 aa, Homo sapiens
IGIQEALLFLLLTSTTTVAGCC

SEQ ID NO: 31057 - protein, 11 aa, Homo sapiens
LEDSIVHARRL

SEQ ID NO: 31058 - protein, 18 aa, Homo sapiens
MFAAMGSWRYILSHLWLM

SEQ ID NO: 31059 - protein, 54 aa, Homo sapiens
RIATVSIAAAVAPLTLFLYRGDGGLSSRRRADAAAGAFQLMWRSRCEATYKSIY

SEQ ID NO: 31060 - protein, 46 aa, Homo sapiens
RIATVSIAAAVAPLTLFLYRGDGGLSSRRRADAAAGAQETIYPACC

SEQ ID NO: 31061 - protein, 22 aa, Homo sapiens
ILSDGSLWMKWKNSKGNKLKKT

SEQ ID NO: 31062 - protein, 20 aa, Homo sapiens
IVKAKDIEYTFSSFIPRNLP

SEQ ID NO: 31063 - protein, 12 aa, Homo sapiens
ITGMVNMAFLIL

SEQ ID NO: 31064 - protein, 15 aa, Homo sapiens
LMWIKEKTTVSVFKQ

SEQ ID NO: 31065 - protein, 41 aa, Homo sapiens
VALLIFRWTSTFGTSWLSSALERVWPFYIGCFPHIPQAGGL

SEQ ID NO: 31066 - protein, 23 aa, Homo sapiens
RVKMEILQVLLTILRLQSLNVVM

SEQ ID NO: 31067 - protein, 15 aa, Homo sapiens
KQCAFKRGPMEKTKG

SEQ ID NO: 31068 - protein, 21 aa, Homo sapiens
MALGMTRILILSQWIFLKILS

SEQ ID NO: 31069 - protein, 8 aa, Homo sapiens
LLLFQGFI

SEQ ID NO: 31070 - protein, 82 aa, Homo sapiens
LERARSQRLGGREGSAARRAPASERASERRGGGRERGAARESRSGSGGGGGGGEARRPLPCKPCLPKAKARRCPRMGRLGKS

SEQ ID NO: 31071 - protein, 28 aa, Homo sapiens
RNRLGKWQILHVILMSCFSWCLSGWVKC

SEQ ID NO: 31072 - protein, 39 aa, Homo sapiens
MDVSTPKPQISISRCPWPCSSSSFDTSLSCTWLHHWLPS

SEQ ID NO: 31073 - protein, 12 aa, Homo sapiens
LSLLLLLEIMMI

SEQ ID NO: 31074 - protein, 7 aa, Homo sapiens
LIWWTLV

SEQ ID NO: 31075 - protein, 12 aa, Homo sapiens
KQRQWSLRFLLV

SEQ ID NO: 31076 - protein, 245 aa, Homo sapiens
TPSGGGRNRSASSSWVGTMAGITTIEAVKRKIQVLQQQADDAEERAERLQREVEGERRAREQAEAEVASLNRRIQLVEEELDRAQERLATALQKLEEAEKAADESERGMKVIENRALKDEEKMELQEIQLKEAKHIAEEADRKYEEVARKLVIIEGDLERTEERAELAESRCREMDEQIRLMDQNLKCLSAAEEKAETRAEFAERSVAKLEKTIDDLEDKLKCTKEEHLCTQRMLDQTLLDLNEM

SEQ ID NO: 31077 - protein, 26 aa, Homo sapiens
IQRPPKKDQFLGCAPSQRDEGAAENS

SEQ ID NO: 31078 - protein, 14 aa, Homo sapiens
MQLPLKSQMNKLLH

SEQ ID NO: 31079 - protein, 24 aa, Homo sapiens
MPIIPALWEAEAGRSPEVGSSRPT

SEQ ID NO: 31080 - protein, 14 aa, Homo sapiens
TPGKEKEREKTEVV

SEQ ID NO: 31081 - protein, 11 aa, Homo sapiens
IVGGHLWLLGM

SEQ ID NO: 31082 - protein, 14 aa, Homo sapiens
MHQFMRLVLAGCYI

SEQ ID NO: 31083 - protein, 31 aa, Homo sapiens
KSSSSFKRGVEGGGGGDGGGDGGGAARGPGC

SEQ ID NO: 31084 - protein, 20 aa, Homo sapiens
ILLLNVMKCCKIMLKDIVEK

SEQ ID NO: 31085 - protein, 17 aa, Homo sapiens
LGQFARLILMTVPVLRV

SEQ ID NO: 31086 - protein, 14 aa, Homo sapiens
LLVCSWLARSAVYH

SEQ ID NO: 31087 - protein, 42 aa, Homo sapiens
LAAAALAAVGGRAGGEGGGGEKRRWRRLGLAPLKSAYPLAAS

SEQ ID NO: 31088 - protein, 19 aa, Homo sapiens
LLILHSILSVVCWVVEGVS

SEQ ID NO: 31089 - protein, 21 aa, Homo sapiens
MLWWWMVFALHFCCLALHIKT

SEQ ID NO: 31090 - protein, 14 aa, Homo sapiens
ILAQPVWCLCVTAL

SEQ ID NO: 31091 - protein, 9 aa, Homo sapiens
IYLSFWVFL

SEQ ID NO: 31092 - protein, 19 aa, Homo sapiens
IAYLYWVSLMPAWTILEAV

SEQ ID NO: 31093 - protein, 47 aa, Homo sapiens
LLLLMSKGQVEYQPRGKGNPGRKKMKTIENFLRRSISFMAVWRSNGT

SEQ ID NO: 31094 - protein, 10 aa, Homo sapiens
IVFLLTLTGS

SEQ ID NO: 31095 - protein, 15 aa, Homo sapiens
IVFLLTLTMQRPPWL

SEQ ID NO: 31096 - protein, 43 aa, Homo sapiens
TLSFRLYLMFLLSGTTFWKKTIIRTSNVLQGISCSCWSSVLES

SEQ ID NO: 31097 - protein, 9 aa, Homo sapiens
IIIIFLLLI

SEQ ID NO: 31098 - protein, 14 aa, Homo sapiens
MLTTSVYFLLTSYT

SEQ ID NO: 31099 - protein, 23 aa, Homo sapiens
LLLLLTVLINMSVYQIESQEGRD

SEQ ID NO: 31100 - protein, 21 aa, Homo sapiens
IKLLWGLPIHLVVSSLSLAIL

SEQ ID NO: 31101 - protein, 833 aa, Homo sapiens
IEMKVHMHTKFCLICLLTFIFHHCNHCHEEHDHGPEALHRQHRGMTELEPSKFSKQAAENEKKYYIEKLFERYGENGRLSFFGLEKLLTNLGLGERKVVEINHEDLGHDHVSHLDILAVQEGKHFHSHNHQHSHNHLNSENQTVTSVSTKRNHKCDPEKETVEVSVKSDDKHMHDHNHRLRHHHRLHHHLDHNNTHHFHNDSITPSERGEPSNEPSTETNKTQEQSDVKLPKGKRKKKGRKSNENSEVITPGFPPNHDQGEQYEHNRVHKPDRVHNPGHSHVHLPERNGHDPGRGHQDLDPDNEGELRHTRKREAPHVKNNAIISLRKDLNEDDHHHECLNVTQLLKYYGHGANSPISTDLFTYLCPALLYQIDSRLCIEHFDKLLVEDINKDKNLVPEDEANIGASAWICGIISITVISLLSLLGVILVPIINQGCFKFLLTFLVALAVGTMSGDALLHLLPHSQGGHDHSHQHAHGHGHSHGHESNKFLEEYDAVLKGLVALGGIYLLFIIEHCIRMFKHYKQQRGKQKWFMKQNTEESTIGRKLSDHKLNNTPDSDWLQLKPLAGTDDSVVSEDRLNETELTDLEGQQESPPKNYLCIEEEKIIDHSHSDGLHTIHEHDLHAAAHNHHGENKTVLRKHNHQWHHKHSHHSHGPCHSGSDLKETGIANIAWMVIMGDGIHNFSDGLAIGAAFSAGLTGGISTSIAVFCHELPHELGDFAVLLKAGMTVKQAIVYNLLSAMMAYIGMLIGTAVGQYANNITLWIFAVTAGMFLYVALVDMLPEMLHGDGDNEEHGFCPVGQFILQNLGLLFGFAIMLVIALYEDKIVFDIQF

SEQ ID NO: 31102 - protein, 18 aa, Homo sapiens
LILLALLVGGFRDSAASS

SEQ ID NO: 31103 - protein, 48 aa, Homo sapiens
RESVRSREKRSFSGKLSWLLLYVVTVLCSKENDSTCSFSLVEVTLVSC

SEQ ID NO: 31104 - protein, 23 aa, Homo sapiens
LSWLLLYVVTVLCSKVSGGRAWA

SEQ ID NO: 31105 - protein, 11 aa, Homo sapiens
MVPMGYRACKH

SEQ ID NO: 31106 - protein, 15 aa, Homo sapiens
LIKMSPLLNQLIVLL

SEQ ID NO: 31107 - protein, 1078 aa, Homo sapiens
RRGEGSGQAAKEKTCGRGLSEGNWDGRAGLGLSCGAAASPGPAEAPVAGRDESLRATVERPAMAPRTLWSCYLCCLLTAAAGAASYPPRGFSLYTGSSGALSPGGPQAQIAPRPASRHRNWCAYVVTRTVSCVLEDGVETYVKYQPCAWGQPQCPQSIMYRRFLRPRYRVAYKTVTDMEWRCCQGYGGDDCAESPAPALGPASSTPRPLARPARPNLSGSSAGSPLSGLGGEGPGESEKVQQLEEQVQSLTKELQGLRGVLQGLSGRLAEDVQRAVETAFNGRQQPADAAARPGVHETLNEIQHQLQLLDTRVSTHDQELGHLNNHHGGSSSSGGSRAPAPASAPPGPSEELLRQLEQRLQESCSVCLAGLDGFRRQQQEDRERLRAMEKLLASVEERQRHLAGLAVGRRPPQECCSPELGRRLAELERRLDVVAGSVTVLSGRRGTELGGAAGQGGHPPGYTSLASRLSRLEDRFNSTLGPSEEQEESWPGAPGGLSHWLPAARGRLEQLGGLLANVSGELGGRLDLLEEQVAGAMQACGQLCSGAPGEQDSQVSEILSALERRVLDSEGQLRLVGSGLHTVEAAGEARQATLEGLQEVVGRLQDRVDAQDETAAEFTLRLNLTAARLGQLEGLLQAHGDEGCGACGGVQEELGRLRDGVERCSCPLLPPRGPGAGPGVGGPSRGPLDGFSVFGGSSGSALQALQGELSEVILSFSSLNDSLNELQTTVEGQGADLADLGATKDRIISEINRLQQEATEHATESEERFRGLEEGQAQAGQCPSLEGRLGRLEGVCERLDTVAGGLQGLREGLSRHVAGLWAGLRETNTTSQMQAALLEKLVGGQAGLGRRLGALNSSLQLLEDRLHQLSLKDLTGPAGEAGPPGPPGLQGPPGPAGPPGSPGKDGQEGPIGPPGPQGEQGVEGAPAAPVPQVAFSAALSLPRSEPGTVPFDRVLLNDGGYYDPETGVFTAPLAGRYLLSAVLTGHRHEKVEAVLSRSNQGVARVDSGGYEPEGLENKPVAESQPSPGTLGVFSLILPLQAGDTVCVDLVMGQLAHSEEPLTIFSGALLYGDPELEHA

SEQ ID NO: 31108 - protein, 13 aa, Homo sapiens
LLLLLYFTFWTWT

SEQ ID NO: 31109 - protein, 13 aa, Homo sapiens
LEALRRFLFLMAL

SEQ ID NO: 31110 - protein, 943 aa, Homo sapiens
TNPALERATFSKMDMFPLTWVFLALYFSRHQVRGQPDPPCGGRLNSKDAGYITSPGYPQDYPSHQNCEWIVYAPEPNQKIVLNFNPHFEIEKHDCKYDFIEIRDGDSESADLLGKHCGNIAPPTIISSGSMLYIKFTSDYARQGAGFSLRYEIFKTGSEDCSKNFTSPNGTIESPGFPEKYPHNLDCTFTILAKPKMEIILQFLIFDLEHDPLQVGEGDCKYDWLDIWDGIPHVGPLIGKYCGTKTPSELRSSTGILSLTFHTDMAVAKDGFSARYYLVHQEPLENFQCNVPLGMESGRIANEQISASSTYSDGRWTPQQSRLHGDDNGWTPNLDSNKEYLQVDLRFLTMLTAIATQGAISRETQNGYYVKSYKLEVSTNGEDWMVYRHGKNHKVFQANNDATEVVLNKLHAPLLTRFVRIRPQTWHSGIALRLELFGCRVTDAPCSNMLGMLSGLIADSQISASSTQEYLWSPSAARLVSSRSGWFPRIPQAQPGEEWLQVDLGTPKTVKGVIIQGARGGDSITAVEARAFVRKFKVSYSLNGKDWEYIQDPRTQQPKLFEGNMHYDTPDIRRFDPIPAQYVRVYPERWSPAGIGMRLEVLGCDWTDSKPTVETLGPTVKSEETTTPYPTEEEATECGENCSFEDDKDLQLPSGFNCNFDFLEEPCGWMYDHAKWLRTTWASSSSPNDRTFPDDRNFLRLQSDSQREGQYARLISPPVHLPRSPVCMEFQYQATGGRGVALQVVREASQESKLLWVIREDQGGEWKHGRIILPSYDMEYQIVFEGVIGKGRSGEIAIDDIRISTDVPLENCMEPISAFAGENFKVDIPEIHEREGYEDEIDDEYEVDWSNSSSATSGSGAPSTDKEKSWLYTLDPILITIIAMSSLGVLLGATCAGLLLYCTCSYSGLSSRSCTTLENYNFELYDGLKHKVKMNHQKCCSEA

SEQ ID NO: 31111 - protein, 31 aa, Homo sapiens
LSFSITTWPSTIPRSRNESGAFSAPGFQDIV

SEQ ID NO: 31112 - protein, 22 aa, Homo sapiens
RSRGKFILLSSLMMMLFSMLKN

SEQ ID NO: 31113 - protein, 9 aa, Homo sapiens
RLLLGSFQR

SEQ ID NO: 31114 - protein, 11 aa, Homo sapiens
IILDILKTCTA

SEQ ID NO: 31115 - protein, 16 aa, Homo sapiens
LSSFCPFPVRFFNFLF

SEQ ID NO: 31116 - protein, 12 aa, Homo sapiens
LLSLYLFLLTLL

SEQ ID NO: 31117 - protein, 38 aa, Homo sapiens
LKQMRKTSFILLRMTVLPTLWTRRRVQLVCPTMSPPHT

SEQ ID NO: 31118 - protein, 37 aa, Homo sapiens
RKIVGKWLWWTYWGLLTRPTCDTVFRKAKQDSQEPGM

SEQ ID NO: 31119 - protein, 12 aa, Homo sapiens
IMKKKMLLYWIL

SEQ ID NO: 31120 - protein, 50 aa, Homo sapiens
MNGSWTWFFWIIAMPSLGVPTQMPVVPAPPACSLSLPGGSTKVPLNQTSQ

SEQ ID NO: 31121 - protein, 22 aa, Homo sapiens
KTIHLCLILLFMYHLFVEVSLL

SEQ ID NO: 31122 - protein, 25 aa, Homo sapiens
LLMSYLISFLLIEDSYILFSQQVVA

SEQ ID NO: 31123 - protein, 8 aa, Homo sapiens
MWWILLAL

SEQ ID NO: 31124 - protein, 10 aa, Homo sapiens
ISPLVFRFEM

SEQ ID NO: 31125 - protein, 7 aa, Homo sapiens
KKLPTVS

SEQ ID NO: 31126 - protein, 23 aa, Homo sapiens
LGRGELLEKMVKLVLLVLWARRV

SEQ ID NO: 31127 - protein, 60 aa, Homo sapiens
ISQTLASSPEILLDGEREGGEGPRGRGPQLPCARSPHSTSPRSPAGVSSLPPLSHRSPHG

SEQ ID NO: 31128 - protein, 12 aa, Homo sapiens
ITLFSPLFCFQL

SEQ ID NO: 31129 - protein, 16 aa, Homo sapiens
KANFMNFKRVPLGLLF

SEQ ID NO: 31130 - protein, 33 aa, Homo sapiens
VWPLGSAIWGVVWYVGRSSEEPLETTLGILPFQ

SEQ ID NO: 31131 - protein, 42 aa, Homo sapiens
IIWGDFIFRSLYKGFLMSITCWMRLCSSPPLSEWSVSINWTP

SEQ ID NO: 31132 - protein, 19 aa, Homo sapiens
KISQRRCPHHCVNWNDDRS

SEQ ID NO: 31133 - protein, 15 aa, Homo sapiens
LRLLCTGIWMILSKL

SEQ ID NO: 31134 - protein, 15 aa, Homo sapiens
LLVLLTTCLLVMGTL

SEQ ID NO: 31135 - protein, 12 aa, Homo sapiens
LLVLLTTCLLRG

SEQ ID NO: 31136 - protein, 14 aa, Homo sapiens
ILISSATVLTCLIY

SEQ ID NO: 31137 - protein, 17 aa, Homo sapiens
RIFGEFLFIMKILLMMN

SEQ ID NO: 31138 - protein, 9 aa, Homo sapiens
IFIFWCLHV

SEQ ID NO: 31139 - protein, 11 aa, Homo sapiens
LIRHLALMGRW

SEQ ID NO: 31140 - protein, 10 aa, Homo sapiens
MAVLTWSTSR

SEQ ID NO: 31141 - protein, 739 aa, Homo sapiens
TGGQRLRPARPGREWNKGTRGAGGCTEASPTVLAAQRRTRKMRLAVGALLVCAVLGLCLAVPDKTVRWCAVSEHEATKCQSFRDHMKSVIPSDGPSVACVKKASYLDCIRAIAANEADAVTLDAGLVYDAYLAPNNLKPVVAEFYGSKEDPQTFYYAVAVVKKDSGFQMNQLRGKKSCHTGLGRSAGWNIPIGLLYCDLPEPRKPLEKAVANFFSGSCAPCADGTDFPQLCQLCPGCGCSTLNQYFGYSGAFKCLKDGAGDVAFVKHSTIFENLANKADRDQYELLCLDNTRKPVDEYKDCHLAQVPSHTVVARSMGGKEDLIWELLNQAQEHFGKDKSKEFQLFSSPHGKDLLFKDSAHGFLKVPPRMDAKMYLGYEYVTAIRNLREGTCPEAPTDECKPVKWCALSHHERLKCDEWSVNSVGKIECVSAETTEDCIAKIMNGEADAMSLDGGFVYIAGKCGLVPVLAENYNKSDNCEDTPEAGYFAIAVVKKSASDLTWDNLKGKKSCHTAVGRTAGWNIPMGLLYNKINHCRFDEFFSEGCAPGSKKDSSLCKLCMGSGLNLCEPNNKEGYYGYTGAFRCLVEKGDVAFVKHQTVPQNTGGKNPDPWAKNLNEKDYELLCLDGTRKPVEEYANCHLARAPNHAVVTRKDKEACVHKILRQQQHLFGSNVTDCSGNFCLFRSETKDLLFRDDTVCLAKLHDRNTYEKYLGEEYVKAVGNLRKCSTSSLLEACTFRRP

SEQ ID NO: 31142 - protein, 16 aa, Homo sapiens
KVFMGLFLALIQVCMK

SEQ ID NO: 31143 - protein, 79 aa, Homo sapiens
TRTPNGTRCRSARVCGHARSDGCQELSSGWAEEAVRRPETELHVSKVGRRKMPPIKLIFEPRRLGSSLPKLEPCRASFP

SEQ ID NO: 31144 - protein, 23 aa, Homo sapiens
LKTMIDVPELEGRGAMKIMFGLS

SEQ ID NO: 31145 - protein, 28 aa, Homo sapiens
VLFFAIWPIMCDLDLSQAFMFPHQLYLN

SEQ ID NO: 31146 - protein, 15 aa, Homo sapiens
MMKIGLPLSLILIPW

SEQ ID NO: 31147 - protein, 18 aa, Homo sapiens
VRKVIGFILFRVRLLGWV

SEQ ID NO: 31148 - protein, 1613 aa, Homo sapiens
RGCWGDPDVAPNEMNKAPQSTGPPPAPSPGLPQPAFPPGQTAPVVFSTPQATQMNTPSQPRQHFYPSRAQPPSSAASRVQSAAPARPGPAAHVYPAGSQVMMIPSQISYPASQGAYYIPGQGRSTYVVPTQQYPVQPGAPGFYPGASPTEFGTYAGAYYPAQGVQQFPTGVAPTPVLMNQPPQIAPKRERKTIRIRDPNQGGKDITEEIMSGARTASTPTPPQTGGGLEPQANGETPQVAVIVRPDDRSQGAIIADRPGLPGPEHSPSESQPSSPSPTPSPSPVLEPGSEPNLAVLSIPGDTMTTIQMSVEESTPISRETGEPYRLSPEPTPLAEPILEVEVTLSKPVPESEFSSSPLQAPTPLASHTVEIHEPNGMVPSEDLEPEVESSPELAPPPACPSESPVPIAPTAQPEELLNGAPSPPAVDLSPVSEPEEQAKEVTASMAPPTIPSATPATAPSATSPAQEEEMEEEEEEEEGEAGEAGEAESEKGGEELLPPESTPIPANLSQNLEAAAATQVAVSVPKRRRKIKELNKKEAVGDLLDAFKEANPAVPEVENQPPAGSNPGPESEGSGVPPRPEEADETWDSKEDKIHNAENIQPGEQKYEYKSDQWKPLNLEEKKRYDREFLLGFQFIFASMQKPEGLPHISDVVLDKANKTPLRPLDPTRLQGINCGPDFTPSFANLGRTTLSTRGPPRGGPGGELPRGPQAGLGPRRSQQGPRKEPRKIIATVLMTEDIKLNKAEKAWKPSSKRTAADKDRGEEDADGSKTQDLFRRVRSILNKLTPQMFQQLMKQVTQLAIDTEERLKGVIDLIFEKAISEPNFSVAYANMCRCLMALKVPTTEKPTVTVNFRKLLLNRCQKEFEKDKDDDEVFEKKQKEMDEAATAEERGRLKEELEEARDIARRRSLGNIKFIGELFKLKMLTEAIMHDCVVKLLKNHDEESLECLCRLLTTIGKDLDFEKAKPRMDQYFNQMEKIIKEKKTSSRIRFMLQDVLDLRGSNWVPRRGDQGPKTIDQIHKEAEMEEHREHIKVQQLMAKGSDKRRGGPPGPPISRGLPLVDDGGWNTVPISKGSRPIDTSRLTKITKPGSIDSNNQLFAPGGRLSWGKGSSGGSGAKPSDAASEAARPATSTLNRFSALQQAVPTESTDNRRVVQRSSLSRERGEKAGDRGDRLERSERGGDRGDRLDRARTPATKRSFSKEVEERSRERPSQPEGLRKAASLTEDRDRGRDAVKREAALPPVSPLKAALSEEELEKKSKAIIEEYLHLNDMKEAVQCVQELASPSLLFIFVRHGVESTLERSAIAREHMGQLLHQLLCAGHLSTAQYYQGLYEILELAEDMEIDIPHVWLYLAELVTPILQEGGVPMGELFREITKPLRPLGKAASLLLEILGLLCKSMGPKKVGTLWREAGLSWKEFLPEGQDIGAFVAEQKVEYTLGEESEAPGQRALPSEELNRQLEKLLKEGSSNQRVFDWIEANLSEQQIVSNTLVRALMTAVCYSAIIFETPLRVDVAVLKARAKLLQKYLCDEQKELQALYALQALVVTLEQPPNLLRMFFDALYDEDVVKEDAFYSWESSKDPAEQQGKGVALKSVTAFFKWLREAEEESDHN

SEQ ID NO: 31149 - protein, 30 aa, Homo sapiens
MNLLLPILLLSLHMKTSKNDLRIQRKRTLC

SEQ ID NO: 31150 - protein, 42 aa, Homo sapiens
VRAALSAAAAAAAREAGRRGAPGTAADGGGGGMRLLALPIVG

SEQ ID NO: 31151 - protein, 27 aa, Homo sapiens
IKSRKMDSLGRQAVITTHTVLPGRHRL

SEQ ID NO: 31152 - protein, 20 aa, Homo sapiens
IVLLLLFTLLLGFYEGFVKS

SEQ ID NO: 31153 - protein, 8 aa, Homo sapiens
LISVAWLM

SEQ ID NO: 31154 - protein, 23 aa, Homo sapiens
KPRGRSLFLFLLWENLMLHLSLT

SEQ ID NO: 31155 - protein, 17 aa, Homo sapiens
LKEKEALWLYILWAWVS

SEQ ID NO: 31156 - protein, 46 aa, Homo sapiens
IETIHRLRWALRRIGYARVLMWCGCTCLFCESHFSETVKVRSPGIH

SEQ ID NO: 31157 - protein, 12 aa, Homo sapiens
LRLFGGGKHSQW

SEQ ID NO: 31158 - protein, 18 aa, Homo sapiens
VSAAGRMVAAGRGPARAP

SEQ ID NO: 31159 - protein, 16 aa, Homo sapiens
MIFTLLIFTGFQKVWV

SEQ ID NO: 31160 - protein, 17 aa, Homo sapiens
LGTKLLISFATLCIPSL

SEQ ID NO: 31161 - protein, 24 aa, Homo sapiens
MGDKRRFLWSSLHLKTGLGGPLQL

SEQ ID NO: 31162 - protein, 19 aa, Homo sapiens
IEDEGFFLFIFLMALQNLK

SEQ ID NO: 31163 - protein, 16 aa, Homo sapiens
LQKKTWLLMKILCHLL

SEQ ID NO: 31164 - protein, 28 aa, Homo sapiens
MPPPLEDVGSLGPWRRCGREEGCRGCGW

SEQ ID NO: 31165 - protein, 19 aa, Homo sapiens
ISRIMMMISSFTLKFTLIH

SEQ ID NO: 31166 - protein, 16 aa, Homo sapiens
VINWILIWLFAEMLEK

SEQ ID NO: 31167 - protein, 23 aa, Homo sapiens
MQRSLFTLMSLEIIWISPEFSSG

SEQ ID NO: 31168 - protein, 51 aa, Homo sapiens
VRDWVWPAALVSAVSCALHAGSALQGLLSAQRTPAARGRRGPELPPAVFTH

SEQ ID NO: 31169 - protein, 15 aa, Homo sapiens
IGFFFVQVSLFSRLY

SEQ ID NO: 31170 - protein, 14 aa, Homo sapiens
ILVFNKLFVHLYLV

SEQ ID NO: 31171 - protein, 392 aa, Homo sapiens
KRKMKTGHFEIVTMLLATMILVDIFQVKAEVLDMADNAFDDEYLKCTDRMEIKYVPQLLKEEKASHQQLDTVWENAKAKWAARKTQIFLPMNFKDNHGIALMAYISEAQEQTPFYHLFSEAVKMAGQSREDYIYGFQFKAFHFYLTRALQLLRKPCEASSKTVVYRTSQGTSFTFGGLNQARFGHFTLAYSAKPQAANDQLTVLSIYTCLGVDIENFLDKESERITLIPLNEVFQVSQEGAGNNLILQSINKTCSHYECAFLGGLKTENCIENLEYFQPIYVYNPGEKNQKLEDHSEKNWKLEDHGEKNQKLEDHGVKILEPTQIPGMKIPEPFPLPEDKSQGNINNPTPGPVPVPGPKSHPSASSGKLLLPQFGMVIILISVSAINLFVAL

SEQ ID NO: 31172 - protein, 56 aa, Homo sapiens
IRTTLSRSSGSPKALDPSPRLLFFAKLHRCTYFCPRHLPLSLECPTAPQTPPGAAP

SEQ ID NO: 31173 - protein, 12 aa, Homo sapiens
MIFGGGLYLLNF

SEQ ID NO: 31174 - protein, 12 aa, Homo sapiens
MSIVVMIFLSTL

SEQ ID NO: 31175 - protein, 11 aa, Homo sapiens
MLVLGIMISTT

SEQ ID NO: 31176 - protein, 12 aa, Homo sapiens
VALPPEGKGCWR

SEQ ID NO: 31177 - protein, 15 aa, Homo sapiens
ITFFWFLTVFYSDGS

SEQ ID NO: 31178 - protein, 22 aa, Homo sapiens
LLLLFSASRWWTLEVEPCPARR

SEQ ID NO: 31179 - protein, 23 aa, Homo sapiens
RRCQKSFQRLLILELRLLCILST

SEQ ID NO: 31180 - protein, 9 aa, Homo sapiens
LAVLWGFWS

SEQ ID NO: 31181 - protein, 27 aa, Homo sapiens
LKLKKMKKKQQYPQKTIPTIRLKNHQY

SEQ ID NO: 31182 - protein, 380 aa, Homo sapiens
RSPGEGLEGGDWTCGEFPPKRQKPPPPPSSSARAERLPACRCCGRPPRPAMPGPATDAGKIPFCDAKEEIRAGLESSEGGGGPERPGARGQRQNIVWRNVVLMSLLHLGAVYSLVLIPKAKPLTLLWAYFCFLLAALGVTAGAHRLWSHRSYRAKLPLRIFLAVANSMAFQNDIFEWSRDHRAHHKYSETDADPHNARRGFFFSHIGWLFVRKHRDVIEKGRKLDVTDLLADPVVRIQRKYYKISVVLMCFVVPTLVPWYIWGESLWNSYFLASILRYTISLNISWLVNSAAHMYGNRPYDKHISPRQNPLVALGAIGEGFHNYHHTFPFDYSASEFGLNFNPTTWFIDFMCWLGLATDRKRATKPMIEARKARTGDSSA

SEQ ID NO: 31183 - protein, 26 aa, Homo sapiens
ILLSYQLLRLMGVSVFILSWEVAQMV

SEQ ID NO: 31184 - protein, 28 aa, Homo sapiens
LDVESVLSPGGIHRIRLSVCGQVTFRPG

SEQ ID NO: 31185 - protein, 15 aa, Homo sapiens
MLMVAVANFVALWNI

SEQ ID NO: 31186 - protein, 11 aa, Homo sapiens
RDLLLYKMKKM

SEQ ID NO: 31187 - protein, 9 aa, Homo sapiens
ILGLSGLLT

SEQ ID NO: 31188 - protein, 18 aa, Homo sapiens
VCCLIFFHTMSCSTVMLQ

SEQ ID NO: 31189 - protein, 19 aa, Homo sapiens
RKMMMMMKLMMMIQFLTGI

SEQ ID NO: 31190 - protein, 20 aa, Homo sapiens
LSLFLTLFSASLIKRLLCVP

SEQ ID NO: 31191 - protein, 15 aa, Homo sapiens
LFVISKATTDIRVLC

SEQ ID NO: 31192 - protein, 11 aa, Homo sapiens
RHRFLLNLLLL

SEQ ID NO: 31193 - protein, 14 aa, Homo sapiens
IGAFSCSLLLEFFS

SEQ ID NO: 31194 - protein, 26 aa, Homo sapiens
LLLALGVLLLVPVPWMKASLRASWEE

SEQ ID NO: 31195 - protein, 9 aa, Homo sapiens
ILSLQSSRL

SEQ ID NO: 31196 - protein, 3410 aa, Homo sapiens
IFPPNCNKPPSKAKMFINIKSILWMCSTLIVTHALHKVKVGKSPPVRGSLSGKVSLPCHFSTMPTLPPSYNTSEFLRIKWSKIEVDKNGKDLKETTVLVAQNGNIKIGQDYKGRVSVPTHPEAVGDASLTVVKLLASDAGLYRCDVMYGIEDTQDTVSLTVDGVVFHYRAATSRYTLNFEAAQKACLDVGAVIATPEQLFAAYEDGFEQCDAGWLADQTVRYPIRAPRVGCYGDKMGKAGVRTYGFRSPQETYDVYCYVDHLDGDVFHLTVPSKFTFEEAAKECENQDARLATVGELQAAWRNGFDQCDYGWLSDASVRHPVTVARAQCGGGLLGVRTLYRFENQTGFPPPDSRFDAYCFKPKEATTIDLSILAETASPSLSKEPQMVSDRTTPIIPLVDELPVIPTEFPPVGNIVSFEQKATVQPQAITDSLATKLPTPTGSTKKPWDMDDYSPSASGPLGKLDISEIKEEVLQSTTGVSHYATDSWDGVVEDKQTQESVTQIEQIEVGPLVTSMEILKHIPSKEFPVTETPLVTARMILESKTEKKMVSTVSELVTTGHYGFTLGEEDDEDRTLTVGSDESTLIFDQIPEVITVSKTSEDTIHTHLEDLESVSASTTVSPLIMPDNNGSSMDDWEERQTSGRITEEFLGKYLSTTPFPSQHRTEIELFPYSGDKILVEGISTVIYPSLQTEMTHRRERTETLIPEMRTDTYTDEIQEEITKSPFMGKTEEEVFSGMKLSTSLSEPIHVTESSVEMTKSFDFPTLITKLSAEPTEVRDMEEDFTATPGTTKYDENITTVLLAHGTLSVEAATVSKWSWDEDNTTSKPLESTEPSASSKLPPALLTTVGMNGKDKDIPSFTEDGADEFTLIPDSTQKQLEEVTDEDIAAHGKFTIRFQPTTSTGIAEKSTLRDSTTEEKVPPITSTEGQVYATMEGSALGEVEDVDLSKPVSTVPQFAHTSEVEGLAFVSYSSTQEPTTYVDSSHTIPLSVIPKTDWGVLVPSVPSEDEVLGEPSQDILVIDQTRLEATISPETMRTTKITEGTTQEEFPWKEQTAEKPVPALSSTAWTPKEAVTPLDEQEGDGSAYTVSEDELLTGSERVPVLETTPVGKIDHSVSYPPGAVTEHKVKTDEVVTLTPRIGPKVSLSPGPEQKYETEGSSTTGFTSSLSPFSTHITQLMEETTTEKTSLEDIDLGSGLFEKPKATELIEFSTIKVTVPSDITTAFSSVDRLHTTSAFKPSSAITKKPPLIDREPGEETTSDMVIIGESTSHVPPTTLEDIVAKETETDIDREYFTTSSPPATQPTRPPTVEDKEAFGPQALSTPQPPASTKFHPDINVYIIEVRENKTGRMSDLSVIGHPIDSESKEDEPCSEETDPVHDLMAEILPEFPDIIEIDLYHSEENEEEEEECANATDVTTTPSVQYINGKHLVTTVPKDPEAAEARRGQFESVAPSQNFSDSSESDTHPFVIAKTELSTAVQPNESTETTESLEVTWKPETYPETSEHFSGGEPDVFPTVPFHEEFESGTAKKGAESVTERDTEVGHQAHEHTEPVSLFPEESSGEIAIDQESQKIAFARATEVTFGEEVEKSTSVTYTPTIVPSSASAYVSEEEAVTLIGNPWPDDLLSTKESWVEATPRQVVELSGSSSIPITEGSGEAEEDEDTMFTMVTDLSQRNTTDTLITLDTSRIITESFFEVPATTIYPVSEQPSAKVVPTKFVSETDTSEWISSTTVEEKKRKEEEGTTGTASTFEVYSSTQRSDQLILPFELESPNVATSSDSGTRKSFMSLTTPTQSEREMTDSTPVFTETNTLENLGAQTTEHSSIHQPGVQEGLTTLPRSPASVFMEQGSGEAAADPETTTVSSFSLNVEYAIQAEKEVAGTLSPHVETTFSTEPTGLVLSTVMDRVVAENITQTSREIVISERLGEPNYGAEIRGFSTGFPLEEDFSGDFREYSTVSHPIAKEETVMMEGSGDAAFRDTQTSPSTVPTSVHISHISDSEGPSSTMVSTSAFPWEEFTSSAEGSGEQLVTVSSSVVPVLPSAVQKFSGTASSIIDEGLGEVGTVNEIDRRSTILPTAEVEGTKAPVEKEEVKVSGTVSTNFPQTIEPAKLWSRQEVNPVRQEIESETTSEEQIQEEKSFESPQNSPATEQTIFDSQTFTETELKTTDYSVLTTKKTYSDDKEMKEEDTSLVNMSTPDPDANGLESYTTLPEATEKSHFFLATALVTESIPAEHVVTDSPIKKEESTKHFPKGMRPTIQESDTELLFSGLGSGEEVLPTLPTESVNFTEVEQINNTLYPHTSQVESTSSDKIEDFNRMENVAKEVGPLVSQTDIFEGSGSVTSTTLIEILSDTGAEGPTVAPLPFSTDIGHPQNQTVRWAEEIQTSRPQTITEQDSNKNSSTAEINETTTSSTDFLARAYGFEMAKEFVTSAPKPSDLYYEPSGEGSGEVDIVDSFHTSATTQATRQESSTTFVSDGSLEKHPEVPSAKAVTADGFPTVSVMLPLHSEQNKSSPDPTSTLSNTVSYERSTDGSFQDRFREFEDSTLKPNRKKPTENIIIDLDKEDKDLILTITESTILEILPELTSDKNTIIDIDHTKPVYEDILGMQTDIDTEVPSEPHDSNDESNDDSTQVQEIYEAAVNLSLTEETFEGSADVLASYTQATHDESMTYEDRSQLDHMGFHFTTGIPAPSTETELDVLLPTATSLPIPRKSATVIPEIEGIKAEAKALDDMFESSTLSDGQAIADQSEIIPTLGQFERTQEEYEDKKHAGPSFQPEFSSGAEEALVDHTPYLSIATTHLMDQSVTEVPDVMEGSNPPYYTDTTLAVSTFAKLSSQTPSSPLTIYSGSEASGHTEIPQPSALPGIDVGSSVMSPQDSFKEIHVNIEATFKPSSEEYLHITEPPSLSPDTKLEPSEDDGKPELLEEMEASPTELIAVEGTEILQDFQNKTDGQVSGEAIKMFPTIKTPEAGTVITTADEIELEGATQWPHSTSASATYGVEAGVVPWLSPQTSERPTLSSSPEINPETQAALIRGQDSTIAASEQQVAARILDSNDQATVNPVEFNTEVATPPFSLLETSNETDFLIGINEESVEGTAIYLPGPDRCKMNPCLNGGTCYPTETSYVCTCVPGYSGDQCELDFDECHSNPCRNGATCVDGFNTFRCLCLPSYVGALCEQDTETCDYGWHKFQGQCYKYFAHRRTWDAAERECRLQGAHLTSILSHEEQMFVNRVGHDYQWIGLNDKMFEHDFRWTDGSTLQYENWRPNQPDSFFSAGEDCVVIIWHENGQWNDVPCNYHLTYTCKKGTVACGQPPVVENAKTFGKMKPRYEINSLIRYHCKDGFIQRHLPTIRCLGNGRWAIPKITCMNPSAYQRTYSMKYFKNSSSAKDNSINTSKHDHRWSRRWQESRR

SEQ ID NO: 31197 - protein, 48 aa, Homo sapiens
KPLPNALGTSLLFCFSLFDVSTACLDFPHLLLKQETPLHVPRQYGVVR

SEQ ID NO: 31198 - protein, 25 aa, Homo sapiens
IIRRNWMSPLNLLKSLYFLLMNCME

SEQ ID NO: 31199 - protein, 15 aa, Homo sapiens
VASGPAMTLQRRTHT

SEQ ID NO: 31200 - protein, 21 aa, Homo sapiens
TFRHSNAGFVRVCLLSGLAGC

SEQ ID NO: 31201 - protein, 11 aa, Homo sapiens
LLARNVLLIWA

SEQ ID NO: 31202 - protein, 1112 aa, Homo sapiens
ISSKDTMRLPGAMPALALKGELLLLSLLLLLEPQISQGLVVTPPGPELVLNVSSTFVLTCSGSAPVVWERMSQEPPQEMAKAQDGTFSSVLTLTNLTGLDTGEYFCTHNDSRGLETDERKRLYIFVPDPTVGFLPNDAEELFIFLTEITEITIPCRVTDPQLVVTLHEKKGDVALPVPYDHQRGFSGIFEDRSYICKTTIGDREVDSDAYYVYRLQVSSINVSVNAVQTVVRQGENITLMCIVIGNEVVNFEWTYPRKESGRLVEPVTDFLLDMPYHIRSILHIPSAELEDSGTYTCNVTESVNDHQDEKAINITVVESGYVRLLGEVGTLQFAELHRSRTLQVVFEAYPPPTVLWFKDNRTLGDSSAGEIALSTRNVSETRYVSELTLVRVKVAEAGHYTMRAFHEDAEVQLSFQLQINVPVRVLELSESHPDSGEQTVRCRGRGMPQPNIIWSACRDLKRCPRELPPTLLGNSSEEESQLETNVTYWEEEQEFEVVSTLRLQHVDRPLSVRCTLRNAVGQDTQEVIVVPHSLPFKVVVISAILALVVLTIISLIILIMLWQKKPRYEIRWKVIESVSSDGHEYIYVDPMQLPYDSTWELPRDQLVLGRTLGSGAFGQVVEATAHGLSHSQATMKVAVKMLKSTARSSEKQALMSELKIMSHLGPHLNVVNLLGACTKGGPIYIITEYCRYGDLVDYLHRNKHTFLQHHSDKRRPPSAELYSNALPVGLPLPSHVSLTGESDGGYMDMSKDESVDYVPMLDMKGDVKYADIESSNYMAPYDNYVPSAPERTCRATLINESPVLSYMDLVGFSYQVANGMEFLASKNCVHRDLAARNVLICEGKLVKICDFGLARDIMRDSNYISKGSTFLPLKWMAPESIFNSLYTTLSDVWSFGILLWEIFTLGGTPYPELPMNEQFYNAIKRGYRMAQPAHASDEIYEIMQKCWEEKFEIRPPFSQLVLLLERLLGEGYKKKYQQVDEEFLRSDHPAILRSQARLPGFHGLRSPLDTSSVLYTAVQPNEGDNDYIIPLPDPKPEVADEGPLEGSPSLASSTLNEVNTSSTISCDSPLEPQDEPEPEPQLELQVEPEPELEQLPDSGCPAPRAEAEDSFL

SEQ ID NO: 31203 - protein, 22 aa, Homo sapiens
VAQPGNRREALHKLRPGKKKPD

SEQ ID NO: 31204 - protein, 12 aa, Homo sapiens
LVTIGMRRKRPT

SEQ ID NO: 31205 - protein, 420 aa, Homo sapiens
TMSCAGRAGPARLAALALLTCSLWPARADNASQEYYTALINVTVQEPGRGAPLTFRIDRGRYGLDSPKAEVRGQVLAPLPLHGVADHLGCDPQTRFFVPPNIKQWIALLQRGNCTFKEKISRAAFHNAVAVVIYNNKSKEEPVTMTHPGTGDIIAVMITELRGKDILSYLEKNISVQMTIAVGTRMPPKNFSRGSLVFVSISFIVLMIISSAWLIFYFIQKIRYTNARDRNQRRLGDAAKKAISKLTTRTVKKGDKETDPDFDHCAVCIESYKQNDVVRILPCKHVFHKSCVDPWLSEHCTCPMCKLNILKALGIVPNLPCTDNVAFDMERLTRTQAVNRRSALGDLAGDNSLGLEPLRTSGISPLPQDGELTPRTGEINIAVTKEWFIIASFGLLSALTLCYMIIRATASLNANEVEWF

SEQ ID NO: 31206 - protein, 33 aa, Homo sapiens
LHHYGDEDTNCQASEPKLSHHISCDLHIYIQMT

SEQ ID NO: 31207 - protein, 42 aa, Homo sapiens
ILWALILQWEYQGLSFLCLDPLGPSWPWWVKTLICPVTCSRP

SEQ ID NO: 31208 - protein, 16 aa, Homo sapiens
IVFILLWFECSLQHSC

SEQ ID NO: 31209 - protein, 9 aa, Homo sapiens
IILKMMGKL

SEQ ID NO: 31210 - protein, 38 aa, Homo sapiens
KQLIRMAMTMRTTGNEPGTQAPMSLCKASLLPSAESRD

SEQ ID NO: 31211 - protein, 11 aa, Homo sapiens
VRRLLWLTLAT

SEQ ID NO: 31212 - protein, 12 aa, Homo sapiens
ITSRVFLTVTIV

SEQ ID NO: 31213 - protein, 14 aa, Homo sapiens
LFLVLIYFCLPFPT

SEQ ID NO: 31214 - protein, 25 aa, Homo sapiens
ILSELLLSSSMVFLLVNYGAQFCLC

SEQ ID NO: 31215 - protein, 10 aa, Homo sapiens
MRRLQLLLLC

SEQ ID NO: 31216 - protein, 52 aa, Homo sapiens
LEAQVVLLLLSHGARCFLITWLPPRPLCSCLLFGCRRCCLWPPAFCCYPESC

SEQ ID NO: 31217 - protein, 743 aa, Homo sapiens
IRKAERRRTEASGGGGGRGRRRSWRRAGAEGVSEADARGRGGKGREGKGGSRGGARAHRERARRRVELDRVCCQRRELRPPFYNSSTRAGHREQRARVSRNPIPSDRISPPQPNGEISGNMATEHVNGNGTEEPMDTTSAVIHSENFQTLLDAGLPQKVAEKLDEIYVAGLVAHSDLDERAIEALKEFNEDGALAVLQQFKDSDLSHVQNKSAFLCGVMKTYRQREKQGTKVADSSKGPDEAKIKALLERTGYTLDVTTGQRKYGGPPPDSVYSGQQPSVGTEIFVGKIPRDLFEDELVPLFEKAGPIWDLRLMMDPLTGLNRGYAFVTFCTKEAAQEAVKLYNNHEIRSGKHIGVCISVANNRLFVGSIPKSKTKEQILEEFSKVTEGLTDVILYHQPDDKKKNRGFCFLEYEDHKTAAQARRRLMSGKVKVWGNVGTVEWADPIEDPDPEVMAKVKVLFVRNLANTVTEEILEKAFSQFGKLERVKKLKDYAFIHFDERDGAVKAMEEMNGKDLEGENIEIVFAKPPDQKRKERKAQRQAAKNQMYDDYYYYGPPHMPPPTRGRGRGGRGGYGYPPDYYGYEDYYDYYGYDYHNYRGGYEDPYYGYEDFQVGARGRGGRGARGAAPSRGRGAAPPRGRAGYSQRGGPGSARGVRGARGGAQQQRGRGVRGARGGRGGNVGGKRKADGYNQPDSKRRQTNNQNWGSQPIAQQPLQGGDHSGNYGYKSENQEFYQDTFGQQWK

SEQ ID NO: 31218 - protein, 39 aa, Homo sapiens
VLLPSVLLLPLFQFPRLCLADCDTVRGLRGGEGNLSVIA

SEQ ID NO: 31219 - protein, 11 aa, Homo sapiens
TIVMLSMLSSL

SEQ ID NO: 31220 - protein, 14 aa, Homo sapiens
LDWLCFSFSLALST

SEQ ID NO: 31221 - protein, 10 aa, Homo sapiens
LLPFQQKGNS

SEQ ID NO: 31222 - protein, 10 aa, Homo sapiens
MLRFLTVCFA

SEQ ID NO: 31223 - protein, 10 aa, Homo sapiens
KLKFPSLSRN

SEQ ID NO: 31224 - protein, 13 aa, Homo sapiens
VVLLAVPARGHPA

SEQ ID NO: 31225 - protein, 16 aa, Homo sapiens
MIFRQNLRMLVLLKLC

SEQ ID NO: 31226 - protein, 13 aa, Homo sapiens
MSLWHPFPKFRWW

SEQ ID NO: 31227 - protein, 49 aa, Homo sapiens
MSLWHPFPKFSLGTPRTPAGSHCSRTALVKITQTWISKEYFHCSVCNTK

SEQ ID NO: 31228 - protein, 125 aa, Homo sapiens
ISFLHIQVRWRLLWRLGPRALETSALAPASLLPWPGAAALPRRQHGWPPGRGLGGGGPAARRGRLLLHLQADPGSAAGRPRARDTLFEVRRCPGRRDVRGSVVRALGPASDGRYLGVTVVQDLAA

SEQ ID NO: 31229 - protein, 94 aa, Homo sapiens
ISFLHIQVRWRLLWRLGPRALETSALAPASLLPWPGAAALPRRQHGWPPGRGLGGGGPAARRGRLLLHLQADPGSAAGRPRARDTLFEVRRRLN

SEQ ID NO: 31230 - protein, 717 aa, Homo sapiens
ITFLKKKAKMKDMPLRIHVLLGLAITTLVQAVDKKVDCPRLCTCEIRPWFTPRSIYMEASTVDCNDLGLLTFPARLPANTQILLLQTNNIAKIEYSTDFPVNLTGLDLSQNNLSSVTNINVKKMPQLLSVYLEENKLTELPEKCLSELSNLQELYINHNLLSTISPGAFIGLHNLLRLHLNSNRLQMINSKWFDALPNLEILMIGENPIIRIKDMNFKPLINLRSLVIAGINLTEIPDNALVGLENLESISFYDNRLIKVPHVALQKVVNLKFLDLNKNPINRIRRGDFSNMLHLKELGINNMPELISIDSLAVDNLPDLRKIEATNNPRLSYIHPNAFFRLPKLESLMLNSNALSALYHGTIESLPNLKEISIHSNPIRCDCVIRWMNMNKTNIRFMEPDSLFCVDPPEFQGQNVRQVHFRDMMEICLPLIAPESFPSNLNVEAGSYVSFHCRATAEPQPEIYWITPSGQKLLPNTLTDKFYVHSEGTLDINGVTPKEGGLYTCIATNLVGADLKSVMIKVDGSFPQDNNGSLNIKIRDIQANSVLVSWKASSKILKSSVKWTAFVKTENSHAAQSARIPSDVKVYNLTHLNPSTEYKICIDIPTIYQKNRKKCVNVTTKGLHPDQKEYEKNNTTTLMACLGGLLGIIGVICLISCLSPEMNCDGGHSYVRNYLQKPTFALGELYPPLINLWEAGKEKSTSLKVKATVIGLPTNMS

SEQ ID NO: 31231 - protein, 58 aa, Homo sapiens
LFPSRFNYTTKKTKILSVARFGLLRNLHTYSFPVCYTNSHRYYSYGPIFCHASTDKIR

SEQ ID NO: 31232 - protein, 82 aa, Homo sapiens
IIILLIVLFLDAVREVRKYSSVHTIEKSSTSRPDAYEHTQMKLFRSQRNLYISGFSLFFWLFETSGYAYYSTGKRTVKQRCT

SEQ ID NO: 31233 - protein, 11 aa, Homo sapiens
MLNLVALMILI

SEQ ID NO: 31234 - protein, 12 aa, Homo sapiens
MISLVMMWTLIM

SEQ ID NO: 31235 - protein, 15 aa, Homo sapiens
KKTVDHRKIMISLLL

SEQ ID NO: 31236 - protein, 26 aa, Homo sapiens
VPGLERKSFKRSKNEPAVGREWGVGG

SEQ ID NO: 31237 - protein, 17 aa, Homo sapiens
KWGMTSWGTLWWASGCG

SEQ ID NO: 31238 - protein, 41 aa, Homo sapiens
VVVKMVTLMMMVMMMMMTEVVMAYPFISVCHAHPIENHRKR

SEQ ID NO: 31239 - protein, 12 aa, Homo sapiens
RPVIVAMSLVLV

SEQ ID NO: 31240 - protein, 15 aa, Homo sapiens
VCLFARLVIYLLCLN

SEQ ID NO: 31241 - protein, 47 aa, Homo sapiens
ITRWCILICFMKTCPFSISSLRCPSTLSLELACRDFVRMGEAAGVVF

SEQ ID NO: 31242 - protein, 17 aa, Homo sapiens
MFCGFFFFLSRCFLFLN

SEQ ID NO: 31243 - protein, 13 aa, Homo sapiens
IFLLHLFHCITHL

SEQ ID NO: 31244 - protein, 10 aa, Homo sapiens
RWWQTSRFLL

SEQ ID NO: 31245 - protein, 13 aa, Homo sapiens
RKERIRQCFLILF

SEQ ID NO: 31246 - protein, 11 aa, Homo sapiens
ILNTTFCLWIL

SEQ ID NO: 31247 - protein, 37 aa, Homo sapiens
VVVFWLLLLFAHAFHHHLLSSDCEENPQSRESLYPRE

SEQ ID NO: 31248 - protein, 9 aa, Homo sapiens
MLANLFHGH

SEQ ID NO: 31249 - protein, 9 aa, Homo sapiens
LLLPQVSHR

SEQ ID NO: 31250 - protein, 22 aa, Homo sapiens
ICGLGMWLINLICWPNVPHVIK

SEQ ID NO: 31251 - protein, 18 aa, Homo sapiens
LHSPPHVHRDLHEEHPTI

SEQ ID NO: 31252 - protein, 9 aa, Homo sapiens
MRVYFLCAL

SEQ ID NO: 31253 - protein, 8 aa, Homo sapiens
MMMILSHT

SEQ ID NO: 31254 - protein, 20 aa, Homo sapiens
IVTLQRATVMALECLGKRRA

SEQ ID NO: 31255 - protein, 12 aa, Homo sapiens
IKYSFPSQGKLC

SEQ ID NO: 31256 - protein, 32 aa, Homo sapiens
LWLGCWQVLAGLAGIAVDCLRGAAARSARGPA

SEQ ID NO: 31257 - protein, 37 aa, Homo sapiens
LEGIMILDKTKAPNLTMFCLLSLAACKQLFAKNPGHC

SEQ ID NO: 31258 - protein, 25 aa, Homo sapiens
KKLQECILLMTMTTLLRLARELMRM

SEQ ID NO: 31259 - protein, 24 aa, Homo sapiens
MLRRTTVFLLNLVFEMSCWDMQIK

SEQ ID NO: 31260 - protein, 15 aa, Homo sapiens
MQKPRVVFLLMMQIL

SEQ ID NO: 31261 - protein, 37 aa, Homo sapiens
LMFGCVRSFFLLVGSWSRWLGSEAADVCEKSKYMTTV

SEQ ID NO: 31262 - protein, 33 aa, Homo sapiens
LMFGCVRSFFLLVGSWSRWLGSEAADVCGTREL

SEQ ID NO: 31263 - protein, 19 aa, Homo sapiens
KTLPGPAPSSAPSHHGQRQ

SEQ ID NO: 31264 - protein, 1232 aa, Homo sapiens
TRSETREPGAMSQPPPPPPPLPPPPPPPEAPQTPSSLASAAASGGLLKRRDRRILSGSCPDPKCQARLFFPASGSVSIECTECGQRHEQQQLLGVEEVTDPDVVLHNLLRNALLGVTGAPKKNTELVKVMGLSNYHCKLLSPILARYGMDKQTGRAKLLRDMNQGELFDCALLGDRAFLIEPEHVNTVGYGKDRSGSLLYLHDTLEDIKRANKSQECLIPVHVDGDGHCLVHAVSRALVGRELFWHALRENLKQHFQQHLARYQALFHDFIDAAEWEDIINECDPLFVPPEGVPLGLRNIHIFGLANVLHRPIILLDSLSGMRSSGDYSATFLPGLIPAEKCTGKDGHLNKPICIAWSSSGRNHYIPLVGIKGAALPKLPMNLLPKAWGVPQDLIKKYIKLEEDGGCVIGGDRSLQDKYLLRLVAAMEEVFMDKHGIHPSLVADVHQYFYRRTGVIGVQPEEVTAAAKKAVMDNRLHKCLLCGALSELHVPPEWLAPGGKLYNLAKSTHGQLRTDKNYSFPLNNLVCSYDSVKDVLVPDYGMSNLTACNWCHGTSVRKVRGDGSIVYLDGDRTNSRSTGGKCGCGFKHFWDGKEYDNLPEAFPITLEWGGRVVRETVYWFQYESDSSLNSNVYDVAMKLVTKHFPGEFGSEILVQKVVHTILHQTAKKNPDDYTPVNIDGAHAQRVGDVQGQESESQLPTKIILTGQKTKTLHKEELNMSKTERTIQQNITEQASVMQKRKTEKLKQEQKGQPRTVSPSTIRDGPSSAPATPTKAPYSPTTSKEKKIRITTNDGRQSMVTLKSSTTFFELQESIAREFNIPPYLQCIRYGFPPKELMPPQAGMEKEPVPLQHGDRITIEILKSKAEGGQSAAAHSAHTVKQEDIAVTGKLSSKELQEQAEKEMYSLCLLATLMGEDVWSYAKGLPHMFQQGGVFYSIMKKTMGMADGKHCTFPHLPGKTFVYNASEDRLELCVDAAGHFPIGPDVEDLVKEAVSQVRAEATTRSRESSPSHGLLKLGSGGVVKKKSEQLHNVTAFQGKGHSLGTASGNPHLDPRARETSVVRKHNTGTDFSNSSTKTEPSVFTASSSNSELIRIAPGVVTMRDGRQLDPDLVEAQRKKLQEMVSSIQASMDRHLRDQSTEQSPSDLPQRKTEVVSSSAKSGSLQTGLPESFPLTGGTENLNTETTDGCVADALGAAFATRSKAQRGNSVEELEEMDSQDAEMTNTTEPMDHS

SEQ ID NO: 31265 - protein, 10 aa, Homo sapiens
ILKKVIIAVV

SEQ ID NO: 31266 - protein, 14 aa, Homo sapiens
LTPELKLYMFFLFG

SEQ ID NO: 31267 - protein, 11 aa, Homo sapiens
LLCCLLALLIM

SEQ ID NO: 31268 - protein, 17 aa, Homo sapiens
MRLLQPASVLFLLASNL

SEQ ID NO: 31269 - protein, 11 aa, Homo sapiens
MLMESHKPLGF

SEQ ID NO: 31270 - protein, 30 aa, Homo sapiens
IPPPVGRQWRAQFRSWVWWGCCLCLRCPGS

SEQ ID NO: 31271 - protein, 11 aa, Homo sapiens
MMISIFMSTIW

SEQ ID NO: 31272 - protein, 11 aa, Homo sapiens
LWITSCWLIAL

SEQ ID NO: 31273 - protein, 14 aa, Homo sapiens
ICLSLGLTWWAMAA

SEQ ID NO: 31274 - protein, 14 aa, Homo sapiens
MALGGGSTWRPRRP

SEQ ID NO: 31275 - protein, 40 aa, Homo sapiens
LALLGFLTVATSLPLPKGNLANGSCPLGRCWAPGRAQMMG

SEQ ID NO: 31276 - protein, 10 aa, Homo sapiens
MQTLLLQVLL

SEQ ID NO: 31277 - protein, 18 aa, Homo sapiens
IPCLRKGLRILALVFVCR

SEQ ID NO: 31278 - protein, 8 aa, Homo sapiens
MDNLLDFA

SEQ ID NO: 31279 - protein, 15 aa, Homo sapiens
KMTCTVRLVLCVAMN

SEQ ID NO: 31280 - protein, 20 aa, Homo sapiens
LGLNRVTWILSFLPSHMLTF

SEQ ID NO: 31281 - protein, 12 aa, Homo sapiens
LLLIISEKNTEL

SEQ ID NO: 31282 - protein, 9 aa, Homo sapiens
LIDRIAGLR

SEQ ID NO: 31283 - protein, 64 aa, Homo sapiens
MKTLMQEVGRTWTNFSTGSASAAPRASSPFPSSPGGRRCPRWWPRCWAAAARPAGGQCRAPGCA

SEQ ID NO: 31284 - protein, 16 aa, Homo sapiens
LLIVHWVWPLVLTSVC

SEQ ID NO: 31285 - protein, 9 aa, Homo sapiens
ISRTLVFLL

SEQ ID NO: 31286 - protein, 20 aa, Homo sapiens
VPTWRMHLLLLEVSAVAGLL

SEQ ID NO: 31287 - protein, 806 aa, Homo sapiens
TGPDRERSRSGSRSRAAGAAGAAGAGEAGRAGLHGASGVRLSSAGNSGGVGRIGPRHLLAMGDVLSTHLDDARRQHIAEKTGKILTEFLQFYEDQYGVALFNSMRHEIEGTGLPQAQLLWRKVPLDERIVFSGNLFQHQEDSKKWRNRFSLVPHNYGLVLYENKAAYERQVPPRAVINSAGYKILTSVDQYLELIGNSLPGTTAKSGSAPILKCPTQFPLILWHPYARHYYFCMMTEAEQDKWQAVLQDCIRHCNNGIPEDSKVEGPAFTDAIRMYRQSKELYGTWEMLCGNEVQILSNLVMEELGPELKAELGPRLKGKPQERQRQWIQISDAVYHMVYEQAKARFEEVLSKVQQVQPAMQAVIRTDMDQIITSKEHLASKIRAFILPKAEVCVRNHVQPYIPSILEALMVPTSQGFTEVRDVFFKEVTDMNLNVINEGGIDKLGEYMEKLSRLAYHPLKMQSCYEKMESLRLDGLQQRFDVSSTSVFKQRAQIHMREQMDNAVYTFETLLHQELGKGPTKEELCKSIQRVLERVLKKYDYDSSSVRKRFFREALLQISIPFLLKKLAPTCKSELPRFQELIFEDFARFILVENTYEEVVLQTVMKDILQAVKEAAVQRKHNLYRDSMVMHNSDPNLHLLAEGAPIDWGEEYSNSGGGGSPSPSTPESATLSEKRRRAKQVVSVVQDEEVGLPFEASPESPPPASPDGVTEIRGLLAQGLRPESPPPAGPLLNGAPAGESPQPKAAPEASSPPASPLQHLLPGKAVDLGPPKPSDQETGEQVSSPSSHPALHTTTEDSAGVQTEF

SEQ ID NO: 31288 - protein, 15 aa, Homo sapiens
MWLCLRTWLERPQLL

SEQ ID NO: 31289 - protein, 19 aa, Homo sapiens
MTCYSKEWSIGYCNFNFLF

SEQ ID NO: 31290 - protein, 28 aa, Homo sapiens
KSFLIFLIHHLMFLRDYRCLMIPVTREE

SEQ ID NO: 31291 - protein, 21 aa, Homo sapiens
KKFRNWVLIMDLMLVSSTKLS

SEQ ID NO: 31292 - protein, 12 aa, Homo sapiens
RSWSVLGMLLMK

SEQ ID NO: 31293 - protein, 14 aa, Homo sapiens
ITQFWMMWAMVSSG

SEQ ID NO: 31294 - protein, 19 aa, Homo sapiens
MVAPTWVILRMGSLMALGY

SEQ ID NO: 31295 - protein, 20 aa, Homo sapiens
MGGGGWPPRRPWPAGIGCQW

SEQ ID NO: 31296 - protein, 43 aa, Homo sapiens
LREMVTSSRPARSQKIKMEKNKVKLYHCLKMKHSPGQVPKQLR

SEQ ID NO: 31297 - protein, 44 aa, Homo sapiens
LVTGEAAGGGGGGGTRREDGLALNFAQVEKCTRPGGENTSPGLG

SEQ ID NO: 31298 - protein, 32 aa, Homo sapiens
MKTGWTMQSGALGPRGQLGRCRKLSLLGGSPK

SEQ ID NO: 31299 - protein, 12 aa, Homo sapiens
MIPMVSREKTSS

SEQ ID NO: 31300 - protein, 13 aa, Homo sapiens
RCHRFIRALSFLV

SEQ ID NO: 31301 - protein, 12 aa, Homo sapiens
LTCAWALVGLGF

SEQ ID NO: 31302 - protein, 31 aa, Homo sapiens
MTGCRRLETQKEKRSSRIQALPRCFLFSKTG

SEQ ID NO: 31303 - protein, 644 aa, Homo sapiens
TGQTNQPRVGSATMPRYGASLRQSCPRSGREQGQDGTAGAPGLLWMGLVLALALALALALALSDSRVLWAPAEAHPLSPQGHPARLHRIVPRLRDVFGWGNLTCPICKGLFTAINLGLKKEPNVARVGSVAIKLCNLLKIAPPAVCQSIVHLFEDDMVEVWRRSVLSPSEACGLLLGSTCGHWDIFSSWNISLPTVPKPPPKPPSPPAPGAPVSRILFLTDLHWDHDYLEGTDPDCADPLCCRRGSGLPPASRPGAGYWGEYSKCDLPLRTLESLLSGLGPAGPFDMVYWTGDIPAHDVWHQTRQDQLRALTTVTALVRKFLGPVPVYPAVGNHESTPVNSFPPPFIEGNHSSRWLYEAMAKAWEPWLPAEALRTLRIGGFYALSPYPGLRLISLNMNFCSRENFWLLINSTDPAGQLQWLVGELQAAEDRGDKVHIIGHIPPGHCLKSWSWNYYRIVARYENTLAAQFFGHTHVDEFEVFYDEETLSRPLAVAFLAPSATTYIGLNPGYRVYQIDGNYSGSSHVVLDHETYILNLTQANIPGAIPHWQLLYRARETYGLPNTLPTAWHNLVYRMRGDMQLFQTFWFLYHKGHPPSEPCGTPCRLATLCAQLSARADSPALCRHLMPDGSLPEAQSLWPRPLFC

SEQ ID NO: 31304 - protein, 17 aa, Homo sapiens
LSSYGWTLWWRIALVGA

SEQ ID NO: 31305 - protein, 11 aa, Homo sapiens
LLLSWIVATIV

SEQ ID NO: 31306 - protein, 12 aa, Homo sapiens
ILGFGILRMSIC

SEQ ID NO: 31307 - protein, 10 aa, Homo sapiens
IFLMTLTCVG

SEQ ID NO: 31308 - protein, 42 aa, Homo sapiens
LVQDKGDPAEGARLDPGRDQDIGFEGPWRRWLPHWPQVELHE

SEQ ID NO: 31309 - protein, 45 aa, Homo sapiens
IFVLRSLLPASSLLWWLGCFFHDFLNLDWAVLCVKPISCDLLLTV

SEQ ID NO: 31310 - protein, 12 aa, Homo sapiens
VRGSLSLLLLPL

SEQ ID NO: 31311 - protein, 51 aa, Homo sapiens
IVYVWVSLSPPLVLILTCRNTQQTHVCEGPEKPDPVRKNSLFTLNKPNIPF

SEQ ID NO: 31312 - protein, 16 aa, Homo sapiens
MMILGITSLLQMHTMC

SEQ ID NO: 31313 - protein, 19 aa, Homo sapiens
LLFESILRGTERIRMLNSV

SEQ ID NO: 31314 - protein, 17 aa, Homo sapiens
IPVLSDFQIWLQMLFLC

SEQ ID NO: 31315 - protein, 16 aa, Homo sapiens
ILEVVLMLILLWLLAS

SEQ ID NO: 31316 - protein, 14 aa, Homo sapiens
VQVWALTWLWMQSF

SEQ ID NO: 31317 - protein, 16 aa, Homo sapiens
MDGGRAEAFASLPTSP

SEQ ID NO: 31318 - protein, 20 aa, Homo sapiens
VSRAWGRVDPGEGGRGLESV

SEQ ID NO: 31319 - protein, 16 aa, Homo sapiens
KRSTLFREHPQVLGCH

SEQ ID NO: 31320 - protein, 15 aa, Homo sapiens
MPLTFYSLCLLGLSR

SEQ ID NO: 31321 - protein, 22 aa, Homo sapiens
LSFLIPSLTIVPPTLPSSRSAE

SEQ ID NO: 31322 - protein, 12 aa, Homo sapiens
TFVCVCLLFAAS

SEQ ID NO: 31323 - protein, 30 aa, Homo sapiens
RNCLGTTKGMRKRMTTPMRASPMADGIPAA

SEQ ID NO: 31324 - protein, 32 aa, Homo sapiens
MVVLMFLSAGPIVPLLRNVSPVQGQRLKRLLY

SEQ ID NO: 31325 - protein, 24 aa, Homo sapiens
KSWLAMVFLCRILSLMVATKILLK

SEQ ID NO: 31326 - protein, 9 aa, Homo sapiens
MKLLSFLLI

SEQ ID NO: 31327 - protein, 9 aa, Homo sapiens
REALWTEEQ

SEQ ID NO: 31328 - protein, 13 aa, Homo sapiens
TSQGYLWTFWAFL

SEQ ID NO: 31329 - protein, 7 aa, Homo sapiens
MVPARTM

SEQ ID NO: 31330 - protein, 17 aa, Homo sapiens
RREMDMAHCSTILLLFL

SEQ ID NO: 31331 - protein, 7 aa, Homo sapiens
LPIPLHR

SEQ ID NO: 31332 - protein, 18 aa, Homo sapiens
MIATLLLDLLVVKLFYTV

SEQ ID NO: 31333 - protein, 35 aa, Homo sapiens
ILAIGARACEPVGVAAAGTIGLSRGRHVAFRGGSI

SEQ ID NO: 31334 - protein, 1582 aa, Homo sapiens
VAGGAGMAERGLEPSPAAVAALPPEVRAQLAELELELSEGDITQKGYEKKRSKLLSPYSPQTQETDSAVQKELRNQTPAPSAAQTSAPSKYHRTRSGGARDERYRSDIHTEAVQAALAKHKEQKMALPMPTKRRSTFVQSPADACTPPDTSSASEDEGSLRRQAALSAALQQSLQNAESWINRSIQGSSTSSSASSTLSHGEVKGTSGSLADVFANTRIENFSAPPDVTTTTSSSSSSSSIRPANIDLPPSGIVKGMHKGSNRSSLMDTADGVPVSSRVSTKIQQLLNTLKRPKRPPLKEFFVDDSEEIVEVPQPDPNQPKPEGRQMTPVKGEPLGVICNWPPALESALQRWGTTQAKCSCLTALDMTGKPVYTLTYGKLWSRSLKLAYTLLNKLGTKNEPVLKPGDRVALVYPNNDPVMFMVAFYGCLLAEVIPVPIEVPLTRKDAGGQQIGFLLGSCGIALALTSEVCLKGLPKTQNGEIVQFKGWPRLKWVVTDSKYLSKPPKDWQPHISPAGTEPAYIEYKTSKEGSVMGVTVSRLAMLSHCQALSQACNYSEGETIVNVLDFKKDAGLWHGMFANVMNKMHTISVPYSVMKTCPLSWVQRVHAHKAKVALVKCRDLHWAMMAHRDQRDVSLSSLRMLIVTDGANPWSVSSCDAFLSLFQSHGLKPEAICPCATSAEAMTVAIRRPGVPGAPLPGRAILSMNGLSYGVIRVNTEDKNSALTVQDVGHVMPGGMMCIVKPDGPPQLCKTDEIGEICVSSRTGGMMYFGLAGVTKNTFEVIPVNSAGSPVGDVPFIRSGLLGFVGPGSLVFVVGKMDGLLMVSGRRHNADDIVATGLAVESIKTVYRGRIAVFSVSVFYDERIVVVAEQRPDASEEDSFQWMSRVLQAIDSIHQVGVYCLALVPANTLPKTPLGGIHISQTKQLFLEGSLHPCNILMCPHTCVTNLPKPRQKQPGVGPASVMVGNLVAGKRIAQAAGRDLGQIEENDLVRKHQFLAEILQWRAQATPDHVLFMLLNAKGTTVCTASCLQLHKRAERIASVLGDKGHLNAGDNVVLLYPPGIELIAAFYGCLYAGCIPVTVRPPHAQNLTATLPTVRMIVDVSKAACILTSQTLMRLLRSREAAAAVDVKTWPTIIDTDDLPRKRLPQLYKPPTPEMLAYLDFSVSTTGMLTGVKMSHSAVNALCRAIKLQCELYSSRQIAICLDPYCGLGFALWCLCSVYSGHQSVLIPPMELENNLFLWLSTVNQYKIRDTFCSYSVMELCTKGLGNQVEVLKTRGINLSCVRTCVVVAEERPRVALQQSFSKLFKDIGLSPRAVSTTFGSRVNVAICLQGTSGPDPTTVYVDLKSLRHDRVRLVERGAPQSLLLSESGKILPGVKVVIVNPETKGPVGDSHLGEIWVNSPHTASGYYTIYDSETLQADHFNTRLSFGDAAQTLWARTGYLGFVRRTELTAATGERHDALYVVGALDETLELRGLRYHPIDIETSVSRIHRSIAECAVFTWTNLLVVVVELCGSEQEALDLVPLVTNVVLEEHYLIVGVVVVVDPGVIPINSRGEKQRMHLRDSFLADQLDPIYVAYNM

SEQ ID NO: 31335 - protein, 9 aa, Homo sapiens
IIPYNVRKD

SEQ ID NO: 31336 - protein, 25 aa, Homo sapiens
ILLRTLLVVVLIDFLLSIYLKDGTD

SEQ ID NO: 31337 - protein, 17 aa, Homo sapiens
VLYFYTPLSWNCLIFVL

SEQ ID NO: 31338 - protein, 17 aa, Homo sapiens
TSAPKEGSGGTPPRAQD

SEQ ID NO: 31339 - protein, 55 aa, Homo sapiens
VCGRGVSGPGVAAVRRGCPRGGISGTWRRPRFLLREPAPWQPPATPPPSRPRLVW

SEQ ID NO: 31340 - protein, 13 aa, Homo sapiens
RMQLRWTLCLVMA

SEQ ID NO: 31341 - protein, 46 aa, Homo sapiens
IWFPCGFPGIGLTLLTLSPKLECSGTVTAHCSLHFLDSSDLLTSAF

SEQ ID NO: 31342 - protein, 21 aa, Homo sapiens
MNQTDQVAGKSVVIVGPGFRI

SEQ ID NO: 31343 - protein, 31 aa, Homo sapiens
RQAMMLILKTMMAGHLFMLQLIGVKKKHVEF

SEQ ID NO: 31344 - protein, 18 aa, Homo sapiens
RQQLLLIGGLCYWAALQL

SEQ ID NO: 31345 - protein, 17 aa, Homo sapiens
RQLLLIGGLCYWAALQL

SEQ ID NO: 31346 - protein, 20 aa, Homo sapiens
MKMILSPALHALLLWGLKIL

SEQ ID NO: 31347 - protein, 24 aa, Homo sapiens
MKLERAPMVSSSWPTMKMTIPTMQ

SEQ ID NO: 31348 - protein, 16 aa, Homo sapiens
KRVMTISRLWLVMFIL

SEQ ID NO: 31349 - protein, 16 aa, Homo sapiens
MAYYVLTISTVVITSS

SEQ ID NO: 31350 - protein, 13 aa, Homo sapiens
MSPGWMFCQVIVG

SEQ ID NO: 31351 - protein, 9 aa, Homo sapiens
LCTAEKWSS

SEQ ID NO: 31352 - protein, 34 aa, Homo sapiens
IGRRNLSAFKTWSVCLVETLLLLTNRTVPARSTS

SEQ ID NO: 31353 - protein, 24 aa, Homo sapiens
MTCLILFYNSFVCCCVFRTVPGTQ

SEQ ID NO: 31354 - protein, 18 aa, Homo sapiens
IISPRRDFLLIACLIAQV

SEQ ID NO: 31355 - protein, 10 aa, Homo sapiens
KWRMTWVLAC

SEQ ID NO: 31356 - protein, 11 aa, Homo sapiens
RSVIQWLLSLA

SEQ ID NO: 31357 - protein, 30 aa, Homo sapiens
VYLLSSAVMGLMPVAMALMKQVAAQTPSLA

SEQ ID NO: 31358 - protein, 7 aa, Homo sapiens
VDSAGRS

SEQ ID NO: 31359 - protein, 17 aa, Homo sapiens
VSPLQVCGPVRDSRLWD

SEQ ID NO: 31360 - protein, 24 aa, Homo sapiens
MCILLTLMVLLWEQQHLLHRPVSS

SEQ ID NO: 31361 - protein, 10 aa, Homo sapiens
MLVIWILKMT

SEQ ID NO: 31362 - protein, 17 aa, Homo sapiens
KCLKPITLLWTTLLLHS

SEQ ID NO: 31363 - protein, 24 aa, Homo sapiens
ILLFETRKVQASRNTVQRDSHSCT

SEQ ID NO: 31364 - protein, 16 aa, Homo sapiens
LVICGGMILLNWIIGD

SEQ ID NO: 31365 - protein, 8 aa, Homo sapiens
VPLDPWLG

SEQ ID NO: 31366 - protein, 12 aa, Homo sapiens
VILMLVTICLQY

SEQ ID NO: 31367 - protein, 11 aa, Homo sapiens
MFGVSPLSKKV

SEQ ID NO: 31368 - protein, 13 aa, Homo sapiens
MMQVLPLQIILPT

SEQ ID NO: 31369 - protein, 11 aa, Homo sapiens
MVLIWVLGIWT

SEQ ID NO: 31370 - protein, 12 aa, Homo sapiens
VLILSLEWAAIL

SEQ ID NO: 31371 - protein, 23 aa, Homo sapiens
KLPYMVIVLLQCCLLKRTKLKMM

SEQ ID NO: 31372 - protein, 9 aa, Homo sapiens
MMAPLLKCI

SEQ ID NO: 31373 - protein, 19 aa, Homo sapiens
MIWFQSPKSLMLLCGHADG

SEQ ID NO: 31374 - protein, 7 aa, Homo sapiens
LSFLVLF

SEQ ID NO: 31375 - protein, 16 aa, Homo sapiens
TVTISGCRWTWAPRRR

SEQ ID NO: 31376 - protein, 13 aa, Homo sapiens
VPLLSMTFWLWMI

SEQ ID NO: 31377 - protein, 51 aa, Homo sapiens
MKTETSSSTTISPITTPFEGSSKMASPMSSTSTAATLPGRFWTTSSTWALH

SEQ ID NO: 31378 - protein, 7 aa, Homo sapiens
MALSPWQ

SEQ ID NO: 31379 - protein, 11 aa, Homo sapiens
ITFVSMFSSLL

SEQ ID NO: 31380 - protein, 14 aa, Homo sapiens
IDSWWRVILTQYRS

SEQ ID NO: 31381 - protein, 827 aa, Homo sapiens
VYVRARRWRRRGKQREQPEDRGVPMKRAAMALHSPQYIFGDFSPDEFNQFFVTPRSSVELPPYSGTVLCGTQAVDKLPDGQEYQRIEFGVDEVIEPSDTLPRTPSYSISSTLNPQAPEFILGCTASKITPDGITKEASYGSIDCQYPGSALALDGSSNVEAEVLENDGVSGGLGQRERKKKKKRPPGYYSYLKDGGDDSISTEALVNGHANSAVPNSVSAEDAEFMGDMPPSVTPRTCNSPQNSTDSVSDIVPDSPFPGALGSDTRTAGQPEGGPGADFGQSCFPAEAGRDTLSRTAGAQPCVGTDTTENLGVANGQILESSGEGTATNGVELHTTESIDLDPTKPESASPPADGTGSASGTLPVSQPKSWASLFHDSKPSSSSPVAYVETKYSPPAISPLVSEKQVEVKEGLVPVSEDPVAIKIAELLENVTLIHKPVSLQPRGLINKGNWCYINATLQALVACPPMYHLMKFIPLYSKVQRPCTSTPMIDSFVRLMNEFTNMPVPPKPRQALGDKIVRDIRPGAAFEPTYIYRLLTVNKSSLSEKGRQEDAEEYLGFILNGLHEEMLNLKKLLSPSNEKLTISNGPKNHSVNEEEQEEQGEGSEDEWEQVGPRNKTSVTRQADFVQTPITGIFGGHIRSVVYQQSSKESATLQPFFTLQLDIQSDKIRTVQDALESLVARESVQGYTTKTKQEVEISRRVTLEKLPPVLVLHLKRFVYEKTGGCQKLIKNIEYPVDLEISKELLSPGVKNKNFKCHRTYRLFAVVYHHGNSATGGHYTTDVFQIGLNGWLRIDDQTVKVINQYQVVKPTAERTAYLLYYRRVDLL

SEQ ID NO: 31382 - protein, 12 aa, Homo sapiens
LALPRLRLFKSR

SEQ ID NO: 31383 - protein, 21 aa, Homo sapiens
TETEERWQPDYLERHRGERSG

SEQ ID NO: 31384 - protein, 23 aa, Homo sapiens
LSPELTEGVFQGSLQGLPKRQDR

SEQ ID NO: 31385 - protein, 14 aa, Homo sapiens
MSVLVFCSAAWILA

SEQ ID NO: 31386 - protein, 42 aa, Homo sapiens
RKSFVKVLTLISTIGWFTMTSSETLSTGQKLRRPFLGGRWEP

SEQ ID NO: 31387 - protein, 30 aa, Homo sapiens
IWCVCVCVCVCLGWVYDVSAEHAEVLAGVS

SEQ ID NO: 31388 - protein, 22 aa, Homo sapiens
KQICKKRKTESKESLALLFCLT

SEQ ID NO: 31389 - protein, 12 aa, Homo sapiens
MTLKEQLFFFKC

SEQ ID NO: 31390 - protein, 10 aa, Homo sapiens
LLPFALRLKV

SEQ ID NO: 31391 - protein, 783 aa, Homo sapiens
VERQRQQRVPGLRQQRGRRRAEAEVTKAAAAAAVSLTVAETKAAAADGERPGPGPLLVGCGRAAVGPARLPPPAAPPPAPPPGRRRGPGPARTQTAAAAAAGGVGGGGGAMGGLASGGDVEPGLPVEVRGSNGAFYKGFVKDVHEDSVTIFFENNWQSERQIPFGDVRLPPPADYNKEITEGDEVEVYSRANEQEPCGWWLARVRMMKGDFYVIEYAACDATYNEIVTLERLRPVNPNPLATKGSFFKVTMAVPEDLREACSNENVHKEFKKALGANCIFLNITNSELFILSTTEAPVKRASLLGDMHFRSLRTKLLLMSRNEEATKHLETSKQLAAAFQEEFTVREDLMGLAIGTHGANIQQARKVPGVTAIELGEETCTFRIYGETPEACRQARSYLEFSEDSVQVPRNLVGKVIGKNGKVIQEIVDKSGVVRVRVEGDNDKKNPREEGMVPFIFVGTRENISNAQALLEYHLSYLQEVEQLRLERLQIDEQLRQIGLGFRPPGSGRGSGGSDKAGYSTDESSSSSLHATRTYGGSYGGRGRGRRTGGPAYGPSSDVSTASETESEKREEPNRAGPGDRDPPTRGEESRRRPTGGRGRGPPPAPRPTSRYNSSSISSVLKDPDSNPYSLLDTSEPEPPVDSEPGEPPPASARRRRSRRRRTDEDRTVMDGGLESDGPNMTENGLEDESRPQRRNRSRRRRNRGNRTDGSISGDRQPVTVADYISRAESQSRQRPPLERTKPSEDSLSGQKGDSVSKLPKGPSENGELSAPLELGSMVNGVS

SEQ ID NO: 31392 - protein, 60 aa, Homo sapiens
MDGHWSAASSALTVTAMSSWARRRSSSSRRIPSLPGSPVCWAWPWYPDTTSFPLRCRGRV

SEQ ID NO: 31393 - protein, 8 aa, Homo sapiens
LFLIITKR

SEQ ID NO: 31394 - protein, 17 aa, Homo sapiens
RLTSWRNGLVLKFWVAF

SEQ ID NO: 31395 - protein, 15 aa, Homo sapiens
ILPVYRQKVKNGSRL

SEQ ID NO: 31396 - protein, 12 aa, Homo sapiens
LLAGRWSLILLS

SEQ ID NO: 31397 - protein, 20 aa, Homo sapiens
LIHLLRWWLMDLGNAILQIL

SEQ ID NO: 31398 - protein, 7 aa, Homo sapiens
LLILTLY

SEQ ID NO: 31399 - protein, 16 aa, Homo sapiens
LIHTVPGDRTRVRGPG

SEQ ID NO: 31400 - protein, 37 aa, Homo sapiens
REPRARSILKISRKGRWFGGGVPGNGMKGFLGPLLWG

SEQ ID NO: 31401 - protein, 11 aa, Homo sapiens
IAMLCTLMWLL

SEQ ID NO: 31402 - protein, 8 aa, Homo sapiens
ILLPQPPW

SEQ ID NO: 31403 - protein, 15 aa, Homo sapiens
KVFLWILGLTAARSY

SEQ ID NO: 31404 - protein, 25 aa, Homo sapiens
MFVHMKLIKEDVNMISLCHNRLMSK

SEQ ID NO: 31405 - protein, 9 aa, Homo sapiens
LRGGMIFFF

SEQ ID NO: 31406 - protein, 58 aa, Homo sapiens
KTEVNYTQLVDLHARYAECGLRILAFPCNQFGKQGVTKRSKSSPRATTSNSICSARSA

SEQ ID NO: 31407 - protein, 29 aa, Homo sapiens
LGWRSGHAGSDPLHLRFCTPRFPARSRGG

SEQ ID NO: 31408 - protein, 8 aa, Homo sapiens
MIQIILVL

SEQ ID NO: 31409 - protein, 451 aa, Homo sapiens
VIRFFPAASATKRVLPPVLRVSSPRTWNPNVPESPRIPAPRLPKRMSGAPTAGAALMLCAATAVLLSAQGGPVQSKSPRFASWDEMNVLAHGLLQLGQGLREHAERTRSQLSALERRLSACGSACQGTEGSTDLPLAPESRVDPEVLHSLQTQLKAQNSRIQQLFHKVAQQQRHLEKQHLRIQHLQSQFGLLDHKHLDHEVAKPARRKRLPEMAQPVDPAHNVSRLHRLPRDCQELFQVGERQSGLFEIQPQGSPPFLVNCKMTSDGGWTVIQRRHDGSVDFNRPWEAYKAGFGDPHGEFWLGLEKVHSITGDRNSRLAVQLRDWDGNAELLQFSVHLGGEDTAYSLQLTAPVAGQLGATTVPPSGLSVPFSTWDQDHDLRRDKNCAKSLSGGWWFGTCSHSNLNGQYFRSIPQQRQKLKKGIFWKTWRGRYYPLQATTMLIQPMAAEAAS

SEQ ID NO: 31410 - protein, 19 aa, Homo sapiens
MPGPASAGPLRSWTPTPMR

SEQ ID NO: 31411 - protein, 42 aa, Homo sapiens
RVCSEPAFLGGSASAAWVVAALASCMPTATGIPAAAPGQASG

SEQ ID NO: 31412 - protein, 303 aa, Homo sapiens
KTSRLQMDPGKDKEGVPQPSGPPARKKFVIPLDEDEVPPGVAKPLFRSTQSLPTVDTSAQAAPQTYAEYAISQPLEGAGATCPTGSEPLAGETPNQALKPGAKSNSIIVSPRQRGNPVLKFVRNVPWEFGDVIPDYVLGQSTCALFLSLRYHNLHPDYIHGRLQSLGKNFALRVLLVQVDVKDPQQALKELAKMCILADCTLILAWSPEEAGRYLETYKAYEQKPADLLMEKLEQDFVSRVTECLTTVKSVNKTDSQTLLTTFGSLEQLIAASREDLALCPGLGPQKARRLFDVLHEPFLKVP

SEQ ID NO: 31413 - protein, 24 aa, Homo sapiens
KESRRTTEALAPRIPAVFTRGDSG

SEQ ID NO: 31414 - protein, 27 aa, Homo sapiens
MCHPSKAPGADPQPPKAALRRPGRALR

SEQ ID NO: 31415 - protein, 70 aa, Homo sapiens
IGGRCQAWRPPGALAWCLWLVPWASLWSCSLEAVQQKSPPGLSKNPRTRSACRGVWPLSCVRPRVTPSHE

SEQ ID NO: 31416 - protein, 26 aa, Homo sapiens
IMTWTILGRLTLCLGAAVKSRPEVEL

SEQ ID NO: 31417 - protein, 10 aa, Homo sapiens
RMVAIPRKRT

SEQ ID NO: 31418 - protein, 663 aa, Homo sapiens
TRPPASPEVPPARPGRRPAAAPASRFVSGGARGRGRQVPPATGPGPPPRGGGGGAGPRGGGRAGMGPKRRQLTFREKSRIIQEVEENPDLRKGEIARRFNIPPSTLSTILKNKRAILASERKYGVASTCRKTNKLSPYDKLEGLLIAWFQQIRAAGLPVKGIILKEKALRIAEELGMDDFTASNGWLDRFRRRHGVVSCSGVARARARNAAPRTPAAPASPAAVPSEGSGGSTTGWRAREEQPPSVAEGYASQDVFSATETSLWYDFLPDQAAGLCGGDGRPRQATQRLSVLLCANADGSEKLPPLVAGKSAKPRAGQAGLPCDYTANSKGGVTTQALAKYLKALDTRMAAESRRVLLLAGRLAAQSLDTSGLRHVQLAFFPPGTVHPLERGVVQQVKGHYRQAMLLKAMAALEGQDPSGLQLGLTEALHFVAAAWQAVEPSDIAACFREAGFGGGPNATITTSLKSEGEEEEEEEEEEEEEEGEGEEEEEEGEEEEEEGGEGEELGEEEEVEEEGDVDSDEEEEEDEESSSEGLEAEDWAQGVVEAGGSFGAYGAQEEAQCPTLHFLEGGEDSDSDSEEEDDEEEDDEDEDDDDDEEDGDEVPVPSFGEAMAYFAMVKRYLTSFPIDDRVQSHILHLEHDLVHVTRKNHARQAGVRGLGHQS

SEQ ID NO: 31419 - protein, 53 aa, Homo sapiens
RVWKSLVSRLLGLTSCSIETLIQWRQRELMLCADSYLNRGIGNPVCLVCGKNQ

SEQ ID NO: 31420 - protein, 36 aa, Homo sapiens
MLYRRMDGMISTAGFVTGKAKSFAVSSVPGFITLSV

SEQ ID NO: 31421 - protein, 351 aa, Homo sapiens
TPPWRAKLVFEVAPPGSTLLPNSPAATRGPSLARLCALVDLCLGCSRCTQRLNESTYVLRRVEHDCSREILLARFKQATKSKVWRVVGCRPTFPRPLCYQVCHYYSPGLGCRRHRNRCTFARSREEALVWTFERQHNLQRLWLKAEVQGSGAQGGAGRAADAILTEFGGRFELLCSLCFRRCPPCICRVDPQGQCPEHGACPSLLAHVSAEGRRKQQFVVVRPRPRAGQPPAYCRFVGRGQPCWRGESRCQFAHSAVEMAVWEAEQLGGLQRGDLLTPPAPDGDGRTAPLGQPPGAQLYCPACLVTCHSQEAFENHCASSEHAQMVAFDQALPWEHRSPPPGLSKFELCPK

SEQ ID NO: 31422 - protein, 11 aa, Homo sapiens
VDWENVPVRCK

SEQ ID NO: 31423 - protein, 24 aa, Homo sapiens
VAMTNLQPEDPGGKNEADKKHVAE

SEQ ID NO: 31424 - protein, 15 aa, Homo sapiens
LLTKMVWPMCLLKIL

SEQ ID NO: 31425 - protein, 32 aa, Homo sapiens
LHQLTLYPLSFFVSLLSPFSLLCLCLSPDFCI

SEQ ID NO: 31426 - protein, 10 aa, Homo sapiens
LSLLFLFLHL

SEQ ID NO: 31427 - protein, 8 aa, Homo sapiens
LFCGHPGL

SEQ ID NO: 31428 - protein, 8 aa, Homo sapiens
LNTWLFVV

SEQ ID NO: 31429 - protein, 16 aa, Homo sapiens
IVSGVLMWKKEMQGKT

SEQ ID NO: 31430 - protein, 40 aa, Homo sapiens
MSEIRKQPNLSCNRDGHARKQTARACSLVGAELSSRVVAN

SEQ ID NO: 31431 - protein, 11 aa, Homo sapiens
ILSAILGLCVS

SEQ ID NO: 31432 - protein, 12 aa, Homo sapiens
ILLYRLLLLLYL

SEQ ID NO: 31433 - protein, 36 aa, Homo sapiens
IAAIVVGLLGQLGLPAALPAPDRGGSSPGRAVAGEK

SEQ ID NO: 31434 - protein, 1025 aa, Homo sapiens
TMPAARPPAAGLRGISLFLALLLGSPAAALERDALPEGDASPLGPYLLPSGAPERGSPGKEHPEERVVTAPPSSSQSAEVLGELVLDGTAPSAHHDIPALSPLLPEEARPKHALPPKKKLPSLKQVNSARKQLRPKATSAATVQRAGSQPASQGLDLLSSSTEKPGPPGDPDPIVASEEASEVPLWLDRKESAVPTTPAPLQISPFTSQPYVAHTLPQRPEPGEPGPDMAQEAPQEDTSPMALMDKGENELTGSASEESQETTTSTIITTTVITTEQAPALCSVSFSNPEGYIDSSDYPLLPLNNFLECTYNVTVYTGYGVELQVKSVNLSDGELLSIRGVDGPTLTVLANQTLLVEGQVIRSPTNTISVYFRTFQDDGLGTFQLHYQAFMLSCNFPRRPDSGDVTVMDLHSGGVAHFHCHLGYELQGAKMLTCINASKPHWSSQEPICSAPCGGAVHNATIGRVLSPSYPENTNGSQFCIWTIEAPEGQKLHLHFERLLLHDKDRMTVHSGQTNKSALLYDSLQTESVPFEGLLSEGNTIRIEFTSDQARAASTFNIRFEAFEKGHCYEPYIQNGNFTTSDPTYNIGTIVEFTCDPGHSLEQGPAIIECINVRDPYWNDTEPLCRAMCGGELSAVAGVVLSPNWPEPYVEGEDCIWKIHVGEEKRIFLDIQFLNLSNSDILTIYDGDEVMPHILGQYLGNSGPQKLYSSTPDLTIQFHSDPAGLIFGKGQGFIMNYIEVSRNDSCSDLPEIQNGWKTTSHTELVRGARITYQCDPGYDIVGSDTLTCQWDLSWSSDPPFCEKIMYCTDPGEVDHSTRLISDPVLLVGTTIQYTCNPGFVLEGSSLLTCYSRETGTPIWTSRLPHCVSEESLACDNPGLPENGYQILYKRLYLPGESLTFMCYEGFELMGEVTIRCILGQPSHWNGPLPVCKVNQDSFEHALEVAEAAAETSLEGGNMALAIFIPVLIISLLLGGAYIYITRCRYYSNLRLPLMYSHPYSQITVETEFDNPIYETGETREYEVSI

SEQ ID NO: 31435 - protein, 18 aa, Homo sapiens
LLPLLHLSHRTLLATSGS

SEQ ID NO: 31436 - protein, 18 aa, Homo sapiens
MLLPPRRRLPSYPRRESR

SEQ ID NO: 31437 - protein, 11 aa, Homo sapiens
MTPTPASLRPC

SEQ ID NO: 31438 - protein, 9 aa, Homo sapiens
LVTFALSAF

SEQ ID NO: 31439 - protein, 41 aa, Homo sapiens
RELEKEGGGETAREEEKRKEETLERKRKENGIKRDQLPTLK

SEQ ID NO: 31440 - protein, 560 aa, Homo sapiens
IPAGRGHCRFWKMAKFMTPVIQDNPSGWGPCAVPEQFRDMPYQPFSKGDRLGKVADWTGATYQDKRYTNKYSSQFGGGSQYAYFHEEDESSFQLVDTARTQKTAYQRNRMRFAQRNLRRDKDRRNMLQFNLQILPKSAKQKERERIRLQKKFQKQFGVRQKWDQKSQKPRDSSVEVRSDWEVKEEMDFPQLMKMRYLEVSEPQDIECCGALEYYDKAFDRITTRSEKPLRSIKRIFHTVTTTDDPVIRKLAKTQGNVFATDAILATLMSCTRSVYSWDIVVQRVGSKLFFDKRDNSDFDLLTVSETANEPPQDEGNSFNSPRNLAMEATYINHNFSQQCLRMGKERYNFPNPNPFVEDDMDKNEIASVAYRYRRWKLGDDIDLIVRCEHDGVMTGANGEVSFINIKTLNEWDSRHCNGVDWRQKLDSQRGAVIATELKNNSYKLARWTCCALLAGSEYLKLGYVSRYHVKDSSRHVILGTQQFKPNEFASQINLSVENAWGILRCVIDICMKLEEGKYLILKDPNKQVIRVYSLPDGTFSSDEDEEEEEEEEEEEEEEET

SEQ ID NO: 31441 - protein, 18 aa, Homo sapiens
LTAACLLLVSMIHKASRT

SEQ ID NO: 31442 - protein, 30 aa, Homo sapiens
RGIGTWTPILQGPGGRFPMGCERLAIIKSL

SEQ ID NO: 31443 - protein, 18 aa, Homo sapiens
IHLFLVAISFQFILKISH

SEQ ID NO: 31444 - protein, 16 aa, Homo sapiens
LVHLWLMIPLIFSFTS

SEQ ID NO: 31445 - protein, 18 aa, Homo sapiens
MSMSMMLLALLTEPTAPW

SEQ ID NO: 31446 - protein, 12 aa, Homo sapiens
TAVLVLNLRLCL

SEQ ID NO: 31447 - protein, 9 aa, Homo sapiens
LWALGAFLG

SEQ ID NO: 31448 - protein, 31 aa, Homo sapiens
LNLWRVCLPFGLCATAATVEKSKLLLIPGPA

SEQ ID NO: 31449 - protein, 22 aa, Homo sapiens
ICSVTLVLTFLTIPFYLQKWCA

SEQ ID NO: 31450 - protein, 25 aa, Homo sapiens
VEWKREKHIFPATFFLCLCSGPASY

SEQ ID NO: 31451 - protein, 23 aa, Homo sapiens
LVSYLVKVMDFQEVALQRKTDFP

SEQ ID NO: 31452 - protein, 33 aa, Homo sapiens
RHRGRGPWRMAFLLATCGVSRPRGSGRGAGPYP

SEQ ID NO: 31453 - protein, 88 aa, Homo sapiens
RHRGRGPWRMAFLLATCGGLDSGFVPSVQDFDKKLTEADAYLQILIEQLKLFDDKLQNCKEDEQRKKIETLKETTNRWDSAMLPRLVS

SEQ ID NO: 31454 - protein, 19 aa, Homo sapiens
TAMKLMFLGGDFSIVLSMC

SEQ ID NO: 31455 - protein, 32 aa, Homo sapiens
KLFQPALQVMDLRQILFLRRLRRNLKRKGNSL

SEQ ID NO: 31456 - protein, 29 aa, Homo sapiens
ITFLMCKGITLLWLWKLLTGNDCIEYIRK

SEQ ID NO: 31457 - protein, 80 aa, Homo sapiens
IMSHKQIYYSDKYDDEEFEYRHVMLPKDIAKLVPKTHLMSESEWRNLGVQQSQGWVHYMIHEPEPHILLFRRPLPKKPKK

SEQ ID NO: 31458 - protein, 28 aa, Homo sapiens
VYPGIGSDLRARRQDGRGIFPRNKCRTG

SEQ ID NO: 31459 - protein, 34 aa, Homo sapiens
VDYHRCSCYLSHHERFQPLIPCLWCYSNHSLPND

SEQ ID NO: 31460 - protein, 22 aa, Homo sapiens
IQVLLTPWCSLMSVLAVRKLAA

SEQ ID NO: 31461 - protein, 17 aa, Homo sapiens
LGFAALAALVVQHLRSG

SEQ ID NO: 31462 - protein, 9 aa, Homo sapiens
LEEPPMKRL

SEQ ID NO: 31463 - protein, 27 aa, Homo sapiens
LLFPLDSAARGKFPKEVKYFRENQAFE

SEQ ID NO: 31464 - protein, 19 aa, Homo sapiens
LAPHFNLSLLLISIPFIFR

SEQ ID NO: 31465 - protein, 27 aa, Homo sapiens
LALFHWLLWGLLLLILPLLHLGFLEQT

SEQ ID NO: 31466 - protein, 87 aa, Homo sapiens
TMPQYQTWEEFSRAAEKLYLADPMKARVVLKYRHSDGNLCVKVTDDLVCLVYKTDQAQDVKKIEKFHSQLMRLMVAKEARNVTMETE

SEQ ID NO: 31467 - protein, 35 aa, Homo sapiens
TISSVWREGNRKNPKSLPCYSFLCKTGLADTTYSR

SEQ ID NO: 31468 - protein, 22 aa, Homo sapiens
VRFFLLCVLILAIFLNVGNSTA

SEQ ID NO: 31469 - protein, 18 aa, Homo sapiens
LGLLWGLLAQMCPSKLLT

SEQ ID NO: 31470 - protein, 63 aa, Homo sapiens
VVHACVCRVRVIPGVWSGGTNQCGCFSVERIPTAVSRSLRVVGKLLKWYLTGNRGVLKTQLRQ

SEQ ID NO: 31471 - protein, 9 aa, Homo sapiens
ILQMMLLLL

SEQ ID NO: 31472 - protein, 20 aa, Homo sapiens
ILGLVATLMRGLWLLLLQSK

SEQ ID NO: 31473 - protein, 16 aa, Homo sapiens
ILFVARWVCMDRLVHL

SEQ ID NO: 31474 - protein, 40 aa, Homo sapiens
TITFCVYLPILSLWHWLVMRNGHTTIQMEVQLGFPKSPLM

SEQ ID NO: 31475 - protein, 22 aa, Homo sapiens
RGTSILLWMMTILNPQMQNNWI

SEQ ID NO: 31476 - protein, 52 aa, Homo sapiens
LWVWTDLHVLLWGFYSLWIVKTAERDLQSSHISIIKKYWSSWKKSKIYQSNQ

SEQ ID NO: 31477 - protein, 15 aa, Homo sapiens
MPMRASFLLLISIIS

SEQ ID NO: 31478 - protein, 15 aa, Homo sapiens
LIILHLCIAFLQKEQ

SEQ ID NO: 31479 - protein, 12 aa, Homo sapiens
LATLLKLFRLMV

SEQ ID NO: 31480 - protein, 17 aa, Homo sapiens
KRGTLLMGICTAMVLGE

SEQ ID NO: 31481 - protein, 12 aa, Homo sapiens
LDFYIMAEPWGI

SEQ ID NO: 31482 - protein, 1191 aa, Homo sapiens
TAEHTARKGPFWGSPHWLKMRPFFLLCFALPGLLHAQQACSRGACYPPVGDLLVGRTRFLRASSTCGLTKPETYCTQYGEWQMKCCKCDSRQPHNYYSHRVENVASSSGPMRWWQSQNDVNPVSLQLDLDRRFQLQEVMMEFQGPMPAGMLIERSSDFGKTWRVYQYLAADCTSTFPRVRQGRPQSWQDVRCQSLPQRPNARLNGGKVQLNLMDLVSGIPATQSQKIQEVGEITNLRVNFTRLAPVPQRGYHPPSAYYAVSQLRLQGSCFCHGHADRCAPKPGASAGPSTAVQVHDVCVCQHNTAGPNCERCAPFYNNRPWRPAEGQDAHECQRCDCNGHSETCHFDPAVFAASQGAYGGVCDNCRDHTEGKNCERCQLHYFRNRRPGASIQETCISCECDPDGAVPGAPCDPVTGQCVCKEHVQGERCDLCKPGFTGLTYANPQGCHRCDCNILGSRRDMPCDEESGRCLCLPNVVGPKCDQCAPYHWKLASGQGCEPCACDPHNSLSPQCNQFTGQCPCREGFGGLMCSAAAIRQCPDRTYGDVATGCRACDCDFRGTEGPGCDKASGRCLCRPGLTGPRCDQCQRGYCNRYPVCVACHPCFQTYDADLREQALRFGRLRNATASLWSGPGLEDRGLASRILDAKSKIEQIRAVLSSPAVTEQEVAQVASAILSLRRTLQGLQLDLPLEEETLSLPRDLESLDRSFNGLLTMYQRKREQFEKISSADPSGAFRMLSTAYEQSAQAAQQVSDSSRLLDQLRDSRREAERLVRQAGGGGGTGSPKLVALRLEMSSLPDLTPTFNKLCGNSRQMACTPISCPGELCPQDNGTACGSRCRGVLPRAGGAFLMAGQVAEQLRGFNAQLQRTRQMIRAAEESASQIQSSAQRLETQVSASRSQMEEDVRRTRLLIQQVRDFLTDPDTDAATIQEVSEAVLALWLPTDSATVLQKMNEIQAIAARLPNVDLVLSQTKQDIARARRLQAEAEEARSRAHAVEGQVEDVVGNLRQGTVALQEAQDTMQGTSRSLRLIQDRVAEVQQVLRPAEKLVTSMTKQLGDFWTRMEELRHQARQQGAEAVQAQQLAEGASEQALSAQEGFERIKQKYAELKDRLGQSSMLGEQGARIQSVKTEAEELFGETMEMMDRMKDMELELLRGSQAIMLRSADLTGLEKRVEQIRDHINGRVLYYATCK

SEQ ID NO: 31483 - protein, 52 aa, Homo sapiens
LIPGTRLREKACCVEDKAAREVDTGWAGDLTGLSLLLAGHGGFGGRCKVYCG

SEQ ID NO: 31484 - protein, 22 aa, Homo sapiens
KSYSHDCWWLLVRLWLDCSFFL

SEQ ID NO: 31485 - protein, 67 aa, Homo sapiens
TPSGGGRNRSASSSWVGTMAGITTIEAVKRKIQVLQQQADDAEERAERLQREVEGERRAREQRYEGY

SEQ ID NO: 31486 - protein, 32 aa, Homo sapiens
VVFLSFFLETVDWCLLLQGKMCLYWQKTWKGL

SEQ ID NO: 31487 - protein, 29 aa, Homo sapiens
LNLIRRHQQKKKMLFTLSVMFLLMGDCMN

SEQ ID NO: 31488 - protein, 820 aa, Homo sapiens
TCAEKEESANTTESAIFEYHCEMSFDPNLLHNNGHNGYPNGTSAALRETGVIEKLLTSYGFIQCSERQARLFFHCSQYNGNLQDLKVGDDVEFEVSSDRRTGKPIAVKLVKIKQEILPEERMNGQVVCAVPHNLESKSPAAPGQSPTGSVCYERNGEVFYLTYTPEDVEGNVQLETGDKINFVIDNNKHTGAVSARNIMLLKKKQARCQGVVCAMKEAFGFIERGDVVKEIFFHYSEFKGDLETLQPGDDVEFTIKDRNGKEVATDVRLLPQGTVIFEDISIEHFEGTVTKVIPKVPSKNQNDPLPGRIKVDFVIPKELPFGDKDTKSKVTLLEGDHVRFNISTDRRDKLERATNIEVLSNTFQFTNEAREMGVIAAMRDGFGFIKCVDRDVRMFFHFSEILDGNQLHIADEVEFTVVPDMLSAQRNHAIRIKKLPKGTVSFHSHSDHRFLGTVEKEATFSNPKTTSPNKGKEKEAEDGIIAYDDCGVKLTIAFQAKDVEGSTSPQIGDKVEFSISDKQRPGQQVATCVRLLGRNSNSKRLLGYVATLKDNFGFIETANHDKEIFFHYSEFSGDVDSLELGDMVEYSLSKGKGNKVSAEKVNKTHSVNGITEEADPTIYSGKVIRPLRSVDPTQTEYQGMIEIVEEGDMKGEVYPFGIVGMANKGDCLQKGESVKFQLCVLGQNAQTMAYNITPLRRATVECVKDQFGFINYEVGDSKKLFFHVKEVQDGIELQAGDEVEFSVILNQRTGKCSACNVWRVCEGPKAVAAPRPDRLVNRLKNITLDDASAPRLMVLRQPRGPDNSMGFGAERKIRQAGVID

SEQ ID NO: 31489 - protein, 27 aa, Homo sapiens
ISIIKIASLLVFCHTTRQEYLCESYSF

SEQ ID NO: 31490 - protein, 50 aa, Homo sapiens
LAALLSFLGLSLPPGLPQIHDVQFSGAGAGCAGHYLPQVLLPRGRQVQAE

SEQ ID NO: 31491 - protein, 10 aa, Homo sapiens
LRTSALASGS

SEQ ID NO: 31492 - protein, 16 aa, Homo sapiens
LWRRHSWLWTHWLMVG

SEQ ID NO: 31493 - protein, 63 aa, Homo sapiens
MGSSSYGTIGCALSLTSLMNMMVQCEALTSISSSHCSSLEEMTIRLRFGITSFGAVFSHCLGT

SEQ ID NO: 31494 - protein, 29 aa, Homo sapiens
LKSLIVIVILMEFLTLNLMISIQKLLKSC

SEQ ID NO: 31495 - protein, 9 aa, Homo sapiens
MKTLLLAAI

SEQ ID NO: 31496 - protein, 13 aa, Homo sapiens
IMLMVLGMVYVMA

SEQ ID NO: 31497 - protein, 16 aa, Homo sapiens
LIIQICSLTVLGLCPL

SEQ ID NO: 31498 - protein, 9 aa, Homo sapiens
LISTVFLML

SEQ ID NO: 31499 - protein, 12 aa, Homo sapiens
ILFLCLMFFGIL

SEQ ID NO: 31500 - protein, 18 aa, Homo sapiens
LDWQTQVQWLLCFGLMLN

SEQ ID NO: 31501 - protein, 38 aa, Homo sapiens
MLSMISLWRILTTFLNQRSTSSKETFPGKSTFTSTGIQ

SEQ ID NO: 31502 - protein, 40 aa, Homo sapiens
LMTVVTALLLIILQTRGCSQFGKAVGPAASAGTLDLSGWR

SEQ ID NO: 31503 - protein, 17 aa, Homo sapiens
RNFRHMVLMRIQCLFAI

SEQ ID NO: 31504 - protein, 20 aa, Homo sapiens
ILSLSPEIMLLISVRVALLL

SEQ ID NO: 31505 - protein, 10 aa, Homo sapiens
MKILKLLARV

SEQ ID NO: 31506 - protein, 14 aa, Homo sapiens
ILWCFLMFVRTVNL

SEQ ID NO: 31507 - protein, 32 aa, Homo sapiens
VEIARLGGTGSSPRPCPKPDPTASLSEVRRFI

SEQ ID NO: 31508 - protein, 16 aa, Homo sapiens
IYLVLLKMAFFAVGIC

SEQ ID NO: 31509 - protein, 424 aa, Homo sapiens
IRVSFMNNQKQQKPTLSGQRFKTRKRDEKERFDPTQFQDCIIQGLTETGTDLEAVAKFLDASGAKLDYRRYAETLFDILVAGGMLAPGGTLADDMMRTDVCVFAAQEDLETMQAFAQVFNKLIRRYKYLEKGFEDEVKKLLLFLKGFSESERNKLAMLTGVLLANGTLNASILNSLYNENLVKEGVSAAFAVKLFKSWINEKDINAVAASLRKVSMDNRLMELFPANKQSVEHFTKYFTEAGLKELSEYVRNQQTIGARKELQKELQEQMSRGDPFKDIILYVKEEMKKNNIPEPVVIGIVWSSVMSTVEWNKKEELVAEQAIKHLKQYSPLLAAFTTQGQSELTLLLKIQEYCYDNIHFMKAFQKIVVLFYKAEVLSEEPILKWYKDAHVAKGKSVFLEQMKKFVEWLKNAEEESESEAEEGD

SEQ ID NO: 31510 - protein, 13 aa, Homo sapiens
IRIIFCMFWSLSC

SEQ ID NO: 31511 - protein, 16 aa, Homo sapiens
MNMKMKHFCVIGLLSL

SEQ ID NO: 31512 - protein, 21 aa, Homo sapiens
IVSDVVRLLHIGGKRCRELKE

SEQ ID NO: 31513 - protein, 10 aa, Homo sapiens
MLTNMRMIQN

SEQ ID NO: 31514 - protein, 40 aa, Homo sapiens
ILSASGKGSDVDLRKHKGTFLALTEPRSSPWTVSLRGGRL

SEQ ID NO: 31515 - protein, 12 aa, Homo sapiens
KRNFMMKLWLFV

SEQ ID NO: 31516 - protein, 31 aa, Homo sapiens
IKYITPQKVRMIRVCLLTVLALLEKKNFHQQ

SEQ ID NO: 31517 - protein, 16 aa, Homo sapiens
ILLCFLSASFLELTMV

SEQ ID NO: 31518 - protein, 16 aa, Homo sapiens
ILLCFLSASFLELTMW

SEQ ID NO: 31519 - protein, 22 aa, Homo sapiens
LSSLQPAKKKQVFILIKEWLVF

SEQ ID NO: 31520 - protein, 10 aa, Homo sapiens
MLISFCAAVL

SEQ ID NO: 31521 - protein, 18 aa, Homo sapiens
LCLMDGGFEFFPFIFVGS

SEQ ID NO: 31522 - protein, 43 aa, Homo sapiens
LYLLLGGLQKEDAWSLELLVGSLPCGMDSLSILKQYYRLTTAQ

SEQ ID NO: 31523 - protein, 20 aa, Homo sapiens
LRIPLEKTAQLGVGLGCCFK

SEQ ID NO: 31524 - protein, 12 aa, Homo sapiens
MNPTWLLVAMQL

SEQ ID NO: 31525 - protein, 26 aa, Homo sapiens
KSGWTSMTQVLWSFLLVGPWNSSCKN

SEQ ID NO: 31526 - protein, 45 aa, Homo sapiens
LVALQNLIGLLVSALKLAFLKQNCLFQGLLSQRHQNLDLLDYRPN

SEQ ID NO: 31527 - protein, 23 aa, Homo sapiens
MPLKLKCLLLQGTKMCSSVRSGM

SEQ ID NO: 31528 - protein, 20 aa, Homo sapiens
LGNPFSLSNVLTGLCLCSAV

SEQ ID NO: 31529 - protein, 22 aa, Homo sapiens
IERTSLKIWLLLLVVQCLEKRD

SEQ ID NO: 31530 - protein, 22 aa, Homo sapiens
VCLLLIMTLVNMCWKNSVAAFR

SEQ ID NO: 31531 - protein, 38 aa, Homo sapiens
KEKLYLPGVLVVFLRMASFSTVTSADDSLVLLGSNSLH

SEQ ID NO: 31532 - protein, 27 aa, Homo sapiens
KEKLYLPGVLVVFLRMASFSTVTSAGE

SEQ ID NO: 31533 - protein, 12 aa, Homo sapiens
KQKNPMVEELKN

SEQ ID NO: 31534 - protein, 15 aa, Homo sapiens
LLVLLLLYQATYLGQ

SEQ ID NO: 31535 - protein, 84 aa, Homo sapiens
RSILSAMELETDRMVTIEEGRDLDMISGGEIFRLLISRAEIHHSWTSGVGTYILGIFGIEKDHLWTIGVEMVLLWIIEVGRHLI

SEQ ID NO: 31536 - protein, 28 aa, Homo sapiens
VCQILHLLLMIVLLTQGNVSMTSTCPLM

SEQ ID NO: 31537 - protein, 2634 aa, Homo sapiens
RMPVTEKDLAEDAPWKKIQQNTFTRWCNEHLKCVNKRIGNLQTDLSDGLRLIALLEVLSQKRMYRKYHQRPTFRQMQLENVSVALEFLDRESIKLVSIDSKAIVDGNLKLILGLVWTLILHYSISMPVWEDEGDDDAKKQTPKQRLLGWIQNKIPYLPITNFNQNWQDGKALGALVDSCAPGLCPDWESWDPQKPVDNAREAMQQADDWLGVPQVITPEEIIHPDVDEHSVMTYLSQFPKAKLKPGAPLKPKLNPKKARAYGRGIEPTGNMVKQPAKFTVDTISAGQGDVMVFVEDPEGNKEEAQVTPDSDKNKTYSVEYLPKVTGLHKVTVLFAGQHISKSPFEVSVDKAQGDASKVTAKGPGLEAVGNIANKPTYFDIYTAGAGVGDIGVEVEDPQGKNTVELLVEDKGNQVYRCVYKPMQPGPHVVKIFFAGDTIPKSPFVVQVGEACNPNACRASGRGLQPKGVRIRETTDFKVDTKAAGSGELGVTMKGPKGLEELVKQKDFLDGVYAFEYYPSTPGRYSIAITWGGHHIPKSPFEVQVGPEAGMQKVRAWGPGLHGGIVGRSADFVVESIGSEVGSLGFAIEGPSQAKIEYNDQNDGSCDVKYWPKEPGEYAVHIMCDDEDIKDSPYMAFIHPATGGYNPDLVRAYGPGLEKSGCIVNNLAEFTVDPKDAGKAPLKIFAQDGEGQRIDIQMKNRMDGTYACSYTPVKAIKHTIAVVWGGVNIPHSPYRVNIGQGSHPQKVKVFGPGVERSGLKANEPTHFTVDCTEAGEGDVSVGIKCDARVLSEDEEDVDFDIIHNANDTFTVKYVPPAAGRYTIKVLFASQEIPASPFRVKVDPSHDASKVKAEGPGLSKAGVENGKPTHFTVYTKGAGKAPLNVQFNSPLPGDAVKDLDIIDNYDYSHTVKYTPTQQGNMQVLVTYGGDPIPKSPFTVGVAAPLDLSKIKLNGLENRVEVGKDQEFTVDTRGAGGQGKLDVTILSPSRKVVPCLVTPVTGRENSTAKFIPREEGLYAVDVTYDGHPVPGSPYTVEASLPPDPSKVKAHGPGLEGGLVGKPAEFTIDTKGAGTGGLGLTVEGPCEAKIECSDNGDGTCSVSYLPTKPGEYFVNILFEEVHIPGSPFKADIEMPFDPSKVVASGPGLEHGKVGEAGLLSVDCSEAGPGALGLEAVSDSGTKAEVSIQNNKDGTYAVTYVPLTAGMYTLTMKYGGELVPHFPARVKVEPAVDTSRIKVFGPGIEGKDVFREATTDFTVDSRPLTQVGGDHIKAHIANPSGASTECFVTDNADGTYQVEYTPFEKGLHVVEVTYDDVPIPNSPFKVAVTEGCQPSRVQAQGPGLKEAFTNKPNVFTVVTRGAGIGGLGITVEGPSESKINCRDNKDGSCSAEYIPFAPGDYDVNITYGGAHIPGSPFRVPVKDVVDPSKVKIAGPGLGSGVRARVLQSFTVDSSKAGLAPLEVRVLGPRADDTDSQSWRSPLKALSEFFKGDPKGDFNKTGLVEPVNVVDNGDGTHTVTYTPSQEGPYMVSVKYADEEIPRSPFKVKVLPTYDASKVTASGPGLSSYGVPASLPVDFAIDARDAGEGLLAVQITDQEGKPKRAIVHDNKDGTYAVTYIPDKTGRYMIGVTYGGDDIPLSPYRIRATQTGDASKCLATGPGIASTVKTGEEVGFVVDAKTAGKGKVTCTVLTPDGTEAEADVIENEDGTYDIFYTAAKPGTYVIYVRFGGVDIPNSPFTVMATDGEVTAVEEAPVNACPPGFRPWVTEEAYVPVSDMNGLGFKPFDLVIPFAVRKGEITGEVHMPSGKTATPEIVDNKDGTVTVRYAPTEVGLHEMHIKYMGSHIPESPLQFYVNYPNSGSVSAYGPGLVYGVANKTATFTIVTEDAGEGGLDLAIEGPSKAEISCIDNKDGTCTVTYLPTLPGDYSILVKYNDKHIPGSPFTAKITDDSRRCSQVKLGSAADFLLDISETDLSSLTASIKAPSGRDEPCLLKRLPNNHIGISFIPREVGEHLVSIKKNGNHVANSPVSIMVVQSEIGDARRAKVYGRGLSEGRTFEMSDFIVDTRDAGYGGISLAVEGPSKVDIQTEDLEDGTCKVSYFPTVPGVYIVSTKFADEHVPGSPFTVKISGEGRVKESITRTSRAPSVATVGSICDLNLKIPEINSSDMSAHVTSPSGRVTEAEIVPMGKNSHCVRFVPQEMGVHTVSVKYRGQHVTGSPFQFTVGPLGEGGAHKVRAGGPGLERGEAGVPAEFSIWTREAGAGGLSIAVEGPSKAEITFDDHKNGSCGVSYIAQEPGNYEVSIKFNDEHIPESPYLVPVIAPSDDARRLTVMSLQESGLKVNQPASFAIRLNGAKGKIDAKVHSPSGAVEECHVSELEPDKYAVRFIPHENGVHTIDVKFNGSHVVGSPFKVRVGEPGQAGNPALVSAYGTGLEGGTTGIQSEFFINTTRAGPGTLSVTIEGPSKVKMDCQETPEGYKVMYTPMAPGNYLISVKYGGPNHIVGSPFKAKVTGQRLVSPGSANETSSILVESVTRSSTETCYSAIPKASSDASKVTSKGAGLSKAFVGQKSSFLVDCSKAGSNMLLIGVHGPTTPCEEVSMKHVGNQQYNVTYVVKERGDYVLAVKWGEEHIPGSPFHVTVP

SEQ ID NO: 31538 - protein, 26 aa, Homo sapiens
RIKVIGSFTIFFIRLCLSLNTEFCRY

SEQ ID NO: 31539 - protein, 35 aa, Homo sapiens
LTWEHIREWLFWGLPLLLWGRRLVQRWHYEPLATC

SEQ ID NO: 31540 - protein, 24 aa, Homo sapiens
MLLLNIQKFFLMFVMTVGKAFQVC

SEQ ID NO: 31541 - protein, 17 aa, Homo sapiens
ILMLCVFRGRIWRPFHL

SEQ ID NO: 31542 - protein, 23 aa, Homo sapiens
RMILAIVLFTLVDMARMPWVWTP

SEQ ID NO: 31543 - protein, 29 aa, Homo sapiens
LCQTLNWALDGHHLLILRTSQGGSPYPGP

SEQ ID NO: 31544 - protein, 8 aa, Homo sapiens
VILLYFSQ

SEQ ID NO: 31545 - protein, 15 aa, Homo sapiens
LPRPTTCLVAFSLCL

SEQ ID NO: 31546 - protein, 20 aa, Homo sapiens
ITGMRLAMFLPATSLFWMTL

SEQ ID NO: 31547 - protein, 27 aa, Homo sapiens
MWILFCGILLTRRCGKRHAVHKWDASG

SEQ ID NO: 31548 - protein, 16 aa, Homo sapiens
IILLGCVVMAQMIVVL

SEQ ID NO: 31549 - protein, 27 aa, Homo sapiens
LVVSFLMILTLRPRRRCFALYRAVPGL

SEQ ID NO: 31550 - protein, 40 aa, Homo sapiens
LSSVSTAQLVVCFLLLRYLEQFLMDIEIPRHCAWLVCMQE

SEQ ID NO: 31551 - protein, 16 aa, Homo sapiens
MNLLPLVLLIILSKSK

SEQ ID NO: 31552 - protein, 34 aa, Homo sapiens
KFLLLVWVWCTYMAVTYTSGDIQKLLKNGSPVSD

SEQ ID NO: 31553 - protein, 42 aa, Homo sapiens
VRILTTMAACQLLGPRIPDPSIGEAPAPDMKIESLQRCLGQT

SEQ ID NO: 31554 - protein, 11 aa, Homo sapiens
IIDFIVAFLTT

SEQ ID NO: 31555 - protein, 48 aa, Homo sapiens
IYWIFWMNQFQVLVHMMISILLIGCEKNVKTEKGIDGSTAKRKNQHGK

SEQ ID NO: 31556 - protein, 22 aa, Homo sapiens
LLVLSFAYRKLIFSCLMSLLVT

SEQ ID NO: 31557 - protein, 13 aa, Homo sapiens
KLWLLGILCRWHI

SEQ ID NO: 31558 - protein, 16 aa, Homo sapiens
MISLLENIKRRKNQQA

SEQ ID NO: 31559 - protein, 8 aa, Homo sapiens
MRLMLLLY

SEQ ID NO: 31560 - protein, 87 aa, Homo sapiens
LSRARASELDGPSWQLVGAYTLAAAAGPSTCFRRRHGAGGVGDPRGMWRVRVHRLRRVAHAAGCTACDHSGTRGAAAPGSGECWYCD

SEQ ID NO: 31561 - protein, 24 aa, Homo sapiens
LAGFDVLLWNLEISGLLLDLLTEL

SEQ ID NO: 31562 - protein, 8 aa, Homo sapiens
KVALLLGL

SEQ ID NO: 31563 - protein, 60 aa, Homo sapiens
IISGSLHFICLMEILSDIQQPCKWSGLCQTATNSCRTISEAAYPRSLMWKDMAVTAWGSK

SEQ ID NO: 31564 - protein, 15 aa, Homo sapiens
ILLLVLILLSGNRPR

SEQ ID NO: 31565 - protein, 31 aa, Homo sapiens
MGQRMPSLASQRKSPATFLTPNMGLKKRKLC

SEQ ID NO: 31566 - protein, 19 aa, Homo sapiens
LAINSKDQKLSEPSMCSIT

SEQ ID NO: 31567 - protein, 11 aa, Homo sapiens
IYLFFKWISLL

SEQ ID NO: 31568 - protein, 15 aa, Homo sapiens
KSGSLFLLAITCSLE

SEQ ID NO: 31569 - protein, 1094 aa, Homo sapiens
IMSQPGIPASGGAPASLQAQNGAALASGSPYTNGPVQNALLSSQESVSQGYNFQLPGSYPHPIPAKTLNPVSGQSNYGGSQGSGQTLNRPPVASNPVTPSLHSGPAPRMPLPASQNPATTPMPSSSFLPEANLPPPLNWQYNYPSTASQTNHCPRASSQPTVSGNTSLTTNHQYVSSGYPSLQNSFIKSGPSVPPLVNPPLPTTFQPGAPHGPPPAGGPPPVRALTPLTSSYRDVPQPLFNSAVNQEGITSNTNNGSMVVHSSYDEIEGGGLLATPQLTNKNPKMSRSVGYSYPSLPPGYQNTTPPGATGVPPSSLNYPSGPQAFTQTPLGANHLTTSMSGLSLQPEGLRVVNLLQERNMLPSTPLKPPVPNLHEDIQKLNCNPELFRCTLTSIPQTQALLNKAKLPLGLLLHPFKDLVQLPVVTSSTIVRCRSCRTYINPFVSFLDQRRWKCNLCYRVNDVPEEFLYNPLTRVYGEPHRRPEVQNATIEFMAPSEYMLRPPQPPVYLFVFDVSHNAVETGYLNSVCQSLLDNLDLLPGNTRTKIGFITFDSTIHFYGLQESLSQPQMLIVSDIEDVFIPMPENLLVNLNESKELVQDLLKTLPQMFTKTLETQSALGPALQAAFKLMSPTGGRMSVFQTQLPTLGVGALKPREEPNHRSSAKDIHMTPSTDFYKKLALDCSGQQVAVDLFLLSGQYSDLASLGCISRYSAGSVYYYPSYHHQHNPVQVQKLQKELQRYLTRKIGFEAVMRIRCTKGLSIHTFHGNFFVRSTDLLSLPNVNPDAGYAVQMSVEESLTDTQLVSFQSALLYTSSKGERRIRVHTLCLPVVSTLNDVFLGADVQAISGLLANMAVDRSMTASLSDARDALVNAVIDSLSAYRSSVLSNQQPGLMVPFSLRLFPLFVLALLKQKSFQTGTNARLDERIFAMCQVKNQPLVYLMLTTHPSLYRVDNLSDEGALNISDRTIPQPPILQLSVEKLSRDGAFLMDAGSVLMLWVGKNCTQNFLSQVLGVQNYASIPQPMTDLPELDTPESARIIAFISWLREQRPFFPILYVIRDESPMKANFLQNMIEDRTESALSYYEFLLHIQQQVNK

SEQ ID NO: 31570 - protein, 16 aa, Homo sapiens
ICFQNYLVTTFVLLLQ

SEQ ID NO: 31571 - protein, 13 aa, Homo sapiens
LNLVLFLMISLTV

SEQ ID NO: 31572 - protein, 47 aa, Homo sapiens
LGSRRQWNGPQKGARPARFLRGSGPWDFSATTFHTWCGSARSSAGSM

SEQ ID NO: 31573 - protein, 15 aa, Homo sapiens
LFLCFSCAHGSLFFL

SEQ ID NO: 31574 - protein, 43 aa, Homo sapiens
MDECTHSSWVSWLLFGVCYTPVLCPVSSEKFHVCDKLGGRVAS

SEQ ID NO: 31575 - protein, 236 aa, Homo sapiens
KMAVELGVLLVRPRPGTGLGRVMRTLLLVLWLATRGSALYFHIGETEKKCFIEEIPDETMVIGNYRTQLYDKQREEYQPATPGLGMFVEVKDPEDKVILARQYGSEGRFTFTSHTPGEHQICLHSNSTKFSLFAGGMLRVHLDIQVGEHANDYAEIAAKDKLSELQLRVRQLVEQVEQIQKEQNYQRWREERFRQTSESTNQRVLWWSILQTLILVAIGVWQMRHLKSFFEAKKLV

SEQ ID NO: 31576 - protein, 17 aa, Homo sapiens
KEAILCLMFIHQMMSVW

SEQ ID NO: 31577 - protein, 13 aa, Homo sapiens
MGKTSPCSHRCCR

SEQ ID NO: 31578 - protein, 44 aa, Homo sapiens
RSGGGGGAAAAGGTGMVVPQGRPRCTHREEEAAAAEEGGAPREH

SEQ ID NO: 31579 - protein, 12 aa, Homo sapiens
VQILILCQTLVL

SEQ ID NO: 31580 - protein, 12 aa, Homo sapiens
IDCSFLMAFSLY

SEQ ID NO: 31581 - protein, 37 aa, Homo sapiens
VILHRGLCIFMIIGSKMLIQELKIGSSCPRLCHKPSS

SEQ ID NO: 31582 - protein, 22 aa, Homo sapiens
LDLVAKVMLLVIFLESALRLSK

SEQ ID NO: 31583 - protein, 15 aa, Homo sapiens
IALAALALGASIMNC

SEQ ID NO: 31584 - protein, 947 aa, Homo sapiens
IALSSRFPARGGAPPALPAPRATRTRARPAAGGGAAMPPRRSIVEVKVLDVQKRRVPNKHYVYIIRVTWSSGSTEAIYRRYSKFFDLQMQMLDKFPMEGGQKDPKQRIIPFLPGKILFRRSHIRDVAVKRLIPIDEYCKALIQLPPYISQCDEVLQFFETRPEDLNPPKEEHIGKKKSGGDQTSVDPMVLEQYVVVANYQKQESSEISLSVGQVVDIIEKNESGWWFVSTAEEQGWVPATCLEGQDGVQDEFSLQPEEEEKYTVIYPYTARDQDEMNLERGAVVEVIQKNLEGWWKIRYQGKEGWAPASYLKKNSGEPLPPKPGPGSPSHPGALDLDGVSRQQNAVGREKELLSSQRDGRFEGRPVPDGDAKQRSPKMRQRPPPRRDMTIPRGLNLPKPPIPPQVEEEYYTIAEFQTTIPDGISFQAGLKVEVIEKNLSGWWYIQIEDKEGWAPATFIDKYKKTSNASRPNFLAPLPHEVTQLRLGEAAALENNTGSEATGPSRPLPDAPHGVMDSGLPWSKDWKGSKDVLRKASSDMSASAGYEEISDPDMEEKPSLPPRKESIIKSEGELLERERERQRTEQLRGPTPKPPGVILPMMPAKHIPPARDSRRPEPKPDKSRLFQLKNDMGLECGHKVLAKEVKKPNLRPISKSKTDLPEEKPDATPQNPFLKSRPQVRPKPAPSPKTEPPQGEDQVDICNLRSKLRPAKSQDKSLLDGEGPQAVGGQDVAFSRSFLPGEGPGRAQDRTGKQDGLSPKEISCRAPPRPAKTTDPVSKSVPVPLQEAPQQRPVVPPRRPPPPKKTSSSSRPLPEVRGPQCEGHESRAAPTPGRALLVPPKAKPFLSNSLGGQDDTRGKGSLGPWGTGKIGENREKAAAASVPNADGLKDSLYVAVADFEGDKDTSSFQEGTVFEVREKNSSGWWFCQVLSGAPSWEGWIPSNYLRKKP

SEQ ID NO: 31585 - protein, 54 aa, Homo sapiens
LGPGDTERQGHRTDFPSESADAARLLQSERGRVSHPAVDAWLRAGARRALPPRV

SEQ ID NO: 31586 - protein, 17 aa, Homo sapiens
VSFFLFSLTCHFQKMPL

SEQ ID NO: 31587 - protein, 9 aa, Homo sapiens
KCLLNILVL

SEQ ID NO: 31588 - protein, 2899 aa, Homo sapiens
ILGPLRFLRAGPPRLCLGAEPLSRLPADMSCNGGSHPRINTLGRMIRAESGPDLRYEVTSGGGGTSRMYYSRRGVITDQNSDGYCQTGTMSRHQNQNTIQELLQNCSDCLMRAELIVQPELKYGDGIQLTRSRELDECFAQANDQMEILDSLIREMRQMGQPCDAYQKRLLQLQEQMRALYKAISVPRVRRASSKGGGGYTCQSGSGWDEFTKHVTSECLGWMRQQRAEMDMVAWGVDLASVEQHINSHRGIHNSIGDYRWQLDKIKADLREKSAIYQLEEEYENLLKASFERMDHLRQLQNIIQATSREIMWINDCEEEELLYDWSDKNTNIAQKQEAFSIRMSQLEVKEKELNKLKQESDQLVLNQHPASDKIEAYMDTLQTQWSWILQITKCIDVHLKENAAYFQFFEEAQSTEAYLKGLQDSIRKKYPCDKNMPLQHLLEQIKELEKEREKILEYKRQVQNLVNKSKKIVQLKPRNPDYRSNKPIILRALCDYKQDQKIVHKGDECILKDNNERSKWYVTGPGGVDMLVPSVGLIIPPPNPLAVDLSCKIEQYYEAILALWNQLYINMKSLVSWHYCMIDIEKIRAMTIAKLKTMRQEDYMKTIADLELHYQEFIRNSQGSEMFGDDDKRKIQSQFTDAQKHYQTLVIQLPGYPQHQTVTTTEITHHGTCQDVNHNKVIETNRENDKQETWMLMELQKIRRQIEHCEGRMTLKNLPLADQGSSHHITVKINELKSVQNDSQAIAEVLNQLKDMLANFRGSEKYCYLQNEVFGLFQKLENINGVTDGYLNSLCTVRALLQAILQTEDMLKVYEARLTEEETVCLDLDKVEAYRCGLKKIKNDLNLKKSLLATMKTELQKAQQIHSQTSQQYPLYDLDLGKFGEKVTQLTDRWQRIDKQIDFRLWDLEKQIKQLRNYRDNYQAFCKWLYDAKRRQDSLESMKFGDSNTVMRFLNEQKNLHSEISGKRDKSEEVQKIAELCANSIKDYELQLASYTSGLETLLNIPIKRTMIQSPSGVILQEAADVHARYIELLTRSGDYYRFLSEMLKSLEDLKLKNTKIEVLEEELRLARDANSENCNKNKFLDQNLQKYQAECSQFKAKLASLEELKRQAELDGKSAKQNLDKCYGQIKELNEKITRLTYEIEDEKRRRKSVEDRFDQQKNDYDQLQKARQCEKENLGWQKLESEKAIKEKEYEIERLRVLLQEEGTRKREYENELAKVRNHYNEEMSNLRNKYETEINITKTTIKEISMQKEDDSKNLRNQLDRLSRENRDLKDEIVRLNDSILQATEQRRRAEENALQQKACGSEIMQKKQHLEIELKQVMQQRSEDNARHKQSLEEAAKTIQDKNKEIERLKAEFQEEAKRRWEYENELSKVRNNYDEEIISLKNQFETEINITKTTIHQLTMQKEEDTSGYRAQIDNLTRENRSLSEEIKRLKNTLTQTTENLRRVEEDIQQQKATGSEVSQRKQQLEVELRQVTQMRTEESVRYKQSLDDAAKTIQDKNKEIERLKQLIDKETNDRKCLEDENARLQRVQYDLQKANSSATETINKLKVQEQELTRLRIDYERVSQERTVKDQDITRFQNSLKELQLQKQKVEEELNRLKRTASEDSCKRKKLEEELEGMRRSLKEQAIKITNLTQQLEQASIVKKRSEDDLRQQRDVLDGHLREKQRTQEELRRLSSEVEALRRQLLQEQESVKQAHLRNEHFQKAIEDKSRSLNESKIEIERLQSLTENLTKEHLMLEEELRNLRLEYDDLRRGRSEADSDKNATILELRSQLQISNNRTLELQGLINDLQRERENLRQEIEKFQKQALEASNRIQESKNQCTQVVQERESLLVKIKVLEQDKARLQRLEDELNRAKSTLEAETRVKQRLECEKQQIQNDLNQWKTQYSRKEEAIRKIESEREKSEREKNSLRSEIERLQAEIKRIEERCRRKLEDSTRETQSQLETERSRYQREIDKLRQRPYGSHRETQTECEWTVDTSKLVFDGLRKKVTAMQLYECQLIDKTTLDKLLKGKKSVEEVASEIQPFLRGAGSIAGASASPKEKYSLVEAKRKKLISPESTVMLLEAQAATGGIIDPHRNEKLTVDSAIARDLIDFDDRQQIYAAEKAITGFDDPFSGKTVSVSEAIKKNLIDRETGMRLLEAQIASGGVVDPVNSVFLPKDVALARGLIDRDLYRSLNDPRDSQKNFVDPVTKKKVSYVQLKERCRIEPHTGLLLLSVQKRSMSFQGIRQPVTVTELVDSGILRPSTVNELESGQISYDEVGERIKDFLQGSSCIAGIYNETTKQKLGIYEAMKIGLVRPGTALELLEAQAATGFIVDPVSNLRLPVEEAYKRGLVGIEFKEKLLSAERAVTGYNDPETGNIISLFQAMNKELIEKGHGIRLLEAQIATGGIIDPKESHRLPVDIAYKRGYFNEELSEILSDPSDDTKGFFDPNTEENLTYLQLKERCIKDEETGLCLLPLKEKKKQVQTSQKNTLRKRRVVIVDPETNKEMSVQEAYKKGLIDYETFKELCEQECEWEEITITGSDGSTRVVLVDRKTGSQYDIQDAIDKGLVDRKFFDQYRSGSLSLTQFADMISLKNGVGTSSSMGSGVSDDVFSSSRHESVSKISTISSVRNLTIRSSSFSDTLEESSPIAAIFDTENLEKISITEGIERGIVDSITGQRLLEAQACTGGIIHPTTGQKLSLQDAVSQGVIDQDMATRLKPAQKAFIGFEGVKGKKKMSAAEAVKEKWLPYEAGQRFLEFQYLTGGLVDPEVHGRISTEEAIRKGFIDGRAAQRLQDTSSYAKILTCPKTKLKISYKDAINRSMVEDITGLRLLEAASVSSKGLPSPYNMSSAPGSRSGSRSGSRSGSRSGSRSGSRRGSFDATGNSSYSYSYSFSSSSIGH

SEQ ID NO: 31589 - protein, 7 aa, Homo sapiens
LLLLFLV

SEQ ID NO: 31590 - protein, 15 aa, Homo sapiens
IVDLKLLLIALVNSS

SEQ ID NO: 31591 - protein, 19 aa, Homo sapiens
MKHMYKLWRASTQILTLMM

SEQ ID NO: 31592 - protein, 18 aa, Homo sapiens
MPEIWPLGQGMPAARDSS

SEQ ID NO: 31593 - protein, 13 aa, Homo sapiens
VVGFCYARNMANS

SEQ ID NO: 31594 - protein, 14 aa, Homo sapiens
ISPWKICFCLLLPT

SEQ ID NO: 31595 - protein, 24 aa, Homo sapiens
VKNLVVVLLFIALQALGELQYLLP

SEQ ID NO: 31596 - protein, 25 aa, Homo sapiens
TPVVWRKSGRHRKNDPLWTRAASNE

SEQ ID NO: 31597 - protein, 402 aa, Homo sapiens
RPSAHGRGGRRGMGAAQSLPGHRSAIMDVLAEANGTFALNLLKTLGKDNSKNVFFSPMSMSCALAMVYMGAKGNTAAQMAQILSFNKSGGGGDIHQGFQSLLTEVNKTGTQYLLRMANRLFGEKSCDFLSSFRDSCQKFYQAEMEELDFISAVEKSRKHINTWVAEKTEGKIAELLSPGSVDPLTRLVLVNAVYFRGNWDEQFDKENTEERLFKVSKNEEKPVQMMFKQSTFKKTYIGEIFTQILVLPYVGKELNMIIMLPDETTDLRTVEKELTYEKFVEWTRLDMMDEEEVEVSLPRFKLEESYDMESVLRNLGMTDAFELGKADFSGMSQTDLSLSKVVHKSFVEVNEEGTEAAAATAAIMMMRCARFVPRFCADHPFLFFIQHSKTNGILFCGRFSSP

SEQ ID NO: 31598 - protein, 90 aa, Homo sapiens
IAAAATTSSSLSSFLLRLAALFSAAEERSAMSGKFREGLHGAMLPGLFRGRPRAALRLRQKDSCGRWNSLSIFQNVFPSPSMGPDTAVLC

SEQ ID NO: 31599 - protein, 15 aa, Homo sapiens
INVFFVLDLNIFIVC

SEQ ID NO: 31600 - protein, 249 aa, Homo sapiens
IRVGTETISAPKMLEEDMEVAIKMVVVGNGAVGKSSMIQRYCKGIFTKDYKKTIGVDFLERQIQVNDEDVRLMLWDTAGQEEFDAITKAYYRGAQACVLVFSTTDRESFEAVSSWREKVVAEVGDIPTVLVQNKIDLLDDSCIKNEEAEALAKRLKLRFYRTSVKEDLNVNEVFKYLAEKYLQKLKQQIAEDPELTHSSSNKIGVFNTSGGSHSGQNSGTLNGGDVINLRPNKQRTKKNRNPFSSCSIP

SEQ ID NO: 31601 - protein, 16 aa, Homo sapiens
TISRESRARVFLRELC

SEQ ID NO: 31602 - protein, 20 aa, Homo sapiens
LKSNSKWHLFLLMILTDLLP

SEQ ID NO: 31603 - protein, 297 aa, Homo sapiens
IRAVGGGVCVDGMGTPGEGLGRCSHALIRGVPESLASGEGAGAGLPALDLAKAQREHGVLGGKLRQRLGLQLLELPPEESLPLGPLLGDTAVIQGDTALITRPWSPARRPEVDGVRKALQDLGLRIVEIGDENATLDGTDVLFTGREFFVGLSKWTNHRGAEIVADTFRDFAVSTVPVSGPSHLRGLCGMGGPRTVVAGSSDAAQKAVRAMAVLTDHPYASLTLPDDAAADCLFLRPGLPGVPPFLLHRGGGDLPNSQEALQKLSDVTLVPVSCSELEKAGAGLSSLCLVLSTRPHS

SEQ ID NO: 31604 - protein, 11 aa, Homo sapiens
ILPKTFGQSRA

SEQ ID NO: 31605 - protein, 10 aa, Homo sapiens
KTFLGLLVVT

SEQ ID NO: 31606 - protein, 10 aa, Homo sapiens
LSAFLSLSLI

SEQ ID NO: 31607 - protein, 50 aa, Homo sapiens
LRGEIGSAGTACSSRARGKGRSPPLQSKFTNLEEAIYTGCADLNGRTRET

SEQ ID NO: 31608 - protein, 14 aa, Homo sapiens
MSVILPRILVWTAV

SEQ ID NO: 31609 - protein, 16 aa, Homo sapiens
MFLSFLMNQILILAFL

SEQ ID NO: 31610 - protein, 31 aa, Homo sapiens
RSGGDCENCCSGSKFSHWLLQVRGVWAAALL

SEQ ID NO: 31611 - protein, 30 aa, Homo sapiens
VIALVLKIVIFFTALMHIDLKDSKKQNVHQ

SEQ ID NO: 31612 - protein, 25 aa, Homo sapiens
VIALVLKIVIFFTDLKDSKKQNVHQ

SEQ ID NO: 31613 - protein, 1120 aa, Homo sapiens
IPSFRPRHSGGGSRGPEEASPARFAFPPSLALPRVHRAASEEQPQEEEEVVGGGGRRPRSRFPGGGKGRTMEVAVEKAVAAAAAASAAASGGPSAAPSGENEAESRQGPDSERGGEAARLNLLDTCAVCHQNIQSRAPKLLPCLHSFCQRCLPAPQRYLMLPAPMLGSAETPPPVPAPGSPVSGSSPFATQVGVIRCPVCSQECAERHIIDNFFVKDTTEVPSSTVEKSNQVCTSCEDNAEANGFCVECVEWLCKTCIRAHQRVKFTKDHTVRQKEEVSPEAVGVTSQRPVFCPFHKKEQLKLYCETCDKLTCRDCQLLEHKEHRYQFIEEAFQNQKVIIDTLITKLMEKTKYIKFTGNQIQNRIIEVNQNQKQVEQDIKVAIFTLMVEINKKGKALLHQLESLAKDHRMKLMQQQQEVAGLSKQLEHVMHFSKWAVSSGSSTALLYSKRLITYRLRHLLRARCDASPVTNNTIQFHCDPSFWAQNIINLGSLVIEDKESQPQMPKQNPVVEQNSQPPSGLSSNQLSKFPTQISLAQLRLQHMQQQVMAQRQQVQRRPAPVGLPNPRMQGPIQQPSISHQQPPPRLINFQNHSPKPNGPVLPPHPQQLRYPPNQNIPRQAIKPNPLQMAFLAQQAIKQWQISSGQGTPSTTNSTSSTPSSPTITSAAGYDGKAFGSPMIDLSSPVGGSYNLPSLPDIDCSSTIMLDNIVRKDTNIDHGQPRPPSNRTVQSPNSSVPSPGLAGPVTMTSVHPPIRSPSASSVGSRGSSGSSSKPAGADSTHKVPVVMLEPIRIKQENSGPPENYDFPVVIVKQESDEESRPQNANYPRSILTSLLLNSSQSSTSEETVLRSDAPDSTGDQPGLHQDNSSNGKSEWLDPSQKSPLHVGETRKEDDPNEDWCAVCQNGGELLCCEKCPKVFHLSCHVPTLTNFPSGEWICTFCRDLSKPEVEYDCDAPSHNSEKKKTEGLVKLTPIDKRKCERLLLFLYCHEMSLAFQDPVPLTVPDYYKIIKNPMDLSTIKKRLQEDYSMYSKPEDFVADFRLIFQNCAEFNEPDSEVANAGIKLENYFEELLKNLYPEKRFPKPEFRNESEDNKFSDDSDDDFVQPRKKRLKSIEERQLLK

SEQ ID NO: 31614 - protein, 14 aa, Homo sapiens
MHIIQRPIFKGYSW

SEQ ID NO: 31615 - protein, 48 aa, Homo sapiens
IMLQFLLGFTLGNVVGMYLAQNYDIPNLAKKLEEIKKDLDAKKKPPSA

SEQ ID NO: 31616 - protein, 12 aa, Homo sapiens
LILLLLRASFTI

SEQ ID NO: 31617 - protein, 33 aa, Homo sapiens
MPTFCAFLSLSELCLRLVALKAAATAKRAKIRP

SEQ ID NO: 31618 - protein, 33 aa, Homo sapiens
IRGGGWAALLCALRLTALLSPVSFVAGSFCAGA

SEQ ID NO: 31619 - protein, 12 aa, Homo sapiens
LVLQMTLILATY

SEQ ID NO: 31620 - protein, 67 aa, Homo sapiens
IKRFSCSHCWQMIEPGFESRQPGSRPCALNSRFASRTESYERLAQCLVLSRHSVSILVAIIPKDTVF

SEQ ID NO: 31621 - protein, 10 aa, Homo sapiens
VALSVLSVLT

SEQ ID NO: 31622 - protein, 16 aa, Homo sapiens
LQSVVMKSWILLSRLP

SEQ ID NO: 31623 - protein, 14 aa, Homo sapiens
IKIKIQVEVKETFS

SEQ ID NO: 31624 - protein, 10 aa, Homo sapiens
LGELILVYLV

SEQ ID NO: 31625 - protein, 22 aa, Homo sapiens
RNPLHLVRSLSGILVLMVPQFP

SEQ ID NO: 31626 - protein, 25 aa, Homo sapiens
RNPLHLVRSLSGILVLMVPQFLMKN

SEQ ID NO: 31627 - protein, 14 aa, Homo sapiens
VTPRMKFLRLWLVG

SEQ ID NO: 31628 - protein, 15 aa, Homo sapiens
ILLIWVVLILVNLLT

SEQ ID NO: 31629 - protein, 23 aa, Homo sapiens
MLFLKVCLCLFKSYSMASWEALR

SEQ ID NO: 31630 - protein, 23 aa, Homo sapiens
LIFLWNYLLSLNLKRTWWILHLN

SEQ ID NO: 31631 - protein, 14 aa, Homo sapiens
LIVLMLVLIRFLEY

SEQ ID NO: 31632 - protein, 11 aa, Homo sapiens
IHCPILLLLTV

SEQ ID NO: 31633 - protein, 22 aa, Homo sapiens
KHRKEQHFFLLLLSMLRLVQVL

SEQ ID NO: 31634 - protein, 455 aa, Homo sapiens
TLDFFRVVENQQPPATMPLNVSFTNRNYDLDYDSVQPYFYCDEEENFYQQQQQSELQPPAPSEDIWKKFELLPTPPLSPSRRSGLCSPSYVAVTPFSLRGDNDGGGGSFSTADQLEMVTELLGGDMVNQSFICDPDDETFIKNIIIQDCMWSGFSAAAKLVSEKLASYQAARKDSGSPNPARGHSVCSTSSLYLQDLSAAASECIDPSVVFPYPLNDSSSPKSCASQDSSAFSPSSDSLLSSTESSPQGSPEPLVLHEETPPTTSSDSEEEQEDEEEIDVVSVEKRQAPGKRSESGSPSAGGHSKPPHSPLVLKRCHVSTHQHNYAAPPSTRKDYPAAKRVKLDSVRVLRQISNNRKCTSPRSSDTEENVKRRTHNVLERQRRNELKRSFFALRDQIPELENNEKAPKVVILKKATAYILSVQAEEQKLISEEDLLRKRREQLKHKLEQLRNSCA

SEQ ID NO: 31635 - protein, 15 aa, Homo sapiens
TSLCLWLWGTWVCWW

SEQ ID NO: 31636 - protein, 13 aa, Homo sapiens
MSRQILLWVYWVG

SEQ ID NO: 31637 - protein, 19 aa, Homo sapiens
ISTFMAALFTIVKIWKQPK

SEQ ID NO: 31638 - protein, 122 aa, Homo sapiens
MLPFAGQRRTGGSTPKEGDMLPHHRNFTSHLHKSIASLKLMNTVSKCQNLTAKMSVLSLDLTAISCLQMHPLRTGEVQQPACRPEGCFWGFLMAMQVVLVPRQSVKDSFIILLSLCYPMRLC

SEQ ID NO: 31639 - protein, 10 aa, Homo sapiens
KILFVSVLHL

SEQ ID NO: 31640 - protein, 36 aa, Homo sapiens
IPLGHLPILIRRMQEKLLMIEKALKTLKSHHQKPKT

SEQ ID NO: 31641 - protein, 66 aa, Homo sapiens
VGVAARRGSLLLCLPLQLRPLPLASGVGAEKTCRSHGGRSGPLCQEDGQDGAEEERGWSIGFAKGA

SEQ ID NO: 31642 - protein, 9 aa, Homo sapiens
LILLTMRKF

SEQ ID NO: 31643 - protein, 13 aa, Homo sapiens
LLWSTVALALSQT

SEQ ID NO: 31644 - protein, 74 aa, Homo sapiens
LFAAGRAGGDLPLQPQPGGAAARRQPAARAAQAFFPAAELAQAGPERQRDPAVASRGGQLHAAGGAGRVPERYP

SEQ ID NO: 31645 - protein, 8 aa, Homo sapiens
ILMIFLML

SEQ ID NO: 31646 - protein, 23 aa, Homo sapiens
ITPKVAIILLTSSFISHTCWQIN

SEQ ID NO: 31647 - protein, 32 aa, Homo sapiens
LSPPLQKKSVMSLHSSLSPSQGQAGSSICRHP

SEQ ID NO: 31648 - protein, 14 aa, Homo sapiens
KKMILVILEWMIVR

SEQ ID NO: 31649 - protein, 12 aa, Homo sapiens
LRSLVFLIIIGN

SEQ ID NO: 31650 - protein, 18 aa, Homo sapiens
VAERCSQGRRCLFSHQHL

SEQ ID NO: 31651 - protein, 14 aa, Homo sapiens
MIHFLLLVTSFHVR

SEQ ID NO: 31652 - protein, 21 aa, Homo sapiens
ILEKTWMMSALRISLASLGLP

SEQ ID NO: 31653 - protein, 14 aa, Homo sapiens
RSASYLLLLRCVCF

SEQ ID NO: 31654 - protein, 8 aa, Homo sapiens
LILTVWLA

SEQ ID NO: 31655 - protein, 27 aa, Homo sapiens
LLLMCTARAMLTGTSSQKICCLMNIIN

SEQ ID NO: 31656 - protein, 12 aa, Homo sapiens
LKPLVPPNRSEL

SEQ ID NO: 31657 - protein, 15 aa, Homo sapiens
LLVPRRMLALLGSPW

SEQ ID NO: 31658 - protein, 23 aa, Homo sapiens
MHGSMIHTGFNASLLTSVTSPAG

SEQ ID NO: 31659 - protein, 50 aa, Homo sapiens
IFFTLELLLLLLLLLLGLSLISERASKRARGEKGRECPPSTLRSWARSHS

SEQ ID NO: 31660 - protein, 21 aa, Homo sapiens
MLGLNKVLFLDLKTFCLNTHL

SEQ ID NO: 31661 - protein, 159 aa, Homo sapiens
KMAARSVSGITRRVFMWTVSGTPCREFWSRFRKEKEPVVVETVEEKKEPILVCPPLRSRAYTPPEDLQSRLESYVKEVFGSSLPSNWQDISLEDSRLKFNLLAHLADDLGHVVPNSRLHQMCRVRDVLDFYNVPIQDRSKFDELSASNLPPNLKITWSY

SEQ ID NO: 31662 - protein, 64 aa, Homo sapiens
LSSSCLSGRAPFKSSDCKERRSRCPRVPGDCEVLTNCHWTYLKQNRKMAANSSGQDKVSLCCPG

SEQ ID NO: 31663 - protein, 42 aa, Homo sapiens
VLDFLQMVSIWSLGLLMDSLKYGTLLLEKSERILSTRPKITL

SEQ ID NO: 31664 - protein, 19 aa, Homo sapiens
RIAVRSLVLLLTRQLEFMV

SEQ ID NO: 31665 - protein, 12 aa, Homo sapiens
VLSSSMLAFKKP

SEQ ID NO: 31666 - protein, 33 aa, Homo sapiens
VPLLPWPPRSAPWVCLQKKLVMTLPRQRVTGRA

SEQ ID NO: 31667 - protein, 20 aa, Homo sapiens
MPVTRFLFINVVIVQVLTLQ

SEQ ID NO: 31668 - protein, 15 aa, Homo sapiens
LLFLKGGSLGLWWLR

SEQ ID NO: 31669 - protein, 9 aa, Homo sapiens
IPNLMARVM

SEQ ID NO: 31670 - protein, 15 aa, Homo sapiens
IFSTTRIITSWLWGK

SEQ ID NO: 31671 - protein, 15 aa, Homo sapiens
VFKDRIWIVCFMALG

SEQ ID NO: 31672 - protein, 15 aa, Homo sapiens
MLKRVSELLNLVRQK

SEQ ID NO: 31673 - protein, 13 aa, Homo sapiens
LCIMIVMILFMEV

SEQ ID NO: 31674 - protein, 35 aa, Homo sapiens
LDYENKNLSVNLNFGRKISLKKMDKMILQKLTNRK

SEQ ID NO: 31675 - protein, 42 aa, Homo sapiens
MNLLLLVSTWMMLIQEGSCFHMTLMNELAKRCYWSYFVRSHI

SEQ ID NO: 31676 - protein, 15 aa, Homo sapiens
IRTLVIAKLFVARCI

SEQ ID NO: 31677 - protein, 61 aa, Homo sapiens
INNCSNLSWTIRIPQAPDCSPFYNWIPRCLECIFTIHFEGSTWCSTFLTDGNKFLSAFSAK

SEQ ID NO: 31678 - protein, 9 aa, Homo sapiens
RFILITYIT

SEQ ID NO: 31679 - protein, 36 aa, Homo sapiens
MSLTLTALRMMKLLLSQLVPPRILQISQLSPPSHLQ

SEQ ID NO: 31680 - protein, 25 aa, Homo sapiens
KGALSIRVEKSTRFLPLKQKPWHLA

SEQ ID NO: 31681 - protein, 11 aa, Homo sapiens
IFVVEKIILLL

SEQ ID NO: 31682 - protein, 32 aa, Homo sapiens
RLCSLYMILWLRRITTQCCLLCLKILTMRKTQ

SEQ ID NO: 31683 - protein, 17 aa, Homo sapiens
RTLPLILLKALMTIGKH

SEQ ID NO: 31684 - protein, 19 aa, Homo sapiens
VTLMLARFHLIYGKRKHNR

SEQ ID NO: 31685 - protein, 14 aa, Homo sapiens
LLKWMVLNPMKELS

SEQ ID NO: 31686 - protein, 29 aa, Homo sapiens
ITSAIKNDHDAMPFFVYSKWELMCLILMW

SEQ ID NO: 31687 - protein, 10 aa, Homo sapiens
MALTKILIVI

SEQ ID NO: 31688 - protein, 17 aa, Homo sapiens
ILLQCRRISVRMGIAKV

SEQ ID NO: 31689 - protein, 11 aa, Homo sapiens
MIMTPLPGMKK

SEQ ID NO: 31690 - protein, 22 aa, Homo sapiens
ISGTLWLVCVTSFCHTSEHPAL

SEQ ID NO: 31691 - protein, 12 aa, Homo sapiens
VWGVVAWWMSWT

SEQ ID NO: 31692 - protein, 22 aa, Homo sapiens
KTSIFRIPPGNADSLLGALMLL

SEQ ID NO: 31693 - protein, 12 aa, Homo sapiens
LWCFLSQFFGFY

SEQ ID NO: 31694 - protein, 52 aa, Homo sapiens
RELEGKSSQAPQVRVPRSPSRGAAARPVEPGRRAGAEAPGRGMRGRGAAPRP

SEQ ID NO: 31695 - protein, 15 aa, Homo sapiens
TMVVERRFCGLGPNG

SEQ ID NO: 31696 - protein, 8 aa, Homo sapiens
LLFGLFLA

SEQ ID NO: 31697 - protein, 12 aa, Homo sapiens
ITATLETSKSWR

SEQ ID NO: 31698 - protein, 33 aa, Homo sapiens
LRALRKPSFPRHGQQGSFLWHEPRSAVQNREEV

SEQ ID NO: 31699 - protein, 26 aa, Homo sapiens
RKNRPPRIRLQLLGLVLLAWPVPSVS

SEQ ID NO: 31700 - protein, 10 aa, Homo sapiens
IYLPICGWLL

SEQ ID NO: 31701 - protein, 16 aa, Homo sapiens
LNTLVVLSWCQWVMFG

SEQ ID NO: 31702 - protein, 377 aa, Homo sapiens
IQMADHSFSDGVPSDSVEAAKNASNTEKLTDQVMQNPRVLAALQERLDNVPHTPSSYIETLPKAVKRRINALKQLQVRCAHIEAKFYEEVHDLERKYAALYQPLFDKRREFITGDVEPTDAESEWHSENEEEEKLAGDMKSKVVVTEKAAATAEEPDPKGIPEFWFTIFRNVDMLSELVQEYDEPILKHLQDIKVKFSDPGQPMSFVLEFHFEPNDYFTNSVLTKTYKMKSEPDKADPFSFEGPEIVDCDGCTIDWKKGKNVTVKTIKKKQKHKGRGTVRTITKQVPNESFFNFFNPLKASGDGESLDEDSEFTLASDFEIGHFFRERIVPRAVLYFTGEAIEDDDNFEEGEEGEEEELEGDEEGEDEDDAEINPKV

SEQ ID NO: 31703 - protein, 31 aa, Homo sapiens
IPVGCDLLLLAMVVRPPQLCGTVSPVNLFLL

SEQ ID NO: 31704 - protein, 8 aa, Homo sapiens
MFLMSIII

SEQ ID NO: 31705 - protein, 22 aa, Homo sapiens
LGESLFLSYLLMTYLVWCQSWN

SEQ ID NO: 31706 - protein, 11 aa, Homo sapiens
TILFLFLQLSA

SEQ ID NO: 31707 - protein, 28 aa, Homo sapiens
MPLHQKEKPTKTWPTEFTVPTRGFLTDT

SEQ ID NO: 31708 - protein, 17 aa, Homo sapiens
IASFYILRPFFLLDIIL

SEQ ID NO: 31709 - protein, 26 aa, Homo sapiens
ILSWLVVLLVSPRFRSFSKTSSMEKN

SEQ ID NO: 31710 - protein, 12 aa, Homo sapiens
VIFCAVFLLDVS

SEQ ID NO: 31711 - protein, 22 aa, Homo sapiens
MARALLVRCFFSLAYSSQLFGL

SEQ ID NO: 31712 - protein, 13 aa, Homo sapiens
IEILNILYLMLLN

SEQ ID NO: 31713 - protein, 16 aa, Homo sapiens
TFTCPCLTTLTAMMWL

SEQ ID NO: 31714 - protein, 32 aa, Homo sapiens
ICLVGFLAFYRKAPLMMFVANDRLFSLCKNYG

SEQ ID NO: 31715 - protein, 99 aa, Homo sapiens
IKMEEISLANLDTNKLEAIAQEIYVDLIEDSCLGFCFEVHRAVKCGYFYLEFAETGSVKDFGIQPVEDKGACRLPLCSLPGEPGNGPDQQLQRSPPEFQ

SEQ ID NO: 31716 - protein, 24 aa, Homo sapiens
KTTDGTMQAGTISNPKGISENSTR

SEQ ID NO: 31717 - protein, 15 aa, Homo sapiens
VISASPFATYLLLVS

SEQ ID NO: 31718 - protein, 88 aa, Homo sapiens
IKEKMLLSVTSRPGISTFGYNRNNKKPYVSLAQQMAPPSPSNSTPNSSSGSNGNDQLSKTNLYIRGLQPGTTDQDLVKLCQPLWLCRF

SEQ ID NO: 31719 - protein, 31 aa, Homo sapiens
IGLSRGRHVAFRGAFMGLSGMGFLFLIVNSR

SEQ ID NO: 31720 - protein, 61 aa, Homo sapiens
LKIHGAEKETEKILEFLLLSLLCLFQLPSIRLAADSTLPLPQMEPYSWQVQAQMEYRDFRH

SEQ ID NO: 31721 - protein, 13 aa, Homo sapiens
LPIFFFVIWLGAR

SEQ ID NO: 31722 - protein, 20 aa, Homo sapiens
RTWISLIVLGIAQLTMKLYL

SEQ ID NO: 31723 - protein, 8 aa, Homo sapiens
MILKMLLF

SEQ ID NO: 31724 - protein, 11 aa, Homo sapiens
KRFFFILASIL

SEQ ID NO: 31725 - protein, 19 aa, Homo sapiens
LLLWQFFCFWSIKLWKPTK

SEQ ID NO: 31726 - protein, 33 aa, Homo sapiens
LAYCNLRLPSSRDSSASVSRVAGTLDVCPWEAA

SEQ ID NO: 31727 - protein, 9 aa, Homo sapiens
ILPPVASPT

SEQ ID NO: 31728 - protein, 36 aa, Homo sapiens
IGVLFVTLRELLYVVQTPCSWHCSFLWRRTTNRCSC

SEQ ID NO: 31729 - protein, 8 aa, Homo sapiens
IWTLSLLA

SEQ ID NO: 31730 - protein, 101 aa, Homo sapiens
LGSFSWFCLFYFSRGAEFRNKNICPSEFQPEGGVLSRRIYSMRWRPASRERTHMGQEPQMTPPTMVVKMLATHRCWEFFLPLKPQNDFRLPGLTRSTSKYL

SEQ ID NO: 31731 - protein, 28 aa, Homo sapiens
KKSRVCLLIMRIKSCLFNMCFVLLPLQQ

SEQ ID NO: 31732 - protein, 17 aa, Homo sapiens
LPTLTWVLLFWTLLATT

SEQ ID NO: 31733 - protein, 17 aa, Homo sapiens
KWRVFLCQICHMLLPTF

SEQ ID NO: 31734 - protein, 15 aa, Homo sapiens
MQKEMLLLTLLSVLK

SEQ ID NO: 31735 - protein, 12 aa, Homo sapiens
MVPAHGSFRKTK

SEQ ID NO: 31736 - protein, 14 aa, Homo sapiens
KECKQLILFFILLA

SEQ ID NO: 31737 - protein, 22 aa, Homo sapiens
VSSSSWWLLWAAAGPARRTIVL

SEQ ID NO: 31738 - protein, 10 aa, Homo sapiens
LFLLPMTLYG

SEQ ID NO: 31739 - protein, 12 aa, Homo sapiens
IILTGWRTVLAM

SEQ ID NO: 31740 - protein, 16 aa, Homo sapiens
KVFFVIFCGLTPIKMS

SEQ ID NO: 31741 - protein, 48 aa, Homo sapiens
KTLFWILQSKSDLMFVASNVLWSFLLQSDLGLESLIFATDVCSFQCTC

SEQ ID NO: 31742 - protein, 186 aa, Homo sapiens
ITLKMKGWGWLALLLGALLGTAWARRSQDLHCGACRALVDELEWEIAQVDPKKTIQMGSFRINPDGSQSVVEVPYARSEAHLTELLEEICDRMKEYGEQIDPSTHRKNYVRVVGRNGESSELDLQGIRIDSDISGTLKFACESIVEEYEDELIEFFSREADNVKDKLCSKRTDLCDHALHISHDEL

SEQ ID NO: 31743 - protein, 11 aa, Homo sapiens
IGAAICLFLFY

SEQ ID NO: 31744 - protein, 20 aa, Homo sapiens
IPTLLSWELIFFFSLSVWLC

SEQ ID NO: 31745 - protein, 22 aa, Homo sapiens
LSSLSQLLGISLVLLVHLQLLC

SEQ ID NO: 31746 - protein, 15 aa, Homo sapiens
LLIAGFFLDRVDVRG

SEQ ID NO: 31747 - protein, 15 aa, Homo sapiens
MLLVRHCCLFLWILI

SEQ ID NO: 31748 - protein, 15 aa, Homo sapiens
LFAILPEPRRRRLGF

SEQ ID NO: 31749 - protein, 36 aa, Homo sapiens
IYNLFVIFLPATQFRLTLERRRAGWFCFSAIPGAPR

SEQ ID NO: 31750 - protein, 45 aa, Homo sapiens
MVLQLDVLHPDVNEVIISHVDFRENVFSSLLAILRHFVGTIDLFK

SEQ ID NO: 31751 - protein, 47 aa, Homo sapiens
KQDSKEHLCVFYRLPIIVLGRKKRVRNKTSFHCPARFCGLVLRPRHL

SEQ ID NO: 31752 - protein, 11 aa, Homo sapiens
LISIQMLPLLF

SEQ ID NO: 31753 - protein, 87 aa, Homo sapiens
VSSLSVTMSAAWIPALGLGVCLLLLPGPAGSEGAAPIAITCFTRGLDIRKEKADVLCPGGCPLEEFSVYGNIVYASVSSICGAAVHR

SEQ ID NO: 31754 - protein, 25 aa, Homo sapiens
LYAQKQMNIIQSILLCLAPLTLEDE

SEQ ID NO: 31755 - protein, 18 aa, Homo sapiens
ITSSWCSRLAALTFLLAG

SEQ ID NO: 31756 - protein, 26 aa, Homo sapiens
LLFLLFIIVKMVNLGAIRVQGLRRTS

SEQ ID NO: 31757 - protein, 18 aa, Homo sapiens
LAKFLQLIVGLVICFSKE

SEQ ID NO: 31758 - protein, 7 aa, Homo sapiens
ILFLIFF

SEQ ID NO: 31759 - protein, 91 aa, Homo sapiens
LARPLLAALRLRLLGLGLGFISRLTSSQSRASSVGFMSLFDENDRRYQKVAIKDLFILLIKPLISQNVCQCQPQRVRPVLSLQDAPSDCQG

SEQ ID NO: 31760 - protein, 23 aa, Homo sapiens
LKVIKVKTRKIAMNVTYLLSTGK

SEQ ID NO: 31761 - protein, 14 aa, Homo sapiens
KEIFIRSQIAGFLS

SEQ ID NO: 31762 - protein, 7 aa, Homo sapiens
MLFAIFW

SEQ ID NO: 31763 - protein, 241 aa, Homo sapiens
IEWLERSEVSGYRSRADPEPRGRDTMTYAYLFKYIIIGDTGVGKSCLLLQFTDKRFQPVHDLTIGVEFGARMVNIDGKQIKLQIWDTAGQESFRSITRSYYRGAAGALLVYDITRRETFNHLTSWLEDARQHSSSNMVIMLIGNKSDLESRRDVKREEGEAFAREHGLIFMETSAKTACNVEEAFINTAKEIYRKIQQGLFDVHNEANGIKIGPQQSISTSVGPSASQRNSRDIGSNSGCC

SEQ ID NO: 31764 - protein, 20 aa, Homo sapiens
MLCPSVLPSPRQMLLPLKMG

SEQ ID NO: 31765 - protein, 30 aa, Homo sapiens
LTSSKEEIQKALRLRQLDSADSFFLFFFFK

SEQ ID NO: 31766 - protein, 27 aa, Homo sapiens
ININMMMEEFHILCALFSPVLLVSEFL

SEQ ID NO: 31767 - protein, 18 aa, Homo sapiens
MWSLMGMVLKLLLDLVIF

SEQ ID NO: 31768 - protein, 14 aa, Homo sapiens
LNLSWVIHVTALVS

SEQ ID NO: 31769 - protein, 12 aa, Homo sapiens
IGLLVWTYYMDQ

SEQ ID NO: 31770 - protein, 8 aa, Homo sapiens
ILLPQPHK

SEQ ID NO: 31771 - protein, 27 aa, Homo sapiens
RARTYLLLTMMWTMKRTLKVPTTGETG

SEQ ID NO: 31772 - protein, 12 aa, Homo sapiens
ILTMKWRVRRLK

SEQ ID NO: 31773 - protein, 70 aa, Homo sapiens
LRAVEMKPARMSFVLPVQLFFVWIIMQQLLKPSSFIRLMQNSVILIPPRKEQAQLTLRTRKVPPTTPALR

SEQ ID NO: 31774 - protein, 16 aa, Homo sapiens
IPMGHRRQMRSLMLAG

SEQ ID NO: 31775 - protein, 59 aa, Homo sapiens
VKMAAAAWLQVLPVILLLLGAHPSPLSFFSAGPATVAAADRSKWHIPIPSLMENLVTCL

SEQ ID NO: 31776 - protein, 18 aa, Homo sapiens
MLLIFLTMRSGNWMVFLC

SEQ ID NO: 31777 - protein, 18 aa, Homo sapiens
IIVSWNWVIWTLWHLSNR

SEQ ID NO: 31778 - protein, 12 aa, Homo sapiens
KKTVQVPIKTTV

SEQ ID NO: 31779 - protein, 127 aa, Homo sapiens
TCFRCGKPGHYIKNCPTNGDKNFESGPRIKKSTGIPRSFMMEVKDPNMKGAMLTNTGKYAIPTIDAEAYAIGKKEKPPFLPEEPSSSSEEDDPIPDELLCLICKDIMTDAVVIPCCGNSYCDECKKC

SEQ ID NO: 31780 - protein, 25 aa, Homo sapiens
TIISTTWTRVKVSVTSLMCLFSTSD

SEQ ID NO: 31781 - protein, 695 aa, Homo sapiens
RKMTPQSLLQTTLFLLSLLFLVQGAHGRGHREDFRFCSQRNQTHRSSLHYKPTPDLRISIENSEEALTVHAPFPAAHPASRSFPDPRGLYHFCLYWNRHAGRLHLLYGKRDFLLSDKASSLLCFQHQEESLAQGPPLLATSVTSWWSPQNISLPSAASFTFSFHSPPHTAAHNASVDMCELKRDLQLLSQFLKHPQKASRRPSAAPASQQLQSLESKLTSVRFMGDMVSFEEDRINATVWKLQPTAGLQDLHIHSRQEEEQSEIMEYSVLLPRTLFQRTKGRSGEAEKRLLLVDFSSQALFQDKNSSQVLGEKVLGIVVQNTKVANLTEPVVLTFQHQLQPKNVTLQCVFWVEDPTLSSPGHWSSAGCETVRRETQTSCFCNHLTYFAVLMVSSVEVDAVHKHYLSLLSYVGCVVSALACLVTIAAYLCSRVPLPCRRKPRDYTIKVHMNLLLAVFLLDTSFLLSEPVALTGSEAGCRASAIFLHFSLLTCLSWMGLEGYNLYRLVVEVFGTYVPGYLLKLSAMGWGFPIFLVTLVALVDVDNYGPIILAVHRTPEGVIYPSMCWIRDSLVSYITNLGLFSLVFLFNMAMLATMVVQILRLRPHTQKWSHVLTLLGLSLVLGLPWALIFFSFASGTFQLVVLYLFSIITSFQGFLIFIWYWSMRLQARGGPSPLKSNSDSARLPISSGSTSSSRI

SEQ ID NO: 31782 - protein, 85 aa, Homo sapiens
ITAKLGIGEMAETDPKTVQDLTSVVQTLLQQMQDKFQTMSDQIIGRIDDMSSRIDDLEKNIADLMTQAGVEELESENKIPATQKS

SEQ ID NO: 31783 - protein, 19 aa, Homo sapiens
LRSAWRWPVPGWWAAVVLS

SEQ ID NO: 31784 - protein, 9 aa, Homo sapiens
LMAHSALRT

SEQ ID NO: 31785 - protein, 35 aa, Homo sapiens
KARCPRVGCLHSQLPHPHPTPTSDTPKLSVTPTVS

SEQ ID NO: 31786 - protein, 27 aa, Homo sapiens
LHSQLPHPHPTPTSDTPKQLPFHPPGN

SEQ ID NO: 31787 - protein, 34 aa, Homo sapiens
MTKPYSTIHFLPRMNQMSSGGAQLMLLKFLRYIR

SEQ ID NO: 31788 - protein, 49 aa, Homo sapiens
MTKPYSTIHFLPRMNQMSSGGAQLMLLKFLRYISLYSSWIFWMKEHSWQ

SEQ ID NO: 31789 - protein, 303 aa, Homo sapiens
KMALVASVRVPARVLLRAGARLPGAALGRTERAAGGGDGARRFGSQRVLVEPDAGAGVAVMKFKNPPVNSLSLEFLTELVISLEKLENDKSFRGVILTSDRPGVFSAGLDLTEMCGRSPAHYAGYWKAVQELWLRLYQSNLVLVSAINGACPAGGCLVALTCDYRILADNPRYCIGLNETQLGIIAPFWLKDTLENTIGHRAAERALQLGLLFPPAEALQVGIVDQVVPEEQVQSTALSAIAQWMAIPDHARQLTKAMMRKATASRLVTQRDADVQNFVSFISKDSIQKSLQMYLERLKEEKG

SEQ ID NO: 31790 - protein, 12 aa, Homo sapiens
IIAWTCGVWAVC

SEQ ID NO: 31791 - protein, 24 aa, Homo sapiens
MFQILMMKMIIFLQILTHVTEPCK

SEQ ID NO: 31792 - protein, 39 aa, Homo sapiens
MMLSHGFGNSLIAFLVLSRRCHIVPKRKSTWRTRKLLWN

SEQ ID NO: 31793 - protein, 10 aa, Homo sapiens
VNSILLYQEK

SEQ ID NO: 31794 - protein, 95 aa, Homo sapiens
KDTAEPSPRAPRTTARSCRLRRTSSLIRWRCGRLETPQRSSWPRATRASWMRTLRPRPCWRSVGIRATAKGSGKSRTMNEEPPEPSWSQDLDSSG

SEQ ID NO: 31795 - protein, 36 aa, Homo sapiens
RYRMRRKTRNLAFLWAITWASPSQLTTRSKLENEIP

SEQ ID NO: 31796 - protein, 14 aa, Homo sapiens
KLKQKLMAHSALRT

SEQ ID NO: 31797 - protein, 177 aa, Homo sapiens
TMAMSFEWPWQYRFPPFFTLQPNVDTRQKQLAAWCSLVLSFCRLHKQSSMTVMEAQESPLFNNVKLQRKLPVESIQIVLEELRKKGNLEWLDKSKSSFLIMWRRPEEWGKLIYQWVSRSGQNNSVFTLYELTNGEDTEDEEFHGLDEATLLRALQALQQEHKAEIITVSDGRGVKFF

SEQ ID NO: 31798 - protein, 11 aa, Homo sapiens
KLPGDVQRTSG

SEQ ID NO: 31799 - protein, 10 aa, Homo sapiens
IGILSVLTFC

SEQ ID NO: 31800 - protein, 995 aa, Homo sapiens
TLCTMAGPVSLRDLLMGASAWMGSESPGGSPTEGGGSAAGGPEPPWREDEICVVGIFGKTALRLNSEKFSLVNTVCDRQVFPLFRHQDPGDPGPGIRTEAGAVGEAGGAEDPGAAAGGSVRGSGAVAEGNRTEAGSQDYSLLQAYYSQESKVLYLLLTSICDNSQLLRACRALQSGEAGGGLSLPHAEAHEFWKHQEKLQCLSLLYLFSVCHILLLVHPTCSFDITYDRVFRALDGLRQKVLPLLKTAIKDCPVGKDWKLNCRPCPPRLLFLFQLNGALKVEPPRNQDPAHPDKPKKHSPKRRLQHALEDQIYRIFRKSRVLTNQSINCLFTVPANQAFVYIVPGSQEEDPVGMLLDQLRSHCTVKDPESLLVPAPLSGPRRYQVMRQHSRQQLSFHIDSSSSSSSGQLVDFTLREFLWQHVELVLSKKGFDDSVGRNPQPSHFELPTYQKWISAASKLYEVAIDGKEEDLGSPTGELTSKILSSIKVLEGFLDIDTKFSENRCQKALPMAHSAYQSNLPHNYTMTVHKNQLAQALRVYSQHARGPAFHKYAMQLHEDCYKFWSNGHQLCEERSLTDQHCVHKFHSLPKSGEKPEADRNPPVLYHNSRARSTGACNCGRKQAPRDDPFDIKAANYDFYQLLEEKCCGKLDHINFPVFEPSTPDPAPAKNESSPAPPDSDADKLKEKEPQTQGESTSLSLALSLGQSTDSLGTYPADPQAGGDNPEVHGQVEVKTEKRPNFVDRQASTVEYLPGMLHSNCPKGLLPKFSSWSLVKLGPAKSYNFHTGLDQQGFIPGTNYLMPWDIVIRTRAEDEGDLDTNSWPAPNKAIPGKRSAVVMGRGRRRDDIARAFVGFEYEDSRGRRFMCSGPDKVMKVMGSGPKESALKALNSDMPLYILSSSQGRGLKPHYAQLMRLFVVVPDAPLQIILMPQVQPGPPPCPVFYPEKQEITLPPDGLWVLRFPYAYVTERGPCFPPKENVQLMSYKVLRGVLKAVTQ

SEQ ID NO: 31801 - protein, 26 aa, Homo sapiens
MNFKTVMLMFLLLFISLFWEKRYQTS

SEQ ID NO: 31802 - protein, 20 aa, Homo sapiens
IISTWRHIWVLLFLQSQSKQ

SEQ ID NO: 31803 - protein, 16 aa, Homo sapiens
RLFKKYFLIILLLYQI

SEQ ID NO: 31804 - protein, 18 aa, Homo sapiens
LEFWPVLQFQILYLIWLE

SEQ ID NO: 31805 - protein, 54 aa, Homo sapiens
RRIALLILAITIHNVPEGLAVGVGFGAIEKTASATFESARVLNLVSCPGLNLPS

SEQ ID NO: 31806 - protein, 22 aa, Homo sapiens
LVGVWRLFLEVIHLVCGSACQL

SEQ ID NO: 31807 - protein, 54 aa, Homo sapiens
LSTHLILFLPKKFMLTREFVGKVKASTRRKLWLSTGLTSQLLLWPMTSHPSLRW

SEQ ID NO: 31808 - protein, 20 aa, Homo sapiens
VVMRIKQKVILFRMRKILTQ

SEQ ID NO: 31809 - protein, 24 aa, Homo sapiens
KVPLRVLQRMFLVLQRKVKKGGKT

SEQ ID NO: 31810 - protein, 67 aa, Homo sapiens
MTCILESLIQLRSVYGITRRSIRNKVLDFSVVFVFFPMPSTASKTLVIRGWIYANSGQMTMIQLEDR

SEQ ID NO: 31811 - protein, 20 aa, Homo sapiens
IFSFWLRGRRGPVALGVGAR

SEQ ID NO: 31812 - protein, 37 aa, Homo sapiens
MPKFLRMLNFLLCWICMNCVHQNFKRKWCLFDPNSRI

SEQ ID NO: 31813 - protein, 13 aa, Homo sapiens
KLIIWTIGSVLVF

SEQ ID NO: 31814 - protein, 79 aa, Homo sapiens
MYLPPPRIPGLGFALLTSAATWCHTEKLRRNHISLLQPQLHICGSSNPFRSCIMWESFPLRKMHTSNFEKMPLGALQGF

SEQ ID NO: 31815 - protein, 58 aa, Homo sapiens
IGIMAAALFVLLGFALLGTHGASGAAGTVFTTVEDLGSKILLTCSLNDSATEQRAAPE

SEQ ID NO: 31816 - protein, 38 aa, Homo sapiens
LRSPPGPPGARPRRSRCHGPDTADGDPELRQQHPGVPQ

SEQ ID NO: 31817 - protein, 29 aa, Homo sapiens
VEPGAGSKPRGLHPTGGRLRPRPRKRWTA

SEQ ID NO: 31818 - protein, 22 aa, Homo sapiens
LIAVGRSGAGAARGQEQQCLCR

SEQ ID NO: 31819 - protein, 22 aa, Homo sapiens
RVPAMPKKLRSGLLGCLELVGL

SEQ ID NO: 31820 - protein, 34 aa, Homo sapiens
MGRSLAASTVFIRKGLIPERRLRRVAVRVPSERS

SEQ ID NO: 31821 - protein, 36 aa, Homo sapiens
LTLTDSARHCRPPGAAQESWSCWQERCRPEALGRLT

SEQ ID NO: 31822 - protein, 212 aa, Homo sapiens
VEEATTEEVSTAAEVVAIARTAGVTTTGITTTPTTEAATTGLPSNSRHHSSLRHHSHHPSSHRHHPATALLGTPQGPAPTIRTATSLAQAPIPAPPPSAATALHRPTLSPAITSISSMPSSGTSTIRTRASGRHTTGTTTTGATPGTHRVAQVHSSQCDPEAPGGPCRLPPPAPASAPPLPPPDPVVLGMGSSQGCLPPAHCLPSEGLPSPP

SEQ ID NO: 31823 - protein, 22 aa, Homo sapiens
LLTTVFLGLQLCAWHRDRLSDG

SEQ ID NO: 31824 - protein, 105 aa, Homo sapiens
VDAGARLTRPGRRGGGLGPPRGAGTPRLLAAGLGLAGGSASRAWDCPGRGRWWPGRGTPDAPGSPEALELRRSASRSGIDSSSMSPASEAPPAGWAVRGGLAGGA

SEQ ID NO: 31825 - protein, 18 aa, Homo sapiens
IKNRGGCLLLLVLVRRQM

SEQ ID NO: 31826 - protein, 294 aa, Homo sapiens
TCRDPAHRSCPRDMGHPPLLPLLLLLHTCVPASWGLRCMQCKTNGDCRVEECALGQDLCRTTIVRLWEEGEELELVEKSCTHSEKTNRTLSYRTGLKITSLTEVVCGLDLCNQGNSGRAVTYSRSRYLECISCGSSDMSCERGRHQSLQCRSPEEQCLDVVTHWIQEGEEGRPKDDRHLRGCGYLPGCPGSNGFHNNDTFHFLKCCNTTKCNEGPILELENLPQNGRQCYSCKGNSTHGCSSEETFLIDCRGPMNQCLVATGTHERSLWGSWLPCKSTTALRPPCCEEAQATHV

SEQ ID NO: 31827 - protein, 23 aa, Homo sapiens
LLFIFIFPLLGCGGPPPGPRLSQ

SEQ ID NO: 31828 - protein, 584 aa, Homo sapiens
MKRRVHTHWDVNISFREASCSQDGNLPTLISSVHRSRHLVMPEHQSRCEFQRGSLEIGLRPAGDLLGKRLGRSPRISSDCFSEKRARSESPQEALLLPRELGPSMAPEDHYRRLVSALSEASTFEDPQRLYHLGLPSHDLLRVRQEVAAAALRGPSGLEAHLPSSTAGQRRKQGLAQHREGAAPAAAPSFSERELPQPPPLLSPQNAPHVALGPHLRPPFLGVPSALCQTPGYGFLPPAQAEMFAWQQELLRKQNLARLELPADLLRQKELESARPQLLAPETALRPNDGAEELQRRGALLVLNHGAAPLLALPPQGPPGSGPPTPSRDSARRAPRKGGPGPASARPSESKEMTGARLWAQDGSEDEPPKDSDGEDPETAAVGCRGPTPGQAPAGGAGAEGKGLFPGSTLPLGFPYAVSPYFHTGAVGGLSMDGEEAPAPEDVTKWTVDDVCSFVGGLSGCGEYTRVFREQGIDGETLPLLTEEHLLTNMGLKLGPALKIRAQVARRLGRVFYVASFPVALPLQPPTLRAPERELGTGEQPLSPTTATSPYGGGHALAGQTSPKQENGTLALLPGAPDPSQPLC

SEQ ID NO: 31829 - protein, 69 aa, Homo sapiens
RRRPNPAGARRTRARSRPPPLQQGPRRRRRSQRGLRRGLRGSLPRWLRPPAPRSPGSRSRRRPRPGQQS

SEQ ID NO: 31830 - protein, 8 aa, Homo sapiens
LPESTLRR

SEQ ID NO: 31831 - protein, 223 aa, Homo sapiens
IMDLLFGRRKTPEELLRQNQRALNRAMRELDRERQKLETQEKKIIADIKKMAKQGQMDAVRIMAKDLVRTRRYVRKFVLMRANIQAVSLKIQTLKSNNSMAQAMKGVTKAMGTMNRQLKLPQIQKIMMEFERQAEIMDMKEEMMNDAIDDAMGDEEDEEESDAVVSQVLDELGLSLTDELSNLPSTGGSLSVAAGGKKAEAAASALADADADLEERLKNLRRD

SEQ ID NO: 31832 - protein, 20 aa, Homo sapiens
KTRPISISAAISAIFAMWML

SEQ ID NO: 31833 - protein, 10 aa, Homo sapiens
LFLILRAWSH

SEQ ID NO: 31834 - protein, 8 aa, Homo sapiens
ILKILLLI

SEQ ID NO: 31835 - protein, 15 aa, Homo sapiens
LGYSIVKSYDGFATP

SEQ ID NO: 31836 - protein, 58 aa, Homo sapiens
KVDHVLDQKAGNLDQRANLSPSLIGAPIHILEADLRMSMRNLEAGLGPDPLKKMERVI

SEQ ID NO: 31837 - protein, 15 aa, Homo sapiens
TSATKLVSYLQSREK

SEQ ID NO: 31838 - protein, 17 aa, Homo sapiens
VVLLLVAVRLHTLLSCP

SEQ ID NO: 31839 - protein, 15 aa, Homo sapiens
VMFGCAGSFFLLVGS

SEQ ID NO: 31840 - protein, 44 aa, Homo sapiens
MYANELVRRQLKSCRPVLLQLTQSLQHWWNLRILLLQMQEWDLI

SEQ ID NO: 31841 - protein, 208 aa, Homo sapiens
LTCVPQAYNRAGAACRSRRLRGSELIFASTGACAVAHSPQPTAMGWDLTVKMLAGNEFQVSLSSSMSVSELKAQITQKIGVHAFQQRLAVHPSGVALQDRVPLASQGLGPGSTVLLVVDKCDEPLSILVRNNKGRSSTYEVRLTQTVAHLKQQVSGLEGVQDDLFWLTFEGKPLEDQLPLGEYGLKPLSTVFMNLRLRGGGTEPGGRS

SEQ ID NO: 31842 - protein, 14 aa, Homo sapiens
TIRELLPLSAFCML

SEQ ID NO: 31843 - protein, 2068 aa, Homo sapiens
MAGRSHPGPLRPLLPLLVVAACVLPGAGGTCPERALERREEEANVVLTGTVEEILNVDPVQHTYSCKVRVWRYLKGKDLVARESLLDGGNKVVISGFGDPLICDNQVSTGDTRIFFVNPAPPYLWPAHKNELMLNSSLMRITLRNLEEVEFCVEDKPGTHFTPVPPTPPDACRGMLCGFGAVCEPNAEGPGRASCVCKKSPCPSVVAPVCGSDASTYSNECELQRAQCSQQRRIRLLSRGPCGSRDPCSNVTCSFGSTCARSADGLTASCLCPATCRGAPEGTVCGSDGADYPGECQLLRRACARQENVFKKFDGPCDPCQGALPDPSRSCRVNPRTRRPEMLLRPESCPARQAPVCGDDGVTYENDCVMGRSGAARGLLLQKVRSGQCQGRDQCPEPCRFNAVCLSRRGRPRCSCDRVTCDGAYRPVCAQDGRTYDSDCWRQQAECRQQRAIPSKHQGPCDQAPSPCLGVQCAFGATCAVKNGQAACECLQACSSLYDPVCGSDGVTYGSACELEATACTLGREIQVARKGPCDRCGQCRFGALCEAETGRCVCPSECVALAQPVCGSDGHTYPSECMLHVHACTHQISLHVASAGPCETCGDAVCAFGAVCSAGQCVCPRCEHPPPGPVCGSDGVTYGSACELREAACLQQTQIEEARAGPCEQAECGSGGSGSGEDGDCEQELCRQRGGIWDEDSEDGPCVCDFSCQSVPGSPVCGSDGVTYSTECELKKARCESQRGLYVAAQGACRGPTFAPLPPVAPLHCAQTPYGCCQDNITAARGVGLAGCPSACQCNPHGSYGGTCDPATGQCSCRPGVGGLRCDRCEPGFWNFRGIVTDGRSGCTPCSCDPQGAVRDDCEQMTGLCSCKPGVAGPKCGQCPDGRALGPAGCEADASAPATCAEMRCEFGARCVEESGSAHCVCPMLTCPEANATKVCGSDGVTYGNECQLKTIACRQGLQISIQSLGPCQEAVAPSTHPTSASVTVTTPGLLLSQALPAPPGALPLAPSSTAHSQTTPPPSSRPRTTASVPRTTVWPVLTVPPTAPSPAPSLVASAFGESGSTDGSSDEELSGDQEASGGGSGGLEPLEGSSVATPGPPVERASCYNSALGCCSDGKTPSLDAEGSNCPATKVFQGVLELEGVEGQELFYTPEMADPKSELFGETARSIESTLDDLFRNSDVKKDFRSVRLRDLGPGKSVRAIVDVHFDPTTAFRAPDVARALLRQIQVSRRRSLGVRRPLQEHVRFMDFDWFPAFITGATSGAIAAGATARATTASRLPSSAVTPRAPHPSHTSQPVAKTTAAPTTRRPPTTAPSRVPGRRPPAPQQPPKPCDSQPCFHGGTCQDWALGGGFTCSCPAGRGGAVCEKVLGAPVPAFEGRSFLAFPTLRAYHTLRLALEFRALEPQGLLLYNGNARGKDFLALALLDGRVQLRFDTGSGPAVLTSAVPVEPGQWHRLELSRHWRRGTLSVDGETPVLGESPSGTDGLNLDTDLFVGGVPEDQAAVALERTFVGAGLRGCIRLLDVNNQRLELGIGPGAATRGSGVGECGDHPCLPNPCHGGAPCQNLEAGRFHCQCPPGRVGPTCADEKSPCQPNPCHGAAPCRVLPEGGAQCECPLGREGTFCQTASGQDGSGPFLADFNGFSHLELRGLHTFARDLGEKMALEVVFLARGPSGLLLYNGQKTDGKGDFVSLALRDRRLEFRYDLGKGAAVIRSREPVTLGAWTRVSLERNGRKGALRVGDGPRVLGESPKSRKVPHTVLNLKEPLYVGGAPDFSKLARAAAVSSGFDGAIQLVSLGGRQLLTPEHVLRQVDVTSFAGHPCTRASGHPCLNGASCVPREAAYVCLCPGGFSGPHCEKGLVEKSAGDVDTLAFDGRTFVEYLNAVTESELANEIPVPETLDSGALHSEKALQSNHFELSLRTEATQGLVLWSGKATERADYVALAIVDGHLQLSYNLGSQPVVLRSTVPVNTNRWLRVVAHREQREGSLQVGNEAPVTGSSPLGATQLDTDGALWLGGLPELPVGPALPKAYGTGFVGCLRDVVVGRHPLHLLEDAVTKPELRPCPTP

SEQ ID NO: 31844 - protein, 8 aa, Homo sapiens
ILWKIVFI

SEQ ID NO: 31845 - protein, 13 aa, Homo sapiens
VALIIANIFSLGY

SEQ ID NO: 31846 - protein, 12 aa, Homo sapiens
VPSPRSITHAGP

SEQ ID NO: 31847 - protein, 15 aa, Homo sapiens
LLDQKHLWLLGLLGT

SEQ ID NO: 31848 - protein, 81 aa, Homo sapiens
MHEELRQAVPRRSGQVPLSQRAHQGRVSQVSGLSDIGEGEEQDLGAPLQLDSGPARGGENRRGLPDAKEAGDCKVRPQASR

SEQ ID NO: 31849 - protein, 19 aa, Homo sapiens
IYWILLLSLVVPPSRCRDS

SEQ ID NO: 31850 - protein, 44 aa, Homo sapiens
LESAGGRQDTGWKGKPNTMTAPRRPQSARPQERDPWSPMSQQAR

SEQ ID NO: 31851 - protein, 27 aa, Homo sapiens
LFTGLALLSPWLSAMLTCKSRQKKSST

SEQ ID NO: 31852 - protein, 25 aa, Homo sapiens
KRMRKKFLLAQVFLSLSVMPSMPVT

SEQ ID NO: 31853 - protein, 23 aa, Homo sapiens
LLLVTQVKVQEAVWRLWKKESHS

SEQ ID NO: 31854 - protein, 16 aa, Homo sapiens
IWLLILAGISGLSAGP

SEQ ID NO: 31855 - protein, 16 aa, Homo sapiens
IQAVCTACSALPDSPS

SEQ ID NO: 31856 - protein, 14 aa, Homo sapiens
ICFILWILRMIRWC

SEQ ID NO: 31857 - protein, 65 aa, Homo sapiens
LCPARPQSYMDPMNEYNALNEAKQMIAVADENQNHHLEPEEVLKYSEFFTGSKLVDYARSVHEEF

SEQ ID NO: 31858 - protein, 30 aa, Homo sapiens
IVAALKIFCFVISGTPQILLRRQPSLVRLS

SEQ ID NO: 31859 - protein, 10 aa, Homo sapiens
MIFTFMSMVW

SEQ ID NO: 31860 - protein, 31 aa, Homo sapiens
MSPSCSLLLVPSLFFWAPLVVLLPAELLHGC

SEQ ID NO: 31861 - protein, 20 aa, Homo sapiens
LLLLFSHQQKNNKRKKRKKD

SEQ ID NO: 31862 - protein, 18 aa, Homo sapiens
LDWDRRTHILATCLWLMC

SEQ ID NO: 31863 - protein, 79 aa, Homo sapiens
IVRIRRSDPDCRTFPDYRILGLLRGLHVKYQDSAWHMLYLPLHPSRPSQKIYKISSGKSLGVLGRERRKIVGWNKNRVE

SEQ ID NO: 31864 - protein, 298 aa, Homo sapiens
LPEPATAAARGCWGPCATLLRSRPPPAGPRPEPACAEPEMSSTSSKRAPTTATQRLKQDYLRIKKDPVPYICAEPLPSNILEWHYVVRGPEMTPYEGGYYHGKLIFPREFPFKPPSIYMITPNGRFKCNTRLCLSITDFHPDTWNPAWSVSTILTGLLSFMVEKGPTLGSIETSDFTKRQLAVQSLAFNLKDKVFCELFPEVVEEIKQKQKAQDELSSRPQTLPLPDVVPDGETHLVQNGIQLLNGHAPGAVPNLAGLQQANRHHGLLGGALANLFVIVGFAAFAYTVKYVLRSIAQE

SEQ ID NO: 31865 - protein, 20 aa, Homo sapiens
LPCIHLFSFLELGLALLPLT

SEQ ID NO: 31866 - protein, 356 aa, Homo sapiens
RGRRKMAAAANSGSSLPLFDCPTWAGKPPPGLHLDVVKGDKLIEKLIIDEKKYYLFGRNPDLCDFTIDHQSCSRVHAALVYHKHLKRVFLIDLNSTHGTFLGHIRLEPHKPQQIPIDSTVSFGASTRAYTLREKPQTLPSAVKGDEKMGGEDDELKGLLGLPEEETELDNLTEFNTAHNKRISTLTIEEGNLDIQRPKRKRKNSRVTFSEDDEIINPEDVDPSVGRFRNMVQTAVVPVKKKRVEGPGSLGLEESGSRRMQNFAFSGGLYGGLPPTHSEAGSQPHGIHGTALIGGLPMPYPNLAPDVDLTPVVPSAVNMNPAPNPAVYNPEAVNEPKKKKYAKEAWPGKKPTPSLLI

SEQ ID NO: 31867 - protein, 22 aa, Homo sapiens
LRIIMMKKCQLELVEIHSQVKF

SEQ ID NO: 31868 - protein, 12 aa, Homo sapiens
IMKCDVDIRKDL

SEQ ID NO: 31869 - protein, 20 aa, Homo sapiens
KIKWMVLLLVYFIFENYLGK

SEQ ID NO: 31870 - protein, 11 aa, Homo sapiens
ILCWMICIQLF

SEQ ID NO: 31871 - protein, 22 aa, Homo sapiens
KRQVTWYLLLLCWCLEHIVMFG

SEQ ID NO: 31872 - protein, 17 aa, Homo sapiens
LIVHGVILMSLSCWRNQ

SEQ ID NO: 31873 - protein, 16 aa, Homo sapiens
LFLPLDFLLFLLVWLW

SEQ ID NO: 31874 - protein, 15 aa, Homo sapiens
LFLPLDFLLFLLVWL

SEQ ID NO: 31875 - protein, 27 aa, Homo sapiens
VRWQLWLCWGSLMLLMWKRQSNLFYPV

SEQ ID NO: 31876 - protein, 684 aa, Homo sapiens
ISPRPHRANMNDISQKAEILLSSSKPVPKTYVPKLGKGDVKDKFEAMQRAREERNQRRSRDEKQRRKEQYIREREWNRRKQEIKEMLASDDEEDVSSKVEKAYVPKLTGTVKGRFAEMEKQRQEEQRKRTEEERKRRIEQDMLEKRKIQRELAKRAEQIEDINNTGTESASEEGDDSLLITVVPVKSYKTSGKMKKNFEDLEKEREEKERIKYEEDKRIRYEEQRPSLKEAKCLSLVMDDEIESEAKKESLSPGKLKLTFEELERQRQENRKKQAEEEARKRLEEEKRAFEEARRQMVNEDEENQDTAKIFKGYRPGKLKLSFEEMERQRREDEKRKAEEEARRRIEEEKKAFAEARRNMVVDDDSPEMYKTISQEFLTPGKLEINFEELLKQKMEEEKRRTEEERKHKLEMEKQEFEQLRQEMGEEEEENETFGLSREYEELIKLKRSGSIQAKNLKSKFEKIGQLSEKEIQKKIEEERARRRAIDLEIKEREAENFHEEDDVDVRPARKSEAPFTHKVNMKARFEQMAKAREEEEQRRIEEQKLLRMQFEQREIDAALQKKREEEEEEEGSIMNGSTAEDEEQTRSGAPWFKKPLKNTSVVDSEPVRFTVKVTGEPKPEITWWFEGEILQDGEDYQYIERGETYCLYLPETFPEDGGEYMCKAVNNKGSAASTCILTIESKN

SEQ ID NO: 31877 - protein, 17 aa, Homo sapiens
IAIFFNSRLLVGLMLRR

SEQ ID NO: 31878 - protein, 8 aa, Homo sapiens
ILPPQPPR

SEQ ID NO: 31879 - protein, 33 aa, Homo sapiens
RNPLNPKRGRTRIRMGWVSTNYRGLPFDTVQDL

SEQ ID NO: 31880 - protein, 32 aa, Homo sapiens
MFTTRLSLMFLLVLEGTAMIGTCAGWRRCASP

SEQ ID NO: 31881 - protein, 42 aa, Homo sapiens
IHTQKGNSMGRWLVSTSDSVLEITDKKPWRKNGIKDQKHDDS

SEQ ID NO: 31882 - protein, 19 aa, Homo sapiens
KFLFKLGHLYVLGMMENLS

SEQ ID NO: 31883 - protein, 19 aa, Homo sapiens
ILTFCLLSSFSSLIKLTFT

SEQ ID NO: 31884 - protein, 14 aa, Homo sapiens
ILSSSCRKILLLLL

SEQ ID NO: 31885 - protein, 45 aa, Homo sapiens
IYRRCLPSWLRSSKSADHSYMYGEWLVSYSQMHPCQNMFQIKYRY

SEQ ID NO: 31886 - protein, 21 aa, Homo sapiens
MLRRKMVSPSIMHKNRLSQFT

SEQ ID NO: 31887 - protein, 31 aa, Homo sapiens
LSWTLAHLLALWMIPQGRSCLMKFSMPCPAA

SEQ ID NO: 31888 - protein, 18 aa, Homo sapiens
IWICAALLVTRKTLVRTL

SEQ ID NO: 31889 - protein, 14 aa, Homo sapiens
LEINLWRLSVLTLL

SEQ ID NO: 31890 - protein, 12 aa, Homo sapiens
IFPLLELLAFSF

SEQ ID NO: 31891 - protein, 29 aa, Homo sapiens
MTMMMIMMMTTTTMMLVTRKHKRALVHQC

SEQ ID NO: 31892 - protein, 22 aa, Homo sapiens
RLFRRVMVYFLNYFSVMVLQMS

SEQ ID NO: 31893 - protein, 14 aa, Homo sapiens
INWSKGAFCCIWFL

SEQ ID NO: 31894 - protein, 33 aa, Homo sapiens
VALPRPPPAKTSNLELTAFYLQNLTQKSKKATR

SEQ ID NO: 31895 - protein, 862 aa, Homo sapiens
LPCLLEVASAMLGPAVLGLSLWALLHPGTGAPLCLSQQLRMKGDYVLGGLFPLGEAEEAGLRSRTRPSSPVCTRFSSNGLLWALAMKMAVEEINNKSDLLPGLRLGYDLFDTCSEPVVAMKPSLMFLAKAGSRDIAAYCNYTQYQPRVLAVIGPHSSELAMVTGKFFSFFLMPQVSYGASMELLSARETFPSFFRTVPSDRVQLTAAAELLQEFGWNWVAALGSDDEYGRQGLSIFSALAAARGICIAHEGLVPLPRADDSRLGKVQDVLHQVNQSSVQVVLLFASVHAAHALFNYSISSRLSPKVWVASEAWLTSDLVMGLPGMAQMGTVLGFLQRGAQLHEFPQYVKTHLALATDPAFCSALGEREQGLEEDVVGQRCPQCDCITLQNVSAGLNHHQTFSVYAAVYSVAQALHNTLQCNASGCPAQDPVKPWQLLENMYNLTFHVGGLPLRFDSSGNVDMEYDLKLWVWQGSVPRLHDVGRFNGSLRTERLKIRWHTSDNQKPVSRCSRQCQEGQVRRVKGFHSCCYDCVDCEAGSYRQNPDDIACTFCGQDEWSPERSTRCFRRRSRFLAWGEPAVLLLLLLLSLALGLVLAALGLFVHHRDSPLVQASGGPLACFGLVCLGLVCLSVLLFPGQPSPARCLAQQPLSHLPLTGCLSTLFLQAAEIFVESELPLSWADRLSGCLRGPWAWLVVLLAMLVEVALCTWYLVAFPPEVVTDWHMLPTEALVHCRTRSWVSFGLAHATNATLAFLCFLGTFLVRSQPGCYNRARGLTFAMLAYFITWVSFVPLLANVQVVLRPAVQMGALLLCVLGILAAFHLPRCYLLMRQPGLNTPEFFLGGGPGDAQGQNDGNTGNQGKHE

SEQ ID NO: 31896 - protein, 16 aa, Homo sapiens
VWFSNIGILMGTCVLK

SEQ ID NO: 31897 - protein, 20 aa, Homo sapiens
MPMILGYWDIRGTKSGTLHL

SEQ ID NO: 31898 - protein, 96 aa, Homo sapiens
IGVLRKVRLAGTWLWVGWTGCRTECPAVGRSMRQSDAHPGAQHRSNCRRHCLRLCAARGCVPEQEARFLGLELPFLASGKSPRTESKGQILSVSAV

SEQ ID NO: 31899 - protein, 18 aa, Homo sapiens
LKPLMFLELCWFFCLAGI

SEQ ID NO: 31900 - protein, 258 aa, Homo sapiens
LGYVLATLLLFILLLVTVLLAARRRRGGYEYSDQKSGKSKGKDVNLAEFAVAAGDQMLYRSEDIQLDYKNNILKERAELAHSPLPAKYIDLDKGERRGRPQPISEPCLSPFHLTWDQRWQAPARPGAPATSGSEIPGESCGGVCPVSPTVMRVEDSRQPVGALGFQGSGRRTANREALGSWLGQQLHLSCLCSSGHLLMLRGSPPFQRLVPLSWNLAWAYAEAASTPLSQGLGGSIAPTPAAFAHGWPCPPLAQPKSH

SEQ ID NO: 31901 - protein, 15 aa, Homo sapiens
MAMTFSWSLSALILL

SEQ ID NO: 31902 - protein, 10 aa, Homo sapiens
RVLLLVGSVV

SEQ ID NO: 31903 - protein, 27 aa, Homo sapiens
ICSNLILTLMTGVGRCRIFLLSVPLCC

SEQ ID NO: 31904 - protein, 21 aa, Homo sapiens
LFLLVFLLCPVWCDSIFLVMN

SEQ ID NO: 31905 - protein, 689 aa, Homo sapiens
IATVSIAAAVAPLTLFLYRGDGGLSSRRRADAAAGALCGEVAVKPPINPFTEFMEKAVNDGSHSEELFCHLKTISEKEDLPRCTSESHLSCLKQDILNEKTELEATLKEAELVTHSVELLLPLFKDTIEKINFENANLSALNLKISEQKEILIKELDTFKSVKLALEHLLRKRDYKQTGDNLSSMLLENLTDNESENTNLKKKVFEKEAHIQELSCLFQSEKANTLKANRFSQSVKVVHERLQIQIHKREAENDKLKEYVKSLETKIAKWNLQSRMNKNEAIVMKEASRQKTVALKKASKVYKQRLDHFTGAIEKLTSQIRDQEAKLSETISASNAWKSHYEKIVIEKTELEVQIETMKKQIINLLEDLKKMEDHGKNSCEEILRKVHSIEYENETLNLENTKLKLRFPCRITESKNMNILIVLDMLCYISSEKTTLAALKDEVVSVENELSELQEVEKKQKTLIEMYKTQVQKLQEAAEIVKSRCENLLHKNNQITKTKNKNVEKMRGQMESHLKELERVCDSLTAAERRLHECQESLQCCKGKCADQEHTIRELQGQVDGNHNLLTKLSLEEENCLIQLKCENLQQKLEQMDAENKELEKKLANQEECLKHSNLKFKEKSAEYTALARQLEAALEEGRQKVAEEIEKMSSRESALQIKILDLETELRKKNEEQNQLVCKMNSDPETP

SEQ ID NO: 31906 - protein, 7 aa, Homo sapiens
LLLLIRM

SEQ ID NO: 31907 - protein, 17 aa, Homo sapiens
MIVQELLFPMLKKMPGN

SEQ ID NO: 31908 - protein, 22 aa, Homo sapiens
LKNWTLNKELPSAFHILLLIEL

SEQ ID NO: 31909 - protein, 14 aa, Homo sapiens
KHTSVLRMILAVCS

SEQ ID NO: 31910 - protein, 7 aa, Homo sapiens
VAILGLI

SEQ ID NO: 31911 - protein, 12 aa, Homo sapiens
ILWLWILGLYGI

SEQ ID NO: 31912 - protein, 21 aa, Homo sapiens
IFSTYTLRVLILPIVKVLLEI

SEQ ID NO: 31913 - protein, 19 aa, Homo sapiens
TTGRIKTHGRTSQSRNAET

SEQ ID NO: 31914 - protein, 21 aa, Homo sapiens
LFNHCRTATLLLFSCFCMDVH

SEQ ID NO: 31915 - protein, 19 aa, Homo sapiens
RLLLEAPAPDPEEPSALLH

SEQ ID NO: 31916 - protein, 24 aa, Homo sapiens
MGVWTESSREPILISLRSSRHSSS

SEQ ID NO: 31917 - protein, 24 aa, Homo sapiens
RFNTSSRSWIISGVESKEVTGWDI

SEQ ID NO: 31918 - protein, 22 aa, Homo sapiens
ITPLFGLNLAWLLVLRTLERWC

SEQ ID NO: 31919 - protein, 19 aa, Homo sapiens
LCQPQWRLWLCMCQRLEWR

SEQ ID NO: 31920 - protein, 12 aa, Homo sapiens
VPMSIWMGWCLL

SEQ ID NO: 31921 - protein, 10 aa, Homo sapiens
IFLTKFGVLL

SEQ ID NO: 31922 - protein, 389 aa, Homo sapiens
TWSLSEKFNLRDKMQWTSLLLLAGLFSLSQAQYEDDPHWWFHYLRSQQSTYYDPYDPYPYETYEPYPYGVDEGPAYTYGSPSPPDPRDCPQECDCPPNFPTAMYCDNRNLKYLPFVPSRMKYVYFQNNQITSIQEGVFDNATGLLWIALHGNQITSDKVGRKVFSKLRHLERLYLDHNNLTRMPGPLPRSLRELHLDHNQISRVPNNALEGLENLTALYLQHNEIQEVGSSMRGLRSLILLDLSYNHLRKVPDGLPSALEQLYMEHNNVYTVPDSYFRGAPKLLYVRLSHNSLTNNGLASNTFNSSSLLELDLSYNQLQKIPPVNTNLENLYLQGNRINEFSISSFCTVVDVVNFSKLQVLRLDGNEIKRSAMPADAPLCLRLASLIEI

SEQ ID NO: 31923 - protein, 11 aa, Homo sapiens
ILFLVLHYIVS

SEQ ID NO: 31924 - protein, 15 aa, Homo sapiens
ITLRLLLVSIHMNWL

SEQ ID NO: 31925 - protein, 672 aa, Homo sapiens
LLPAAPESDSGGGPGGGSGGGGASMSWLFGVNKGPKGEGAGPPPPLPPAQPGAEGGGDRGLGDRPAPKDKWSNFDPTGLERAAKAARELEHSRYAKEALNLAQMQEQTLQLEQQSKLKEYEAAVEQLKSEQIRAQAEERRKTLSEETRQHQARAQYQDKLARQRYEDQLKQQQLLNEENLRKQEESVQKQEAMRRATVEREMELRHKNEMLRVETEARARAKAERENADIIREQIRLKASEHRQTVLESIRTAGTLFGEGFRAFVTDRDKVTATVAGLTLLAVGVYSAKNATAVTGRFIEARLGKPSLVRETSRITVLEALRHPIQVSRRLLSRPQDVLEGVVLSPSLEARVRDIAIATRNTKKNRGLYRHILLYGPPGTGKTLFAKKLALHSGMDYAIMTGGDVAPMGREGVTAMHKLFDWANTSRRGLLLFMDEADAFLRKRATEEISKDLRATLNAFLYHMGQHSNKFMLVLASNLPEQFDCAINSRIDVMVHFDLPQQEERERLVRLHFDNCVLKPATEGKRRLKLAQFDYGRKCSEVARLTEGMSGREIAQLAVSWQATAYASKDGVLTEAMMDACVQDAVQQYRQKMRWLKAEGPGRGVEHPLSGVQGETLTSWSLATDPSYPCLAGPCTFRICSWMGTGLCPGPLSPRMSCGGGRPFCPPGHPLL

SEQ ID NO: 31926 - protein, 32 aa, Homo sapiens
ISFCLRLGLLFLFADETGFHHVGQAGLQFLTS

SEQ ID NO: 31927 - protein, 173 aa, Homo sapiens
LWDSGLGIRVPVGPAHGPVLLPQAERGWGQPRASPALGGRDGGGRCASAVSLLQVAGLTLLAVGVYSAKNATAVTGRFIEARLGKPSLVRETSRITVLEALRHPIQVSRRLLSRPQDVLEGVVLSVSRCAWDRGGAGRGPRSWAGLWPLLALVVAPRSFWVLRCNCLDCAGDR

SEQ ID NO: 31928 - protein, 1211 aa, Homo sapiens
TKLLRPSQGRVRQDRRAASEDHIAMPFGLKLRRTRRYNVLSKNCFVTRIRLLDSNVIECTLSVESTGQECLEAVAQRLELRETHYFGLWFLSKSQQARWVELEKPLKKHLDKFANEPLLFFGVMFYVPNVSWLQQEATRYQYYLQVKKDVLEGRLRCTLDQVIRLAGLAVQADFGDYNQFDSQDFLREYVLFPMDLALEEAVLEELTQKVAQEHKAHSGILPAEAELMYINEVERLDGFGQEIFPVKDNHGNCVHLGIFFMGIFVRNRIGRQAVIYRWNDMGNITHNKSTILVELINKEETALFHTDDIENAKYISRLFATRHKFYKQNKICTEQSNSPPPIRRQPTWSRSSLPRQQPYILPPVHVQCGEHYSETHTSQDSIFHGNEEALYCNSHNSLDLNYLNGTVTNGSVCSVHSVNSLNCSQSFIQASPVSSNLSIPGSDIMRADYIPSHRHSAIIVPSYRPTPDYETVMRQMKRGILHTDSQSQSLRNLNIINTHAYNQPEDLVYSQPEMRERHPYTVPYGPQGVYSNKLVSPSDQRNPKNNVVPSKPGASAISHTVSTPELANMQLQGSHNYSTAHMLKNYLFRPPPPYPRPRPATSTPDLASHRHKYVSGSSPDLVTRKVQLSVKTFQEDSSPVVHQSLQEVSEPLTATKHHGTVNKRHSLEVMNSMVRGMEAMTLKSLHLPMARRNTLREQGPPEEGSGSHEVPQLPQYHHKKTFSDATMLIHSSESEEEEEEAPESVPQIPMLREKMEYSAQLQAALARIPNKPPPEYPGPRKSVSNGALRQDQASLPPAMARARVLRHGPAKAISMSRTDPPAVNGASLGPSISEPDLTSVKERVKKEPVKERPVSEMFSLEDSIIEREMMIRNLEKQKMAGLEAQKRPLMLAALNGLSVARVSGREENRVDATRVPMDERFRTLKKKLEEGMVFTEYEQIPKKKANGIFSTAALPENAERSRIREVVPYEENRVELIPTKENNTGYINASHIKVVVGGAEWHYIATQGPLPHTCHDFWQMVWEQGVNVIAMVTAEEEGGRTKSHRYWPKLGSKHSSATYGKFKVTTKFRTDSVCYATTGLKVKHLLSGQERTVWHLQYTDWPDHGCPEDVQGFLSYLEEIQSVRRHTNSMLEGTKNRHPPIVVHCSAGVGRTGVLILSELMIYCLEHNEKVEVPMMLRLLREQRMFMIQTIAQYKFVYQVLIQFLQNSRLI

SEQ ID NO: 31929 - protein, 18 aa, Homo sapiens
MLMVTIWNMLTLLMNSCL

SEQ ID NO: 31930 - protein, 610 aa, Homo sapiens
LLPAARESDSGGGPGGGSGGGGASMSWLFGINKGPKGEGAGPPPPLPPAQPGAEGGGDRGLGDRPAPKDKWSNFDPTGLERAAKAARELEHSRYAKDALNLAQMQEQTLQLEQQSKLKEYEAAVEQLKSEQIRAQAEERRKTLSEETRQHQARAQYQDKLARQRYEDQLKQQQLLNEENLRKQEESVQKQEAMRRATVEREMELRHKNEMLRVEAEARARAKAERENADIIREQIRLKAAEHRQTVLESIRTAGTLFGEGFRAFVTDWDKVTATVAGLTLLAVGVYSAKNATLVAGRFIEARLGKPSLVRETSRITVLEALRHPIQVSRRLLSRPQDALEGVVLSPSLEARVRDIAIATRNTKKNRSLYRNILMYGPPGTGKTLFAKKLALHSGMDYAIMTGGDVAPMGREGVTAMHKLFDWANTSRRGLLLFVDEADAFLRKRATEKISEDLRATLNAFLYRTGQHSNKFMLVLASNQPEQFDWAINDRINEMVHFDLPGQEERERLVRMYFDKYVLKPATEGKQRLKLAQFDYGRKCSEVARLTEGMSGREIAQLAVSWQATAYASEDGVLTEAMMDTRVQDAVQQHQQKMCWLKAEGPGRGDEPSPS

SEQ ID NO: 31931 - protein, 658 aa, Homo sapiens
LLPAARESDSGGGPGGGSGGGGASMSWLFGINKGPKGEGAGPPPPLPPAQPGAEGGGDRGLGDRPAPKDKWSNFDPTGLERAAKAARELEHSRYAKDALNLAQMQEQTLQLEQQSKLKMRLEALSLLHTLVWAWSLCRAGAVQTQERLSGSASPEQVPAGECCALQEYEAAVEQLKSEQIRAQAEERRKTLSEETRQHQARAQYQDKLARQRYEDQLKQQQLLNEENLRKQEESVQKQEAMRRATVEREMELRHKNEMLRVEAEARARAKAERENADIIREQIRLKAAEHRQTVLESIRTAGTLFGEGFRAFVTDWDKVTATVAGLTLLAVGVYSAKNATLVAGRFIEARLGKPSLVRETSRITVLEALRHPIQVSRRLLSRPQDALEGVVLSPSLEARVRDIAIATRNTKKNRSLYRNILMYGPPGTGKTLFAKKLALHSGMDYAIMTGGDVAPMGREGVTAMHKLFDWANTSRRGLLLFVDEADAFLRKRATEKISEDLRATLNAFLYRTGQHSNKFMLVLASNQPEQFDWAINDRINEMVHFDLPGQEERERLVRMYFDKYVLKPATEGKQRLKLAQFDYGRKCSEVARLTEGMSGREIAQLAVSWQATAYASEDGVLTEAMMDTRVQDAVQQHQQKMCWLKAEGPGRGDEPSPS

SEQ ID NO: 31932 - protein, 15 aa, Homo sapiens
LFSVYWLFWAAGRKS

SEQ ID NO: 31933 - protein, 31 aa, Homo sapiens
LAELSSNLWMEHLQNQRSFTHFMIWSQILTN

SEQ ID NO: 31934 - protein, 52 aa, Homo sapiens
MRRCRKLVLAYIPVSLCSITAVTPTVRLCSMGPTSYCEQSETSRWERRMLIC

SEQ ID NO: 31935 - protein, 23 aa, Homo sapiens
RICCRLLVIIAKIETLCIEEKNH

SEQ ID NO: 31936 - protein, 16 aa, Homo sapiens
LTFYKPSLNLSVLVIA

SEQ ID NO: 31937 - protein, 47 aa, Homo sapiens
KMNIWQKGQDKVKRIMSILKAILMMIQVWKTTQIHRIQKILLFWRVI

SEQ ID NO: 31938 - protein, 15 aa, Homo sapiens
LRYRIQKILLFWRVI

SEQ ID NO: 31939 - protein, 13 aa, Homo sapiens
VAVKISLLQSLLY

SEQ ID NO: 31940 - protein, 8 aa, Homo sapiens
IAYFGILI

SEQ ID NO: 31941 - protein, 18 aa, Homo sapiens
LFLTCIEMVMKKLCPSLH

SEQ ID NO: 31942 - protein, 10 aa, Homo sapiens
LEILLFGQMR

SEQ ID NO: 31943 - protein, 15 aa, Homo sapiens
MVAVRLLLLFASGLR

SEQ ID NO: 31944 - protein, 14 aa, Homo sapiens
RYTSNFSRRQSPVC

SEQ ID NO: 31945 - protein, 26 aa, Homo sapiens
RTWSLEEYLVCFSSCLACLCSSSCCC

SEQ ID NO: 31946 - protein, 17 aa, Homo sapiens
RIAILPFRANLQEQRKN

SEQ ID NO: 31947 - protein, 19 aa, Homo sapiens
VDPFVLLVLMSSLLSLNLF

SEQ ID NO: 31948 - protein, 8 aa, Homo sapiens
LIMLVLVL

SEQ ID NO: 31949 - protein, 46 aa, Homo sapiens
MIIEGDYSVLTSALELIYEIIILQVGNSITGSSREFPLDLKLGHVI

SEQ ID NO: 31950 - protein, 25 aa, Homo sapiens
ILLKSIMKRTKKISHGLISESGTKL

SEQ ID NO: 31951 - protein, 25 aa, Homo sapiens
MCPSSWWPTKKTCAATSMSAQSWPA

SEQ ID NO: 31952 - protein, 11 aa, Homo sapiens
VAKWMVCLFAV

SEQ ID NO: 31953 - protein, 14 aa, Homo sapiens
MYHWVFRDPSCKET

SEQ ID NO: 31954 - protein, 10 aa, Homo sapiens
KNLILMLLLQ

SEQ ID NO: 31955 - protein, 174 aa, Homo sapiens
VDLKCVGEAAGGFYYKDHLPRLGKPAELQRRVSADSQPFQHGDKVKCLLDTDVLREMQEGHGGWNPRMAEVSRPAVEPCVPCPPSPPPPQPLPPQASSPTQPQLHDPPQFIGQTGTVHRITDRGDVRVQFNHETRWTFHPGALTKVPGGLGCASSACFCNPFHVPPWPWGVRQD

SEQ ID NO: 31956 - protein, 151 aa, Homo sapiens
KLLKEMVLLERLRHPNVLQLYGYCYQDSEDIPDTLTTITELGAPVEMIQLLQTSWEDRFRICLSLGRLLHHLAHSPLGSVTLLDFRPRQFVLVDGELKVTDLDDARVEETPCAGSTDCILEFPARNFTLPCSAQGWCEGMNEKRNLYNAYR

SEQ ID NO: 31957 - protein, 21 aa, Homo sapiens
LLFLLLSRTQFMTTVLQILQN

SEQ ID NO: 31958 - protein, 16 aa, Homo sapiens
LLPYLKKKFLSGLVIC

SEQ ID NO: 31959 - protein, 32 aa, Homo sapiens
LIFLSLNLLMGPISMRNVKSEKQDSVTLSTIL

SEQ ID NO: 31960 - protein, 371 aa, Homo sapiens
VWGGHTAAAGLLLCCLGAVPGPRPTSLLHRAVRKILARARQLVDAKKEDGFTALHLAALNNHREVAQILIREGRCDVNVRNRKLQSPLHLAVQQAHVGLVPLLVDAGCSVNAEDEEGDTALHVALQRHQLLPLVADGAGGDPGPLQLLSRLQASGLPGSAELTVGAAVACFLALEGADVSYTNHRGRSPLDLAAEGRVLKALQGCAQRFRERQAGGGAAPGPRQTLGTPNTVTNLHVGAAPGPEAAECLVCSELALLVLFSPCQHRTVCEECARRMKKCIRCQVVVSKKLRPDGSEVASAAPAPGPPRQLVEELQSRYRQMEERITCPICIDSHIRLVFQCGHGACAPCGSALSACPICRQPIRDRIQIFV

SEQ ID NO: 31961 - protein, 12 aa, Homo sapiens
IVLLLQDRRLVH

SEQ ID NO: 31962 - protein, 24 aa, Homo sapiens
MTRSNGFCDAVWTLLSLNSMCVLL

SEQ ID NO: 31963 - protein, 14 aa, Homo sapiens
VLLFSACCCCCCCG

SEQ ID NO: 31964 - protein, 9 aa, Homo sapiens
LPPLSHNRK

SEQ ID NO: 31965 - protein, 11 aa, Homo sapiens
LNLIYRNHCVS

SEQ ID NO: 31966 - protein, 23 aa, Homo sapiens
LKLTLKMILTLMYILEKQRLLLF

SEQ ID NO: 31967 - protein, 14 aa, Homo sapiens
MKFPFLPILIFVIL

SEQ ID NO: 31968 - protein, 10 aa, Homo sapiens
MMTHFLIGLA

SEQ ID NO: 31969 - protein, 12 aa, Homo sapiens
LLRGDWLLHLLL

SEQ ID NO: 31970 - protein, 66 aa, Homo sapiens
IFTAQFLGRWSHQPLLDKQSGSAKAAVTSIFSNLNELYPQKNTIRLVRQALLSHFTDEELGGPVDV

SEQ ID NO: 31971 - protein, 19 aa, Homo sapiens
LNRVLNLKHLVALKMLCWL

SEQ ID NO: 31972 - protein, 13 aa, Homo sapiens
MPHFCLLLATLLD

SEQ ID NO: 31973 - protein, 36 aa, Homo sapiens
LLHSAHNGSHRKQYLSHQTLCPTGRVLIHWLQRLRA

SEQ ID NO: 31974 - protein, 23 aa, Homo sapiens
MQLLPFLQLSLWWPCLRTTMLTI

SEQ ID NO: 31975 - protein, 27 aa, Homo sapiens
LPTQWKAPLVGRLLSLALLPVLVWPSI

SEQ ID NO: 31976 - protein, 11 aa, Homo sapiens
MRILATIMFLI

SEQ ID NO: 31977 - protein, 19 aa, Homo sapiens
LWMIMLDLLSWIPKARLLL

SEQ ID NO: 31978 - protein, 33 aa, Homo sapiens
IIAILPIPWQYVACLWIHSVPKKVNRRAKKWRS

SEQ ID NO: 31979 - protein, 7 aa, Homo sapiens
IMLLMIV

SEQ ID NO: 31980 - protein, 18 aa, Homo sapiens
ILALRRLFLEMILFLMTF

SEQ ID NO: 31981 - protein, 244 aa, Homo sapiens
VKMKNEKMKTTSWLFQSHGSTEIPGRVKKQRKKWGCRSVEEFQCLNRIEEGTYGVVYRAKDKKTDEIVALKRLKMEKEKEGFPITSLREINTILKAQHPNIVTVREIVVGSNMDKIYIVMNYVEHDLKSLMETMKQPFLPGEVKTLMIQLLRGVKHLHDNWILHRDLKTSNLLLSHAGILKPPTASRALAFLNTSPGVLGILHGRGHVVSGLHLRGAADSEASVPREFGNRSDQQSVQGAGDPQ

SEQ ID NO: 31982 - protein, 10 aa, Homo sapiens
VYLGIFLCLL

SEQ ID NO: 31983 - protein, 24 aa, Homo sapiens
IFGDKRRKTRRNPKNGTESRECYC

SEQ ID NO: 31984 - protein, 19 aa, Homo sapiens
ISLMQTRKALLPLLMFSVY

SEQ ID NO: 31985 - protein, 19 aa, Homo sapiens
RINICRIGWCVLCVCFSNP

SEQ ID NO: 31986 - protein, 71 aa, Homo sapiens
TPSITVDLLTKRISRYLCALSVMCLCLWPEGSPLTVLWESTLTETVALIQHSKNVRSSPISVNALAAGSEK

SEQ ID NO: 31987 - protein, 22 aa, Homo sapiens
KKWMGYFELELLTVVMIECFAE

SEQ ID NO: 31988 - protein, 32 aa, Homo sapiens
LHCCLGGSGDSALDPKVQAREHNPWLRWAARG

SEQ ID NO: 31989 - protein, 22 aa, Homo sapiens
RFSSLSFWISLFLVLSTKDPFL

SEQ ID NO: 31990 - protein, 11 aa, Homo sapiens
IKPTIQMFLLF

SEQ ID NO: 31991 - protein, 13 aa, Homo sapiens
IWVPQWICIFLII

SEQ ID NO: 31992 - protein, 11 aa, Homo sapiens
ITVASLIMLVE

SEQ ID NO: 31993 - protein, 15 aa, Homo sapiens
IWACGLLLVWQAPRG

SEQ ID NO: 31994 - protein, 17 aa, Homo sapiens
RHRHGWYIRLLLPAVLH

SEQ ID NO: 31995 - protein, 92 aa, Homo sapiens
LLSEFCTRSCPHLLEIDKEGTRRSPLPVRSFPQPPGPAWARSPRHVSPCSPSSGHLSICGLERPKTLSVILGSRPGLKSAMTLGTGEAQPWA

SEQ ID NO: 31996 - protein, 20 aa, Homo sapiens
LVIFTLFLLKTYWMQYIHFA

SEQ ID NO: 31997 - protein, 42 aa, Homo sapiens
LGHMPRPWRLSHASCVTMLALMPQTFSTSCGLGMPRGVHGME

SEQ ID NO: 31998 - protein, 18 aa, Homo sapiens
IYRLLLYDRSQTCQTKVN

SEQ ID NO: 31999 - protein, 17 aa, Homo sapiens
MLLVVVFSTLGGMPLLA

SEQ ID NO: 32000 - protein, 19 aa, Homo sapiens
LMTAIWVILWLSEISMVMA

SEQ ID NO: 32001 - protein, 19 aa, Homo sapiens
MTSLCLSKVILINRSCSFM

SEQ ID NO: 32002 - protein, 12 aa, Homo sapiens
MQCFWILLIPVA

SEQ ID NO: 32003 - protein, 19 aa, Homo sapiens
LVYRASGVQARDPMHRGGQ

SEQ ID NO: 32004 - protein, 25 aa, Homo sapiens
VPLPDLHRFRCRCRSTQRRKERMLL

SEQ ID NO: 32005 - protein, 13 aa, Homo sapiens
ILLIIPLAAMPMA

SEQ ID NO: 32006 - protein, 26 aa, Homo sapiens
VGIFFFFFVWRNGDTKTHLAAEVRVQ

SEQ ID NO: 32007 - protein, 98 aa, Homo sapiens
KMMTVGTMIRMKKTAHRKMVRRKKRNETRIRAVARERLLSLDRQSIPCSTTTLFGTPGEPPAVPRAHRAMNRISNRLAPLPLWSSSGGFIATWYVLGT

SEQ ID NO: 32008 - protein, 290 aa, Homo sapiens
VSLTSYGRRPSNLRTRFELLVSASQDGKLIIWDSYTTNKVHAIPLRSSWVMTCAYAPSGNYVACGGLDNICSIYNLKTREGNVRVSRELAGHTGYLSCCRFLDDNQIVTSSGDTTCALWDIETGQQTTTFTGHTGDVMSLSLAPDTRLFVSGACDASAKLWDVREGMCRQTFTGHESDINAICFFPNGNAFATGSDDATCRLFDLRADQELMTYSHDNIICGITSVSFSKSGRLLLAGYDDFNCNVWDALKADRAGVLAGHDNRVSCLGVTDDGMAVATGSWDSFLKIWN

SEQ ID NO: 32009 - protein, 18 aa, Homo sapiens
IRFVLICMKVLASSFCHL

SEQ ID NO: 32010 - protein, 13 aa, Homo sapiens
IMPYWSSELFSPV

SEQ ID NO: 32011 - protein, 12 aa, Homo sapiens
TARTSWGCRCSG

SEQ ID NO: 32012 - protein, 22 aa, Homo sapiens
VVLIKNLVWTLALFAFYKPNSI

SEQ ID NO: 32013 - protein, 13 aa, Homo sapiens
LIVLVFLFQISHS

SEQ ID NO: 32014 - protein, 13 aa, Homo sapiens
IILTSRWIIQFLF

SEQ ID NO: 32015 - protein, 145 aa, Homo sapiens
LAARGLRLLLPLLPLLPLLPLPQVGRAAFSLGSATAGRVPARTTPLPGSPLSPQVALGFADGSCDPSDQCPPQARWSSLWHVGLYTPEPPPSYDEAVKMAKPREEGPALSQKPSPLLGASGLETTPVPQESGPNTQLPPCSPGAP

SEQ ID NO: 32016 - protein, 47 aa, Homo sapiens
LRLLLPLLPLLPLLPLPQVALGFADGSCDPSDQCPPQARWSSLWHVG

SEQ ID NO: 32017 - protein, 24 aa, Homo sapiens
IPLSQKILSEQLCTLFLACASGWC

SEQ ID NO: 32018 - protein, 70 aa, Homo sapiens
MKLSLAMMTFLQQLQTVLLIPLRRESNLLGQSPLPHPVSTGGFIPWATSTTHTPQTTITSISRCQGPTAR

SEQ ID NO: 32019 - protein, 31 aa, Homo sapiens
IQIIPLTMISMMMILSLLLLYHIEFTQQVET

SEQ ID NO: 32020 - protein, 296 aa, Homo sapiens
LCGRREPSLRGPRPEPAAAMDAPARLLAPLLLLCAQQLRGTRAMNDIGDYVGSNLEISWLPNLDGLIAGYARNFRPGIGGPPVNVALALEVASIDHISEANMEYTMTVFLHQSWRDSRLSYNHTNETLGLDSRFVDKLWLPDTFIVNAKSAWFHDVTVENKLIRLQPDGVILYSIRITSTVACDMDLAKYPMDEQECMLDLESCEWVCKAGRGFSSSGWGLRLSARGLDKAGPAQDAGKHQTSFCMQEAWAGGEGARKPGAVWLVGLCPAWGAGPWSPDMARIDIVEPVQQPLCVT

SEQ ID NO: 32021 - protein, 17 aa, Homo sapiens
LSALGFLCLLWMAPEGM

SEQ ID NO: 32022 - protein, 257 aa, Homo sapiens
LSPGGPRSCQALQPLSPMVGLGWAGMGALTVAVLAAGQFPRLSLHFHLRRNRGVYIIQSYMPSVLLVAMSWVSFWISQAAVPARVSLGITTVLTMTTLMVSARSSLPRASAIKALDVYFWICYVFVFAALVEYAFAHFNADYRKKQKAKVKVSRPRAEMDVRNAIVLFSLSAAGVTQELAISRRQRRVPGNLMGSYRSVGVETGETKKEGAARSGGQGGIRARLRPIDADTIDIYARAVFPAAFAAVNVIYWAAYAM

SEQ ID NO: 32023 - protein, 24 aa, Homo sapiens
IIMKWDRCTTIFSLLLWIQLAAFE

SEQ ID NO: 32024 - protein, 10 aa, Homo sapiens
TVREILALLL

SEQ ID NO: 32025 - protein, 10 aa, Homo sapiens
LLMHIVVLIS

SEQ ID NO: 32026 - protein, 12 aa, Homo sapiens
MLPIALSMVIWS

SEQ ID NO: 32027 - protein, 13 aa, Homo sapiens
KWLFYRICTILGL

SEQ ID NO: 32028 - protein, 9 aa, Homo sapiens
INDWMVAAF

SEQ ID NO: 32029 - protein, 14 aa, Homo sapiens
VKLVVMQKRMLQNF

SEQ ID NO: 32030 - protein, 460 aa, Homo sapiens
VVLMTSADLLKSYDHVCETGMPLPTWLLPDPSLFPWRAGGLLSLAAMKSGLEATPPVTCGAVPMQETASLQPPADPVPAPSPGPSHLHSHLVTGHLLHSGAHPHFPSPHTVAKSEGRRGPRMTPSPAPFTSGPAARPHQPLSAARVLLLLFALCKTEPAGGFGPTKAASVGLLSKEAAVCRGDCSLRRLSPCRLFLVIEYVNGGDLMFHMQRQRKLPEEHARFYAAEICIALNFLHERGIIYRDLKLDNVLLDADGHIKLTDYGMCKEGLGPGDTTSTFCGTPNYIAPEILRGEEYGFSVDWWALGVLMFEMMAGRSPFDIITDNPDMNTEDYLFQVILEKPIRIPRFLSVKASHVLKGFLNKDPKERLGCRPQTGFSDIKSHAFFRSIDWDLLEKKQALPPFQPQITDDYGLDNFDTQFTSEPVQLTPDDEDAIKRIDQSEFEGFEYINPLLLSTEESV

SEQ ID NO: 32031 - protein, 26 aa, Homo sapiens
IRINKAHGKNFRKFTERVPADETAFG

SEQ ID NO: 32032 - protein, 8 aa, Homo sapiens
LLLLMLCC

SEQ ID NO: 32033 - protein, 16 aa, Homo sapiens
IAREFSVCFWRLLWIL

SEQ ID NO: 32034 - protein, 14 aa, Homo sapiens
RRSSTTSCCPTRSG

SEQ ID NO: 32035 - protein, 8 aa, Homo sapiens
MLLVLKGH

SEQ ID NO: 32036 - protein, 12 aa, Homo sapiens
IGILLCCSLFAR

SEQ ID NO: 32037 - protein, 90 aa, Homo sapiens
ILDMQDHQFFPGHPVHSIQSVGHSTRTWFQWLTMTRLLHFYVNPISLKFYRSVNLILPGITHSGRRSNLSELKGLQDWCAFQAMQTLLCC

SEQ ID NO: 32038 - protein, 23 aa, Homo sapiens
MKPPRWASITFQFWVLLLGGVPS

SEQ ID NO: 32039 - protein, 14 aa, Homo sapiens
METLDIGFFCAVLL

SEQ ID NO: 32040 - protein, 12 aa, Homo sapiens
LETAHNFLLLLF

SEQ ID NO: 32041 - protein, 23 aa, Homo sapiens
KIGVLLWTYVTKLEVLLMERKIA

SEQ ID NO: 32042 - protein, 10 aa, Homo sapiens
IGQAWILVKS

SEQ ID NO: 32043 - protein, 18 aa, Homo sapiens
MCRNQILSALLILRPALC

SEQ ID NO: 32044 - protein, 17 aa, Homo sapiens
LPSMTFILMTFLSTLMP

SEQ ID NO: 32045 - protein, 13 aa, Homo sapiens
MNLIICWIFCLTD

SEQ ID NO: 32046 - protein, 43 aa, Homo sapiens
KVVMDCSSERNILSKYLLISIPGHRGNVYAASRNISIWRFLIK

SEQ ID NO: 32047 - protein, 30 aa, Homo sapiens
MTNPFYVLRLDVASVLPTRIIWLSININMR

SEQ ID NO: 32048 - protein, 43 aa, Homo sapiens
LFTGSPWCYIVWLLFWEFQEMPSSFGSRGSSGRRQSPLCGSSI

SEQ ID NO: 32049 - protein, 26 aa, Homo sapiens
VKRKFLVSSPLYLLLKLPMLTVSLWS

SEQ ID NO: 32050 - protein, 18 aa, Homo sapiens
LDILSMIIQYLLMGSLFS

SEQ ID NO: 32051 - protein, 50 aa, Homo sapiens
MGRPRHRARLLHLRGGAQGDVAAGSGRVRRITTLGIKDKSKYCISETTGK

SEQ ID NO: 32052 - protein, 8 aa, Homo sapiens
MEPFSVTR

SEQ ID NO: 32053 - protein, 33 aa, Homo sapiens
MPGCAGLCRPCNAPWGMLSCLFTNTWRWQYQFW

SEQ ID NO: 32054 - protein, 11 aa, Homo sapiens
LALMVLMVFLD

SEQ ID NO: 32055 - protein, 29 aa, Homo sapiens
ILKINPFFSPTPNAISTASDLIISVVAWG

SEQ ID NO: 32056 - protein, 273 aa, Homo sapiens
KMVLLTAVLLLLAAYAGPAQSLGSFVHCEPCDEKALSMCPPSPLGCELVKEPGCGCCMTCALAEGQSCGVYTERCAQGLRCLPRQDEEKPLHALLHGRGVCLNEKSYREQVKIERDSREHEEPTTSEMAEETYSPKIFRPKHTRISELKAEAVKKDRRKKLTQSKFVGGAENTAHPRIISAPEMRQESEQGPCRRHMEASLQELKASPRMVPRAVYLPNCDRKGFYKRKQCKPSRGRKRGICWCVDKYGMKLPGMEYVDGDFQCHTFDSSNVE

SEQ ID NO: 32057 - protein, 37 aa, Homo sapiens
VWELARRIRQSLSRLLLTQAWCISWMISAPCQLCLSS

SEQ ID NO: 32058 - protein, 13 aa, Homo sapiens
KPLKTLICYRRIV

SEQ ID NO: 32059 - protein, 21 aa, Homo sapiens
KEISKCFARAWATESAAKRQL

SEQ ID NO: 32060 - protein, 15 aa, Homo sapiens
LPLLVVPWMLGFGMS

SEQ ID NO: 32061 - protein, 22 aa, Homo sapiens
MKLPRTLRVITTMVTLLGCQLA

SEQ ID NO: 32062 - protein, 23 aa, Homo sapiens
LEQRQGTTWKVVLALNGERSKGR

SEQ ID NO: 32063 - protein, 39 aa, Homo sapiens
IMKNQENRKKKKILLCWQRRKLNFCARTRFWIQIWTFEQ

SEQ ID NO: 32064 - protein, 14 aa, Homo sapiens
MTLFWKMLLLQSAL

SEQ ID NO: 32065 - protein, 9 aa, Homo sapiens
IVILFCMYV

SEQ ID NO: 32066 - protein, 14 aa, Homo sapiens
ICGYHVSLLAVCLL

SEQ ID NO: 32067 - protein, 12 aa, Homo sapiens
ILILYLTTHLLW

SEQ ID NO: 32068 - protein, 13 aa, Homo sapiens
RTSPPRLTTIGRG

SEQ ID NO: 32069 - protein, 21 aa, Homo sapiens
VVIFLIQLHLPLLVSFRCSGA

SEQ ID NO: 32070 - protein, 17 aa, Homo sapiens
IPLHLGLLLHILMRVLW

SEQ ID NO: 32071 - protein, 25 aa, Homo sapiens
LLLTYLLQMVCMLRLLELAIINLGK

SEQ ID NO: 32072 - protein, 35 aa, Homo sapiens
VFWLEYSAIGEDGRFVETTLPRTTFHHQICKKNHK

SEQ ID NO: 32073 - protein, 11 aa, Homo sapiens
MFMLHLALMST

SEQ ID NO: 32074 - protein, 155 aa, Homo sapiens
LLSLLSEKFVRCQPSSQLGTEQETSPASLAGVAAGVSVACAGQDARPTGLPLRGPHQPPHSRSPGRRERRGWTSGKAWRAASGKPSGLLPPPSTGESQATVNEEQRAGETSASAQEQRPATPPTGDPVDALVATLPGSPSPSEPERISVPLLLGA

SEQ ID NO: 32075 - protein, 22 aa, Homo sapiens
MILANFKSLLCWTLHLSLELYI

SEQ ID NO: 32076 - protein, 20 aa, Homo sapiens
MFHWILLLSHLLHPPFRPLL

SEQ ID NO: 32077 - protein, 15 aa, Homo sapiens
VIHLPRPPKMLGLQA

SEQ ID NO: 32078 - protein, 12 aa, Homo sapiens
LKFSPWKHQHLL

SEQ ID NO: 32079 - protein, 178 aa, Homo sapiens
MEPPGDWGPPPWRSTPKTDVLRLVLYLTFLGAPCYAPALPSCKEDEYPVGSECCPKCSPGYRVKEACGELTGTVCEPCPPGTYIAHLNGLSKCLQCQMCDPGKRPAQPAQPPLGQPGCPRTLHPLSMATVPQEGPGCPRPGPNPISMDAPCRGRLEVSLRPPSTSVSPLTLSPPGGPS

SEQ ID NO: 32080 - protein, 185 aa, Homo sapiens
MEPPGDWGPPPWRSTPKTDVLRLVLYLTFLGAPCYAPALPSCKEDEYPVGSECCPKCSPGYRVKEACGELTGTVCEPCPPGTYIAHLNGLSKCLQCQMCDPDIGSPCDLRGRGHLEAGAHLSPGRQKGEPDPEVAFESLSAEPVHAANGSVPLEPHARLSMASAPCGQAGLHLRDRADGTPGGRA

SEQ ID NO: 32081 - protein, 184 aa, Homo sapiens
MEPPGDWGPPPWRSTPKTDVLRLVLYLTFLGAPCYAPALPSCKEDEYPVGSECCPKCSPGYRVKEACGELTGTVCEPCPPGTYIAHLNGLSKCLQCQMCDPAMGLRASRNCSRTENAVCGCSPGHFCIVQDGDHCAACRAYATSSPGQRVQKGGTESQDTLCQNCPPGTFSPNGTLEECQHQTK

SEQ ID NO: 32082 - protein, 112 aa, Homo sapiens
VEWDGAGTLRPALGPAASPQGFLSLSPPDIGSPCDLRGRGHLEAGAHLSPGRQKGEPDPEVAFESLSAEPVHAANGSVPLEPHARLSMASAPCGQAGLHLRDRADGTPGGRA

SEQ ID NO: 32083 - protein, 17 aa, Homo sapiens
LVSSLLPLLLVSSTGCT

SEQ ID NO: 32084 - protein, 15 aa, Homo sapiens
VNLLTQIMLVAFMDV

SEQ ID NO: 32085 - protein, 18 aa, Homo sapiens
KENFMSLNMLLVTLLTMK

SEQ ID NO: 32086 - protein, 14 aa, Homo sapiens
MCIGLWGFISMVYF

SEQ ID NO: 32087 - protein, 51 aa, Homo sapiens
VKPLHLRSMLSKLVRCTENCNTCCLHWSTERAQFFSTTTPDCVSHNQCFKS

SEQ ID NO: 32088 - protein, 15 aa, Homo sapiens
LMKKLLWILAKLAQL

SEQ ID NO: 32089 - protein, 12 aa, Homo sapiens
LEGCLEKLQKAE

SEQ ID NO: 32090 - protein, 17 aa, Homo sapiens
RLPMRKLETFWLFLFLS

SEQ ID NO: 32091 - protein, 20 aa, Homo sapiens
IITITTLLLALPWIHPMGLC

SEQ ID NO: 32092 - protein, 48 aa, Homo sapiens
VPGAVPKLTRVPVTMRQPVRPAAPPVNAPAFSAPLQRTALCQDPAGCS

SEQ ID NO: 32093 - protein, 7 aa, Homo sapiens
IHRASAT

SEQ ID NO: 32094 - protein, 21 aa, Homo sapiens
LLLLGYFCIVRAASRKKLRGN

SEQ ID NO: 32095 - protein, 26 aa, Homo sapiens
RLAPRSRRSESPHPKEPLSPTIRASP

SEQ ID NO: 32096 - protein, 19 aa, Homo sapiens
MILAGLVYMQLQLEGIWSA

SEQ ID NO: 32097 - protein, 12 aa, Homo sapiens
KRIHWLSTFICY

SEQ ID NO: 32098 - protein, 36 aa, Homo sapiens
RVFIVWLFVISNRQLNSSLTLFQHLHPMNSWIIKHL

SEQ ID NO: 32099 - protein, 14 aa, Homo sapiens
IQTHLLCLLLIQMK

SEQ ID NO: 32100 - protein, 17 aa, Homo sapiens
IRKDKSIHLLIWLFLKY

SEQ ID NO: 32101 - protein, 12 aa, Homo sapiens
VARYIEASQRLH

SEQ ID NO: 32102 - protein, 53 aa, Homo sapiens
MKLLLILTAFQANLCITMPASACQRSTFPSFCTTIGILPLSVGKTLFVHIRNT

SEQ ID NO: 32103 - protein, 301 aa, Homo sapiens
LGLPLDNRGTAPVRGIVAGGSVRSPRPLTTSHPPSLLSSIPGPGPAPSACCVLPLGAELSSCHVHVCVSVHADACLCVHTWGPTTRPVAPSSPLLAFRFFEDLEQRHKAQVLVEDISDILEEHAEKHFHPYIAYCSNEVYQQRTLQKLISSNAAFREALREIERRPACGGLPMLSFLILPMQRVTRLPLLMDTLCLKTQGHSERYKAASRALKAISKLVRQCNEGAHRMERMEQMYTLHTQLDFSKVKSLPLISASRWLLKRGELFLVEETGLFRKIASRPTCYLFLFNDVLVVTKKKRWP

SEQ ID NO: 32104 - protein, 17 aa, Homo sapiens
LNAFLLLAILVPWTRIS

SEQ ID NO: 32105 - protein, 10 aa, Homo sapiens
MALALTLTVL

SEQ ID NO: 32106 - protein, 49 aa, Homo sapiens
LGAPPPPQKAKGCGGWGTGRPGSLHAALLLLEGWGSFTFRDLSTIRIVK

SEQ ID NO: 32107 - protein, 22 aa, Homo sapiens
ITIWLLIRLMIRRTLGEEFMML

SEQ ID NO: 32108 - protein, 19 aa, Homo sapiens
VYPAVHGAAGCPDPFPFLA

SEQ ID NO: 32109 - protein, 22 aa, Homo sapiens
MYLCFLSSWLLVELNSSCVLFK

SEQ ID NO: 32110 - protein, 48 aa, Homo sapiens
MQLQGCEAPTSIIPHARWQMQHALQFGVSTSLWKYYTSPGKCTEIAKR

SEQ ID NO: 32111 - protein, 14 aa, Homo sapiens
MLKFCSGKLMMALF

SEQ ID NO: 32112 - protein, 16 aa, Homo sapiens
KMYSKKVLLGVFSMGF

SEQ ID NO: 32113 - protein, 21 aa, Homo sapiens
LLGGVFRSPGRAEKRKHFSSH

SEQ ID NO: 32114 - protein, 41 aa, Homo sapiens
LPPSCPAPPGDLDQTTMWKRWLALALALVAVAWVRAEAFIK

SEQ ID NO: 32115 - protein, 17 aa, Homo sapiens
MIIILLRLFWTWKRTTM

SEQ ID NO: 32116 - protein, 11 aa, Homo sapiens
MHHGLIITVFM

SEQ ID NO: 32117 - protein, 24 aa, Homo sapiens
MASVSLLCFTASFLLREVPACAGM

SEQ ID NO: 32118 - protein, 279 aa, Homo sapiens
MGGKKKALHDYAAEFTDLVVKHLIEHSDSGDTSVVETLYCRACELPVRVRRDRILEHLSSGRQHGLRTPILISAASDLAATSLTAHPCHPPLPRQPQPQLILSGSPSIGTVPPPAVGHTSLLPVNPPAISTTTSDLSAREDATPSASTGHLSVFPAFQVKIPAVPSEQTSQSFSEASHRVLPGGGPRCSRDFGAGVAGHLGLGIFGVGFGSPALLQSVVDENSCCLLYVVEDQLCDVEQAFRAEHLGQHQSGSGTGCRHCPQRPARLWSSCLLPAGGSF

SEQ ID NO: 32119 - protein, 31 aa, Homo sapiens
IYIFLGKLEFISTTWRTFDLGRQPRARPSTR

SEQ ID NO: 32120 - protein, 22 aa, Homo sapiens
IYIFLGKLEFISTTWRTFDRWD

SEQ ID NO: 32121 - protein, 68 aa, Homo sapiens
KGTGRARECVPGLSEQRCEDQQREEIPSSRDMKPLLYQEPKWPSISRKKYSEVWNHGFPLETEDLTSV

SEQ ID NO: 32122 - protein, 12 aa, Homo sapiens
VFWKYLLCLRGL

SEQ ID NO: 32123 - protein, 18 aa, Homo sapiens
KMAWKIIGNTKLTNRSII

SEQ ID NO: 32124 - protein, 15 aa, Homo sapiens
LNFLKMNMYVLGKKF

SEQ ID NO: 32125 - protein, 33 aa, Homo sapiens
IQSRIMVIRSIGIMELRSFLLTIKGFLKLLKKI

SEQ ID NO: 32126 - protein, 40 aa, Homo sapiens
LADAGSRLHPFTFGLRSVSGHLRDLHEDPSENFRVGHNTN

SEQ ID NO: 32127 - protein, 24 aa, Homo sapiens
MLLYFTILTVILIMTNKQKIDAIE

SEQ ID NO: 32128 - protein, 18 aa, Homo sapiens
IMSFVILIYMILKAVSMM

SEQ ID NO: 32129 - protein, 67 aa, Homo sapiens
ILLLLTLWVHTAFMSRNRSAVSLLSRRDHEPTRRKKLRTHPNIRRNKLQTRHFKSCNTHREGPWLHS

SEQ ID NO: 32130 - protein, 40 aa, Homo sapiens
LYLFFWCVCVSVCVSVCVLWSQLSHHVCSDASDRYANPHH

SEQ ID NO: 32131 - protein, 18 aa, Homo sapiens
MIPLPKNKKILIRKFKKS

SEQ ID NO: 32132 - protein, 17 aa, Homo sapiens
RTWAMLLILYRLPWLQI

SEQ ID NO: 32133 - protein, 8 aa, Homo sapiens
LFTITLLL

SEQ ID NO: 32134 - protein, 35 aa, Homo sapiens
VLVHQRKLKSWLLQMGLFLETELLLMLSQESLTRS

SEQ ID NO: 32135 - protein, 19 aa, Homo sapiens
LIFTLMMSVWLHTKEFPLR

SEQ ID NO: 32136 - protein, 278 aa, Homo sapiens
LAGLMCLLLDRHLLFVPLVADVSDIRRFLSAFHEPQVGLIQAAQQLLCDEQAPQRQRLLADLLHNVSQNIAAETRAEDPPWFEGLESRFQSKSGYLRYSCESRIRSYLREVSSYPSTVGAEAQEEFLRVLGSMCQRLRSMQYNGSYFDRGAKGGSRLCTPEGWFSCQGPFDMDSCLSRHSINPYSNRESRILFSTWNLDHIIEKKRTIIPTLVEAIKEQDGREVDWEYFYGLLFTSENLKLVHIVCHKKTTHKLNCDPSRIYKPQTRLKRKQPVRKRQ

SEQ ID NO: 32137 - protein, 17 aa, Homo sapiens
LESIPFWKSLLLQPLLL

SEQ ID NO: 32138 - protein, 7 aa, Homo sapiens
MIYLLLS

SEQ ID NO: 32139 - protein, 14 aa, Homo sapiens
LMKMPKIVNLTLLV

SEQ ID NO: 32140 - protein, 250 aa, Homo sapiens
LAAVLTLMRSRKLTGAVRSSARLKARSCSAARLASAQEVAGSTSAKTACLTSSSHKATDTRTSKKFKCDKGHLVKSELQKLVPKNDSASLPKVTPETPCENEFAEGSALLPGSEAGVSVQQGAASLPLGGCRVVSDSRLAKTRDGLSVPKHSAGSGAEESNSSSTVQKQNEPGLQTEDVQKPPLQMDNSVFLDDDSNQPMPVSRFFGNVELMQDLPPASSSCPSMSRREFRKMHFRAKDDDDDDDDDAEM

SEQ ID NO: 32141 - protein, 14 aa, Homo sapiens
VAFVIIHYLRVKKD

SEQ ID NO: 32142 - protein, 28 aa, Homo sapiens
LVPLTFFFLTDFLIPQSHRHANVQEVQM

SEQ ID NO: 32143 - protein, 14 aa, Homo sapiens
IIIQSSRLQHGDPL

SEQ ID NO: 32144 - protein, 95 aa, Homo sapiens
LAAVLTLMRSRKLTGAVRSSARLKARSCSAARLASAQEVAGSTSAKTACLVSPVTVENAKILTRGSIFIQNCHSKMCCFRKISTVTYLPEGDYCR

SEQ ID NO: 32145 - protein, 14 aa, Homo sapiens
VKHLRNVMRLRDIL

SEQ ID NO: 32146 - protein, 63 aa, Homo sapiens
IFPTTTISVLFCSLCMLLSRSSKCMSRLKMNTLLVCFNNAARPFIMYILTINSPRCLASLKRD

SEQ ID NO: 32147 - protein, 15 aa, Homo sapiens
TKIRLELLWVSCCGL

SEQ ID NO: 32148 - protein, 11 aa, Homo sapiens
LLWLAVFWIGF

SEQ ID NO: 32149 - protein, 179 aa, Homo sapiens
LPGVDPSRGHSHVRVGCGLRFGRPGTTHDLGLPWLIGLQAPRSPLLAHPERLCSDPPLSLLKTDPKGVFVLPPRGVQDLHVGVRPLRAGSRFVHLNLVDVDCHQLVASWLVCLCCRQPLISKAFEIMLAAGEGKGVNKRITYTNPYPSRRTFHLHSDHPELLRFREDSFQVWWGCAWDS

SEQ ID NO: 32150 - protein, 191 aa, Homo sapiens
LIGLQAPRSPLLAHPERLCSDPPLSLLKTDPKGVFVLPPRGVQDLHVGVRPLRAGSRFVHLNLVDVDCHQLVASWLVCLCCRQPLISKVCMCGRHRLRGWGLNTRALQDPHLGPVTRTTGYSVLTQQGRVHECLLLCCVSPGWKLQRASVLSLWGSPCTVHRRLREYLEEGPVAVPVSGRSVSLSPPSTGL

SEQ ID NO: 32151 - protein, 10 aa, Homo sapiens
KSRISEIEKG

SEQ ID NO: 32152 - protein, 8 aa, Homo sapiens
LNSWTMNI

SEQ ID NO: 32153 - protein, 40 aa, Homo sapiens
LGLVFIVLVSLILNKHSLKELLIPRSKFSLSKVDFRLLKE

SEQ ID NO: 32154 - protein, 18 aa, Homo sapiens
MAAEPKLFFTSPLVLLQL

SEQ ID NO: 32155 - protein, 18 aa, Homo sapiens
IVVFFLLYITSSSAVRWR

SEQ ID NO: 32156 - protein, 313 aa, Homo sapiens
LRSTFFLRTFWCLVCSRYLACFQLMENPGCGPLDGGALEILERRLRVGVHNGLGFVQRPQVVVLVPEMDVALTRSASFSRKVVSSSKTSSGSQALVLRSRLRLPEMVGHPAFAVIFQLEYVFSSPAGVDGNAASVTSLSNLACMHMVRWAVWNPLLEADSGRVTLPLQGGIQPNPSHCLVYKVPSASMSSEEVKQVESGTLRFQFSLGSEEHLDAPTEPVSGPKVERRPSRKPPTSPSRVPVGGRYLPPGSRPEPDLPGPGNIHCRTVTGAAVHAFACPYCCGNPDQELCRAALESLHGAPAVLRLSRDSGCQ

SEQ ID NO: 32157 - protein, 17 aa, Homo sapiens
LPKVMLLTYYLSVSSVL

SEQ ID NO: 32158 - protein, 7 aa, Homo sapiens
MYDLEPF

SEQ ID NO: 32159 - protein, 46 aa, Homo sapiens
LQELAGFGGAKVAGAGREGRSGAGHRIRSWSPQNFPTVKNRASLDK

SEQ ID NO: 32160 - protein, 515 aa, Homo sapiens
IMVEEVQKHSVHTLVFRSLKRTHDMFVADNGKPVPLDEESHKRKMAIKLRNEYGPVLHMPTSKENLKEKGPQNATDSYVHKQYPANQGQEVEYFVAGTHPYPPGPGVALTADTKIQRMPSESAAQSLAVALPLQTKADANRTAPSGSEYRHPGASDRPQPTAMNSIVMETGNTKNSALMAKKAPTMPKPQWHPPWKLYRVISGHLGWVRCIAVEPGNQWFVTGSADRTIKIWDLASGKLKLSLTGHISTVRGVIVSTRSPYLFSCGEDKQVKCWDLEYNKVIRHYHGHLSAVYGLDLHPTIDVLVTCSRDSTARIWDVRTKASVHTLSGHTNAVATVRCQAAEPQIITGSHDTTIRLWDLVAGKTRVTLTNHKKSVRAVVLHPRHYTFASGSPDNIKQWKFPDGSFIQNLSGHNAIINTLTVNSDGVLVSGADNGTMHLWDWRTGYNFQRVHAAVQPGSLDSESGIFACAFDQSESRLLTAEADKTIKVYREDDTATEETHPVSWKPEIIKRKRF

SEQ ID NO: 32161 - protein, 14 aa, Homo sapiens
KKITAKGAVLFVCF

SEQ ID NO: 32162 - protein, 25 aa, Homo sapiens
LENLLMTTVMMYVALLLMLELKVIR

SEQ ID NO: 32163 - protein, 15 aa, Homo sapiens
LSCYGSFYSLLWMLI

SEQ ID NO: 32164 - protein, 20 aa, Homo sapiens
VTYLFLTWRPQLSLPLFGWM

SEQ ID NO: 32165 - protein, 15 aa, Homo sapiens
ILMMPSKKLILYLFL

SEQ ID NO: 32166 - protein, 15 aa, Homo sapiens
IIAWTAWDLHVFSVL

SEQ ID NO: 32167 - protein, 53 aa, Homo sapiens
ILETVMAANDLNRLLCSLHTSSTTSPCRRTLQLRLMWGILSRWVFTLHIQRGK

SEQ ID NO: 32168 - protein, 16 aa, Homo sapiens
KMLMTTHLHLFHLIIV

SEQ ID NO: 32169 - protein, 17 aa, Homo sapiens
IILCLVITHGLSLMNLF

SEQ ID NO: 32170 - protein, 16 aa, Homo sapiens
MKMAPAVKIWRKRQKT

SEQ ID NO: 32171 - protein, 23 aa, Homo sapiens
MSDLQRKAGYLWSLRCGKIVLKL

SEQ ID NO: 32172 - protein, 40 aa, Homo sapiens
LVLLLHLLMVIQHGLGQFLNQRFPKKLMTWQWKKGNMLVN

SEQ ID NO: 32173 - protein, 9 aa, Homo sapiens
IFISGLFWC

SEQ ID NO: 32174 - protein, 20 aa, Homo sapiens
KSVIAQIPLLLLTNLISSLV

SEQ ID NO: 32175 - protein, 16 aa, Homo sapiens
IKMIQLMLKIFVMCGT

SEQ ID NO: 32176 - protein, 21 aa, Homo sapiens
IIGHLFLAIFLSDLVSIRIFL

SEQ ID NO: 32177 - protein, 34 aa, Homo sapiens
MPRGRQCEPAPAPSSRDRVGNAAEQNLIALLPRC

SEQ ID NO: 32178 - protein, 12 aa, Homo sapiens
LKVKAFILLHLS

SEQ ID NO: 32179 - protein, 10 aa, Homo sapiens
LILWTMMMLA

SEQ ID NO: 32180 - protein, 13 aa, Homo sapiens
LKLVRRSLILCFC

SEQ ID NO: 32181 - protein, 142 aa, Homo sapiens
LECSEQAGAAGRVGEEQRVPGCTVPNACTCTQHVFRGRPGSGFSSTSLGHLGPKCEPHYTGGETEVQNKGLEPVSRQWQRLRPFDLGRAHWSPIQGGVVDLHRRGSPVCRPGPTLKGLCYPSGIEAATAQGRWGQHAVPSGL

SEQ ID NO: 32182 - protein, 265 aa, Homo sapiens
ISLRMTILGTTFGMVFSLLQVVSGESGYAQNGDLEDAELDDYSFSCYSQLEVNGSQHSLTCAFEDPDVNITNLEFEICGALVEVKCLNFRKLQEIYFIETKKFLLIGKSNICVKVGEKSLTCKKIDLTTIVKPEAPFDLSVVYREGANDFVVTFNTSHLQKKYVKVLMHDVAYRQEKDENKWTHVNLSSTKLTLLQRKLQPAAMYEIKVRSIPDHYFKGFWSEWSPSYYFRTPEINNSSGLSLSYGPVSPIIRRLWNIFVRNQEK

SEQ ID NO: 32183 - protein, 463 aa, Homo sapiens
ISLRMTILGTTFGMVFSLLQVVSGESGYAQNGDLEDAELDDYSFSCYSQLEVNGSQHSLTCAFEDPDVNITNLEFEICGALVEVKCLNFRKLQEIYFIETKKFLLIGKSNICVKVGEKSLTCKKIDLTTIVKPEAPFDLSVVYREGANDFVVTFNTSHLQKKYVKVLMHDVAYRQEKDENKWTHVNLSSTKLTLLQRKLQPAAMYEIKVRSIPDHYFKGFWSEWSPSYYFRTPEINNSSGEMDPILLTISILSFFSVALLVILACVLWKKRIKPIVWPSLPDHKKTLEHLCKKPRKNLNVSFNPESFLDCQIHRVDDIQARDEVEGFLQDTFPQQLEESEKQRLGGDVQSPNCPSEDVVITPESFGRDSSLTCLAGNVSACDAPILSSSRSLDCRESGKNGPHVYQDLLLSLGTTNSTLPPPFSLQSGILTLNPVAQGQPILTSLGSNQEEAYVTMSSFYQNQ

SEQ ID NO: 32184 - protein, 29 aa, Homo sapiens
LYHLKFPPILRVRVCTYNGLSTTFLIIRN

SEQ ID NO: 32185 - protein, 18 aa, Homo sapiens
MCHTLCKNKEFGGRCQVP

SEQ ID NO: 32186 - protein, 9 aa, Homo sapiens
VWKLLIWSW

SEQ ID NO: 32187 - protein, 9 aa, Homo sapiens
LLPRWVRGL

SEQ ID NO: 32188 - protein, 28 aa, Homo sapiens
IWIFFFFAFFRSSQNKATSRHETEADSR

SEQ ID NO: 32189 - protein, 13 aa, Homo sapiens
MQYAFIHWKLLVL

SEQ ID NO: 32190 - protein, 35 aa, Homo sapiens
LFLTAWLLCLFWANYVWQTGKMVGSSVLKLTPKNL

SEQ ID NO: 32191 - protein, 15 aa, Homo sapiens
MSDSFPFSTFKVLCI

SEQ ID NO: 32192 - protein, 19 aa, Homo sapiens
KVVWIFYVRYIAYLDFLLN

SEQ ID NO: 32193 - protein, 22 aa, Homo sapiens
MCIFLKMLSFTLLMTDLISDMS

SEQ ID NO: 32194 - protein, 435 aa, Homo sapiens
TAPMTELQQDVEDTKPAKVLGKRESKLGSAHSEAENGVEEKKKACRSPTAQSPTPSVEADSPDQKKIISLWSKSSFDGASLASDKNDCKTESKNDPKTERKKSSSSSQYKANMHFHKLFLSVPTEEPLKQSFTCALQKEILYQGKLFVSENWICFHSKVFGKDTKISIPAFSVTLIKKTKTALLVPNALIIATVTDRYIFVSLLSRDSTYKLLKSVCGHLENTSVGNSPNPSSAENSFRADRPSSLPLDFNDEFSDLDGVVQQRRQDMEGYSSSGSQTPESENSRDFHATESQTVLNVSKGEAKPTRADAHVNRVPEGKAKSLPVQGLSETVGILHKVKSQKCPMLHHILIFYAIVVCALIISTFYMRYRINTLEEQLGLLTSIVDTHNTEQAAPSGLRSQVQFNVEVLCQELTANIVKLEKIQNNLQKLLENGD

SEQ ID NO: 32195 - protein, 15 aa, Homo sapiens
RAWLLAILFLSPPLL

SEQ ID NO: 32196 - protein, 12 aa, Homo sapiens
LEAHVAILDSGI

SEQ ID NO: 32197 - protein, 10 aa, Homo sapiens
IISMTLLSTF

SEQ ID NO: 32198 - protein, 13 aa, Homo sapiens
LYMTCLAPVKTSC

SEQ ID NO: 32199 - protein, 73 aa, Homo sapiens
RSGGGGGAAAAGGTGMVVPQGRPRCTHREEEAAAAEEGGAPREVDCLIVSAESSCLLVSGNLTLKRKRVNMNN

SEQ ID NO: 32200 - protein, 12 aa, Homo sapiens
LGSWRRFIAIIL

SEQ ID NO: 32201 - protein, 8 aa, Homo sapiens
ILSLQSSR

SEQ ID NO: 32202 - protein, 12 aa, Homo sapiens
RWHVCFWIVVLK

SEQ ID NO: 32203 - protein, 61 aa, Homo sapiens
VLLVFSAGLCRALRAAQPPCLSGSPVRGTQGHQYSRGRQHGSGVTPLSKTIGIPGSLWKSV

SEQ ID NO: 32204 - protein, 11 aa, Homo sapiens
LRILLVWTMQM

SEQ ID NO: 32205 - protein, 10 aa, Homo sapiens
ISGLWALICL

SEQ ID NO: 32206 - protein, 17 aa, Homo sapiens
MLWLCVMNQIVFILGMQ

SEQ ID NO: 32207 - protein, 14 aa, Homo sapiens
LQLFQTSTWMALMM

SEQ ID NO: 32208 - protein, 9 aa, Homo sapiens
MGNDFLGRS

SEQ ID NO: 32209 - protein, 16 aa, Homo sapiens
LILQRLFIMKVKKILP

SEQ ID NO: 32210 - protein, 8 aa, Homo sapiens
LGLLVIFL

SEQ ID NO: 32211 - protein, 819 aa, Homo sapiens
TTMAAQPRGGDYRGFFLLSILLGTPWEAWAGRILYSVSEETDKGSFVGDIAKDLGLEPRELAERGVRIISRGRTQLFALNQRSGSLVTAGRIDREEICAQSARCLVNFNILMEDKMNLYPIDVEIIDINDNVPRFLTEEINVKIMENTAPGVRFPLSEAGDPDVGTNSLQSYQLSPNRHFSLAVQSGDDETKYPELVLERVLDREEERVHHLVLTASDGGDPPRSSTAHIQVTVVDVNDHTPVFSLPQYQVTVPENVPVGTRLLTVHAIDLDEGVNGEVTYSFRKITPKLPKMFHLNSLTGEISTLEGLDYEETAFYEMEVQAQDGPGSLTKAKVLITVLDVNDNAPEVTMTSLSSSIPEDTPLGTVIALFYLQDRDSGKNGEVTCTIPENLPFKLEKSIDNYYRLVTTKNLDRETLSLYNITLKATDGGTPPLSRETHIFMQVADTNDNPPTFPHSSYSVYIAENNPRGASIFLVTAQDHDSEDNAQITYSLAEDTIQGAPVSSYVSINSDTGVLYALQSFDYEQLRELQLRVTAHDSGDPPLSSNMSLSLFVLDQNDNPPEILYPALPTDGSTGMELAPRSAEPGYLVTKVVAVDKDSGQNAWLSYLLLKASEPGLFAVGLYTGEVRTARALLDRDALKQSLVVAVQDHGQPPLSATVTLTVAVADSIPEVLADLGSLEPSDGPYNYDLTLYLVVAVATVSCVFLAFVLVLLALRLRRWHKSRLLQASEGGLANVPTSHFVGMDGVQAFLQTYSHEVSLTADSRKSHLIFPQPNYVDMLISQESCEKNDSLLTSVDFQECKENLPSIQVSPALPLFP

SEQ ID NO: 32212 - protein, 26 aa, Homo sapiens
IPGSMWKQRRSSDFPTVPFYGRRNCS

SEQ ID NO: 32213 - protein, 23 aa, Homo sapiens
MASWCTSVPFLSIFPKMDKREHR

SEQ ID NO: 32214 - protein, 32 aa, Homo sapiens
LCIWTCATFLTTAIVRMLMWNFSRECGLPTTW

SEQ ID NO: 32215 - protein, 65 aa, Homo sapiens
RLEIMEGKWLLCMLLVLGTAIVEAHDGHDDDVIDIEDDLDDVIEEVEDSKPDTTAPPSSPKESGR

SEQ ID NO: 32216 - protein, 433 aa, Homo sapiens
LGARRRAMEQRPRGCAAVAAALLLVLLGARAQGGTRSPRCDCAGDFHKKIGLFCCRGCPAGHYLKAPCTEPCGNSTCLVCPQDTFLAWENHHNSECARCQACDEQASQVALENCSAVADTRCGCKPGWFVECQVSQCVSSSPFYCQPCLDCGALHRHTRLLCSRRDTDCGTCLPGFYEHGDGCVSCPTPPPSLAGAPWGAVQSAVPLSVAGGRVGVFWVQVLLAGLVVPLLLGATLTYTYRHCWPHKPLVTADEAGMEALTPPPATHLSPLDSAHTLLAPPDSSEKICTVQLVGNSWTPGYPETQEALCPQVTWSWDQLPSRALGPAAAPTLSPESPAGSPAMMLQPGPQLYDVMDAVPARRWKEFVRTLGLREAEIEAVEVEIGRFRDQQYEMLKRWRQQQPAGLGAVYAALERMGLDGCVEDLRSRLQRGP

SEQ ID NO: 32217 - protein, 424 aa, Homo sapiens
LGARRRAMEQRPRGCAAVAAALLLVLLGARAQGGTRSPRCDCAGDFHKKIGLFCCRGCPAGHYLKAPCTEPCGNSTCLVCPQDTFLAWENHHNSECARCQACDEQASQVALENCSAVADTRCGCKPGWFVECQVSQCVSSSPFYCQPCLDCGALHRHTRLLCSRRDTDCGTCLPGFYEHGDGCVSCPTSTLGSCPERCAAVCGWRQMFWVQVLLAGLVVPLLLGATLTYTYRHCWPHKPLVTADEAGMEALTPPPATHLSPLDSAHTLLAPPDSSEKICTVQLVGNSWTPGYPETQEALCPQVTWSWDQLPSRALGPAAAPTLSPESPAGSPAMMLQPGPQLYDVMDAVPARRWKEFVRTLGLREAEIEAVEVEIGRFRDQQYEMLKRWRQQQPAGLGAVYAALERMGLDGCVEDLRSRLQRGP

SEQ ID NO: 32218 - protein, 14 aa, Homo sapiens
LVQFWHKILTVLTA

SEQ ID NO: 32219 - protein, 387 aa, Homo sapiens
LGARRRAMEQRPRGCAAVAAALLLVLLGARAQGGTRSPRCDCAGDFHKKIGLFCCRGCPAGHYLKAPCTEPCGNSTCLVCPQDTFLAWENHHNSECARCQACDEQASQVALENCSAVADTRCGCKPGWFVECQVSQCVSSSPFYCQPCLDCGALHRHTRLLCSRRDTDCGTCLPGFYEHGDGCVSCPTSTLGSCPERCAAVCGWRQNEAGMEALTPPPATHLSPLDSAHTLLAPPDSSEKICTVQLVGNSWTPGYPETQEALCPQVTWSWDQLPSRALGPAAAPTLSPESPAGSPAMMLQPGPQLYDVMDAVPARRWKEFVRTLGLREAEIEAVEVEIGRFRDQQYEMLKRWRQQQPAGLGAVYAALERMGLDGCVEDLRSRLQRGP

SEQ ID NO: 32220 - protein, 12 aa, Homo sapiens
LIVWWGCKSACD

SEQ ID NO: 32221 - protein, 13 aa, Homo sapiens
MKSIVSIQVKKVW

SEQ ID NO: 32222 - protein, 12 aa, Homo sapiens
IAFFSVACYFAV

SEQ ID NO: 32223 - protein, 40 aa, Homo sapiens
MQSVCKQMLLFRGMVWWLTPVFPAAQETEAEARRSLELRH

SEQ ID NO: 32224 - protein, 12 aa, Homo sapiens
VFMIVFSMLTTK

SEQ ID NO: 32225 - protein, 284 aa, Homo sapiens
LGARRRAMEQRPRGCAAVAAALLLVLLGARAQGGTRSPRCDCAGDFHKKIGLFCCRGCPAGHYLKAPCTEPCGNSTCLVCPQDTFLAWENHHNSECARCQACDEQASQVALENCSAVADTRCGCKPGWFVECQVSQCVSSSPFYCQPCLDCGALHRHTRLLCSRRDTDCGTCLPGFYEHGDGCVSCPTPPPSLAGAPWGAVQSAVPLSVAGGRVGGVLGMRVGELGWTEGRRVRRGATTQHPPAAFSVLGPGAPGWPCGPPPAWGHPDLHIPPLLASQAPGYCR

SEQ ID NO: 32226 - protein, 260 aa, Homo sapiens
LGARRRAMEQRPRGCAAVAAALLLVLLGARAQGGTRSPRCDCAGDFHKKIGLFCCRGCPAGHYLKAPCTEPCGNSTCLVCPQDTFLAWENHHNSECARCQACDEQASQVALENCSAVADTRCGCKPGWFVECQVSQCVSSSPFYCQPCLDCGALHRHTRLLCSRRDTDCGTCLPGFYEHGDGCVSCPTSTLGSCPERCAAVCGWRQSRWCAGNASGRTGMDRGEAGEEGGNHPTPTSCFQCSGSRCSWLALWSPSCLGPP

SEQ ID NO: 32227 - protein, 22 aa, Homo sapiens
VWIQIQLILMTVAMIGKSGLEI

SEQ ID NO: 32228 - protein, 24 aa, Homo sapiens
ILQHRLNSFWFGLVLWVSIHVKLE

SEQ ID NO: 32229 - protein, 188 aa, Homo sapiens
MEQRPRGCAAVAAALLLVLLGARAQGGTRSPRCDCAGDFHKKIGLFCCRGCPAGHYLKAPCTEPCGNSTCLVCPQDTFLAWENHHNSECARCQACDEQASQVALENCSAVADTRCGCKPGWFVECQVSQCVSSSPFYCQPCLDCGALHRHTRLLCSRRDTDCGTCLPGFYEHGDGCVSCPTRDGVSPC

SEQ ID NO: 32230 - protein, 20 aa, Homo sapiens
LILSNLQIRRKRIRVARLLR

SEQ ID NO: 32231 - protein, 7 aa, Homo sapiens
MWLALVL

SEQ ID NO: 32232 - protein, 19 aa, Homo sapiens
LAPSMRSGLCLATWCASCL

SEQ ID NO: 32233 - protein, 54 aa, Homo sapiens [sequence omitted]

SEQ ID NO: 32234 - protein, 21 aa, Homo sapiens
IIKDIVAWLIVSLSVAFDLLF

SEQ ID NO: 32235 - protein, 16 aa, Homo sapiens
MFGLRPGLESATSSSC

SEQ ID NO: 32236 - protein, 15 aa, Homo sapiens
RPFTSRSSGDAFPRK

SEQ ID NO: 32237 - protein, 22 aa, Homo sapiens
ILFFKLQLIILEIFYIHDLRKE

SEQ ID NO: 32238 - protein, 7 aa, Homo sapiens
TWLFWYL

SEQ ID NO: 32239 - protein, 52 aa, Homo sapiens
MDPPESPHQRLLLGLPQWGLHLLQVRLPGPHLWGVVLPLAWSPQVSQSSLRL

SEQ ID NO: 32240 - protein, 844 aa, Homo sapiens
LASMLLCTARLVGLQLLISCCWAFACHSTESSPDFTLPGDYLLAGLFPLHSGCLQVRHRPEVTLCDRSCSFNEHGYHLFQAMRLGVEEINNSTALLPNITLGYQLYDVCSDSANVYATLRVLSLPGQHHIELQGDLLHYSPTVLAVIGPDSTNRAATTAALLSPFLVPMISYAASSETLSVKRQYPSFLRTIPNDKYQVETMVLLLQKFGWTWISLVGSSDDYGQLGVQALENQATGQGICIAFKDIMPFSAQVGDERMQCLMRHLAQAGATVVVVFSSRQLARVFFESVVLTNLTGKVWVASEAWALSRHITGVPGIQRIGMVLGVAIQKRAVPGLKAFEEAYARADKKAPRPCHKGSWCSSNQLCRECQAFMAHTMPKLKAFSMSSAYNAYRAVYAVAHGLHQLLGCASGACSRGRVYPWQLLEQIHKVHFLLHKDTVAFNDNRDPLSSYNIIAWDWNGPKWTFTVLGSSTWSPVQLNINETKIQWHGKDNQVPKSVCSSDCLEGHQRVVTGFHHCCFECVPCGAGTFLNKSDLYRCQPCGKEEWAPEGSQTCFPRTVVFLALREHTSWVLLAANTLLLLLLLGTAGLFAWHLDTPVVRSAGGRLCFLMLGSLAAGSGSLYGFFGEPTRPACLLRQALFALGFTIFLSCLTVRSFQLIIIFKFSTKVPTFYHAWVQNHGAGLFVMISSAAQLLICLTWLVVWTPLPAREYQRFPHLVMLECTETNSLGFILAFLYNGLLSISAFACSYLGKDLPENYNEAKCVTFSLLFNFVSWIAFFTTASVYDGKYLPAANMMAGLSSLSSGFGGYFLPKCYVILCRPDLNSTEHFQASIQDYTRRCGST

SEQ ID NO: 32241 - protein, 590 aa, Homo sapiens
LASMLLCTARLVGLQLLISCCWAFACHSTESSPDFTLPGDYLLAGLFPLHSGCLQVRHRPEVTLCDRSCSFNEHGYHLFQAMRLGVEEINNSTALLPNITLGYQLYDVCSDSANVYATLRVLSLPGQHHIELQGDLLHYSPTVLAVIGPDSTNRAATTAALLSPFLVPMLLEQIHKVHFLLHKDTVAFNDNRDPLSSYNIIAWDWNGPKWTFTVLGSSTWSPVQLNINETKIQWHGKDNQVPKSVCSSDCLEGHQRVVTGFHHCCFECVPCGAGTFLNKSDLYRCQPCGKEEWAPEGSQTCFPRTVVFLALREHTSWVLLAANTLLLLLLLGTAGLFAWHLDTPVVRSAGGRLCFLMLGSLAAGSGSLYGFFGEPTRPACLLRQALFALGFTIFLSCLTVRSFQLIIIFKFSTKVPTFYHAWVQNHGAGLFVMISSAAQLLICLTWLVVWTPLPAREYQRFPHLVMLECTETNSLGFILAFLYNGLLSISAFACSYLGKDLPENYNEAKCVTFSLLFNFVSWIAFFTTASVYDGKYLPAANMMAGLSSLSSGFGGYFLPKCYVILCRPDLNSTEHFQASIQDYTRRCGST

SEQ ID NO: 32242 - protein, 730 aa, Homo sapiens
LWRRRSRGPVGPAQGGPAWELSLAYPRLGWPGCHFCLPALQTMDGSFVQHSVRVLQELNKQREKGQYCDATLDVGGLVFKAHWSVLACCSHFFQSLYGDGSGGSVVLPAGFAEIFGLLLDFFYTGHLALTSGNRDQVLLAARELRVPEAVELCQSFKPKTSVGQAAGGQSGLGPPASQNVNSHVKEPAGLEEEEVSRTLGLVPRDQEPRGSHSPQRPQLHSPAQSEGPSSLCGKLKQALKPCPLEDKKPEDCKVPPRPLEAEGAQLQGGSNEWEVVVQVEDDGDGDYMSEPEAVLTRRKSNVIRKPCAAEPALSAGSLAAEPAENRKGTAVPVECPTCHKKFLSKYYLKVHNRKHTGEKPFECPKCGKCYFRKENLLEHEARNCMNRSEQVFTCSVCQETFRRRMELRVHMVSHTGEMPYKCSSCSQQFMQKKDLQSHMIKLHGAPKPHACPTCAKCFLSRTELQLHEAFKHRGEKLFVCEECGHRASSRNGLQMHIKAKHRNERPHVCEFCSHAFTQKANLNMHLRTHTGEKPFQCHLCGKTFRTQASLDKHNRTHTGERPFSCEFCEQRFTEKGPLLRHVASRHQEGRPHFCQICGKTFKAVEQLRVHVRRHKGVRKFECTECGYKFTRQAHLRRHMEIHDRVENYNPRQRKLRNLIIEDEKMVVVALQPPAELEVGSAEVIVESLAQGGLASQLPGQRLCAEESFTGPGVLEPSLIITAAVPEDCDT

SEQ ID NO: 32243 - protein, 13 aa, Homo sapiens
MILVVLQIWINLF

SEQ ID NO: 32244 - protein, 12 aa, Homo sapiens
LLFLFIIVSSHS

SEQ ID NO: 32245 - protein, 23 aa, Homo sapiens
LQSSVAVGVGEGGVQGAWHRPLQ

SEQ ID NO: 32246 - protein, 12 aa, Homo sapiens
LVIKCLPFLFMV

SEQ ID NO: 32247 - protein, 20 aa, Homo sapiens
ITFLKNDPVTVKKTQDGRAW

SEQ ID NO: 32248 - protein, 24 aa, Homo sapiens
RIKALVWLQVFLPTPLMILLPSET

SEQ ID NO: 32249 - protein, 18 aa, Homo sapiens
LTMILDYRMTLWAQPFWI

SEQ ID NO: 32250 - protein, 30 aa, Homo sapiens
ILPPRPPKALGLQVFLALCQMHPGLETSEL

SEQ ID NO: 32251 - protein, 11 aa, Homo sapiens
MGSLVMTSLRD

SEQ ID NO: 32252 - protein, 15 aa, Homo sapiens
KQPPEQYENTITISR

SEQ ID NO: 32253 - protein, 294 aa, Homo sapiens
IMGSRAELCTLLGGFSFLLLLIPGEGAKGGSLRESQGVCSKQTLVVPLHYNESYSQPVYKPYLTLCAGRRICSTYRTMYRVMWREVRREVQQTHAVCCQGWKKRHPGALTCEAICAKPCLNGGVCVRPDQCECAPGWGGKHCHVDVDECRTSITLCSHHCFNTAGSFTCGCPHDLVLGVDGRTCMEGSPEPPTSASILSVAVREAEKDERALKQEIHELRGRLERLEQWAGQAGAWVRAVLPVPPEELQPEQVAELWGRGDRIESLSDQVLLLEERLGACSCEDNSLGLGVNHR

SEQ ID NO: 32254 - protein, 62 aa, Homo sapiens
METQLPSLCLCKRPLRPECSWNWFPGLTGAGRTTWPQGERRYRAYATPSPQHKPKLLPARCK

SEQ ID NO: 32255 - protein, 359 aa, Homo sapiens
IMVDGTLLLLLSEALALTQTWAGSHSLKYFHTSVSRPGRGEPRFISVGYVDDTQFVRFDNDAASPRMVPRAPWMEQEGSEYWDRETRSARDTAQIFRVNLRTLRGYYNQSEAGSHTLQWMHGCELGPDGRFLRGYEQFAYDGKDYLTLNEDLRSWTAVDTAAQISEQKSNDASEAEHQRAYLEDTCVEWLHKYLEKGKETLLHLEPPKTHVTHHPISDHEATLRCWALGFYPAEITLTWQQDGEGHTQDTELVETRPAGDGTFQKWAAVVVPSGEEQRYTCHVQHEGLPEPVTLRWKPASQPTIPIVGIIAGLVLLGSVVSGAVVAAVIWRKKSSGGKGGSYSKAEWSDSAQGSESHSL

SEQ ID NO: 32256 - protein, 1756 aa, Homo sapiens
KMASELEPEVQAIDRSLLECSAEEIAGKWLQATDLTREVYQHLAHYVPKIYCRGPNPFPQKEDMLAQHVLLGPMEWYLCGEDPAFGFPKLEQANKPSHLCGRVFKVGEPTYSCRDCAVDPTCVLCMECFLGSIHRDHRYRMTTSGGGGFCDCGDTEAWKEGPYCQKHELNTSEIEEEEDPLVHLSEDVIARTYNIFAITFRYAVEILTWEKESELPADLEMVEKSDTYYCMLFNDEVHTYEQVIYTLQKAVNCTQKEAIGFATTVDRDGRRSVRYGDFQYCEQAKSVIVRNTSRQTKPLKVQVMHSSIVAHQNFGLKLLSWLGSIIGYSDGLRRILCQVGLQEGPDGENSSLVDRLMLSDSKLWKGARSVYHQLFMSSLLMDLKYKKLFAVRFAKNYERLQSDYVTDDHDREFSVADLSVQIFTVPSLARMLITEENLMSIIIKTFMDHLRHRDAQGRFQFERYTALQAFKFRRVQSLILDLKYVLISKPTEWSDELRQKFLEGFDAFLELLKCMQGMDPITRQVGQHIEMEPEWEAAFTLQMKLTHVISMMQDWCASDEKVLIEAYKKCLAVLMQCHGGYTDGEQPITLSICGHSVETIRYCVSQEKVSIHLPVSRLLAGLHVLLSKSEVAYKFPELLPLSELSPPMLIEHPLRCLVLCAQVHAGMWRRNGFSLVNQIYYYHNVKCRREMFDKDVVMLQTGVSMMDPNHFLMIMLSRFELYQIFSTPDYGKRFSSEITHKDVVQQNNTLIEEMLYLIIMLVGERFSPGVGQVNATDEIKREIIHQLSIKPMAHSELVKSLPEDENKETGMESVIEAVAHFKKPGLTGRGMYELKPECAKEFNLYFYHFSRAEQSKAEEAQRKLKRQNREDTALPPPVLPPFCPLFASLVNILQSDVMLCIMGTILQWAVEHNGYAWSESMLQRVLHLIGMALQEEKQHLENVTEEHVVTFTFTQKISKPGEAPKNSPSILAMLETLQNAPYLEVHKDMIRWILKTFNAVKKMRESSPTSPVAETEGTIMEESSRDKDKAERKRKAEIARLRREKIMAQMSEMQRHFIDENKELFQQTLELDASTSAVLDHSPVASDMTLTALGPAQTQVPEQRQFVTCILCQEEQEVKVESRAMVLAAFVQRSTVLSKNRSKFIQDPEKYDPLFMHPDLSCGTHTSSCGHIMHAHCWQRYFDSVQAKEQRRQQRLRLHTSYDVENGEFLCPLCECLSNTVIPLLLPPRNIFNNRLNFSDQPNLTQWIRTISQQIKALQFLRKEESTPNNASTKNSENVDELQLPEGFRPDFRPKIPYSESIKEMLTTFGTATYKVGLKVHPNEEDPRVPIMCWGSCAYTIQSIERILSDEDKPLFGPLPCRLDDCLRSLTRFAAAHWTVASVSVVQGHFCKLFASLVPNDSHEELPCILDIDMFHLLVGLVLAFPALQCQDFSGISLGTGDLHIFHLVTMAHIIQILLTSCTEENGMDQENPPCEEESAVLALYKTLHQYTGSALKEIPSGWHLWRSVRAGIMPFLKCSALFFHYLNGVPSPPDIQVPGTSHFEHLCSYLSLPNNLICLFQENSEIMNSLIESWCRNSEVKRYLEGERDAIRYPRESNKLINLPEDYSSLINQASNFSCPKSGGDKSRAPTLCLVCGSLLCSQSYCCQTELEGEDVGACTAHTYSCGSGVGIFLRVRECQVLFLAGKTKGCFYSPPYLDDYGETDQGLRRGNPLHLCKERFKKIQKLWHQHSVTEEIGHAQEANQTLVGIDWQHL

SEQ ID NO: 32257 - protein, 18 aa, Homo sapiens
LFSVFLLSAHHMLCSLPI

SEQ ID NO: 32258 - protein, 29 aa, Homo sapiens
LTCITLALTTHLFMGAAKKRDPQSWSHEG

SEQ ID NO: 32259 - protein, 13 aa, Homo sapiens
LNWEVTVLGILLS

SEQ ID NO: 32260 - protein, 33 aa, Homo sapiens
MWTYLAIFTLVTAMICPTHFNIISLSCECPWRC

SEQ ID NO: 32261 - protein, 16 aa, Homo sapiens
IVSSLWPFIAVLFHGL

SEQ ID NO: 32262 - protein, 19 aa, Homo sapiens
LVLASLGLWWPLHQTSLCL

SEQ ID NO: 32263 - protein, 12 aa, Homo sapiens
IYIKCLWCILIT

SEQ ID NO: 32264 - protein, 17 aa, Homo sapiens
LLYYQAYLLLSLKFFLC

SEQ ID NO: 32265 - protein, 22 aa, Homo sapiens
RSMTSETLWWLITVVYTQCRLE

SEQ ID NO: 32266 - protein, 30 aa, Homo sapiens
MYQVILKFLGSGHLMFPVVLGLLQPNHQIF

SEQ ID NO: 32267 - protein, 24 aa, Homo sapiens
MALYLLWTLLMSKGWKKPKLNFTK

SEQ ID NO: 32268 - protein, 19 aa, Homo sapiens
LLSHPLDLRCLPQQREAPL

SEQ ID NO: 32269 - protein, 13 aa, Homo sapiens
ILLQSFRNVDSGY

SEQ ID NO: 32270 - protein, 8 aa, Homo sapiens
LLLMLSPR

SEQ ID NO: 32271 - protein, 9 aa, Homo sapiens
IKMISIMWI

SEQ ID NO: 32272 - protein, 18 aa, Homo sapiens
VLKFCLSFSVQGWCLFWT

SEQ ID NO: 32273 - protein, 25 aa, Homo sapiens
MGLWLLSWRVTMKIILLSSGMPLLL

SEQ ID NO: 32274 - protein, 110 aa, Homo sapiens
MASKRALVILAKGAEEMETVIPVDVMRRAGIKVTVAGLAGKDPVQCSRDVVICPDASLEDAKKEGPYDVVVLPGGNLGAQNLSESAAVKEILKEQENRKGLIAAICAGLH

SEQ ID NO: 32275 - protein, 14 aa, Homo sapiens
MASRTFLLCLLVKL

SEQ ID NO: 32276 - protein, 12 aa, Homo sapiens
KETFLHARKQTL

SEQ ID NO: 32277 - protein, 16 aa, Homo sapiens
LCCWFLFSISWGLFAF

SEQ ID NO: 32278 - protein, 10 aa, Homo sapiens
MNSTWLLWWI

SEQ ID NO: 32279 - protein, 82 aa, Homo sapiens
LPVMCGCALCTCPREIEEIVCSLNHTMCVKNLLLSNYTCGGCMGVLGVTAVKCFTQEESCGSIGSWGALSLTQVERGLLIFY

SEQ ID NO: 32280 - protein, 30 aa, Homo sapiens
LKRPMTLAAGLLLMPLTETAILEALSICTT

SEQ ID NO: 32281 - protein, 17 aa, Homo sapiens
LNLIQGKSTLEMKITLH

SEQ ID NO: 32282 - protein, 10 aa, Homo sapiens
LLLTNFWFII

SEQ ID NO: 32283 - protein, 20 aa, Homo sapiens
IAGWGKLIMCTFCLNILVPC

SEQ ID NO: 32284 - protein, 21 aa, Homo sapiens
MLRVMFLSILMRLWRLSFPQC

SEQ ID NO: 32285 - protein, 45 aa, Homo sapiens
MINWIGYLVSWGFLQIKTGKILERCQNIPHFKKTLEEQRMPTVAS

SEQ ID NO: 32286 - protein, 527 aa, Homo sapiens
LGLLLPQKGTQTLSLSPGLGGGFGYVVGGIHWDKTGFGRALGGQLRVIYLFTAVTLSVTTVLTLVSIPERPLRPPSEKRAAMKSPSLPLPPSPPVLPEEGPGDSLPSHTATNFSSPISPPSPLTPKYGSFISRDSSLTGISEFASSFGTANIDSVLIDCFTGGHDSYLAIPGSVPRPPISVSFPRAPDGFYRQDRGLLEGREGALTSGCDGDILRVGSLDTSKPRSSGILKRPQTLAIPDAAGGGGPETSRRRNVTFSQQVANILLNGVKYESELTGSSERAEQPLSVGRLCSTICNMPKALRTLCVNHFLGWLSFEGMLLFYTDFMGEVVFQGDPKAPHTSEAYQKYNSGVTMGCWGMCIYAFSAAFYSAILEKLEEFLSVRTLYFIAYLAFGLGTGLATLSRNLYVVLSLCITYGILFSTLCTLPYSLLCDYYQSKKFAGSSADGTRRGMGVDISLLSCQYFLAQILVSLVLGPLTSAVGSANGVMYFSSLVSFLGCLYSSLFVIYEIPPSDAADEEHRPLLLNV

SEQ ID NO: 32287 - protein, 43 aa, Homo sapiens
IKAASMLCGKDLLWLRCTVEDHLSHQLTMVAHPALRILCFQGS

SEQ ID NO: 32288 - protein, 27 aa, Homo sapiens
VAQRDIYLLLGQMALFVFGSGMLEPLK

SEQ ID NO: 32289 - protein, 12 aa, Homo sapiens
INTWKRVGFILL

SEQ ID NO: 32290 - protein, 21 aa, Homo sapiens
MNLNGWVELSYLMMAAMSCYQ

SEQ ID NO: 32291 - protein, 10 aa, Homo sapiens
LMTFSVLLSI

SEQ ID NO: 32292 - protein, 14 aa, Homo sapiens
LTFRRKTMALAFLL

SEQ ID NO: 32293 - protein, 527 aa, Homo sapiens
VVGFSLELSEKFRRLKPRLTVYLSRRPSRERTEEGTWRIMTADKDKDKDKEKDRDRDRDREREKRDKARESENSRPRRSCTLEGGAKNYAESDHSEDEDNDNNSATAEESTKKNKKKPPKKKSRYERTDTGEITSYITEDDVVYRPGDCVYIESRRPNTPYFICSIQDFKLVHNSQACCRSPTPALCDPPACSLPVASQPPQHLSEAGRGPVGSKRDHLLMNVKWYYRQSEVPDSVYQHLVQDRHNENDSGRELVITDPVIKNRELFISDYVDTYHAAALRGKCNISHFSDIFAAREFKARVDSFFYILGYNPETRRLNSTQGEIRVGPSHQAKLPDLQPFPSPDGDTVTQHEELVWMPGVNDCDLLMYLRAARSMAAFAGMCDGGSTEDGCVAASRDDTTLNALNTLHESGYDAGKALQRLVKKPVPKLIEKCWTEDEVVSRNQHLPCALGHRATGVSVCDLPAAQGKQKLQSCRMAVRGSARQEDGALQPLNCTERLDFIKIRLHRCRERLSNFHGKKGEIDSYS

SEQ ID NO: 32294 - protein, 23 aa, Homo sapiens
METSRKSIMIPKLPVTLGCTMCM

SEQ ID NO: 32295 - protein, 123 aa, Homo sapiens
MSILKIHAREIFDSRGNPTVEVDLFTSKGLFRAAVPSGASTGIYEALELRDNDKTRYMGKERLPGPGAFLFMEELILRAVEAYWIPCHAREQSMHDIILTCPLPHPTFGSRWNCIRRMRHFEP

SEQ ID NO: 32296 - protein, 21 aa, Homo sapiens
TKLPHSVNRPIELIRTGDSFV

SEQ ID NO: 32297 - protein, 29 aa, Homo sapiens
LRCFISSLMTGLWTGGAWELSCMRCCMAW

SEQ ID NO: 32298 - protein, 23 aa, Homo sapiens
TPPEEREGNIGEQGYFSVHTAMA

SEQ ID NO: 32299 - protein, 16 aa, Homo sapiens
KRSCWFRWMVSVFSLS

SEQ ID NO: 32300 - protein, 14 aa, Homo sapiens
VILIVTMFIPDLNW

SEQ ID NO: 32301 - protein, 8 aa, Homo sapiens
ITSLLFIL

SEQ ID NO: 32302 - protein, 12 aa, Homo sapiens
ILFLMLGWAFPS

SEQ ID NO: 32303 - protein, 15 aa, Homo sapiens
LLLLSMAEFVVCLVG

SEQ ID NO: 32304 - protein, 28 aa, Homo sapiens
KTMDQLGVLFVLLGKCFHWNLVEDLILS

SEQ ID NO: 32305 - protein, 46 aa, Homo sapiens
IIVDLWFHLLLIFCMWQMMKKPVISDFEIVYGKMKKRKWKFFILCD

SEQ ID NO: 32306 - protein, 61 aa, Homo sapiens
IQVVTRLVSLIHLVEVTPVRIQVPSMVEMSSILDPTNKGPRKTEILLAAVAYPKMFWEENN

SEQ ID NO: 32307 - protein, 22 aa, Homo sapiens
ITTKWVTILLCFRVRRVLHLTG

SEQ ID NO: 32308 - protein, 24 aa, Homo sapiens
KQVKRSFTSVAHQSVLSMLISLAA

SEQ ID NO: 32309 - protein, 11 aa, Homo sapiens
VRIVAILLAWI

SEQ ID NO: 32310 - protein, 24 aa, Homo sapiens
LLFFSMLTWLAEASGCVIFEKGRK

SEQ ID NO: 32311 - protein, 9 aa, Homo sapiens
VIILWPLLS

SEQ ID NO: 32312 - protein, 18 aa, Homo sapiens
IYKYWQSNDLCQRENICA

SEQ ID NO: 32313 - protein, 10 aa, Homo sapiens
RRTFDWRCHN

SEQ ID NO: 32314 - protein, 20 aa, Homo sapiens
LTLHIKLLLLLFMKMEMVAI

SEQ ID NO: 32315 - protein, 37 aa, Homo sapiens
LPGILIMILNVCWQLDKQMVELYLQALVKIITQSSKI

SEQ ID NO: 32316 - protein, 9 aa, Homo sapiens
LLLMLAMMV

SEQ ID NO: 32317 - protein, 15 aa, Homo sapiens
RKYVLRKFLCLSSLI

SEQ ID NO: 32318 - protein, 18 aa, Homo sapiens
TPRWHLAKGNSLLALMLS

SEQ ID NO: 32319 - protein, 179 aa, Homo sapiens
LHLGPASVAMDRGPWSSLILRGCLHGTRTDSNTGSSFPLPDISRRQHPCMPSVYNPSLKKDTENKLLRKPYIELQSARGGTGASHTSGRRLQPPGGPRVVGVAGGTTALRADTRGTKRCLDKGWCPAQGAQRGHAMADKAQDVKNSPWTPRQKPRTVCRQISTQHPSWLPVPRTLYLFF

SEQ ID NO: 32320 - protein, 21 aa, Homo sapiens
VFLIHLKAMTSHLWILLQFMC

SEQ ID NO: 32321 - protein, 20 aa, Homo sapiens
MLNLILLNNWWNLLILLEFP

SEQ ID NO: 32322 - protein, 168 aa, Homo sapiens
LMPSQSACPVLSTAPGTPCDLRKHLLNMVSEEKRSPQLSAKTWRRGLRLQKRRNALFLPEGDICVVGSTSGARALIPETSKLERSGTVIAYCNLELLASSDPPVWASQSTGMTGMSYRSQPQLGFKSTPPAHSSVFHHSVKAPKEDQAQEAASRPLTSQDGWNPNIKK

SEQ ID NO: 32323 - protein, 13 aa, Homo sapiens
LYLLFSFLYLALV

SEQ ID NO: 32324 - protein, 9 aa, Homo sapiens
VKLLVWVFL

SEQ ID NO: 32325 - protein, 91 aa, Homo sapiens
ISFLHIQVRWRLLWRLGPRALETSALAPASLLPWPGAAALPRRQHGWPPGRGLGGGGPAARRGRLLLHLQADPGSAAGRPRARDTLFEVRR

SEQ ID NO: 32326 - protein, 1056 aa, Homo sapiens
LLPLPSARRCSEAGRAPRPERAAQRHGGGGGGSSLDPRSSPRRGAASPRPLEPRELRELRSASRAPPCRSRPGLAMLRRPAPALAPAARLLLAGLLCGGGVWAARVNKHKPWLEPTYHGIVTENDNTVLLDPPLIALDKDAPLRFAESFEVTVTKEGEICGFKIHGQNVPFDAVVVDKSTGEGVIRSKEKLDCELQKDYSFTIQAYDCGKGPDGTNVKKSHKATVHIQVNDVNEYAPVFKEKSYKATVIEGKQYDSILRVEAVDADCSPQFSQICSYEIITPDVPFTVDKDGYIKNTEKLNYGKEHQYKLTVTAYDCGKKRATEDVLVKISIKPTCTPGWQGWNNRIEYEPGTGALAVFPNIHLETCDEPVASVQATVELETSHIGKGCDRDTYSEKSLHRLCGAAAGTAELLPSPSGSLNWTMGLPTDNGHDSDQVFEFNGTQAVRIPDGVVSVSPKEPFTISVWMRHGPFGRKKETILCSSDKTDMNRHHYSLYVHGCRLIFLFRQDPSEEKKYRPAEFHWKLNQVCDEEWHHYVLNVEFPSVTLYVDGTSHEPFSVTEDYPLHPSKIETQLVVGACWQEFSGVENDNETEPVTVASAGGDLHMTQFFRGNLAGLTLRSGKLADKKVIDCLYTCKEGLDLQVLEDSGRGVQIQAHPSQLVLTLEGEDLGELDKAMQHISYLNSRQFPTPGIRRLKITSTIKCFNEATCISVPPVDGYVMVLQPEEPKISLSGVHHFARAASEFESSEGVFLFPELRIISTITREVEPEGDGAEDPTVQESLVSEEIVHDLDTCEVTVEGEELNHEQESLEVDMARLQQKGIEVSSSELGMTFTGVDTMASYEEVLHLLRYRNWHARSLLDRKFKLICSELNGRYISNEFKVEVNVIHTANPMEHANHMAAQPQFVHPEHRSFVDLSGHNLANPHPFAVVPSTATVVIVVCVSFLVFMIILGVFRIRAAHRRTMRDQDTGKENEMDWDDSALTITVNPMETYEDQHSSEEEEEEEEEEESEDGEEEDDITSAESESSEEEEGEQGDPQNATRQQQLEWDDSTLSY

SEQ ID NO: 32327 - protein, 1046 aa, Homo sapiens
LLPLPSARRCSEAGRAPRPERAAQRHGGGGGGSSLDPRSSPRRGAASPRPLEPRELRELRSASRAPPCRSRPGLAMLRRPAPALAPAARLLLAGLLCGGGVWAARVNKHKPWLEPTYHGIVTENDNTVLLDPPLIALDKDAPLRFAGEICGFKIHGQNVPFDAVVVDKSTGEGVIRSKEKLDCELQKDYSFTIQAYDCGKGPDGTNVKKSHKATVHIQVNDVNEYAPVFKEKSYKATVIEGKQYDSILRVEAVDADCSPQFSQICSYEIITPDVPFTVDKDGYIKNTEKLNYGKEHQYKLTVTAYDCGKKRATEDVLVKISIKPTCTPGWQGWNNRIEYEPGTGALAVFPNIHLETCDEPVASVQATVELETSHIGKGCDRDTYSEKSLHRLCGAAAGTAELLPSPSGSLNWTMGLPTDNGHDSDQVFEFNGTQAVRIPDGVVSVSPKEPFTISVWMRHGPFGRKKETILCSSDKTDMNRHHYSLYVHGCRLIFLFRQDPSEEKKYRPAEFHWKLNQVCDEEWHHYVLNVEFPSVTLYVDGTSHEPFSVTEDYPLHPSKIETQLVVGACWQEFSGVENDNETEPVTVASAGGDLHMTQFFRGNLAGLTLRSGKLADKKVIDCLYTCKEGLDLQVLEDSGRGVQIQAHPSQLVLTLEGEDLGELDKAMQHISYLNSRQFPTPGIRRLKITSTIKCFNEATCISVPPVDGYVMVLQPEEPKISLSGVHHFARAASEFESSEGVFLFPELRIISTITREVEPEGDGAEDPTVQESLVSEEIVHDLDTCEVTVEGEELNHEQESLEVDMARLQQKGIEVSSSELGMTFTGVDTMASYEEVLHLLRYRNWHARSLLDRKFKLICSELNGRYISNEFKVEVNVIHTANPMEHANHMAAQPQFVHPEHRSFVDLSGHNLANPHPFAVVPSTATVVIVVCVSFLVFMIILGVFRIRAAHRRTMRDQDTGKENEMDWDDSALTITVNPMETYEDQHSSEEEEEEEEEEESEDGEEEDDITSAESESSEEEEGEQGDPQNATRQQQLEWDDSTLSY

SEQ ID NO: 32328 - protein, 22 aa, Homo sapiens
RLLLKCFLSGLVICTWPTCWLR

SEQ ID NO: 32329 - protein, 16 aa, Homo sapiens
LMILILNKEHKTVRLI

SEQ ID NO: 32330 - protein, 16 aa, Homo sapiens
MTLALWLLLIRLVVAS

SEQ ID NO: 32331 - protein, 17 aa, Homo sapiens
KEWLVVLCTLTTIVCHQ

SEQ ID NO: 32332 - protein, 9 aa, Homo sapiens
KKFIIFWIL

SEQ ID NO: 32333 - protein, 16 aa, Homo sapiens
MDRVLFPYLLSLAVIC

SEQ ID NO: 32334 - protein, 225 aa, Homo sapiens
IMDLRQFLMCLSLCTAFALSKPTEKKDRVHHEPQLSDKVHNDAQSFDYDHDAFLGAEEAKTFDQLTPEESKERLGKIVSKIDGDKDGFVTVDELKDWIKFAQKRWIYEDVERQWKGHDLNEDGLVSWEEYKNATYGYVLDDPDPDDGFNYKQMMVRDERRFKMADKDGDLIATKEEFTAFLHPEEYDYMKDIVVQETMEDIDKNADGFIDLEEYIGWQAYQGGDR

SEQ ID NO: 32335 - protein, 23 aa, Homo sapiens
IYFYSFWFHMKLFALLRLLLQTF

SEQ ID NO: 32336 - protein, 9 aa, Homo sapiens
MGIIGLYIC

SEQ ID NO: 32337 - protein, 15 aa, Homo sapiens
LTSTLRGPALAMLLW

SEQ ID NO: 32338 - protein, 26 aa, Homo sapiens
KVSLEHFKIIKSNSTGIGDQPEGSDI

SEQ ID NO: 32339 - protein, 10 aa, Homo sapiens
VPLVFLFFNL

SEQ ID NO: 32340 - protein, 29 aa, Homo sapiens
LARWVLWMWNFALPVEKREQVKDVQFAKW

SEQ ID NO: 32341 - protein, 24 aa, Homo sapiens
MAIHLLFMMCSLMPAKSFKMQVNR

SEQ ID NO: 32342 - protein, 23 aa, Homo sapiens
IPVAPAVTISALLGLTAAPLDSV

SEQ ID NO: 32343 - protein, 9 aa, Homo sapiens
KPTEMHSKR

SEQ ID NO: 32344 - protein, 1193 aa, Homo sapiens
LLTRSARRSAARLRKLGCNFKRRFDSLFLDCIYIYNKAIKMSGASVKVAVRVRPFNSRETSKESKCIIQMQGNSTSIINPKNPKEAPKSFSFDYSYWSHTSPEDPCFASQNRVYNDIGKEMLLHAFEGYNVCIFAYGQTGAGKSYTMMGKQEESQAGIIPQLCEELFEKINDNCNEEMSYSVEVSYMEIYCERVRDLLNPKNKGNLRVREHPLLGPYVEDLSKLAVTSYTDIADLMDAGNKARTVAATNMNETSSRSHAVFTIVFTQKKHDNETNLSTEKVSKISLVDLAGSERADSTGAKGTRLKEGANINKSLTTLGKVISALAEVSKKKKKTDFIPYRDSVLTWLLRENLGGNSRTAMVAALSPADINYDETLSTLRYADRAKQIKCNAVINEDPNAKLVRELKEEVTRLKDLLRAQGLGDIIDTSMGSLTSSPSSCSLSSQVGLTSVTSIQERIMSTPGGEEAIERLKESEKIIAELNETWEEKLRKTEAIRMEREALLAEMGVAIREDGGTLGVFSPKKTPHLVNLNEDPLMSECLLYYIKDGITRVGQADAERRQDIVLSGAHIKEEHCIFRSERSNSGEVIVTLEPCERSETYVNGKRVSQPVQLRSGNRIIMGKNHVFRFNHPEQARAEREKTPSAETPSEPVDWTFAQRELLEKQGIDMKQEMEKRLQEMEILYKKEKEEADLLLEQQRLDADSDSGDDSDKRSCEESWKLITSLREKLPPSKLQTIVKKCGLPSSGKKREPIKMYQIPQRRRLSKDSKWVTISDLKIQAVKEICYEVALNDFRHSRQEIEALAIVKMKELCAMYGKKDPNERDSWRAVARDVWDTVGVGDEKIEDVMATGKGSTDVDDLKVHIDKLEDILQEVKKQNNMKDEEIKVLRNKMLKMEKVLPLIGSQEQKSPGSHKAKEPVGAGVSSTSENNVSKGDNGELAKEERVSQLMNGDPAFRRGRLRWMRQEQIRFKNLQQQEITKQLRRQNVPHRFIPPENRKPRFPFKSNPKHRNSWSPGTHIIITEDEVIELRIPKDDEARKGNKEESQEKGGKGAFKDPQFPWGSQGMRSQDHIQVSKQHINNQQQPPQLRWRSNSLNNGQPKSTRCQASASAESLNSHSGHPTADVQTFQAKRHIHQHRQSYCNYNTGGQLEGNAATSYQKQTDKPSHCSQFVTPPRMRRQFSAPNLKAGRETTV

SEQ ID NO: 32345 - protein, 1810 aa, Homo sapiens
LLTRSARRSAARLRKLGCNFKRRFDSLFLDCIYIYNKAIKMSGASVKVAVRVRPFNSRETSKESKCIIQMQGNSTSIINPKNPKEAPKSFSFDYSYWSHTSPEDPCFASQNRVYNDIGKEMLLHAFEGYNVCIFAYGQTGAGKSYTMMGKQEESQAGIIPQLCEELFEKINDNCNEEMSYSVEVSYMEIYCERVRDLLNPKNKGNLRVREHPLLGPYVEDLSKLAVTSYTDIADLMDAGNKARTVAATNMNETSSRSHAVFTIVFTQKKHDNETNLSTEKVSKISLVDLAGSERADSTGAKGTRLKEGANINKSLTTLGKVISALAEVSKKKKKTDFIPYRDSVLTWLLRENLGGNSRTAMVAALSPADINYDETLSTLRYADRAKQIKCNAVINEDPNAKLVRELKEEVTRLKDLLRAQGLGDIIDTSMGSLTSSPSSCSLSSQVGLTSVTSIQERIMSTPGGEEAIERLKESEKIIAELNETWEEKLRKTEAIRMEREALLAEMGVAIREDGGTLGVFSPKKTPHLVNLNEDPLMSECLLYYIKDGITRVGQADAERRQDIVLSGAHIKEEHCIFRSERSNSGEVIVTLEPCERSETYVNGKRVSQPVQLRSGNRIIMGKNHVFRFNHPEQARAEREKTPSAETPSEPVDWTFAQRELLEKQGIDMKQEMEKRLQEMEILYKKEKEEADLLLEQQRLDYESKLQALQKQVETRSLAAETTEEEEEEEEVPWTQHEFELAQWAFRKWKSHQFTSLRDLLWGNAVYLKEANAISVELKKKVQFQFVLLTDTLYSPLPPELLPTEMEKTHEDRPFPRTVVAVEVQDLKNGATHYWSLEKLKQRLDLMREMYDRAGEMASSAQDESETTVTGSDPFYDRFHWFKLVGSSPIFHGCVNERLADRTPSPTFSTADSDITELADEQQDEMEDFDDEAFVDDAGSDAGTEEGSDLFSDGHDPFYDRSPWFILVGRAFVYLSNLLYPVPLIHRVAIVSEKGEVRGFLRVAVQAIAADEEAPDYGSGIRQSGTAKISFDNEYFNQSDFSSVAMTRSGLSLEELRIVEGQGQSSEVITPPEEISRINDLDLKSSTLLDGKMVMEGFSEEIGNHLKLGSAFTFRVTVLQASGILPEYADIFCQFNFLHRHDEAFSTEPLKNNGRGSPLAFYHVQNIAVEITESFVDYIKTKPIVFEVFGHYQQHPLHLQGQELNSPPQPCRRFFPPPMPLSKPVPATKLNTMSKTSLGQSMSKYDLLVWFEISELEPTGEYIPAVVDHTAGLPCQGTFLLHQGIQRRITVTIIHEKGSELHWKDVRELVVGRIRNKPEVDEAAVDAILSLNIISAKYLKSSHNSSRTFYRFEAVWDSSLHNSLLLNRVTPYGEKIYMTLSAYLELDHCIQPAVITKDVCMVFYSRDAKISPPRSLRSLFGSGYSKSPDSNRVTGIYELSLCKMSDTGSPGMQRRRRKILDTSVAYVRGEENLAGWRPRGDSLILEHQWELEKLELLHEVEKTRHFLLLRERLGDSIPKSLSDSLSPSLSSGTLSTSTSISSQISTTTFESAITPSESSGYDSGDIESLVDREKELATKCLQLLTHTFNREFSQVHGSVSDCKLSDISPIGRDPSESSFSSATLTPSSTCPSLVDSRSNSLDQKTPEANSRASSPCPEFEQFQIVPAVETPYLARAGKNEFLNLVPDIEEIRPSSVVSKKGYLHFKEPLYSNWAKHFVVVRRPYVFIYNSDKDPVERGIINLSTAQVEYSEDQQAMVKTPNTFAVCTKHRGVLLQALNDKDMNDWLYAFNPLLAGTIRSKLSRRCPSQSKY

SEQ ID NO: 32346 - protein, 34 aa, Homo sapiens
KACTVLGTEIAASRSIVYMQKCTVPGVKLLVFDF

SEQ ID NO: 32347 - protein, 487 aa, Homo sapiens
LSAAMAQADIALIGLAVMGQNLILNMNDHGFVVCAFNRTVSKVDDFLANEAKGTKVVGAQSLKEMVSKLKKPRRIILLVKAGQAVDDFIEKLVPLLDTGDIIIDGGNSEYRDTTRRCRDLKAKGILFVGSGVSGGEEGARYGPSLMPGGNKEAWPHIKTIFQGIAAKVGTGEPCCDWVGDEGAGHFVKMVHNGIEYGDMQLICEAYHLMKDVLGMAQDEMAQAFEDWNKTELDSFLIEITANILKFQDTDGKHLLPKIRDSAGQKGTGKWTAISALEYGVPVTLIGEAVFARCLSSLKDERIQASKKLKGPQKFQFDGDKKSFLEDIRKALYASKIISYAQGFMLLRQAATEFGWTLNYGGIALMWRGGCIIRSVFLGKIKDAFDRNPELQNLLLDDFFKSAVENCQDSWRRAVSTGVQAGIPMPCFTTALSFYDGYRHEMLPASLIQAQRDYFGAHTYELLAKPGQFIHTNWTGHGGTVSSSSYNA

SEQ ID NO: 32348 - protein, 11 aa, Homo sapiens
LTLSFVLFLPL

SEQ ID NO: 32349 - protein, 60 aa, Homo sapiens
LGAYGSPGRALLMCSVAARGIFVWKGEAPCRRGRADPELSPAECACGSVRFTARMNELVS

SEQ ID NO: 32350 - protein, 36 aa, Homo sapiens
LVVGSVPRADRSLPRGAGGLQAGRRGSALVRRLLGL

SEQ ID NO: 32351 - protein, 23 aa, Homo sapiens
VLGMVLHVLAIFPLQRDAQDDKI

SEQ ID NO: 32352 - protein, 20 aa, Homo sapiens
LSWIHWWIIYLLILPRGTSG

SEQ ID NO: 32353 - protein, 32 aa, Homo sapiens
MSSPEFGPPTLGLKVDVIRGSGPPYLEDSAAI

SEQ ID NO: 32354 - protein, 65 aa, Homo sapiens [sequence omitted]

SEQ ID NO: 32355 - protein, 12 aa, Homo sapiens
ILFMTVLKARGS

SEQ ID NO: 32356 - protein, 15 aa, Homo sapiens
LALWDWLCAILLTRG

SEQ ID NO: 32357 - protein, 12 aa, Homo sapiens
TSPSSLSSARNV

SEQ ID NO: 32358 - protein, 11 aa, Homo sapiens
IQWQGFWLLSI

SEQ ID NO: 32359 - protein, 53 aa, Homo sapiens
LHGCLQLSLPLFLALAPSLCHLTLPCATWALSLLPGRCGSGDLGAWGWLWESS

SEQ ID NO: 32360 - protein, 35 aa, Homo sapiens
ITGKTGEKFKLDPGRSPTVSCSKTQAASGKGAWVD

SEQ ID NO: 32361 - protein, 9 aa, Homo sapiens
IKIHSLFLL

SEQ ID NO: 32362 - protein, 20 aa, Homo sapiens
LGYFYQMLSILLLLCPLWKP

SEQ ID NO: 32363 - protein, 41 aa, Homo sapiens
MAFLLMPQPIPLSFLNSRSPPCPPRKLLMNLLPSPRKNQFH

SEQ ID NO: 32364 - protein, 29 aa, Homo sapiens
LVFIFWAPESVPLKGKMIYASSKDAIKKS

SEQ ID NO: 32365 - protein, 12 aa, Homo sapiens
KMMLIITLSMMW

SEQ ID NO: 32366 - protein, 36 aa, Homo sapiens
MSHCWTLLALSLWGLRVSQGRETWWRWPHGLGPPCS

SEQ ID NO: 32367 - protein, 66 aa, Homo sapiens
LLLDVSHRRVCCLPAGLAQQQPENLLQVSQSDQSQFRSCYPGAGWGNAQRSVHILSGSPSSGHTGR

SEQ ID NO: 32368 - protein, 20 aa, Homo sapiens
ISLPFLGFLAAWSISKLATI

SEQ ID NO: 32369 - protein, 9 aa, Homo sapiens
MCLSILWLW

SEQ ID NO: 32370 - protein, 322 aa, Homo sapiens
LRRRAACSPGPAPRAARPPAMEPGPDGPAASGPAAIREGWFRETCSLWPGQALSLQVEQLLHHRRSRYQDILVFRSKTYGNVLVLDGVIQCTERDEFSYQEMIANLPLCSHPNPRKVLIIGGGDGGVLREVVKHPSVESVVQCEIDEDVIQVSKKFLPGMAIGYSSSKLTLHVGDGFEFMKQNQDAFDVIITDSSDPMGPAESLFKESYYQLMKTALKEDGVLCCQGECQWLHLDLIKEMRQFCQSLFPVVAYAYCTIPTYPSGQIGFMLCSKNPSTNFQEPVQPLTQQQVAQMQLKYYNSDVHRAAFVLPEFARKALNDVS

SEQ ID NO: 32371 - protein, 31 aa, Homo sapiens
IVIVMHSVFLIIEMGEQLILIVKLTTDLLPT

SEQ ID NO: 32372 - protein, 13 aa, Homo sapiens
INGIVLVLAVMLI

SEQ ID NO: 32373 - protein, 22 aa, Homo sapiens
IMLVWSLGITFWNVLMSSLREP

SEQ ID NO: 32374 - protein, 47 aa, Homo sapiens
TAILSRMKIFLPVLLAALLGVEREEQSVLPEADHLLRPGQLLRDCVC

SEQ ID NO: 32375 - protein, 10 aa, Homo sapiens
LYHLILLAFL

SEQ ID NO: 32376 - protein, 18 aa, Homo sapiens
MFLLMMWLVTLKKSLLKH

SEQ ID NO: 32377 - protein, 24 aa, Homo sapiens
MEFIELWHRSWENCGVYIYKDAFK

SEQ ID NO: 32378 - protein, 31 aa, Homo sapiens
ISGCCYLGWYLFRLPKRRCFYWMEFSFSHHY

SEQ ID NO: 32379 - protein, 28 aa, Homo sapiens
LQCLMWITLPLGRSLCLLVSINLFESFL

SEQ ID NO: 32380 - protein, 8 aa, Homo sapiens
IPLSPSMR

SEQ ID NO: 32381 - protein, 35 aa, Homo sapiens
IPIYRIIVIIGAMWREFIIHPLLLATVLDSEDCCI

SEQ ID NO: 32382 - protein, 94 aa, Homo sapiens
VASAASVPLPRKFSRARCHRAPVISPRGQELWVKHSGTPLEIWLAMRSGSHDLACPLTPLLLLSFKSRNWVERRVVPAWCGGRSTGLEVRGPGS

SEQ ID NO: 32383 - protein, 39 aa, Homo sapiens
ILLHRTLSILHFPTVTRDSPTQQDLLPQALSLSSQETIK

SEQ ID NO: 32384 - protein, 10 aa, Homo sapiens
IKYNILMLGI

SEQ ID NO: 32385 - protein, 35 aa, Homo sapiens
ISEATGYFFHAGIWTKESGPYSEKEKACFTEKATL

SEQ ID NO: 32386 - protein, 35 aa, Homo sapiens
LIIPLYCKNQKTTKVLSSILRTDEFKFGHLQMRWI

SEQ ID NO: 32387 - protein, 16 aa, Homo sapiens
ISRPLRLCRSLALVLG

SEQ ID NO: 32388 - protein, 26 aa, Homo sapiens
MMSQGWPRSSWAELLKAQRPGPDSSA

SEQ ID NO: 32389 - protein, 30 aa, Homo sapiens
LQPSASNPQYVREVDAESPDEDPGKEGAGG

SEQ ID NO: 32390 - protein, 17 aa, Homo sapiens
MMLMVMEILMWMMPKFY

SEQ ID NO: 32391 - protein, 34 aa, Homo sapiens
ISLGFGYTLIDLLHCLQAQLLICVQDEWDGRKYL

SEQ ID NO: 32392 - protein, 1465 aa, Homo sapiens
KMSGMGENTSDPSRAETRKRKECPDQLGPSPKRNTEKRNREQENKYIEELAELIFANFNDIDNFNFKPDKCAILKETVKQIRQIKEQEKAAAANIDEVQKSDVSSTGQGVIDKDALGPMMLEALDGFFFVVNLEGNVVFVSENVTQYLRYNQEELMNKSVYSILHVGDHTEFVKNLLPKSIVNGGSWSGEPPRRNSHTFNCRMLVKPLPDSEEEGHDNQEAHQKYETMQCFAVSQPKSIKEEGEDLQSCLICVARRVPMKERPVLPSSESFTTRQDLQGKITSLDTSTMRAAMKPGWEDLVRRCIQKFHAQHEGESVSYAKRHHHEVLRQGLAFSQIYRFSLSDGTLVAAQTKSKLIRSQTTNEPQLVISLHMLHREQNVCVMNPDLTGQTMGKPLNPISSNSPAHQALCSGNPGQDMTLSSNINFPINGPKEQMGMPMGRFGGSGGMNHVSGMQATTPQGSNYALKMNSPSQSSPGMNPGQPTSMLSPRHRMSPGVAGSPRIPPSQFSPAGSLHSPVGVCSSTGNSHSYTNSSLNALQALSEGHGVSLGSSLASPDLKMGNLQNSPVNMNPPPLSKMGSLDSKDCFGLYGEPSEGTTGQAESSCHPGEQKETNDPNLPPAVSSERADGQSRLHDSKGQTKLLQLLTTKSDQMEPSPLASSLSDTNKDSTGSLPGSGSTHGTSLKEKHKILHRLLQDSSSPVDLAKLTAEATGKDLSQESSSTAPGSEVTIKQEPVSPKKKENALLRYLLDKDDTKDIGLPEITPKLERLDSKTDPASNTKLIAMKTEKEEMSFEPGDQPGSELDNLEEILDDLQNSQLPQLFPDTRPGAPAGSVDKQAIINDLMQLTAENSPVTPVGAQKTALRISQSTFNNPRPGQLGRLLPNQNLPLDITLQSPTGAGPFPPIRNSSPYSVIPQPGMMGNQGMIGNQGNLGNSSTGMIGNSASRPTMPSGEWAPQSSAVRVTCAATTSAMNRPVQGGMIRNPAASIPMRPSSQPGQRQTLQSQVMNIGPSELEMNMGGPQYSQQQAPPNQTAPWPESILPIDQASFASQNRQPFGSSPDDLLCPHPAAESPSDEGALLDQLYLALRNFDGLEEIDRALGIPELVSQSQAVDPEQFSSQDSNIMLEQKAPVFPQQYASQAQMAQGSYSPMQDPNFHTMGQRPSYATLRMQPRPGLRPTGLVQNQPNQLRLQLQHRLQAQQNRQPLMNQISNVSNVNLTLRPGVPTQAPINAQMLAQRQREILNQHLRQRQMHQQQQVQQRTLMMRGQGLNMTPSMVAPSGMPATMSNPRIPQANAQQFPFPPNYGISQQPDPGFTGATTPQSPLMSPRMAHTQSPMMQQSQANPAYQAPSDINGWAQGNMGGNSMFSQQSPPHFGQQANTSMYSNNMNINVSMATNTGGMSSMNQMTGQISMTSVTSVPTSGLSSMGPEQVNDPALRGGNLFPNQLPGMDMIKQEGDTTRKYC

SEQ ID NO: 32393 - protein, 16 aa, Homo sapiens
MKMMYVSFSLVCAWME

SEQ ID NO: 32394 - protein, 14 aa, Homo sapiens
LNFCLLITYHLLLS

SEQ ID NO: 32395 - protein, 18 aa, Homo sapiens
LWLAGVTVLLYGMCKGLS

SEQ ID NO: 32396 - protein, 16 aa, Homo sapiens
LQLHTCIILVIVTVAE

SEQ ID NO: 32397 - protein, 42 aa, Homo sapiens
MRLVLGTLWGGTEPNPVSAAWGLGPGVAKREEEGGSCCARNP

SEQ ID NO: 32398 - protein, 91 aa, Homo sapiens
MACTTPVRIISGPASRTLCAPSFLGINWKTRIPACTFPPGRSEMPTPASTKARSAAWSPASISPFARKTASKSTYTHSKKGRKSPKVTKTF

SEQ ID NO: 32399 - protein, 20 aa, Homo sapiens
RIVRTTTVFILSGRFSLLLC

SEQ ID NO: 32400 - protein, 73 aa, Homo sapiens
LKTKGPRGWQAGKAPRCVAVAQTSGRLAEWNAGKRAVPGKGPTHLPAAVTAEPLAVAGSAATTSARPISGATP

SEQ ID NO: 32401 - protein, 12 aa, Homo sapiens
LIPSGGFVVLLT

SEQ ID NO: 32402 - protein, 46 aa, Homo sapiens
MAKTDLSLSHQPDKKGVPRDFILPISDVRASIGAGFIYPLVGTVHH

SEQ ID NO: 32403 - protein, 8 aa, Homo sapiens
TWTLWMAL

SEQ ID NO: 32404 - protein, 28 aa, Homo sapiens
KWDSGQPAMKEVAAAAFRKEHQAAQDRG

SEQ ID NO: 32405 - protein, 14 aa, Homo sapiens
IMKPCIWSVFYLIL

SEQ ID NO: 32406 - protein, 308 aa, Homo sapiens
MAGCRGSLCCCCRWCCCCGERETRTPEELTILGETQEEEDEILPRKDYESLDYDRCINDPYLEVLETMDNKKGRRYEAVKWMVVFAIGVCTGLVGLFVDFFVRLFTQLKFGVVQTSVEECSQKGCLALSLLELLGFNLTFVFLASLLVLIEPVAAGSGIPEVKCYLNGVKVPGIVRLRTLLCKVLGVLFSVAGGLFVEKEGPMIHSGSVVGAGLPQFQSISLRKIQFNFPYFRSDRSGCWSCCSFRGANRGYLVQSRGGFVLLEPRAHVESALLFHVCHLHPQLLPFWDSVWKLGFLPAPWIAELWRV

SEQ ID NO: 32407 - protein, 353 aa, Homo sapiens
MAGCRGSLCCCCRWCCCCGERETRTPEELTILGETQEEEDEILPRKDYESLDYDRCINDPYLEVLETMDNKKGRRYEAVKWMVVFAIGVCTGLVGLFVDFFVRLFTQLKFGVVQTSVEECSQKGCLALSLLELLGFNLTFVFLASLLVLIEPVAAGSGIPEVKCYLNGVKVPGIVRLRTLLCKVLGVLFSVAGGLFVEKEGPMIHSGSVVGAGLPQFQSISLRKIQFNFPYFRSDRDKRDFVSAGAAAGVAAAFGAPIGGTLFSLEEGSSFWNQGLTWKVLFCSMSATFTLNFFRSGIQFGSWGSFQLPGLLNFGEFKSLREPPCVSGNHRGGVCGLDGVRRMPTDVLFESNR

SEQ ID NO: 32408 - protein, 19 aa, Homo sapiens
MVRVAIQNLWICASVVYAK

SEQ ID NO: 32409 - protein, 16 aa, Homo sapiens
MLLPLMEIRVLYRGSS

SEQ ID NO: 32410 - protein, 1712 aa, Homo sapiens
IRQIKERGEKLIANQEELGCIFQRWGEWSTHLEEESEKEKKKASGKGGSPKKGEEAKKVEAPRLPKLAAPGGGAGAKGGRGEPSDMRLWSWVLHLGLLSAALGCGLAERPRRARRDPRAGRPPRPAAGPATCATRAARGRRASPPPPPPPGGAWEAVRVPRRRQQREARGATEEPSPPSRALYFSGRGEQLRLRADLELPRDAFTLQVWLRAEGGQRSPAVITGLYDKCSYISRDRGWVVGIHTISDQDNKDPRYFFSLKTDRARQVTTINAHRSYLPGQWVYLAATYDGQFMKLYVNGAQVATSGEQVGGIFSPLTQKCKVLMLGGSALNHNYRGYIEHFSLWKVARTQREILSDMETHGAHTALPQLLLQENWDNVKHAWSPMKDGSSPKVEFSNAHGFLLDTSLEPPLCGQTLCDNTEVIASYNQLSSFRQPKVVRYRVVNLYEDDHKNPTVTREQVDFQHHQLAEAFKQYNISWELDVLEVSNSSLRRRLILANCDISKIGDENCDPECNHTLTGHDGGDCRHLRHPAFVKKQHNGVCDMDCNYERFNFDGGECCDPEITNVTQTCFDPDSPHRAYLDVNELKNILKLDGSTHLNIFFAKSSEEELAGVATWPWDKEALMHLGGIVLNPSFYGMPGHTHTMIHEIGHSLGLYHVFRGISEIQSCSDPCMETEPSFETGDLCNDTNPAPKHKSCGDPGPGNDTCGFHSFFNTPYNNFMSYADDDCTDSFTPNQVARMHCYLDLVYQGWQPSRKPAPVALAPQVLGHTTDSVTLEWFPPIDGHFFERELGSACHLCLEGRILVQYASNASSPMPCSPSGHWSPREAEGHPDVEQPCKSSVRTWSPNSAVNPHTVPPACPEPQGCYLELEFLYPLVPESLTIWVTFVSTDWDSSGAVNDIKLLAVSGKNISLGPQNVFCDVPLTIRLWDVGEEVYGIQIYTLDEHLEIDAAMLTSTADTPLCLQCKPLKYKVVRDPPLQMDVASILHLNRKFVDMDLNLGSVYQYWVITISGTEESEPSPAVTYIHGSGYCGDGIIQKDQGEQCDDMNKINGDGCSLFCRQEVSFNCIDEPSRCYFHDGDGVCEEFEQKTSIKDCGVYTPQGFLDQWASNASVSHQDQQCPGWVIIGQPAASQVCRTKVIDLSEGISQHAWYPCTISYPYSQLAQTTFWLRAYFSQPMVAAAVIVHLVTDGTYYGDQKQETISVQLLDTKDQSHDLGLHVLSCRNNPLIIPVVHDLSQPFYHSQAVRVSFSSPLVAISGVALRSFDNFDPVTLSSCQRGETYSPAEQSCVHFACEKTDCPELAVENASLNCSSSDRYHGAQCTVSCRTGYVLQIRRDDELIKSQTGPSVTVTCTEGKWNKQVACEPVDCSIPDHHQVYAASFSCPEGTTFGSQCSFQCRHPAQLKGNNSLLTCMEDGLWSFPEALCELMCLAPPPVPNADLQTARCRENKHKVGSFCKYKCKPGYHVPGSSRKSKKRAFKTQCTQDGSWQEGACVPVTCDPPPPKFHGLYQCTNGFQFNSECRIKCEDSDASQGLGSNVIHCRKDGTWNGSFHVCQEMQGQCSVPNELNSNLKLQCPDGYAIGSECATSCLDHNSESIILPMNVTVRDIPHWLNPTRVERVVCTAGLKWYPHPALIHCVKGCEPFMGDNYCDAINNRAFCNYDGGDCCTSTVKTKKVTPFPMSCDLQGDCACRDPQAQEHSRKDLRGYSHG

SEQ ID NO: 32411 - protein, 18 aa, Homo sapiens
VVNQTFTRSISNRWKSCY

SEQ ID NO: 32412 - protein, 32 aa, Homo sapiens
LEATEKKEEAGVAAAAAVAAGAGVGAAVRAGQ

SEQ ID NO: 32413 - protein, 24 aa, Homo sapiens
VFAEVIRKPGYSGTRLFSPSSAPP

SEQ ID NO: 32414 - protein, 46 aa, Homo sapiens
LTLSSSLLALLVADEDWPICRALQPAVEHQRRPFLVQSEPGSHPHV

SEQ ID NO: 32415 - protein, 7 aa, Homo sapiens
IIPIFPK

SEQ ID NO: 32416 - protein, 17 aa, Homo sapiens
MDSWTLPLAKAPLRRKE

SEQ ID NO: 32417 - protein, 14 aa, Homo sapiens
LPMWKFVLWTSPLL

SEQ ID NO: 32418 - protein, 35 aa, Homo sapiens
MSVFEAVGVARGSETEQSDWPHASVLDAPLHRRPF

SEQ ID NO: 32419 - protein, 57 aa, Homo sapiens
LAQGELWLLMGLAGVYCYRVNRRLFPVPVDPGTPCRLCRTPRDQQGPGTLAQPAHVR

SEQ ID NO: 32420 - protein, 20 aa, Homo sapiens
VPGDGKADQEAVNDLQVPSG

SEQ ID NO: 32421 - protein, 163 aa, Homo sapiens
LAQGELWLLMGLAGVYCYRVNRRLFPVPVDPGTPCRLCRTPRDQQGPGTLAQPAHVRVSIPLSILEPPHRYHIHRRKSFDASDTLALPRHCLLGWDIFPPKSEKSSAPRNLDLWSSVSAEAQHQKLSGTSSPFHPASPMQMLPPTPTWSVPQVPRPHVPRQKP

SEQ ID NO: 32422 - protein, 26 aa, Homo sapiens
MSPSAFCYSLTLLACWRAAWIPTCVA

SEQ ID NO: 32423 - protein, 25 aa, Homo sapiens
VAPWKVPLEMRRATCFCEAFPCWAE

SEQ ID NO: 32424 - protein, 17 aa, Homo sapiens
VATPAQSWILALAPLAT

SEQ ID NO: 32425 - protein, 642 aa, Homo sapiens
VAAAGVCWSLKSTRAAENRRDRTWAPRASPASQVGAGRQATSRPAPGMRVLLAALGLLFLGALRAFPQDRPFEDTCHGNPSHYYDKAVRRCCYRCPMGLFPTQQCPQRPTDCRKQCEPDYYLDEADRCTACVTCSRDDLVEKTPCAWNSSRVCECRPGMFCSTSAVNSCARCFFHSVCPAGMIVKFPGTAQKNTVCEPASPGVSPACASPENCKEPSSGTIPQAKPTPVSPATSSASTMPVRGGTRLAQEAASKLTRAPDSPSSVGRPSSDPGLSPTQPCPEGSGDCRKQCEPDYYLDEAGRCTACVSCSRDDLVEKTPCAWNSSRTCECRPGMICATSATNSCARCVPYPICAAETVTKPQDMAEKDTTFEAPPLGTQPDCNPTPENGEAPASTSPTQSLLVDSQASKTLPIPTSAPVALSSTGKPVLDAGPVLFWVILVLVVVVGSSAFLLCHRRACRKRIRQKLHLCYPVQTSQPKLELVDSRPRRSSTQLRSGASVTEPVAEERGLMSQPLMETCHSVGAAYLESLPLQDASPAGGPSSPRDLPEPRVSTEHTNNKIEKIYIMKADTVIVGTVKAELPEGRGLAGPAEPELEEELEADHTPHYPEQETEPPLGSCSDVMLSVEEEGKEDPLPTAASGK

SEQ ID NO: 32426 - protein, 23 aa, Homo sapiens
ITTVRALTGSTGRATNTQSSLLR

SEQ ID NO: 32427 - protein, 9 aa, Homo sapiens
MTPSKAYLV

SEQ ID NO: 32428 - protein, 9 aa, Homo sapiens
LFGITFVYA

SEQ ID NO: 32429 - protein, 9 aa, Homo sapiens
LIITAGFFM

SEQ ID NO: 32430 - protein, 36 aa, Homo sapiens
LFVCLFLPLGSAPALASRKPQHPFLQRGFLERRDAA

SEQ ID NO: 32431 - protein, 18 aa, Homo sapiens
KVTGLPAIIAAFLYLEKM

SEQ ID NO: 32432 - protein, 10 aa, Homo sapiens
KTIIFWVHLI

SEQ ID NO: 32433 - protein, 13 aa, Homo sapiens
MWADSRELRHFPR

SEQ ID NO: 32434 - protein, 12 aa, Homo sapiens
MLTSILFILQCL

SEQ ID NO: 32435 - protein, 41 aa, Homo sapiens
VPPRLMEMHLFLVLLGKIMVKSIIKPSYRNKKNIIRPGQPV

SEQ ID NO: 32436 - protein, 20 aa, Homo sapiens
MIALVFCVMIVQEILMHFQN

SEQ ID NO: 32437 - protein, 626 aa, Homo sapiens
LIRGLLENNLGEPIEEFMRPYDLQDPRIHTVLSGEVYTCMCFLIDMVNVSLELKDPKRKEGAGSLARFDFKKCKLLYESFSNQTKSINLVSHSMMAFDTRYAGQKTSPGMTNVFSCIFQPAKNSSTTQGSIQIELHFRSTKDSSCFTVVLNNLRVFLIFDWLLLVHDFLHTPSDIKKQNHVTPSRHRNSSSESAIVPKTVKSGVVTKRSSLPVSNERHLEVKVNVTGTEFVVIEDVSCFDTNAIILKGTTVLTYKPRFVDRPFSGSLFGIEVFSCRLGNEHDTALSIVDPVQIQMELVGNSSYQNSSGLMDAFNSEDFPPVLEIQLQALDIRLSYNDVQLFLAIAKSIPEQANAAVPDSVALESDSVGTYLPGASRVGEEIREGTRHTLDPVLELQLARLQELGFSMDDCRKALLACQGQLKKAASWLFKNAEPLKSLSLASTSRDSPGAVAAPLISGVEIKAESVCICFIDDCMDCDVPLAELTFSRLNFLQRVRTSPEGYAHFTLSGDYYNRALSGWEPFIEPWPCSVSWQQQAASRLHPPRLKLEAKAKPRLDINITSVLIDQYVSTKESWMADYCKDDKDIESAKSEDWMGSSVDPPCFGQSKSFHYMCLTKSLLTYKAMLH

SEQ ID NO: 32438 - protein, 21 aa, Homo sapiens
VDSVLAAVLLPLWVIQPKVSP

SEQ ID NO: 32439 - protein, 27 aa, Homo sapiens
MGPSVSSRPNSPQSWTAGSSGSSLKRL

SEQ ID NO: 32440 - protein, 12 aa, Homo sapiens
RPSAVPSRADVP

SEQ ID NO: 32441 - protein, 12 aa, Homo sapiens
IPAPSVERFCLT

SEQ ID NO: 32442 - protein, 32 aa, Homo sapiens
VNLIQKRLMMEKQERQETKRKIWPLSLEIWRT

SEQ ID NO: 32443 - protein, 11 aa, Homo sapiens
VLNLLGVMFLT

SEQ ID NO: 32444 - protein, 37 aa, Homo sapiens
ILSLLVSTWILHLLRVIYTKSYRGLCFVTLEEFFTET

SEQ ID NO: 32445 - protein, 31 aa, Homo sapiens
LLSLLQLDPKMSRMHFHHPFRRLNLVLHLPH

SEQ ID NO: 32446 - protein, 40 aa, Homo sapiens
ILPLYCAMMIALSRMCDYKHHWQAVGRSQPSRRMAAPICS

SEQ ID NO: 32447 - protein, 25 aa, Homo sapiens
MVLLLRQGVKNFPLLLCFHLKVLPG

SEQ ID NO: 32448 - protein, 24 aa, Homo sapiens
RMMILCLMWICLRMHLLKMWSVTI

SEQ ID NO: 32449 - protein, 17 aa, Homo sapiens
KILLRLVLQMWTFGLSP

SEQ ID NO: 32450 - protein, 21 aa, Homo sapiens
LLLLMLLLLLPPPPLLLLLLV

SEQ ID NO: 32451 - protein, 16 aa, Homo sapiens
IILCSLIPWMWTFTLF

SEQ ID NO: 32452 - protein, 421 aa, Homo sapiens
LPPVHKDNLCLPCGGFYEGGDSRLSLVCFLDAFKRGQLEDINCGNSPEPSSDGISPSCAAVAPSLEEIRNQKSVTVLLREEVSRLQEEVHLLRQMKEMLAKDLEESQGGKSSEVLSATELRVQLAQKEQELARAKEALQAMKADRKRLKGEKTDLVSQMQQLYATLESREEQLRDFIRNYEQHRKESEDAVKALAKEKDLLEREKWELRRQAKEATDHATALRSQLDLKDNRMKELEAELAMAKQSLATLTKDVPKRHSLAMPGETVLNGNQEWVVQADLPLTAAIRQSQQTLYHSHPPHPADRQAVRVSPCHSRQPSVISDASAAEGDRSSTPSDINSPRHRTHSLCNGDSPGPVQKNLHNPIVQSLEDLEDQKRKKKKEKMGFGSISRVFARGKQRKSLDPGLFDGTAPDYYIEEDADW

SEQ ID NO: 32453 - protein, 23 aa, Homo sapiens
MNKQTRLNPYNGMLADNKKKMNY

SEQ ID NO: 32454 - protein, 106 aa, Homo sapiens [sequence omitted]

SEQ ID NO: 32455 - protein, 13 aa, Homo sapiens
IWFMLLTVLMVFF

SEQ ID NO: 32456 - protein, 18 aa, Homo sapiens
LALALALALGSAQDLMFC

SEQ ID NO: 32457 - protein, 44 aa, Homo sapiens
MVHLTSLFCVTAKKKKKRRRKKTVGNVLFEMPCNGAFCNKIFYM

SEQ ID NO: 32458 - protein, 766 aa, Homo sapiens
ILASAVLEVTMAWSPPATLFLFLLLLGQPPPSRPQSLGTTKLRLVGPESKPEEGRLEVLHQGQWGTVCDDNFAIQEATVACRQLGFEAALTWAHSAKYGQGEGPIWLDNVRCVGTESSLDQCGSNGWGVSDCSHSEDVGVICHPRRHRGYLSETVSNALGPQGRRLEEVRLKPILASAKQHSPVTEGAVEVKYEGHWRQVCDQGWTMNNSRVVCGMLGFPSEVPVDSHYYRKVWDLKMRDPKSRLKSLTNKNSFWIHQVTCLGTEPHMANCQVQVAPARGKLRPACPGGMHAVVSCVAGPHFRPPKTKPQRKGSWAEEPRVRLRSGAQVGEGRVEVLMNRQWGTVCDHRWNLISASVVCRQLGFGSAREALFGARLGQGLGPIHLSEVRCRGYERTLSDCPALEGSQNGCQHENDAAVRCNVPNMGFQNQVRLAGGRIPEEGLLEVQVEVNGVPRWGSVCSENWGLTEAMVACRQLGLGFAIHAYKETWFWSGTPRAQEVVMSGVRCSGTELALQQCQRHGPVHCSHGGGRFLAGVSCMDSAPDLVMNAQLVQETAYLEDRPLSQLYCAHEENCLSKSADHMDWPYGYRRLLRFSTQIYNLGRTDFRPKTGRDSWVWHQCHRHYHSIEVFTHYDLLTLNGSKVAEGHKASFCLEDTNCPTGLQRRYACANFGEQGVTVGCWDTYRHDIDCQWVDITDVGPGNYIFQVIVNPHYEVAESDFSNNMLQCRCKYDGHRVWLHNCHTGNSYPANAELSLEQEQRLRNNLI

SEQ ID NO: 32459 - protein, 32 aa, Homo sapiens
KNNCFLPKAQKMAASKKMMTAVVFLKNDMVPY

SEQ ID NO: 32460 - protein, 39 aa, Homo sapiens
LNLICLYYWSSLVLMKARDILSHWKRSLFEFQEKQLLDM

SEQ ID NO: 32461 - protein, 12 aa, Homo sapiens
RKKIINYEVKIN

SEQ ID NO: 32462 - protein, 38 aa, Homo sapiens
LRLLFAWVEFYLLVQSLLKCISSSRLSGHIRSIMSMAS

SEQ ID NO: 32463 - protein, 19 aa, Homo sapiens
IYLHFMIFQFMQIRMCFTW

SEQ ID NO: 32464 - protein, 19 aa, Homo sapiens
RQKHFFPLAYIPCLCTILL

SEQ ID NO: 32465 - protein, 40 aa, Homo sapiens
MFFSLGFLLLFSPPSHLPFSPTPPPKKATSSFRGTIIFFN

SEQ ID NO: 32466 - protein, 12 aa, Homo sapiens
RKHRQRPHPASR

SEQ ID NO: 32467 - protein, 23 aa, Homo sapiens
KWSSQTTCVMWCLHSLTVMAMAN

SEQ ID NO: 32468 - protein, 10 aa, Homo sapiens
MGLLLMSLYG

SEQ ID NO: 32469 - protein, 8 aa, Homo sapiens
RLWFCIFL

SEQ ID NO: 32470 - protein, 18 aa, Homo sapiens
MRSSASGFIILTLCGQIV

SEQ ID NO: 32471 - protein, 15 aa, Homo sapiens
IYTSLKLLPLVGKWK

SEQ ID NO: 32472 - protein, 11 aa, Homo sapiens
KIPDQRSSLMY

SEQ ID NO: 32473 - protein, 15 aa, Homo sapiens
LVWLLELFLLALHYC

SEQ ID NO: 32474 - protein, 16 aa, Homo sapiens
MLKFKIFIGHLAVMMS

SEQ ID NO: 32475 - protein, 34 aa, Homo sapiens
ITLLHVAFLLLGFCFCSELSCYLFRADVTCRWRV

SEQ ID NO: 32476 - protein, 104 aa, Homo sapiens
LRGLLLAAAFVLANVRGGSPPSRLARGRPGIRDQAGPAAFGADPAAGVLRRRSGYARSTHGLPALACSAQENRARLHFGQWWTGKLVPACSGPRHRASCSYPVA

SEQ ID NO: 32477 - protein, 16 aa, Homo sapiens
LILMWLLLFWKRLVRR

SEQ ID NO: 32478 - protein, 14 aa, Homo sapiens
LLPGLHSIRVLREV

SEQ ID NO: 32479 - protein, 10 aa, Homo sapiens
IFVPVRTSGS

SEQ ID NO: 32480 - protein, 16 aa, Homo sapiens
KTFLYLAMLSYVMMMK

SEQ ID NO: 32481 - protein, 15 aa, Homo sapiens
MFLCLSCLWFYQVWS

SEQ ID NO: 32482 - protein, 38 aa, Homo sapiens
LGLSLTMPTVEELYRNYGILADATEQVGQTHPSPPTQK

SEQ ID NO: 32483 - protein, 12 aa, Homo sapiens
LNTFWMFLTWTM

SEQ ID NO: 32484 - protein, 11 aa, Homo sapiens
IFKMMLGLFMV

SEQ ID NO: 32485 - protein, 39 aa, Homo sapiens
LRGPHLSWGLLLITLWTVPIPAPLPCTPAITELLVRTLE

SEQ ID NO: 32486 - protein, 23 aa, Homo sapiens
KVMLFKAMVIILSSNSILKILKL

SEQ ID NO: 32487 - protein, 21 aa, Homo sapiens
LVISWACTMLLMRAVSWPLGS

SEQ ID NO: 32488 - protein, 16 aa, Homo sapiens
RPLGWWTYLVGTLSLR

SEQ ID NO: 32489 - protein, 51 aa, Homo sapiens
VSLTLWFMSCWLPWLSTRCLFHSDRRQMFSKCTKSSPLLMFCISNLKGTTI

SEQ ID NO: 32490 - protein, 9 aa, Homo sapiens
MSAWLFLLF

SEQ ID NO: 32491 - protein, 8 aa, Homo sapiens
MLPLILIF

SEQ ID NO: 32492 - protein, 16 aa, Homo sapiens
LRRPWLGGSPAAPPRR

SEQ ID NO: 32493 - protein, 34 aa, Homo sapiens
VTRLLMAIVKKSTSASCSSSFSLVMTLTLDTWRL

SEQ ID NO: 32494 - protein, 19 aa, Homo sapiens
VSHLGLLHLRLGLVRLLSV

SEQ ID NO: 32495 - protein, 34 aa, Homo sapiens
VSHLGLLHLRLGLHLALCMEEEHQEVPCLEKQAE

SEQ ID NO: 32496 - protein, 33 aa, Homo sapiens
MYWAGLTVAVEMLLGPVVTMQIVPRVAQKREFI

SEQ ID NO: 32497 - protein, 12 aa, Homo sapiens
LGGFWLSLLYWP

SEQ ID NO: 32498 - protein, 15 aa, Homo sapiens
VHGPMIAIRAILCWL

SEQ ID NO: 32499 - protein, 19 aa, Homo sapiens
IIKMTMVFTAGMAQAAMWK

SEQ ID NO: 32500 - protein, 20 aa, Homo sapiens
MKVLITFVYWNKMRFFGLSC

SEQ ID NO: 32501 - protein, 7 aa, Homo sapiens
LVFIMWV

SEQ ID NO: 32502 - protein, 20 aa, Homo sapiens
MLTHQLFILDLEKVLQKMLS

SEQ ID NO: 32503 - protein, 14 aa, Homo sapiens
KGITHLCWSSVMIL

SEQ ID NO: 32504 - protein, 107 aa, Homo sapiens
VVPHARFALGLATGNLKRHLRIHSGEKPYVCIHCQRQFADPGALQRHVRIHTGEKPCQCVMCGKAFTQASSLIAHVRQHTGEKPYVCERCGKRSCPLPHTHWPDTPQ

SEQ ID NO: 32505 - protein, 18 aa, Homo sapiens
IFQLLLYMLHLWFLKMWD

SEQ ID NO: 32506 - protein, 43 aa, Homo sapiens
KCVKRSRMELCTSWQKELLGHLKAKIDLQSAICMQILNVSQLY

SEQ ID NO: 32507 - protein, 15 aa, Homo sapiens
RMTSVVWAMMTWIMV

SEQ ID NO: 32508 - protein, 33 aa, Homo sapiens
LPWRWPATSRLLQPMPEQDLLLLSLKSQCFVGS

SEQ ID NO: 32509 - protein, 15 aa, Homo sapiens
LCSQFLRCLLFATAS

SEQ ID NO: 32510 - protein, 7 aa, Homo sapiens
MTTGLAG

SEQ ID NO: 32511 - protein, 12 aa, Homo sapiens
VCLLGRLYWAAL

SEQ ID NO: 32512 - protein, 56 aa, Homo sapiens
IHLTAPLLLALEMRWLGALLEKSLTSSRNGASTPISAQSNCYQNDLVEAHGLWTWS

SEQ ID NO: 32513 - protein, 19 aa, Homo sapiens
MIVFLSRALVWLSCSSNWL

SEQ ID NO: 32514 - protein, 55 aa, Homo sapiens
MIVFLSRALVWLSCSSNWEFKMSSASFVQSSQKIRFSSILQVSRDLVMLVEPWNL

SEQ ID NO: 32515 - protein, 11 aa, Homo sapiens
TNSFIPLKNAG

SEQ ID NO: 32516 - protein, 26 aa, Homo sapiens
TTRLQKMNRKRCRRFLELFRILQNQS

SEQ ID NO: 32517 - protein, 258 aa, Homo sapiens
MSGCELSPLGLRVGLSAGPAHGRRFPAPSGPWRGLNLASRQGAGPKPRDSRPYKAAAVGAWHARPEACAHTLSCPALARLGRARRRPWMSHRTSSTFRAERSFHSSSSSSSSSTSSSASRALPAQDPPMEKALSMFSDDFGSFMRPHSEPLAFPARPGGAGNIKTLGDAYEFAVDVRDFSPEDIIVTTSNNHIEVRAEKLAADGTVMNTFAHKCQLPEDVDPTSVTSALREDGSLTIRARRHPHTEHVQQTFRTEIKI

SEQ ID NO: 32518 - protein, 9 aa, Homo sapiens
LMGLFVFLY

SEQ ID NO: 32519 - protein, 25 aa, Homo sapiens
VAGILRLCSQKMVKFYHVDPTPLAS

SEQ ID NO: 32520 - protein, 11 aa, Homo sapiens
IKILGVIALFV

SEQ ID NO: 32521 - protein, 9 aa, Homo sapiens
IILLSFWPI

SEQ ID NO: 32522 - protein, 21 aa, Homo sapiens
IQVFLMTVCLYLTEQLVAIYH

SEQ ID NO: 32523 - protein, 35 aa, Homo sapiens
LQEIHGRSEKDLFLQGVKLEDHLEICAHIFSWGRT

SEQ ID NO: 32524 - protein, 15 aa, Homo sapiens
LLSLTTSRTPGGHKP

SEQ ID NO: 32525 - protein, 97 aa, Homo sapiens
LGFIIAFENVVFFFLCPNDRLVPDVPALATKITARALPGQAGGGRQPGDAVSVSKLRIWAVSQGRSGSWMRGLEFPGDLQTCTATLPCSCLLASVQC

SEQ ID NO: 32526 - protein, 262 aa, Homo sapiens
VKVVIHFAWFLHGLSAACDPGGHPALYLGVPLCDTCATWNISGICPMAKLSCLFDHPGTVFFSIFMSFWGHGLPGALEAGSATLAHHWDCSDFQDQEAMPSSAPHHWDCSDFQDQEVMPSSALHHWDCSDFQDQEVMPSSALQATTPLPRFAALALQMTQNPVTGLKEPYFLCVVMIFLVSVIIYHGIISIAISLSFSVCQFLFFSLLHGILQRQVCGIPRSCGPGGCHIQVTQQLIIIMVGKQLLNHMEEFVGGNHHGACL

SEQ ID NO: 32527 - protein, 21 aa, Homo sapiens
KFSTNVQTKWLEIQLLLTCLL

SEQ ID NO: 32528 - protein, 28 aa, Homo sapiens
IGWKLSTCLAWGLWKSAVNLYSLSPPGR

SEQ ID NO: 32529 - protein, 16 aa, Homo sapiens
KGLILNQVRMMMMILL

SEQ ID NO: 32530 - protein, 49 aa, Homo sapiens
IMLFCLWAMALTQPLGWITGLLKTAGAPAGVRMATSGSAEELMSVQLRA

SEQ ID NO: 32531 - protein, 15 aa, Homo sapiens
MVLCLSGLAWVTPSL

SEQ ID NO: 32532 - protein, 154 aa, Homo sapiens
LSDMAPHNPHTLLFEILSLLVEMLALPEAVLEEITNYYQKKLKEGTCKAQEMEAAVGRLRLQKLPYNPQQEESSEVPERKVLSILSRLKQQNYAPNLQSPYAQVPCILLCPQLDKKMVRRQPSNHYALDQCTPPGLDPDIRSPFFQSGSQGNRV

SEQ ID NO: 32533 - protein, 25 aa, Homo sapiens
LPPPYHQALPGYGDRTDDLSGDRIC

SEQ ID NO: 32534 - protein, 16 aa, Homo sapiens
LRQFVILQLRCLLAWQ

SEQ ID NO: 32535 - protein, 15 aa, Homo sapiens
TFMSTNMILSWMYLL

SEQ ID NO: 32536 - protein, 19 aa, Homo sapiens
MKASQSSLNKSPAGFVALG

SEQ ID NO: 32537 - protein, 16 aa, Homo sapiens
LGRRRTQRRPEQDGTR

SEQ ID NO: 32538 - protein, 36 aa, Homo sapiens
KLPFSVVLMFLSAGPIVPLLRNVSPVQGQRLKRLLY

SEQ ID NO: 32539 - protein, 22 aa, Homo sapiens
LFLGSLGMSACLRLLLVGWKER

SEQ ID NO: 32540 - protein, 26 aa, Homo sapiens
RLTLMCLDPVWTLMLLIWILRDQKES

SEQ ID NO: 32541 - protein, 10 aa, Homo sapiens
ITFTMFGLLI

SEQ ID NO: 32542 - protein, 22 aa, Homo sapiens
VSLGVMAASLGLTPSVLSGVTC

SEQ ID NO: 32543 - protein, 13 aa, Homo sapiens
LLIHLVALTLLTF

SEQ ID NO: 32544 - protein, 52 aa, Homo sapiens
MSLRRKGPKVPLKENTHITKILEYINVLFVELHCLSQKPNLTPVQVGLHSTM

SEQ ID NO: 32545 - protein, 31 aa, Homo sapiens
LCFLCLYFMMSALWWLRNKDLMLLRKIVSSG

SEQ ID NO: 32546 - protein, 70 aa, Homo sapiens
LDRGRREGGCAPGAVPAPPPVIPPAWPARVGGAGGPGRHAGGAQRGSLCLSPCDPKSAGKMRLLLRPGGT

SEQ ID NO: 32547 - protein, 8 aa, Homo sapiens
ITLLIFGI

SEQ ID NO: 32548 - protein, 22 aa, Homo sapiens
ILLAFYDLLDDLWLYILLGTPL

SEQ ID NO: 32549 - protein, 31 aa, Homo sapiens
KRGRSCCVVGALLLTVVTSSSPLCLEMCRMA

SEQ ID NO: 32550 - protein, 7 aa, Homo sapiens
VIMCFFI

SEQ ID NO: 32551 - protein, 15 aa, Homo sapiens
LLQVLSLLFLPWALV

SEQ ID NO: 32552 - protein, 15 aa, Homo sapiens
MLEGAGVRTDHRFPG

SEQ ID NO: 32553 - protein, 89 aa, Homo sapiens
IYVNPKTTSTVLISPASKFEIWRQGQYFLRLPNLAFQTRRRMRRREVETWTSAQDVLSAISSHRHFSASGQSGLRWSSQWETNLFQTSG

SEQ ID NO: 32554 - protein, 20 aa, Homo sapiens
LICQGFKMMKLVMALPLLPF

SEQ ID NO: 32555 - protein, 9 aa, Homo sapiens
MAPFLWWKT

SEQ ID NO: 32556 - protein, 24 aa, Homo sapiens
MPGAANGDASSASPGSARFLPKKS

SEQ ID NO: 32557 - protein, 11 aa, Homo sapiens
LIAVILATMQV

SEQ ID NO: 32558 - protein, 144 aa, Homo sapiens [sequence omitted]

SEQ ID NO: 32559 - protein, 16 aa, Homo sapiens
MVAFATLTVFSFLIEV

SEQ ID NO: 32560 - protein, 13 aa, Homo sapiens
LWLEVLQLLGLLL

SEQ ID NO: 32561 - protein, 37 aa, Homo sapiens
ISLKLVMSVLCVCQYSAISAPFVLRARQPLKFLCLQC

SEQ ID NO: 32562 - protein, 187 aa, Homo sapiens
IVEGKVNKGIYLKEEKGVTLLYYGRYNSSCISKPEQCGPEGVTFSFFWKTQGEQSRPIPSAYGGQVISNGFKVCSSGGRGSVELYTRDNSMTWEASFSPPGPYWTHVLFTWKSKEGLKVYVNGTLSTSDPSGKVSRDYGESNVNLVIGSEQDQAKCYENGAFDEFIIWERALTPDEIAMYFTAAIGQ

SEQ ID NO: 32563 - protein, 16 aa, Homo sapiens
MLPLNFSLLYLGIAIL

SEQ ID NO: 32564 - protein, 30 aa, Homo sapiens
LSPLSSLSATPLVLCRSWWCRKAGGCRSTQ

SEQ ID NO: 32565 - protein, 12 aa, Homo sapiens
LVISVTWKMKEL

SEQ ID NO: 32566 - protein, 12 aa, Homo sapiens
RCNPKFLLRCEV

SEQ ID NO: 32567 - protein, 37 aa, Homo sapiens
ITWILSHQLLVMMWVKEQHQMLSIHILERELHYILEI

SEQ ID NO: 32568 - protein, 233 aa, Homo sapiens
LEGGRQPRRGPGGGLGAGQGAAPAGGLGAGGGVTRTAVLSDTTPACLFVAMRAAYLFLLFLPAGLLAQGQYDLDPLPPFPDHVQYTHYSDQIDNPDYYDYQEVTPRPSEEQFQFQSQQQVQQEVIPAPTPEPGNAELEPTEPGPLDCREEQYPCTRLYSIHRPCKQCLNEVCFYSLRRVYVINKEICVRTVCAHEELLRADLCRDKFSKCGVMASSGLCQSVAASCARSCGSC

SEQ ID NO: 32569 - protein, 29 aa, Homo sapiens
LCLTFKMWLSCVPLCPGALFEFTCWLLEG

SEQ ID NO: 32570 - protein, 109 aa, Homo sapiens [sequence omitted]

SEQ ID NO: 32571 - protein, 31 aa, Homo sapiens
MCEFFSVSIWMCPVLSCVFSALSMVSFSENE

SEQ ID NO: 32572 - protein, 40 aa, Homo sapiens
VACAVSTRSHKASACHVRTVGPWKERSRNWPRKPICPLCL

SEQ ID NO: 32573 - protein, 21 aa, Homo sapiens
ILKTLMGLIVKLYKWMWLCLR

SEQ ID NO: 32574 - protein, 19 aa, Homo sapiens
VVFIVAAMPLDLFLILKIL

SEQ ID NO: 32575 - protein, 36 aa, Homo sapiens
TPSLAFLLSLISLFQRRPNLKSFPGSGSVHLIRQPK

SEQ ID NO: 32576 - protein, 11 aa, Homo sapiens
MNFIIGLFSFI

SEQ ID NO: 32577 - protein, 290 aa, Homo sapiens
TESPHHCLCWIAALPFLMKKTQTWILTCIYLQLLLFNPLVKTEGICRNRVTNNVKDVTKLVANLPKDYMITLKYVPGMDVLPSHCWISEMVVQLSDSLTDLLDKFSNISEGLSNYSIIDKLVNIVDDLVECVKENSSKDLKKSFKSPEPRLFTPEEFFRIFNRSIDAFKDFVVASETSDCVVSSTLSPEKDSRVSVTKPFMLPPVAASSLRNDSSSSNRKAKNPPGDSSLHWAAMALPALFSLIIGFAFGALYWKKRQPSLTRAVENIQINEEDNEISMLQEKEREFQEV

SEQ ID NO: 32578 - protein, 31 aa, Homo sapiens
MGAVLRSLLACSFCVLLRGSCTGQTGEKCQR

SEQ ID NO: 32579 - protein, 15 aa, Homo sapiens
IPWLPAYSWLLSTCW

SEQ ID NO: 32580 - protein, 11 aa, Homo sapiens
IIFIFTTSCFF

SEQ ID NO: 32581 - protein, 33 aa, Homo sapiens
MSQLLFLTVLRMLKMPTLDCLKEIADRQYGGAT

SEQ ID NO: 32582 - protein, 1041 aa, Homo sapiens
LMSLSTFAQMTQLMKAAKSGTKDGLEKTRMAVMRKVSFLHRKDVLGDSEEEDMGLLEVSVSDIKPPAPELGPMPEGLSPQQVVRRHILGSIVQSEGSYVESLKRILQDYRNPLMEMEPKALSARKCQVVFFRVKEILHCHSMFQIALSSRVAEWDSTEKIGDLFVASFSKSMVLDVYSDYVNNFTSAMSIIKKACLTKPAFLEFLKRRQVCSPDRVTLYGLMVKPIQRFPQFILLLQDMLKNTPRGHPDRLSLQLALTELETLAEKLNEQKRLADQVAEIQQLTKSVSDRSSLNKLLTSGQRQLLLCETLTETVYGDRGQLIKSKERRVFLLNDMLVCANINFKGQLEISSLVPLGPKYVVKWNTALPQVQVVEVGQDGGTYDKDNVLIQHSGAKKASASGQAQNKVYLGPPRLFQELQDLQKDLAVVEQITLLISTLHGTYQNLNMTVAQDWCLALQRLMRVKEEEIHSANKCRLRLLLPGKPDKSGRPISFMVVFITPNPLSKISWVNRLHLAKIGLREENQPGWLCPDEDKKSKAPFWCPILACCIPAFSSRALSLQLGALVHSPVNCPLLGFSAVSTSLPQGYLWVGGGQEGAGGQVEIFSLNRPSPRTVKSFPLAAPVLCMEYIPELEEEAESRDESPTVADPSATVHPTICLGLQDGSILLYSSVDTGTQCLVSCRSPGLQPVLCLRHSPFHLLAGLQDGTLAAYPRTSGGVLWDLESPPVCLTVGPGPVRTLLSLEDAVWASCGPRVTVLEATTLQPQQSFEAHQDEAVSVTHMVKAGSGVWMAFSSGTSIRLFHTETLEHLQEINIATRTTFLLPGQKHLCVTSLLICQGLLWVGTDQGVIVLLPVPRLEGIPKITGKGMVSLNGHCGPVAFLAVATSILAPDILRSDQEEAEGPRAEEDKPDGQAHEPMPDSHVGRELTRKKGILLQYRLRSTAHLPGPLLSMREPAPADGAALEHSEEDGSIYEMADDPDIWVRSRPCARDAHRKEICSVAIISGGQGYRNFGSALGSSGRQAPCGETDSTLLIWQVPLML

SEQ ID NO: 32583 - protein, 10 aa, Homo sapiens
VAVLLLLSTS

SEQ ID NO: 32584 - protein, 38 aa, Homo sapiens
MRSPLSASALLLWSSSVARAFSSPSLLMAVPSPTCSRY

SEQ ID NO: 32585 - protein, 66 aa, Homo sapiens
IYSTKMILRNFLLVCMKLDMEVLEQFILLQMLTPVRWWQLRRCPIVGSRPMRNGKIFLRKLNFYDN

SEQ ID NO: 32586 - protein, 22 aa, Homo sapiens
MHFRTSLSGSLVLCCVMPPLWH

SEQ ID NO: 32587 - protein, 32 aa, Homo sapiens
TMHLQILYSLMLLGTVLWTNLKSKGQAENRKV

SEQ ID NO: 32588 - protein, 21 aa, Homo sapiens
ILLQCRARFLLLLVLSQTQDL

SEQ ID NO: 32589 - protein, 76 aa, Homo sapiens
LLLLLLNFYFNQRLSEPVGLGPQLLKRFSVSSRAGKHPPSWVSSVQGRGRHWTMWYGSFVGSVEAGPGLFPKVVGG

SEQ ID NO: 32590 - protein, 15 aa, Homo sapiens
RCALTAAGRILPGHQ

SEQ ID NO: 32591 - protein, 54 aa, Homo sapiens
TLLLEPKLTKKNKSTPDLDSGHLLKPSFRVDIPTSRTVRILKTTQQKVKKWKIV

SEQ ID NO: 32592 - protein, 19 aa, Homo sapiens
MPRVAKLGFLVVLELARLY

SEQ ID NO: 32593 - protein, 21 aa, Homo sapiens
ISFHTLVICLLVRSMKIHLAP

SEQ ID NO: 32594 - protein, 28 aa, Homo sapiens
RIITGSIVCLHSVLTWSVRVYQQKQDSD

SEQ ID NO: 32595 - protein, 25 aa, Homo sapiens
IFQWTVLALVDISCTWPAPFLQRIC

SEQ ID NO: 32596 - protein, 17 aa, Homo sapiens
MKMKWGLGAFILLMAQN

SEQ ID NO: 32597 - protein, 21 aa, Homo sapiens
MWRPWEVLLWKLLLQGWLAWR

SEQ ID NO: 32598 - protein, 8 aa, Homo sapiens
KKNIIEEN

SEQ ID NO: 32599 - protein, 17 aa, Homo sapiens
TSLGPGALLILLRFLLF

SEQ ID NO: 32600 - protein, 35 aa, Homo sapiens
IWWPSGWAAHWVLVSTSWLELWPVRMQALPLSSPS

SEQ ID NO: 32601 - protein, 21 aa, Homo sapiens
VCRMFPYMSERLTEQRNWCLE

SEQ ID NO: 32602 - protein, 191 aa, Homo sapiens
MSRPPPPRVASVLGTMEMGRRMDAPASAAAVRAFLERGHTELDTAFMYSDGQSETILGGLGLGLGGGDCRVKIATKANPWDGKSLKPDSVRSQLETSLKRLQCPQVDLFYLHAPDHGTPVEETLHACQRLHQEGKFVELGLSNYASWEVAEICTLCKSNGWILPTVYQVRAGAAEAKVSRTPANPGLSLPP

SEQ ID NO: 32603 - protein, 13 aa, Homo sapiens
MLTLLLWVVLILM

SEQ ID NO: 32604 - protein, 13 aa, Homo sapiens
LLLLAVFLMQLQG

SEQ ID NO: 32605 - protein, 29 aa, Homo sapiens
MGVIRMYFLIILVWEQIERDAWKTQKTLE

SEQ ID NO: 32606 - protein, 70 aa, Homo sapiens
RGPKPARTSWATSSACVKLAGGAGSATKMSTNAARRTGAASRSATTSRVASTVPATAASSSPLMAGPAKT

SEQ ID NO: 32607 - protein, 24 aa, Homo sapiens
MPWLHLLMIWISGFTSEMNLCVVD

SEQ ID NO: 32608 - protein, 33 aa, Homo sapiens
ICLFLTGLMLHKFAATGTRYFTCLTCGDVLNLN

SEQ ID NO: 32609 - protein, 16 aa, Homo sapiens
MSLQQVSFVWLISVTA

SEQ ID NO: 32610 - protein, 19 aa, Homo sapiens
MILTMEILIMIMFMNCHWK

SEQ ID NO: 32611 - protein, 13 aa, Homo sapiens
LVLTSLMFAGMPL

SEQ ID NO: 32612 - protein, 9 aa, Homo sapiens
LCWLWLWQM

SEQ ID NO: 32613 - protein, 14 aa, Homo sapiens
MVLLLLLFVNSNEP

SEQ ID NO: 32614 - protein, 27 aa, Homo sapiens
KSGWRNSVSWGLVDWCWLCPLPLGLGQ

SEQ ID NO: 32615 - protein, 44 aa, Homo sapiens
LEARVGNMSESELGRKWDRCLADAVVKIGREMESQVKEFAHGHS

SEQ ID NO: 32616 - protein, 60 aa, Homo sapiens
LEARVGNMSESELGRKWDRCLADAVVKIEMGFHHVAQAGLELRVQTIHLPWPPNVPGLQA

SEQ ID NO: 32617 - protein, 46 aa, Homo sapiens
LEARVGNMSESELGRKWDRCLADAVVKIVETGFHRVSQDGLDLLTS

SEQ ID NO: 32618 - protein, 31 aa, Homo sapiens
LEARVGNMSESELGRKWDRCLADAVVKIESW

SEQ ID NO: 32619 - protein, 69 aa, Homo sapiens
LEARVGNMSESELGRKWDRCLADAVVKIGRMWPLAFGSGMGLGMAYSNCQHDFQAPYLLHGKYVKEQEQ

SEQ ID NO: 32620 - protein, 35 aa, Homo sapiens
LEARVGNMSESELGRKWDRCLADAVVKIGLWRPRA

SEQ ID NO: 32621 - protein, 250 aa, Homo sapiens
LNRVACRSGRDEVHRRTGDSWCRDAAGWGAPLSGQVCNARCPQKGHIHLCHPEAWHGLTAQARALEATGMMLRVLVGAVLPAMLLAAPPPINKLALFPDKSAWCEAKNITQIVGHSGCEAKSIQNRACLGQCFSYSVPNTFPQSTESLVHCDSCMPAQSMWEIVTLECPGHEEVPRVDKLVEKILHCSCQACGKEPSHEGLSVYVQGEDGPGSQPGTHPHPHPHPHPGGQTPEPEDPPGAPHTEEEGAED

SEQ ID NO: 32622 - protein, 669 aa, Homo sapiens
IVFYFRTSEMGLQTTKWPSHGAFFLKSWLIISLGLYSQVSKLLACPSVCRCDRNFVYCNERSLTSVPLGIPEGVTVLYLHNNQINNAGFPAELHNVQSVHTVYLYGNQLDEFPMNLPKNVRVLHLQENNIQTISRAALAQLLKLEELHLDDNSISTVGVEDGAFREAISLKLLFLSKNHLSSVPVGLPVDLQELRVDENRIAVISDMAFQNLTSLERLIVDGNLLTNKGIAEGTFSHLTKLKEFSIVRNSLSHPPPDLPGTHLIRLYLQDNQINHIPLTAFSNLRKLERLDISNNQLRMLTQGVFDNLSNLKQLTARNNPWFCDCSIKWVTEWLKYIPSSLNVRGFMCQGPEQVRGMAVRELNMNLLSCPTTTPGLPLFTPAPSTASPTTQPPTLSIPNPSRSYTPPTPTTSKLPTIPDWDGRERVTPPISERIQLSIHFVNDTSIQVSWLSLFTVMAYKLTWVKMGHSLVGGIVQERIVSGEKQHLSLVNLEPRSTYRICLVPLDAFNYRAVEDTICSEATTHASYLNNGSNTASSHEQTTSHSMGSPFLLAGLIGGAVIFVLVVLLSVFCWHMHKKGRYTSQKWKYNRGRRKDDYCEAGTKKDNSILEMTETSFQIVSLNNDQLLKGDFRLQPIYTPNGGINYTDCHIPNNMRYCNSSVPDLEHCHT

SEQ ID NO: 32623 - protein, 254 aa, Homo sapiens
LFGGSHPDVGAAPPRRAPARGRRQRAAQPSRASRGRPPPCRPPRRASWGARARDPRTQLRRTGGRARALEATGMMLRVLVGAVLPAMLLAAPPPINKLALFPDKSAWCEAKNITQIVGHSGCEAKSIQNRACLGQCFSYSVPNTFPQSTESLVHCDSCMPAQSMWEIVTLECPGHEEVPRVDKLVEKILHCSCQACGKEPSHEGLSVYVQGEDGPGSQPGTHPHPHPHPHPGGQTPEPEDPPGAPHTEEEGAED

SEQ ID NO: 32624 - protein, 20 aa, Homo sapiens
VIFRWVLQFVMKWTLSSLAG

SEQ ID NO: 32625 - protein, 230 aa, Homo sapiens
LPWRGRRLAGIKGESHTSRLSEALAPQAGRHQPVTRGTPGKQRALEATGMMLRVLVGAVLPAMLLAAPPPINKLALFPDKSAWCEAKNITQIVGHSGCEAKSIQNRACLGQCFSYSVPNTFPQSTESLVHCDSCMPAQSMWEIVTLECPGHEEVPRVDKLVEKILHCSCQACGKEPSHEGLSVYVQGEDGPGSQPGTHPHPHPHPHPGGQTPEPEDPPGAPHTEEEGAED

SEQ ID NO: 32626 - protein, 43 aa, Homo sapiens
LKTSIPLLSLLEMLVPRTVPQVLGPPESCQSRPPSPLSQGCSL

SEQ ID NO: 32627 - protein, 18 aa, Homo sapiens
IPVHFMLWLCRAQCFSFV

SEQ ID NO: 32628 - protein, 13 aa, Homo sapiens
IQLVFFIFVHVEY

SEQ ID NO: 32629 - protein, 31 aa, Homo sapiens
LISWAICIFLQRTIQNLSSLSSDRERPTAVS

SEQ ID NO: 32630 - protein, 15 aa, Homo sapiens
LWPVKLWLSWLSPLL

SEQ ID NO: 32631 - protein, 47 aa, Homo sapiens
VLYKIMNMCIWSCHKSFTNIVQKNGRKRPARYDNTKSLGVSTNLGLL

SEQ ID NO: 32632 - protein, 27 aa, Homo sapiens
TSPSLTAMLGPEHPWARASCSPTAKIG

SEQ ID NO: 32633 - protein, 15 aa, Homo sapiens
KKSHTCFLWGMILIW

SEQ ID NO: 32634 - protein, 57 aa, Homo sapiens
LAKSMKRESTLKFITSLLPTMKSTTCIWYQAGRQMRREEEEEEEKALGSSAKIKIKK

SEQ ID NO: 32635 - protein, 25 aa, Homo sapiens
LESLSRQRECWRMLVLWALLSSSGL

SEQ ID NO: 32636 - protein, 115 aa, Homo sapiens
LVTNDAGTIRYPGPLIKVNDIIQIDLDTGKSTDVIKFDTGNLWMVTGGANLGRIGVITNRERHPGSFDVVHVKDANSNSFATWLSSIFVIGKGNKTQGKGIHLTTAEETDKRLAA

SEQ ID NO: 32637 - protein, 15 aa, Homo sapiens
ICWEFLGLTALGSLF

SEQ ID NO: 32638 - protein, 8 aa, Homo sapiens
IIFPVLVL

SEQ ID NO: 32639 - protein, 11 aa, Homo sapiens
MDQSEYMIKKG

SEQ ID NO: 32640 - protein, 12 aa, Homo sapiens
LHVDLMLLITWV

SEQ ID NO: 32641 - protein, 274 aa, Homo sapiens
MCGSQRPSPLSASYPCTLRQYLCVNTPSPRLAAMMLLQLLEGVDHLVQQGIAHRDLKSDNILVELDPDGCPWLVIADFGCCLADESIGLQLPFSSWYVDRGGNGCLMAPEVSTARPGPRAVIDYSKADAWAVGAIAYEIFGLVNPFYGQGKAHLESRSYQEAQLPALPESVPPDVRQLVRALLQREASKRPSARVAANVLHLSLWGEHILALKNLKLDKMVGWLLQQSAATLLANRLTEKCCVETKMKMLFLANLECETLCQAALLLCSWRAAL

SEQ ID NO: 32642 - protein, 80 aa, Homo sapiens
IKMVLLMDMLTVWMEKLLSSVIVMIQKHKAVLFKMGRKKMQLIPYYSSIKCNPLKKNYMSLLLLKQHKSAGENTYFLVIN

SEQ ID NO: 32643 - protein, 132 aa, Homo sapiens [sequence omitted]

SEQ ID NO: 32644 - protein, 8 aa, Homo sapiens
LMILGVLL

SEQ ID NO: 32645 - protein, 9 aa, Homo sapiens
IMIFLMEMI

SEQ ID NO: 32646 - protein, 25 aa, Homo sapiens
VAEAAPAMLAGRRSSLRPGAGWRHP

SEQ ID NO: 32647 - protein, 13 aa, Homo sapiens
LLNFYLSFLALNM

SEQ ID NO: 32648 - protein, 16 aa, Homo sapiens
LATALQDRSPRLSCMP

SEQ ID NO: 32649 - protein, 438 aa, Homo sapiens
VPSELRASPSRPSRRSAGRGQCQGPSRPLIGWCGRAERLRGRRLYVGSFPVDDLDTQESVWLVQQQLWALKDCPRRRAVILKFSLQGLKIYSGEGEVLLMAHALRRILYSTWCPADCQFAFMARNPRSPASKLFCHLFVGSQPGEVQILHLLLCRSFQLAYLLQHPEERAQPEPCPGPTGEVPLKPLSSSGGLVREPFGRDQLSQNVHALVSFRRLPAEGLVGSGKELPESEGRARHARLGNPYCSPTLVRKKAIRSKVIRSGAYRGCTYETQLQLSAREAFPAAWEAWPRGPGGHSCLVESEGSLTENIWAFAGISRPCALALLRRDVLGAFLLWPELGASGQWCLSVRTQCGVVPHQVFRNHLGRYCLEHLPAEFPSLEALVENHAVTERSLFCPLDMGRLNPTYEEQDCGPPGRPPRTLRPLSHAKSEAELQGLG

SEQ ID NO: 32650 - protein, 481 aa, Homo sapiens
VPSELRASPSRPSRRSAGRGQCQGPSRPLIGWCGRAERLRGRRLPPLPWSWKPGTLGAMQKAGAGGRRASDCGLAPHRPRCITKFAQYVGSFPVDDLDTQESVWLVQQQLWALKDCPRRRAVILKFSLQGLKIYSGEGEVLLMAHALRRILYSTWCPADCQFAFMARNPRSPASKLFCHLFVGSQPGEVQILHLLLCRSFQLAYLLQHPEERAQPEPCPGPTGEVPLKPLSSSGGLVREPFGRDQLSQNVHALVSFRRLPAEGLVGSGKELPESEGRARHARLGNPYCSPTLVRKKAIRSKVIRSGAYRGCTYETQLQLSAREAFPAAWEAWPRGPGGHSCLVESEGSLTENIWAFAGISRPCALALLRRDVLGAFLLWPELGASGQWCLSVRTQCGVVPHQVFRNHLGRYCLEHLPAEFPSLEALVENHAVTERSLFCPLDMGRLNPTYEEQDCGPPGRPPRTLRPLSHAKSEAELQGLG

SEQ ID NO: 32651 - protein, 78 aa, Homo sapiens
IGISVKLLLSVFLILGLPMKFSMTKGSSTNPRVWTVDLQVEKMKFIMFMIKPGEVVKIWPRVFIGPVKIWTRTCMVMT

SEQ ID NO: 32652 - protein, 22 aa, Homo sapiens
LWVFFPSFLSTALLISSKWLPF

SEQ ID NO: 32653 - protein, 12 aa, Homo sapiens
VLVLLMLVQYLN

SEQ ID NO: 32654 - protein, 22 aa, Homo sapiens
MSLYWIYLATFLLSLKLPLEED

SEQ ID NO: 32655 - protein, 18 aa, Homo sapiens
RFWLTVIIILNYKWTILA

SEQ ID NO: 32656 - protein, 18 aa, Homo sapiens
LSSGWLVLSGCLMSLFLS

SEQ ID NO: 32657 - protein, 1811 aa, Homo sapiens
VKKIHRHRLSPATEKGAASSGEGDKDPPPPAHEDIAVKGTATAAGTGPGTGAAAAAAAAVPPPHPAAAAAAAAAAAAAAAAAVPPPHPNIRALQTQAPQQIPRGPVQQPLEDRIFTPAVSAVYSTVTQVARQPGTPTPSPYSAHEINKGHPNLAATPPGHASSPGLSQTPYPSGQNAGPTTLVYPQTPQTMNSQPQTRSPFFQRPQIQPPRATIPNSSPSIRPGAQTPTAVYQANQHIMMVNHLPMPYPVPQGPQYCIPQYRHSGPPYVGPPQQYPVQPPGPGPFYPGPGPGDFPNAYGTPFYPSQPVYQSAPIIVPTQQQPPPAKREKKTIRIRDPNQGGKDITEEIMSGGGSRNPTPPIGRPTSTPTPPQLPSQVPEHSPVVYGTVESAHLAASTPVTAASDQKQEEKPKPDPVLKSPSPVLRLVLSGEKKEQEGQTSETTAIVSIAELPLPPSPTTVSSVARSTIAAPTSSALSSQPIFTTAIDDRCELSSPREDTIPIPSLTSCTETSDPLPTNENDDDICKKPCSVAPNDIPLVSSTNLINEINGVSEKLSATESIVEIVKQEVLPLTLELEILENPPEEMKLECIPAPITPSTVPSFPPTPPTPPASPPHTPVIVPAAATTVSSPSAAITVQRVLEEDESIRTCLSEDAKEIQNKIEVEADGQTEEILDSQNLNSRRSPVPAQIAITVPKTWKKPKDRTRTTEEMLEAELELKAEEELSIDKVLESEQDKMSQGFHPERDPSDLKKVKAVEENGEEAEPVRNGAESVSEGEGIDANSGSTDSSGDGVTFPFKPESWKPTDTEGKKQYDREFLLDFQFMPACIQKPEGLPPISDVVLDKINQPKLPMRTLDPRILPRGPDFTPAFADFGRQTPGGRGVPICKVQSRHGLPILEQSKAPTCPPLVMSHPPMKSLPLGLLNVGSRRSQPGQRREPRKIITVSVKEDVHLKKAENAWKPSQKRDSQADDPENIKTQELFRKVRSILNKLTPQMFNQLMKQVSGLTVDTEERLKGVIDLVFEKAIDEPSFSVAYANMCRCLVTLKVPMADKPGNTVNFRKLLLNRCQKEFEKDKADDDVFEKKQKELEAASAPEERTRLHDELEEAKDKARRRSIGNIKFIGELFKLKMLTEAIMHDCVVKLLKNHDEESLECLCRLLTTIGKDLDFEKAKPRMDQYFNQMEKIVKERKTSSRIRFMLQDVIDLRLCNWVSRRADQGPKTIEQIHKEAKIEEQEEQRKVQQLMTKEKRRPGVQRVDEGGWNTVQGAKNSRVLDPSKFLKITKPTIDEKIQLVPKAQLGSWGKGSSGGAKASETDALRSSASSLNRFSALQPPAPSGSTPSTPVEFDSRRTLTSRGSMGREKNDKPLPSATARPNTFMRGGSSKDLLDNQSQEEQRREMLETVKQLTGGVDVERNSTEAERNKTRESAKPEISAMSAHDKAALSEEELERKSKSIIDEFLHINDFKEAMQCVEELNAQGLLHVFVRVGVESTLERSQITRDHMGQLLYQLVQSEKLSKQDFFKGFSETLELADDMAIDIPHIWLYLAELVTPMLKEGGISMRELTIEFSKPLLPVGRAGVLLSEILHLLCKQMSHKKVGALWREADLSWKDFLPEGEDVHNFLLEQKLDFIESDSPCSSEALSKKELSAEELYKRLEKLIIEDKANDEQIFDWVEANLDEIQMSSPTFLRALMTAVCKAAIIADSSTFRVDTAVIKQRVPILLKYLDSDTEKELQALYALQASIVKLDQPANLLRMFFDCLYDEEVISEDAFYKWESSKDPAEQNGKGVALKSVTAFFTWLREAEEESEDN

SEQ ID NO: 32658 - protein, 330 aa, Homo sapiens
VFQGGLGQAKQARTRACAALPTPHPSAPRLLEPQGVFSLFPPPPGPWPNMILTKAQYDEIAQCLVSVPPTRQSLRKLKQRFPSQSQATLLSIFSQEYQKHIKRTHAKHHTSEAIESYYQRYLNGVVKNGAAPVLLDLANEVDYAPSLMARLILERFLQEHEETPPSKSIINSMLRDPSQIPDGVLANQVYQCIVNDCCYGPLVDCIKHAIGHEHEVLLRDLLLEKNLSFLDEDQLRAKGYDKTPDFILQVPVAVEGHIIHWIESKASFGDECSHHAYLHDQFWSYWNRFGPGLVIYWYGFIQELDCNRERGILLKACFPTNIVTLCHSIA

SEQ ID NO: 32659 - protein, 247 aa, Homo sapiens
MLKFLVWFLQWCVCVLVQPAKELLHCLKMQMRISKYTKCLQAQIAITVPKTWKKPKDRTRTTEEMLEAELELKAEEELSIDKVLESEQDKMSQGFHPERDPSDLKKVKAVEENGEEAEPVRNGAESVSEGEGIDANSGSTDSSGDGVTFPFKPESWKPTDTEGKKQYDREFLLDFQFMPACIQKPEGLPPISDVVLDKINQPKLPMRTLDPRILPRGPDFTPAFADFGRQTPGGRGVPVSASSLQLT

SEQ ID NO: 32660 - protein, 29 aa, Homo sapiens
IRLEEDPVLPGKWRLPLVPRSHRRPRIRR

SEQ ID NO: 32661 - protein, 19 aa, Homo sapiens
VDVGLGAGNLFFVLCFELL

SEQ ID NO: 32662 - protein, 25 aa, Homo sapiens
LLLSNQYRWKSWLQRVLLPHLRMSP

SEQ ID NO: 32663 - protein, 10 aa, Homo sapiens
MIWCIIILLR

SEQ ID NO: 32664 - protein, 15 aa, Homo sapiens
METIMILLENFSAEK

SEQ ID NO: 32665 - protein, 204 aa, Homo sapiens
IHEHPEHYTIMHKWILTWILPTLLYRSCFHIICLVGTISLACNDMTPEQMATNVNCSSPERHTRSYDYMEGGDIRVRRLFCRTQWYLRIDKRGKVKGTQEMKNNYNIMEIRTVAVGIVAIKGVESEFYLAMNKEGKLYAKKECNEDCNFKELILENHYNTYASAKWTHNGGEMFVALNQKGIPVRGKKTKKEQKTAHFLPMAIT

SEQ ID NO: 32666 - protein, 30 aa, Homo sapiens
MDTDMDPANFALQIMLSHYLSSGYYIFSLQ

SEQ ID NO: 32667 - protein, 46 aa, Homo sapiens
IAVMILWLMTPSWDWYRKSENTYRTWKTQLSQLTGIRKENFWKTQH

SEQ ID NO: 32668 - protein, 54 aa, Homo sapiens
MRVMIAFSLLMNSSNAAICHGKEESPWRSGRPGAYTTQLFGTIITARTGCQLLW

SEQ ID NO: 32669 - protein, 26 aa, Homo sapiens
LRSLWIFPGVLWMRFFKSLHSLQLQL

SEQ ID NO: 32670 - protein, 13 aa, Homo sapiens
LIGRFCIIWALSI

SEQ ID NO: 32671 - protein, 10 aa, Homo sapiens
IVEVLLILWC

SEQ ID NO: 32672 - protein, 23 aa, Homo sapiens
LETDWESRSPFPRPMSTFLEWSL

SEQ ID NO: 32673 - protein, 781 aa, Homo sapiens
LFLSWIRAESVGTRPPLRQEAALMPLQGLGLQRNPFLQGKRGPGLTSSPPLLPPSLQVNFHSPRSGQRCWAARTQVEKRLVVLVVLLAAGLVACLAALGIQYQTRSPSVCLSEACVSVTSSILSSMDPTVDPCHDFFSYACGGWIKANPVPDGHSRWGTFSNLWEHNQAIIKHLLENSTASVSEAERKAQVYYRACMNETRIEELRAKPLMELIERLGGWNITGPWAKDNFQDTLQVVTAHYRTSPFFSVYVSADSKNSNSNVIQVDQSGLGLPSRDYYLNKTENEKVLTGYLNYMVQLGKLLGGGDEEAIRPQMQQILDFETALANITIPQEKRRDEELIYHKVTAAELQTLAPAINWLPFLNTIFYPVEINESEPIVVYDKEYLEQISTLINTTDRCLLNNYMIWNLVRKTSSFLDQRFQDADEKFMEVMYGTKKTCLPRWKFCVSDTENNLGFALGPMFVKATFAEDSKSIATEIILEIKKAFEESLSTLKWMDEETRKSAKEKADAIYNMIGYPNFIMDPKELDKVFNDYTAVPDLYFENAMRFFNFSWRVTADQLRKAPNRDQWSMTPPMVNAYYSPTKNEIVFPAGILQAPFYTRSSPKALNFGGIGVVVGHELTHAFDDQGREYDKDGNLRPWWKNSSVEAFKRQTECMVEQYSNYSVNGEPVNGRHTLGENIADNGGLKAAYRAYQNWVKKNGAEHSLPTLGLTNNQLFFLGFAQVWCSVRTPESSHEGLITDPHSPSRFRVIGSLSNSKEFSEHFRCPPGSPMNPPHKCEVW

SEQ ID NO: 32674 - protein, 21 aa, Homo sapiens
RNFQSPGQFPGWLKALMSALM

SEQ ID NO: 32675 - protein, 25 aa, Homo sapiens
KILPNLMFLLCQICMETSLVTCVQD

SEQ ID NO: 32676 - protein, 28 aa, Homo sapiens
TAFSVLVAMATSMTFPWAAFFEMPSCMR

SEQ ID NO: 32677 - protein, 1374 aa, Homo sapiens
ISSQIKGMKSGSGGGSPTSLWGLLFLSAALSLWPTSGEICGPGIDIRNDYQQLKRLENCTVIEGYLHILLISKAEDYRSYRFPKLTVITEYLLLFRVAGLESLGDLFPNLTVIRGWKLFYNYALVIFEMTNLKDIGLYNLRNITRGAIRIEKNADLCYLSTVDWSLILDAVSNNYIVGNKPPKECGDLCPGTMEEKPMCEKTTINNEYNYRCWTTNRCQKMCPSTCGKRACTENNECCHPECLGSCSAPDNDTACVACRHYYYAGVCVPACPPNTYRFEGWRCVDRDFCANILSAESSDSEGFVIHDGECMQECPSGFIRNGSQSMYCIPCEGPCPKVCEEEKKTKTIDSVTSAQMLQGCTIFKGNLLINIRRGNNIASELENFMGLIEVVTGYVKIRHSHALVSLSFLKNLRLILGEEQLEGNYSFYVLDNQNLQQLWDWDHRNLTIKAGKMYFAFNPKLCVSEIYRMEEVTGTKGRQSKGDINTRNNGERASCESDVLHFTSTTTSKNRIIITWHRYRPPDYRDLISFTVYYKEAPFKNVTEYDGQDACGSNSWNMVDVDLPPNKDVEPGILLHGLKPWTQYAVYVKAVTLTMVENDHIRGAKSEILYIRTNASVPSIPLDVLSASNSSSQLIVKWNPPSLPNGNLSYYIVRWQRQPQDGYLYRHNYCSKDKIPIRKYADGTIDIEEVTENPKTEVCGGEKGPCCACPKTEAEKQAEKEEAEYRKVFENFLHNSIFVPRPERKRRDVMQVANTTMSSRSRNTTAADTYNITDPEELETEYPFFESRVDNKERTVISNLRPFTLYRIDIHSCNHEAEKLGCSASNFVFARTMPAEGADDIPGPVTWEPRPENSIFLKWPEPENPNGLILMYEIKYGSQVEDQRECVSRQEYRKYGGAKLNRLNPGNYTARIQATSLSGNGSWTDPVFFYVQAKTGYENFIHLIIALPVAVLLIVGGLVIMLYVFHRKRNNSRLGNGVLYASVNPEYFSAADVYVPDEWEVAREKITMSRELGQGSFGMVYEGVAKGVVKDEPETRVAIKTVNEAASMRERIEFLNEASVMKEFNCHHVVRLLGVVSQGQPTLVIMELMTRGDLKSYLRSLRPEMENNPVLAPPSLSKMIQMAGEIADGMAYLNANKFVHRDLAARNCMVAEDFTVKIGDFGMTRDIYETDYYRKGGKGLLPVRWMSPESLKDGVFTTYSDVWSFGVVLWEIATLAEQPYQGLSNEQVLRFVMEGGLLDKPDNCPDMLFELMRMCWQYNPKMRPSFLEIISSIKEEMEPGFREVSFYYSEENKLPEPEELDLEPENMESVPLDPSASSSSLPLPDRHSGHKAENGPGPGVLVLRASFDERQPYAHMNGGRKNERALPLPQSSTC

SEQ ID NO: 32678 - protein, 23 aa, Homo sapiens
MVWLVWPSLLAPSTLSLWATSMT

SEQ ID NO: 32679 - protein, 23 aa, Homo sapiens
LFLHHLCLFLVTILLRFPTASNS

SEQ ID NO: 32680 - protein, 85 aa, Homo sapiens
VRIPRLSELLRAVLLGTRDWQPAAPGAGPRRGGAAAGRRLDGKLRRSPPSVSQVRAPRQAGRAAGDGQARCARSRMHMRSVCSHH

SEQ ID NO: 32681 - protein, 57 aa, Homo sapiens
LFRPRRRFLVTQALTSQLSLAVLLRVSGASVLCALGLHTGDATDSHCPGLPVDSPRP

SEQ ID NO: 32682 - protein, 41 aa, Homo sapiens
MPWMRLDCLRFFTQKLQISMIERTCQDVSTVSMHSVCTCSS

SEQ ID NO: 32683 - protein, 17 aa, Homo sapiens
KRRRFCWLSAHLCFFLS

SEQ ID NO: 32684 - protein, 42 aa, Homo sapiens
LRTVRRILNHRIGLNWSLFMLSGIPGVSLKSCLPIPENIMAT

SEQ ID NO: 32685 - protein, 12 aa, Homo sapiens
LWLRSLTVMTWI

SEQ ID NO: 32686 - protein, 50 aa, Homo sapiens
MILVLTSVCYLDTFLISRRTKKILCWMLCPILNKQLEKNEETVIVGSMNI

SEQ ID NO: 32687 - protein, 12 aa, Homo sapiens
ILNLFLLKMIVS

SEQ ID NO: 32688 - protein, 26 aa, Homo sapiens
KSKWMPGLWPFLLIPSIWPQELMSGK

SEQ ID NO: 32689 - protein, 14 aa, Homo sapiens
TKISYAVLLFLTRR

SEQ ID NO: 32690 - protein, 11 aa, Homo sapiens
VMCYLWISLLR

SEQ ID NO: 32691 - protein, 7 aa, Homo sapiens
LIFLLLA

SEQ ID NO: 32692 - protein, 16 aa, Homo sapiens
IFWKRRKKLIIQFLLF

SEQ ID NO: 32693 - protein, 21 aa, Homo sapiens
TSVSLRQMGVLWFMIYLLDLM

SEQ ID NO: 32694 - protein, 15 aa, Homo sapiens
LFTGRKTIYLTWLLC

SEQ ID NO: 32695 - protein, 16 aa, Homo sapiens
ITQALTLSGLLQQFLL

SEQ ID NO: 32696 - protein, 30 aa, Homo sapiens
TVPSGLILVLMGRIAGPRSTRRVGACCSPP

SEQ ID NO: 32697 - protein, 23 aa, Homo sapiens
IAAVLGSILRLVLIRDIESLVPI

SEQ ID NO: 32698 - protein, 11 aa, Homo sapiens
VVSISVLYLLW

SEQ ID NO: 32699 - protein, 33 aa, Homo sapiens
LSRQSFQFGILLFFFFSVCMPEEGFKGTGLLGH

SEQ ID NO: 32700 - protein, 25 aa, Homo sapiens
LKKILVSFIFRLIICSLNITEHEKL

SEQ ID NO: 32701 - protein, 17 aa, Homo sapiens
MWKRRRKLVSFSLRTEG

SEQ ID NO: 32702 - protein, 20 aa, Homo sapiens
KYYTQRLWLIRNLLCVLVPG

SEQ ID NO: 32703 - protein, 9 aa, Homo sapiens
IKLFGFIIW

SEQ ID NO: 32704 - protein, 158 aa, Homo sapiens
LSPVMKDSAPELNVSSSETEEDKEEAKPDGEKDPDFNQSNGGTKRQKISHQNYIAYQKQVIRRSMRHRKVRGEKALLVSANQTLKELKIQIMHAFSVAPFDQNLSIDGKILSDDCATLGTLGVIPESVILLKADEPIADYAAMDDVMQGKDEFVLGIC

SEQ ID NO: 32705 - protein, 11 aa, Homo sapiens
LLLSLLRLCLY

SEQ ID NO: 32706 - protein, 48 aa, Homo sapiens
MYLGTASWTLMAGRSATTCCISGPVTSIAVNSTPREMKSSPTSAPPGR

SEQ ID NO: 32707 - protein, 17 aa, Homo sapiens
TAEDSGRWSLPGFIGQT

SEQ ID NO: 32708 - protein, 31 aa, Homo sapiens
IIMKMMKELAMFLSLMAIMIVQRRCQITIMD

SEQ ID NO: 32709 - protein, 9 aa, Homo sapiens
TILGVVVGL

SEQ ID NO: 32710 - protein, 167 aa, Homo sapiens
LGAGECPRSGRKPGCRNEEAVFVGPDLSFSGGKKELGKQGQTSESGVSISEGGDSVVGPGRTRKFVERGLTQFHCREGRRGSIQVDGEELVSGRSPGPNVAVNAKGSVYIGGAPDVATLTGGRFSSGITGCVKNLVLHSARPGAPPPQPLDLQHRAQAGANTRPCPS

SEQ ID NO: 32711 - protein, 37 aa, Homo sapiens
LGARDNVRSGVERVWCVAAAWARAAADHEGYFPQKWP

SEQ ID NO: 32712 - protein, 35 aa, Homo sapiens
LGLDDCRYQLGSGEARLVSEDPINDGEWHRVTALR

SEQ ID NO: 32713 - protein, 18 aa, Homo sapiens
INSPSRDQIIKRKTNIDR

SEQ ID NO: 32714 - protein, 12 aa, Homo sapiens
MGGVGLVLLWLS

SEQ ID NO: 32715 - protein, 27 aa, Homo sapiens
TCPPAAARSSTTLATSLCRECLRSTTR

SEQ ID NO: 32716 - protein, 82 aa, Homo sapiens
MSAWNQNHWLSLAACFLLSLHMRSQPSILLDARSNCTHGKSELPLSLSLSLVVIRIHQNPCLDLSLAEAALFPTERVSLSSC

SEQ ID NO: 32717 - protein, 95 aa, Homo sapiens
MSCGEAGAPGPSPPTAWMAASRCLRWPSCSSSAMSSCAVATLSGSASCPGLPVWRVTPPSPRDTSESRASASCWRVTTSMRCACLRTCWATARRT

SEQ ID NO: 32718 - protein, 8 aa, Homo sapiens
LLLWLSVL

SEQ ID NO: 32719 - protein, 20 aa, Homo sapiens
MNPTPSSITLRRMMSLFLLL

SEQ ID NO: 32720 - protein, 275 aa, Homo sapiens
LEPLLLGSPQGPWAEGRSIQLELTTGGRGIMEGPRGWLVLCVLAISLASMVTEDLCRAPDGKKGEAGRPGRRGRPGLKGEQGEPGAPGIRTGIQGLKGDQGEPGPSGNPGKVGYPGPSGPLGARGIPGIKGTKGSPGNIKDQPRPAFSAIRRNPPMGGNVVIFDTVITNQEEPYQNHSGRFVCTVPGYYYFTFQVLSQWEICLSIVSSSRGQVRRSLGFCDTTNKGLFQVVSGGMVLQLQQGDQVWVEKDPKKGHIYQGSEADSVFSGFLIFPSA

SEQ ID NO: 32721 - protein, 11 aa, Homo sapiens
KTPLTLLKKAR

SEQ ID NO: 32722 - protein, 9 aa, Homo sapiens
VVILIELLM

SEQ ID NO: 32723 - protein, 62 aa, Homo sapiens
TEPMCKSTTGARLHTSKKSGVGGSATFASVAPPCSPLCPRHSLMLVLRWAELGGGGNCNWWL

SEQ ID NO: 32724 - protein, 14 aa, Homo sapiens
TKSLSWTWTLFFTV

SEQ ID NO: 32725 - protein, 22 aa, Homo sapiens
VSSLARRLDFQEEPMTGFVSSH

SEQ ID NO: 32726 - protein, 661 aa, Homo sapiens
TMEALMARGALTGPLRALCLLGCLLSHAAAAPSPIIKFPGDVAPKTDKELAVQYLNTFYGCPKESCNLFVLKDTLKKMQKFFGLPQTGDLDQNTIETMRKPRCGNPDVANYNFFPRKPKWDKNQITYRIIGYTPDLDPETVDDAFARAFQVWSDVTPLRFSRIHDGEADIMINFGRWEHGDGYPFDGKDGLLAHAFAPGTGVGGDSHFDDDELWTLGEGQVVRVKYGNADGEYCKFPFLFNGKEYNSCTDTGRSDGFLWCSTTYNFEKDGKYGFCPHEALFTMGGNAEGQPCKFPFRFQGTSYDSCTTEGRTDGYRWCGTTEDYDRDKKYGFCPETAMSTVGGNSEGAPCVFPFTFLGNKYESCTSAGRSDGKMWCATTANYDDDRKWGFCPDQGYSLFLVAAHEFGHAMGLEHSQDPGALMAPIYTYTKNFRLSQDDIKGIQELYGASPDIDLGTGPTPTLGPVTPEICKQDIVFDGIAQIRGEIFFFKDRFIWRTVTPRDKPMGPLLVATFWPELPEKIDAVYEAPQEEKAVFFAGNEYWIYSASTLERGYPKPLTSLGLPPDVQRVDAAFNWSKNKKTYIFAGDKFWRYNEVKKKMDPGFPKLIADAWNAIPDNLDAVVDLQGGGHSYFFKGAYYLKLENQSLKSVKFGSIKSDWLGC

SEQ ID NO: 32727 - protein, 21 aa, Homo sapiens
VAFCNLCVLLCFLCLVFECFD

SEQ ID NO: 32728 - protein, 24 aa, Homo sapiens
VTVSKTASIGRAAGSIDGKLELPT

SEQ ID NO: 32729 - protein, 9 aa, Homo sapiens
MITLLMFLL

SEQ ID NO: 32730 - protein, 12 aa, Homo sapiens
IRMSWQIVYWMF

SEQ ID NO: 32731 - protein, 16 aa, Homo sapiens
LKNSTIKVFMLLACHG

SEQ ID NO: 32732 - protein, 26 aa, Homo sapiens
MGVSYPMERLREHRGHVGAGAPPLAL

SEQ ID NO: 32733 - protein, 9 aa, Homo sapiens
KIYLMMIAA

SEQ ID NO: 32734 - protein, 15 aa, Homo sapiens
ILIIFVILDAHLMPR

SEQ ID NO: 32735 - protein, 10 aa, Homo sapiens
MCHLLLILQI

SEQ ID NO: 32736 - protein, 18 aa, Homo sapiens
VFLLAVFKERDLFPFFLP

SEQ ID NO: 32737 - protein, 18 aa, Homo sapiens
MSFIMLAEIMGLVILGRV

SEQ ID NO: 32738 - protein, 33 aa, Homo sapiens
LQLLLTRNVVVKIGLLLLLQMVHTLLGHKDIAQ

SEQ ID NO: 32739 - protein, 14 aa, Homo sapiens
IVMVVRKISLVNIL

SEQ ID NO: 32740 - protein, 62 aa, Homo sapiens
MLVWCLFLNFLGSQPSSAPQMSSLRSDDKVCSTSLKRSCRVWFSCQTASCTYSCKASSRCLR

SEQ ID NO: 32741 - protein, 10 aa, Homo sapiens
MLWTWAIVVC

SEQ ID NO: 32742 - protein, 51 aa, Homo sapiens
MNLLLFLVRVRIRDPTLMTPGASTSSKSTLTEAPPSAITVGHCSMDLSIKG

SEQ ID NO: 32743 - protein, 182 aa, Homo sapiens
LLSIMAQDQGEKENPMRELRIRKLCLNICVGESGDRLTRAAKVLEQLTGQTPVFSKARYTVRSFGIRRNEKIAVHCTVRGAKAEEILEKGLKVREYELRKNNFSDTGNFGFGIQEHIDLGIKYDPSIGIYGLDFYVVLGRPGFSIADKKRRTGCIGAKHRISKEEAMRWFQQKYDGIILPGK

SEQ ID NO: 32744 - protein, 179 aa, Homo sapiens
LLQQDQGEKENPMRELRIRKLCLNICVGESGDRLTRAAKVLEQLTGQTPVFSKARYTVRSFGIRRNEKIAVHCTVRGAKAEEILEKGLKVREYELRKNNFSDTGNFGFGIQEHIDLGIKYDPSIGIYGLDFYVVLGRPGFSIADKKRRTGCIGAKHRISKEEAMRWFQQKYDGIILPGK

SEQ ID NO: 32745 - protein, 19 aa, Homo sapiens
VSPRRCSFLVLQLLIQVWN

SEQ ID NO: 32746 - protein, 56 aa, Homo sapiens
TPVWWRSWACMTLAWALPWGPIRASVSKASCSLAQRPRKKNTSPSWHLGRLWPLSV

SEQ ID NO: 32747 - protein, 30 aa, Homo sapiens
LPFLFFRCLLYFPKFLLLLCPLRPPPLGAP

SEQ ID NO: 32748 - protein, 19 aa, Homo sapiens
LILLLFNWNLMDPMWFPPS

SEQ ID NO: 32749 - protein, 28 aa, Homo sapiens
LSVISCFWSIPLVPLISLMIEYSEPWMG

SEQ ID NO: 32750 - protein, 15 aa, Homo sapiens
LPIPLWERRIGWPQK

SEQ ID NO: 32751 - protein, 19 aa, Homo sapiens
IAFGERQKAQVYSQLAKSS

SEQ ID NO: 32752 - protein, 223 aa, Homo sapiens
VGPRGRAGGGVAMSHGHSHGGGGCRCAAEREEPPEQRGLAYGLYLRIDLERLQCLNESREGSGRGVFKPWEERTDRSKFVESDADEELLFNIPFTGNVKLKGIIIMGEDDDSHPSEMRLYKNIPQMSFDDTEREPDQTFSLNRDLTGELEYATKISRFSNVYHLSIHISKNFGADTTKVFYIGLRGEWTELRRHEVTICNYEASANPADHRVHQVTPQTHFIS

SEQ ID NO: 32753 - protein, 26 aa, Homo sapiens
MTWKRLPIKRAVMTRCHSPWCWKDSG

SEQ ID NO: 32754 - protein, 37 aa, Homo sapiens
RNRIVCPLSRTSTLSTPLLMQVRVMTCFLLALRIISI

SEQ ID NO: 32755 - protein, 46 aa, Homo sapiens
MYTKVAVNMELVVLLQLFCSRYTGILEARGPPVAGSGGLVTPVAQP

SEQ ID NO: 32756 - protein, 24 aa, Homo sapiens
MDDELVVGHSARSDISSFPCTSGF

SEQ ID NO: 32757 - protein, 11 aa, Homo sapiens
LMWIQTFLSVL

SEQ ID NO: 32758 - protein, 10 aa, Homo sapiens
LGYGWTWILT

SEQ ID NO: 32759 - protein, 70 aa, Homo sapiens
VARPGRAFLPGLSHLALSAAGAGCFLIHFPGGGPPWQQYWRGYRQLEKGAQPLTHSLRTSLTSPALGPLL

SEQ ID NO: 32760 - protein, 49 aa, Homo sapiens
LAGPSFLALATWLCLQQGQAAFLSISLEAGPPGSSIGGATGSWRKGPSR

SEQ ID NO: 32761 - protein, 43 aa, Homo sapiens
VAELPLGGRKQLKSCSSCNHLGVVLLSDLGCTDPGPRDRRKTA

SEQ ID NO: 32762 - protein, 16 aa, Homo sapiens
VHWAPSSLILCFPLLG

SEQ ID NO: 32763 - protein, 29 aa, Homo sapiens
MRRELNLGSWLAIQCALMMSPQKTPGSSF

SEQ ID NO: 32764 - protein, 44 aa, Homo sapiens
MCSWSFVLRTAPMSTCLLRITALCSAARMPMEWSCTMRLSSMPK

SEQ ID NO: 32765 - protein, 14 aa, Homo sapiens
MYGKAQLLPLFCFL

SEQ ID NO: 32766 - protein, 11 aa, Homo sapiens
IRGFWLTRWVL

SEQ ID NO: 32767 - protein, 56 aa, Homo sapiens
RRQPLAFQRVLLSLCLLEGIWHSPAAAAGGGSHCSSWPSLYTTFQRVSLLELDLGL

SEQ ID NO: 32768 - protein, 54 aa, Homo sapiens
LEALLRHRLPVCGCAELGGLGGSHLRQEHREGCFEDVQPLQEAADSFQSWPRPG

SEQ ID NO: 32769 - protein, 59 aa, Homo sapiens
LEALLRHRLPVCGCAELGGLGGSHLRQEHREGCFEDVQPLQEAADSFQSWPRPGGGPAP

SEQ ID NO: 32770 - protein, 28 aa, Homo sapiens
KILYFKISSALCITVQILCSRICGLKAN

SEQ ID NO: 32771 - protein, 20 aa, Homo sapiens
MWLVLQVLINCLMLVSILEK

SEQ ID NO: 32772 - protein, 37 aa, Homo sapiens
RTLTSAPWSTLRGLWAETLLALLTAALTQSLGQPRPS

SEQ ID NO: 32773 - protein, 36 aa, Homo sapiens
MHAVLHPPPQAAVLRDAPRGEHVQEARRLRLAQPPE

SEQ ID NO: 32774 - protein, 27 aa, Homo sapiens
MIIMKMDVSWIRRSKTALTQRPRFLCP

SEQ ID NO: 32775 - protein, 38 aa, Homo sapiens
IKIRLGLLHFLLSVVSPLASGSGEGPSFLRRFGAPRYS

SEQ ID NO: 32776 - protein, 11 aa, Homo sapiens
IALYIVCYLTR

SEQ ID NO: 32777 - protein, 13 aa, Homo sapiens
LLKIQMIMMMAFQ

SEQ ID NO: 32778 - protein, 9 aa, Homo sapiens
TWCSWSSRA

SEQ ID NO: 32779 - protein, 23 aa, Homo sapiens
MNPFLLLMILAPIIVDTMTYKQY

SEQ ID NO: 32780 - protein, 323 aa, Homo sapiens
LPGPDQVLRRTCSRTFHQTNGTRHRILLTWTTLHRKMNALANIPDVPVKYRKNDIPGPGFYNVIHQSPVSNSVSLSKKGTCMFPSMCARLDTIISKYPAANAYTIPSDFISKRDFSNSCSSMFQLPSFMKALKFETPAPNYYNASVSCCKQRNNVCTRAGFMSKTQRGSFAFADKGPPPGHYDINESLVKQSPNTLMSCFKSKTNRGLKLTSTGPGPGYYNPSDCTKVPKKTLFPKNPILNFSAQPSPLPPKPPFPGPGQYEIVDYLGPRKHFISSASFVSNTSRWTAAPPQPGLPGPATYKPELPGKQSFLYNEDKKWIPVL

SEQ ID NO: 32781 - protein, 28 aa, Homo sapiens
LEQMKKFFGFFLHLGILWKIFVPLQDNH

SEQ ID NO: 32782 - protein, 13 aa, Homo sapiens
LELQVLAVFSLLM

SEQ ID NO: 32783 - protein, 18 aa, Homo sapiens
ILLLSIGVPLLTLKWMFR

SEQ ID NO: 32784 - protein, 18 aa, Homo sapiens
TKSRSFMFPLLMLTTTLN

SEQ ID NO: 32785 - protein, 18 aa, Homo sapiens
LTAALDTRRLPGPGGRAP

SEQ ID NO: 32786 - protein, 116 aa, Homo sapiens
MDNSAQKNERTGKHPRRASEVQKGFTAAYPTQSSIPFKSQASVIPESEKKGFNSQAKRFPHKKVMTLSQGFFRFSLDFSLAGQARSVWLLCLSVDSGGQCAPRSRGTSSTEGHRLD

SEQ ID NO: 32787 - protein, 14 aa, Homo sapiens
MFLCGFLLQCCLWV

SEQ ID NO: 32788 - protein, 26 aa, Homo sapiens
LRGSSRWSPWAFSALLLCFTLEVLTA

SEQ ID NO: 32789 - protein, 23 aa, Homo sapiens
KRPLPALRRCLDLENQEVRGLTT

SEQ ID NO: 32790 - protein, 15 aa, Homo sapiens
RLIKWFKYFCCCVLS

SEQ ID NO: 32791 - protein, 23 aa, Homo sapiens
MTLNLNFGVLFLFFYNVCSNSLC

SEQ ID NO: 32792 - protein, 22 aa, Homo sapiens
IFLRKLLKGFLPFLEFLCLLLV

SEQ ID NO: 32793 - protein, 12 aa, Homo sapiens
KMKLTLFMMLLF

SEQ ID NO: 32794 - protein, 21 aa, Homo sapiens
IDRLRMLKTWSSLLITFWMAQ

SEQ ID NO: 32795 - protein, 26 aa, Homo sapiens
MEKEKYNMRAVSLQILRWMKMAWCMP

SEQ ID NO: 32796 - protein, 19 aa, Homo sapiens
ILMEIKWRTPLTLSSMLLT

SEQ ID NO: 32797 - protein, 15 aa, Homo sapiens
IGCLSLLLLQKIKCH

SEQ ID NO: 32798 - protein, 19 aa, Homo sapiens
LKPPSLKSWRRTVSGAWTF

SEQ ID NO: 32799 - protein, 34 aa, Homo sapiens
MPGPPRSLEMVCVLILLKTFGQSRAWKILFKKQY

SEQ ID NO: 32800 - protein, 28 aa, Homo sapiens
MNPQVCVLILLKTFGQSRAWKILFKKQY

SEQ ID NO: 32801 - protein, 31 aa, Homo sapiens
KCEKASCPEEEARRRILPPRRRAVPGLSGRL

SEQ ID NO: 32802 - protein, 12 aa, Homo sapiens
LATSCALVLWAA

SEQ ID NO: 32803 - protein, 25 aa, Homo sapiens
VGWAARRRLRSAVFILVRGPEVPGG

SEQ ID NO: 32804 - protein, 32 aa, Homo sapiens
KIKPPTSLEALGLSNLKTQTVWGRCWPADRTR

SEQ ID NO: 32805 - protein, 38 aa, Homo sapiens
LYWWVTWTTVAVSTLRSFTSWAPVSGPRWPSRPSSRSL

SEQ ID NO: 32806 - protein, 17 aa, Homo sapiens
LLASKIWLMLICELLCV

SEQ ID NO: 32807 - protein, 17 aa, Homo sapiens
IDVMKTSWALQRLWLLL

SEQ ID NO: 32808 - protein, 453 aa, Homo sapiens
TKGRVFSALRTGAEEAAVAPGAFERAHPSPRANADPGPTGGTAPDSPRAFLAAMEDGVYEPPDLTPEERMELENIRRRKQELLVEIQRLREELSEAMSEVEGLEANEGSKTLQRNRKMAMGRKKFNMDPKKGIQFLVENELLQNTPEEIARFLYKGEGLNKTAIGDYLGEREELNLAVLHAFVDLHEFTDLNLVQALRQFLWSFRLPGEAQKIDRMMEAFAQRYCLCNPGVFQSTDTCYVLSFAVIMLNTSLHNPNVRDKPGLERFVAMNRGINEGGDLPEELLRNLYDSIRNEPFKIPEDDGNDLTHTFFNPDREGWLLKLAGGRVKTWKRRWFILTDNCLYYFEYTTDKEPRGIIPLENLSIREVDDPRKPNCFELYIPNNKGQLIKACKTEADGRVVEGNHMVYRISAPTQEEKDEWIKSIQAAVSVDPFYEMLAARKKRISVKKKQEQP

SEQ ID NO: 32809 - protein, 40 aa, Homo sapiens
LHCEAGRWGRAEAPPAQLKQTARTATRSASHGWGLSGNKC

SEQ ID NO: 32810 - protein, 18 aa, Homo sapiens
ISNQWQGTLFLLLLLLMQ

SEQ ID NO: 32811 - protein, 30 aa, Homo sapiens
IERRRSRRCHGPDTADGDPELRQQHPGVPQ

SEQ ID NO: 32812 - protein, 10 aa, Homo sapiens
LADLIFKMCP

SEQ ID NO: 32813 - protein, 11 aa, Homo sapiens
MWEGLFVWLWS

SEQ ID NO: 32814 - protein, 8 aa, Homo sapiens
LFWMCGFI

SEQ ID NO: 32815 - protein, 15 aa, Homo sapiens
RLRTLPCVGTRRASS

SEQ ID NO: 32816 - protein, 46 aa, Homo sapiens
VACMVLAVGVGVVGMVMGLRIRCDEGESLRGQTTSAFLFLGDPSEA

SEQ ID NO: 32817 - protein, 28 aa, Homo sapiens
VVCLGRCLLLLHQLCQLSELGGHEANDE

SEQ ID NO: 32818 - protein, 13 aa, Homo sapiens
VICNFPVLYYLLC

SEQ ID NO: 32819 - protein, 19 aa, Homo sapiens
RGSCPRADGARREVLPDKL

SEQ ID NO: 32820 - protein, 28 aa, Homo sapiens
IFPKWCQPPTKVGSTPLDESSRGWSPLA

SEQ ID NO: 32821 - protein, 16 aa, Homo sapiens
VSLFMILWIAVSRETQ

SEQ ID NO: 32822 - protein, 13 aa, Homo sapiens
VIPWARLLSGEKT

SEQ ID NO: 32823 - protein, 12 aa, Homo sapiens
IPFLYILSLCSI

SEQ ID NO: 32824 - protein, 70 aa, Homo sapiens
ISWTVLYRTKHKKGQSEEIQKKRTRRAVKFQRAITGASLADIMAKRDQKPEVRKAQREQAIRAAKEAKKG

SEQ ID NO: 32825 - protein, 44 aa, Homo sapiens
VCLPTVSLWILFVYIEAAIRFKDLKNFHVDLCRPFAAHCSQRIT

SEQ ID NO: 32826 - protein, 33 aa, Homo sapiens
LAVKIKKQFLLYFVELYLLSFLKRGEKITSKSD

SEQ ID NO: 32827 - protein, 20 aa, Homo sapiens
MFLPVGLLIVVMMVKDLNKK

SEQ ID NO: 32828 - protein, 16 aa, Homo sapiens
KEPLENLIWSSLLWMG

SEQ ID NO: 32829 - protein, 23 aa, Homo sapiens
VFSEEPNRKMEAGPCGRSWTRLG

SEQ ID NO: 32830 - protein, 54 aa, Homo sapiens
LMSAGVTMGAKCLRHRVIKLPKCGTSAVTKRYRSHSMMLLLKPSIGSKLQTTAV

SEQ ID NO: 32831 - protein, 25 aa, Homo sapiens
LAEHLLFLRRPHLALGVVRVQVPAE

SEQ ID NO: 32832 - protein, 15 aa, Homo sapiens
LSTQVWLPGLLLLRV

SEQ ID NO: 32833 - protein, 39 aa, Homo sapiens
LLPLAQGLTWNLMQMFRLCPQRLLSTKHAMSHHIKDHAV

SEQ ID NO: 32834 - protein, 48 aa, Homo sapiens
MPRTQEESRRILCTQEHCYPPKLMSAIPCRLAWSSRASSAKLPQAGRK

SEQ ID NO: 32835 - protein, 30 aa, Homo sapiens
RVSVEKMEGVKTASGAVAPSSTSGSPWARW

SEQ ID NO: 32836 - protein, 612 aa, Homo sapiens
LATLPRDPHPGRRSGRPPLTAPPQTRAWTPRASGATGRATMLMRKVPGFVPASPWGLRLPQKFLFLLFLSGLVTLCFGALFLLPHSSRLKRLFLAPRTQQPGLEVVAEIAGHAPAREQEPPPNPAPAAPAPGEDDPSSWASPRRRKGGLRRTRPTGPREEATAARGNSIPASRPGDEGVPFRFDFNAFRSRLRHPVLGTRADESQEPQSQVRAQREKIKEMMQFAWQSYKRYAMGKNELRPLTKDGYEGNMFGGLSGATVIDSLDTLYLMELKEEFQEAKAWVGESFHLNVSGEASLFEVNIRYIGGLLSAFYLTGEEVFRIKAIRLGEKLLPAFNTPTGIPKGVVSFKSGNWGWATAGSSSILAEFGSLHLEFLHLTELSGNQVFAEKATVRNIRKVLRKIEKPFGLYPNFLSPVSGNWVQHHVSVGGLGDSFYEYLIKSWLMSGKTDMEAKNMYYEALEAIETYLLNVSPGGLTYIAEWRGGILDHKMGHLACFSGGMIALGAEDAKEEKRAHYRELAAQITKTCHESYARSDTKLGPEAFWFNSGREAVATQLSESYYILRPEVVESYMYLWRQTHNPIYREWGWEGQGGLGEILSDRSRFLWDPRRVQ

SEQ ID NO: 32837 - protein, 43 aa, Homo sapiens
ILSLRCWTSLLLLIPLTSCNFSSPSWRMTASQVPSKRKASMTL

SEQ ID NO: 32838 - protein, 670 aa, Homo sapiens
LATLPRDPHPGRRSGRPPLTAPPQTRAWTPRASGATGRATMLMRKVPGFVPASPWGLRLPQKFLFLLFLSGLVTLCFGALFLLPHSSRLKRLFLAPRTQQPGLEVVAEIAGHAPAREQEPPPNPAPAAPAPGEDDPSSWASPRRRKGGLRRTRPTGPREEATAARGNSIPASRPGDEGVPFRFDFNAFRSRLRHPVLGTRADESQEPQSQVRAQREKIKEMMQFAWQSYKRYAMGKNELRPLTKDGYEGNMFGGLSGATVIDSLDTLYLMELKEEFQEAKAWVGESFHLNVSGEASLFEVNIRYIGGLLSAFYLTGEEVFRIKAIRLGEKLLPAFNTPTGIPKGVVSFKSGNWGWATAGSSSILAEFGSLHLEFLHLTELSGNQVFAEKVRNIRKVLRKIEKPFGLYPNFLSPVSGNWVQHHVSVGGLGDSFYEYLIKSWLMSGKTDMEAKNMYYEALEAIETYLLNVSPGGLTYIAEWRGGILDHKMGHLACFSGGMIALGAEDAKEEKRAHYRELAAQITKTCHESYARSDTKLGPEAFWFNSGREAVATQLSESYYILRPEVVESYMYLWRQTHNPIYREWGWEVVLALEKYCRTEAGFSGIQDVYSSTPNHDNKQQSFFLAETLKYLYLLFSEDDLLSLEDWVFNTEAHPLPVNHSDSSGRAWGRH

SEQ ID NO: 32839 - protein, 52 aa, Homo sapiens
LILLGKKMLHFLYLAFRSKIFAPLPTLLFPTLCTAEPNLEQQPKLRMVWNVD

SEQ ID NO: 32840 - protein, 24 aa, Homo sapiens
MLFPLEIYTFTAYDTSRRRQSHAY

SEQ ID NO: 32841 - protein, 206 aa, Homo sapiens
LFCPAQAKREAVHLPGAALHSSPGRGTPHPHTPDITLAAGSRQLTSLLDPEKQEVGGLTWALCLAVSPDTKLGPEAFWFNSGREAVATQLSESYYILRPEVVESYMYLWRQTHNPIYREWGWEVVLALEKYCRTEAGFSGIQDVYSSTPNHDNKQQSFFLAETLKYLYLLFSEDDLLSLEDWVFNTEAHPLPVNHSDSSGRAWGRH

SEQ ID NO: 32842 - protein, 16 aa, Homo sapiens
TIIVWICGVWVVCWQV

SEQ ID NO: 32843 - protein, 427 aa, Homo sapiens
MGRARPGQRGPPSPGPAAQPPAPPRRRARSLALLGALLAAAAAAAVRVCARHAEAQAAARQELALKTLGTDGLFLFSSLDTDGDMYISPEEFKPIAEKLTGSTPAASCEEEELPPDPSEETLTIEARFQPLLPETMTKSKDGFLGVSRLALSGLRNWTAAASPSAVFATRHFQPFLPPPGQELGEPWWIIPSELSMFTGYLSNNRFYPPPPKGKEVIIHRLLSMFHPRPFVKTRFAPQGAVACLTAISDFYYTVMFRIHAEFQLSEPPDFPFWFSPAQFTGHIILSKDATHVRDFRLFVPNHRSLNVDMEWLYGASESSNMEVDIGYIPQMELEATGPSVPSVILDEDGSMIDSHLPSGEPLQFVFEEIKWQQELSWEEAARRLEVAMYPFKKVSYLPFTEAFDRAKAENKLVHSILLWGALDDQSC

SEQ ID NO: 32844 - protein, 24 aa, Homo sapiens
VWKAWVAGMWLSLPPLNLRSCWET

SEQ ID NO: 32845 - protein, 19 aa, Homo sapiens
MKKFQRWGFAVLPRLILSF

SEQ ID NO: 32846 - protein, 34 aa, Homo sapiens
RSRMDGMISTAGFVTGKAKSFAVSSVPGFITLSV

SEQ ID NO: 32847 - protein, 18 aa, Homo sapiens
ILIFLDCMVISMMLPEST

SEQ ID NO: 32848 - protein, 12 aa, Homo sapiens
VSKRTKIWCLLL

SEQ ID NO: 32849 - protein, 10 aa, Homo sapiens
IEVKIRKTNG

SEQ ID NO: 32850 - protein, 9 aa, Homo sapiens
IVLCGLWMV

SEQ ID NO: 32851 - protein, 10 aa, Homo sapiens
MGPCLLFFLL

SEQ ID NO: 32852 - protein, 10 aa, Homo sapiens
ICLIMTLIWP

SEQ ID NO: 32853 - protein, 29 aa, Homo sapiens
ILLFLSTLPLFLNQRISFCLGLNGMEYLA

SEQ ID NO: 32854 - protein, 37 aa, Homo sapiens
MGLVGIPGRGTRCQGDPSRALPRGSGIRRAAVYPQDR

SEQ ID NO: 32855 - protein, 13 aa, Homo sapiens
LIPQLWIPLAIFL

SEQ ID NO: 32856 - protein, 10 aa, Homo sapiens
IKSLIRIFLM

SEQ ID NO: 32857 - protein, 15 aa, Homo sapiens
LGLLMIVVLRLAEDL

SEQ ID NO: 32858 - protein, 11 aa, Homo sapiens
LQRTLMDFCCV

SEQ ID NO: 32859 - protein, 19 aa, Homo sapiens
LPDTINQALVTWLCLCPAV

SEQ ID NO: 32860 - protein, 130 aa, Homo sapiens
LLLMIAMTLRLMNSLAKRILDVEDRKSLWGQADLDSNTSQFCLLCLSLSLLICEEEVARMKMPALWFVVRTDTANVEGPAAHRPVALRADHSCLDGRELFLCVASGTLGRKATVRLLRRTLHKGVSSQGR

SEQ ID NO: 32861 - protein, 20 aa, Homo sapiens
LLVLQLFLDWYVFWKTLKDS

SEQ ID NO: 32862 - protein, 21 aa, Homo sapiens
IDSSMRNICKAEWTLPGLLKD

SEQ ID NO: 32863 - protein, 189 aa, Homo sapiens
LIVQNTLPVACLLFTMASSDIQVKELEKRASGQAFELILSPRSKESVPEFPLSPPKKKDLSLEEIQKKLEAAEERRKSHEAEVLKQLAEKREHEKEVLQKAIEENNNFSKMAEEKLTHKMEANKENREAQMAAKLERLREKMYFWTHGPGAHPAQISAEQSCLHSVPALCPALGLQSALITWSDLSHHH

SEQ ID NO: 32864 - protein, 51 aa, Homo sapiens
LEFLLYRQNNGSPSTYNWQWRKGTYAGLETCTVSSCQTSVGCPRKRRHCLL

SEQ ID NO: 32865 - protein, 37 aa, Homo sapiens
LRENLKILLGGLLALRYRWGMSSSFPAIKAMTRESEY

SEQ ID NO: 32866 - protein, 18 aa, Homo sapiens
LTCKLLPQPPGEPSFCLR

SEQ ID NO: 32867 - protein, 127 aa, Homo sapiens
LIVQNTLPVACLLFTMASSDIQVKELEKRASGQAFELILSPRSKESVPEFPLSPPKKKDLSLEEIQKKLEAAEERRKVNEAIHRKQDINLCNGQINFISITGRKQNCSYTVIITYASDWKEIPVLIY

SEQ ID NO: 32868 - protein, 31 aa, Homo sapiens
IFVVYLLTTAVSLCSPLSTQSALPMASSLTY

SEQ ID NO: 32869 - protein, 12 aa, Homo sapiens
LGPVLRLILCFS

SEQ ID NO: 32870 - protein, 22 aa, Homo sapiens
LRAPPGSPLSEGTGRCPRDQRL

SEQ ID NO: 32871 - protein, 11 aa, Homo sapiens
VLLLAMLETIL

SEQ ID NO: 32872 - protein, 27 aa, Homo sapiens
LGLLSWMKRLGTALSASRPIRSFPGSS

SEQ ID NO: 32873 - protein, 697 aa, Homo sapiens
LLFLLAGRGLPASLALTVGGHMQSWRRRKSLWLALSASWLLLVLLGGFSLLRLALPPRPRPGASQGWPRWLDAELLQSFSQPGELPEDAVSPPQAPHGGSCNWESCFDTSKCRGDGLKVFVYPAVGTISETHRRILASIEGSRFYTFSPAGACLLLLLSLDAQTGECSSMPLQWNRGRNHLVLRLHPAPCPRTFQLGQAMVAEASPTVDSFRPGFDVALPFLPEAHPLRGGAPGQLRQHSPQPGVALLALEEERGGWRTADTGSSACPWDGRCEQDPGPGQTQRQETLPNATFCLISGHRPEAASRFLQALQAGCIPVLLSPRWELPFSEVIDWTKAAIVADERLPLQVLAALQEMSPARVLALRQQTQFLWDAYFSSVEKVIHTTLEVIQDRIFGTSAHPSLLWNSPPGALLALSTFSTSPQDFPFYYLQQGSRPEGRFSALIWVGPPGQPPLKLIQAVAGSQHCAQILVLWSNERPLPSRWPETAVPLTVIDGHRKVSDRFYPYSTIRTDAILSLDARSSLSTSEVDFAFLVWQSFPERMVGFLTSSHFWDEAHGGWGYTAERTNEFSMVLTTAAFYHRYYHTLFTHSLPKALRTLADEAPTCVDVLMNFIVAAVTKLPPIKVPYGKQRQEAAPLAPGGPGPRPKPPAPAPDCINQIAAAFGHMPLLSSRLRLDPVLFKDPVSVQRKKYRSLEKP

SEQ ID NO: 32874 - protein, 9 aa, Homo sapiens
LLLTLTSFA

SEQ ID NO: 32875 - protein, 20 aa, Homo sapiens
LSRDHLPGPASLHDRNPGSV

SEQ ID NO: 32876 - protein, 11 aa, Homo sapiens
LPASEVSSKAL

SEQ ID NO: 32877 - protein, 286 aa, Homo sapiens [sequence omitted]

SEQ ID NO: 32878 - protein, 19 aa, Homo sapiens
RNAWNGRGHAWNGWNAWTQ

SEQ ID NO: 32879 - protein, 17 aa, Homo sapiens
ISSSITIRLILILFHGH

SEQ ID NO: 32880 - protein, 50 aa, Homo sapiens
MHLMVQRMVLLQGSALATLGLTASTTLTQLTMLLQHHLQLQGHQLKMTVT

SEQ ID NO: 32881 - protein, 9 aa, Homo sapiens
KLCFLSLMM

SEQ ID NO: 32882 - protein, 19 aa, Homo sapiens
LAVMSVSSEKRRFQGLTLT

SEQ ID NO: 32883 - protein, 199 aa, Homo sapiens
LKQTMESWWGLPCLAFLCFLMHARGQRDFDLADALDDPEPTKKPNSDIYPKPKPPYYPQPENPDSGGNIYPRPKPRPQPQPGNSGNSGGYFNDVDRDDGRYPPRPRPRPPAGGGGGGYSSYGNSDNTHGRGGYRLNSRYGNTYGGDHHSTYGNPEGNMVAKIVSPIVSVVVVTLLGAAASYFKLNNRRNCFRTHEPENV

SEQ ID NO: 32884 - protein, 13 aa, Homo sapiens
LLLPLATLFPMYT

SEQ ID NO: 32885 - protein, 15 aa, Homo sapiens
LETLLSLLRSLLMLA

SEQ ID NO: 32886 - protein, 38 aa, Homo sapiens
LGTELAFWVFSCLVLLLLPQGSCSPRSLRVMCWLARNY

SEQ ID NO: 32887 - protein, 9 aa, Homo sapiens
VCLFWAFLF

SEQ ID NO: 32888 - protein, 19 aa, Homo sapiens
LHRQVNPEPKEQSWRHHTT

SEQ ID NO: 32889 - protein, 13 aa, Homo sapiens
RILWYCLWFWRTQ

SEQ ID NO: 32890 - protein, 24 aa, Homo sapiens
RSNLTQALLLFQMLHLVLAITRPL

SEQ ID NO: 32891 - protein, 28 aa, Homo sapiens
ITNICFPILFQTFLLCYSWEITSPRYRL

SEQ ID NO: 32892 - protein, 9 aa, Homo sapiens
ILLPFLLRV

SEQ ID NO: 32893 - protein, 38 aa, Homo sapiens
ICLQALIALLIPPLDLLETMVIITVMVPIQKWKAVCLE

SEQ ID NO: 32894 - protein, 52 aa, Homo sapiens
MKRFLFLLLTISLLVMVQREAWMFRNAKKTGLSHFRNNWSLKSDCYSRRQLW

SEQ ID NO: 32895 - protein, 139 aa, Homo sapiens
LQSWRRVYFRLWNAALGGFLAVPDHVEDMKAGRVVVADPQAGGSCIWYYEDGLLKNQMAPTMSLQVIGPPSPGSKVVLWAESRLPRQTWSISESGHICSQMFEGQILDVKGGRGYDRDHVVLWEPDEDRASQIWTIHVL

SEQ ID NO: 32896 - protein, 49 aa, Homo sapiens
IQLKEETLFQKSWIYTGLCLLGDCCFMLHYWKSHVWCGEAHEDYGTALR

SEQ ID NO: 32897 - protein, 27 aa, Homo sapiens
ILDLYWPMPSWGLLFHASLLEISCMVW

SEQ ID NO: 32898 - protein, 10 aa, Homo sapiens
TFLPLLLFFN

SEQ ID NO: 32899 - protein, 11 aa, Homo sapiens
LILTNGSRRRQ

SEQ ID NO: 32900 - protein, 22 aa, Homo sapiens
TAKVSSWFIAWLINSLFRISSQ

SEQ ID NO: 32901 - protein, 10 aa, Homo sapiens
ILGLLLHLMG

SEQ ID NO: 32902 - protein, 62 aa, Homo sapiens
LSAAVLCAAGPSFGWHHTVELLGCLCSNMAVEVNGHCWSLSWNWSLGTKSSISSRRRNVCGV

SEQ ID NO: 32903 - protein, 64 aa, Homo sapiens
LSAAVLCAAGPSFGWHHTVELLGCLCSNMAVEVNGHCWSLSWNWSLGTKSSISKEKRVWSLKPC

SEQ ID NO: 32904 - protein, 14 aa, Homo sapiens
LHVPIPGFRARWHC

SEQ ID NO: 32905 - protein, 16 aa, Homo sapiens
MLVCIFAVLLRIRTMN

SEQ ID NO: 32906 - protein, 29 aa, Homo sapiens
VSAIILLLLVLLILCFIKRSKGGKYSGSL

SEQ ID NO: 32907 - protein, 8 aa, Homo sapiens
LVLLMWCM

SEQ ID NO: 32908 - protein, 11 aa, Homo sapiens
MACFILALSKR

SEQ ID NO: 32909 - protein, 67 aa, Homo sapiens
KEPEKLRKLFIGGLSFETTDDSLREHFEKWGTLTDCVVMRDPQTKRSRGFGFVTYSCVEEVDAAMCA

SEQ ID NO: 32910 - protein, 216 aa, Homo sapiens
LLLPWCRGPAGRMEQDPKPPRLRLWALIPWLPRKQRPRISQTSLPVPGPGSGPQRDSDEGVLKEISITHHVKAGSEKADPSHFELLKVLGQGSFGKVFLVRKVTRPDSGHLYAMKVLKKATLKVRDRVRTKMERDILADVNHPFVVKLHYAFQTEGKLYLILDFLRGGDLFTRLSKEVIYMIQKKNIHEEVFLPPQPPLFPSIGDVHGGGCEVLPG

SEQ ID NO: 32911 - protein, 756 aa, Homo sapiens
LLLPWCRGPAGRMEQDPKPPRLRLWALIPWLPRKQRPRISQTSLPVPGPGSGPQRDSDEGVLKEISITHHVKAGSEKADPSHFELLKVLGQGSFGKVFLVRKVTRPDSGHLYAMKVLKKATLKVRDRVRTKMERDILADVNHPFVVKLHYAFQTEGKLYLILDFLRGGDLFTRLSKEVMFTEEDVKFYLAELALGLDHLHSLGIIYRDLKPENILLDEEGHIKLTDFGLSKEAIDHEKKAYSFCGTVEYMAPEVVNRQGHSHSADWWSYGVLMFEMLTGSLPFQGKDRKETMTLILKAKLGMPQFLSTEAQSLLRALFKRNPANRLGSGPDGAEEIKRHVFYSTIDWNKLYRREIKPPFKPAVAQPDDTFYFDTEFTSRTPKDSPGIPPSAGAHQLFRGFSFVATGLMEDDGKPRAPQAPLHSVVQQLHGKNLVFSDGYVVKETIGVGSYSECKRCVHKATNMEYAVKVIDKSKRDPSEEIEILLRYGQHPNIITLKDVYDDGKHVYLVTELMRGGELLDKILRQKFFSEREASFVLHTIGKTVEYLHSQGVVHRDLKPSNILYVDESGNPECLRICDFGFAKQLRAENGLLMTPCYTANFVAPEVLKRQGYDEGCDIWSLGILLYTMLAGYTPFANGPSDTPEEILTRIGSGKFTLSGGNWNTVSETAKDLVSKMLHVDPHQRLTAKQVLQHPWVTQKDKLPQSQLSHQDLQLVKGAMAATYSALNSSKPTPQLKPIESSILAQRRVRKLPSTTL

SEQ ID NO: 32912 - protein, 496 aa, Homo sapiens
ISLEMANNYKKIVLLKGLEVINDYHFRIVKSLLSNDLKLNPKMKEEYDKIQIADLMEEKFPGDAGLGKLIEFFKEIPTLGDLAETLKREKLKVANKIESIPVKGIIPSKKTKQKEVYPATPACTPSNRLTAKGAEETLGPQKRKKPSEEETGTKRSKMSKEQTRPSCSAGASTSTAMGRSPPPQTSSSAPPNTSSTESLKPLANRHATASKNIFREDPIIAMVLNATKVFKYESSENEQRRMFHATVATQTQFFHVKVLNINLKRKFIKKRIIIISNYSKRNSLLEVNEASSVSEAGPDQTFEVPKDIIRRAKKIPKINILHKQTSGYIVYGLFMLHTKIVNRKTTIYEIQDKTGSMAVVGKGECHNIPCEKGDKLRLFCFRLRKRENMSKLMSEMHSFIQIQKNTNQRSHDSRSMALPQEQSQHPKPSEASTTLPESHLKTPQMPPTTPSSSSFTKKDETHPGAQSSPANFRITSPTVAPPLSSDTSTNRHPAVP

SEQ ID NO: 32913 - protein, 456 aa, Homo sapiens
ISLEMANNYKKIVLLKGLEVINDYHFRIVKSLLSNDLKLNPKMKEEYDKIQIADLMEEKFPGDAGLGKLIEFFKEIPTLGDLAETLKREKLKVKGIIPSKKTKQKEVYPATPACTPSNRLTAKGAEETLGPQKRKKPSEEETGTKRSKMSKEQTRPSCSAGASTSTAMGRSPPPQTSSSAPPNTSSTESLKPLANRHATASKNIFREDPIIAMVLNATKVFKYESSENEQRRMFHATVATQTQFFHVKVLNINLKRKFIKKRIIIISNYSKRNSLLEVNEASSVSEAGPDQTFEVPKDIIRRAKKIPKINILHKQTSGYIVYGLFMLHTKIVNRKTTIYEIQDKTGSMAVVGKGECHNIPCEKGDKLRLFCFRLRKRENMSKLMSEMHSFIQIQKNTNQRSHDSRSMALPQEQSQHPKPSEASTTLPESHLKTPQMPPTTPSSSSFTKVTKDKDIK

SEQ ID NO: 32914 - protein, 41 aa, Homo sapiens
RLAGSGALLHWRPGWRLCERSGCSLVWAPAGGALSERCGPE

SEQ ID NO: 32915 - protein, 15 aa, Homo sapiens
LLLPLGVFGSLVLLR

SEQ ID NO: 32916 - protein, 14 aa, Homo sapiens
KPRTKWMFMVMLSS

SEQ ID NO: 32917 - protein, 9 aa, Homo sapiens
LILIYFSMT

SEQ ID NO: 32918 - protein, 10 aa, Homo sapiens
LEYMIVPRRF

SEQ ID NO: 32919 - protein, 15 aa, Homo sapiens
VASGMCCWLLQVLLE

SEQ ID NO: 32920 - protein, 19 aa, Homo sapiens
IMVYLWLAMVILMGKNTGL

SEQ ID NO: 32921 - protein, 14 aa, Homo sapiens
VPMIPREAWTMPDV

SEQ ID NO: 32922 - protein, 9 aa, Homo sapiens
ILGLLLGFT

SEQ ID NO: 32923 - protein, 23 aa, Homo sapiens
LISATSPRSLLLELKTCWGFKQE

SEQ ID NO: 32924 - protein, 47 aa, Homo sapiens
LKPTVLGFLACGISLVGLHTKPCRSAAFPDSPVLSECKGLPCRRCVL

SEQ ID NO: 32925 - protein, 8 aa, Homo sapiens
ILLPQRTL

SEQ ID NO: 32926 - protein, 225 aa, Homo sapiens
IVRTKMLRLLLALNLFPSIQVTGNKILVKQSPMLVAYDNAVNLSCKYSYNLFSREFRASLHKGLDSAVEVCVVYGNYSQQLQVYSKTGFNCDGKLGNESVTFYLQNLYVNQTDIYFCKIEVMYPPPYLDNEKSNGTIIHVKGKHLCPSPLFPGPSKPFWVLVVVGGVLACYSLLVTVAFIIFWVRSKRSRLLHSDYMNMTPRRPGPTRKHYQPYAPPRDFAAYRS

SEQ ID NO: 32927 - protein, 22 aa, Homo sapiens
MVIISLCVLRCLVVVEDGVFYE

SEQ ID NO: 32928 - protein, 24 aa, Homo sapiens
MLMTKELILKSAWLFLISSITMSV

SEQ ID NO: 32929 - protein, 8 aa, Homo sapiens
LLFLILLS

SEQ ID NO: 32930 - protein, 19 aa, Homo sapiens
LGILFLLWMQNMPTTILEK

SEQ ID NO: 32931 - protein, 72 aa, Homo sapiens
VLELVICFFSIWSILGLSGFHTYLVASNLTTNEDIKGSWSSKRGGEASVNPYSHKSIITNCCAVLCGPLPPR

SEQ ID NO: 32932 - protein, 16 aa, Homo sapiens
VLVLFSATFLMIRDIY

SEQ ID NO: 32933 - protein, 12 aa, Homo sapiens
IDTWLLSMLCLL

SEQ ID NO: 32934 - protein, 9 aa, Homo sapiens
IVILMMSLL

SEQ ID NO: 32935 - protein, 11 aa, Homo sapiens
ILVKTVLLLLH

SEQ ID NO: 32936 - protein, 10 aa, Homo sapiens
VLLSSWLLFL

SEQ ID NO: 32937 - protein, 12 aa, Homo sapiens
LCVFFFSFFPSM

SEQ ID NO: 32938 - protein, 250 aa, Homo sapiens
LFGCAVVILPAHLQPQTAGGGRGMPGCRISACGPGAQEGTAEQRSPPPPWDPMPSSQPPPPTPTLTPTPTPGQSPPLPDAAGASAGAAEDQELQRWRQGASGIAGLAGPGGGSGAAAGAGGRALELAEARRRLLEVEGRRRLVSELESRVLQLHRVFLAAELRLAHRAESLSRLSGGVAQAELYLAAHGSRLKKGPRRGRRGRPPALLASALGLGGCVPWGAGRLRRGHGPEPDSPFRRSPPRGPASPQR

SEQ ID NO: 32939 - protein, 38 aa, Homo sapiens
ISPKRSLYIKRRCGSWGNQDFLGHPRCAPLGRGGRSAQ

SEQ ID NO: 32940 - protein, 19 aa, Homo sapiens
IAATLSSLASFTFSFSLRC

SEQ ID NO: 32941 - protein, 18 aa, Homo sapiens
IWCWCFSLWLFHHRLQCP

SEQ ID NO: 32942 - protein, 13 aa, Homo sapiens
LDLLFVSSMLYIM

SEQ ID NO: 32943 - protein, 23 aa, Homo sapiens
TLDLLIFLVMLLVQIQIRQKTAL

SEQ ID NO: 32944 - protein, 15 aa, Homo sapiens
IVLCVLLDPFCLLLL

SEQ ID NO: 32945 - protein, 34 aa, Homo sapiens
MQEYVQAPRRPVHKRYRGFSRKLLKWMKTTDFCF

SEQ ID NO: 32946 - protein, 325 aa, Homo sapiens
LPAPQGMTIRPLVDLLAVKKKQETKRSINEEIHTQFLDHLLTGIEDICGHYGHHHWKDKLNRFNKKYVKKCLIAGERSKEPQLIAFYHKMEMKQAIELVESGGMGKIPSAVSTVSMQNIHPKSLPSERILPALSKDKEEEIRKILRNNLQKTRQRLRSYNRHTLVADPYEEAWNQMLLRRQKARQLEQKINNYLTVPAHKLDSPTMSRARIGSDPLAYEPKEDLPVITIDPASPQSPESVDLVNEELKGKVLGLSRDPAKVAEEDEDDDGGIMMRSKETSSPGTDDVFTPAPSDSPSSQRIQRCLSDPGPHPEPGEGEPFFPKGQ

SEQ ID NO: 32947 - protein, 32 aa, Homo sapiens
VVLVLFLLAEWRLVFSNPVWWSPLLQSTLQRK

SEQ ID NO: 32948 - protein, 30 aa, Homo sapiens
MCLSRMFVVATLLVTAKMTHQWKQLASLLR

SEQ ID NO: 32949 - protein, 37 aa, Homo sapiens
LNIGCCHKIYLVYFSLSLMSCTIADLSTMSADCVEKL

SEQ ID NO: 32950 - protein, 20 aa, Homo sapiens
MRQLQRTIILLSLPSSIFLT

SEQ ID NO: 32951 - protein, 19 aa, Homo sapiens
VELLAFSLQFFLSCCWCIA

SEQ ID NO: 32952 - protein, 19 aa, Homo sapiens
LRSSVTAIEPPKVHYETVS

SEQ ID NO: 32953 - protein, 8 aa, Homo sapiens
MSEELTLV

SEQ ID NO: 32954 - protein, 26 aa, Homo sapiens
ILMMVLMMNVSGKSFLHLVQSLVQRL

SEQ ID NO: 32955 - protein, 126 aa, Homo sapiens
VLPALVFPLLSGWRRPKRCWARSPFLSLRRPLPALSRCTVSPTQDCPGPDMARGQQKIQSQQKNAKKQAGQKKKQGHDQKAAAKAALIYTCTVCRTQMPDPKTFKQHFESKHPKTPLPPELADVQA

SEQ ID NO: 32956 - protein, 48 aa, Homo sapiens
IVLLLLQVCMLMGMTARNLNEIDLPVRLPVFSIFEKFHVMSPKQRSYH

SEQ ID NO: 32957 - protein, 19 aa, Homo sapiens
ITTNIMDFIYQIALFWISW

SEQ ID NO: 32958 - protein, 12 aa, Homo sapiens
IQSAFWTLLATS

SEQ ID NO: 32959 - protein, 15 aa, Homo sapiens
ILLVMLLHFTELMIT

SEQ ID NO: 32960 - protein, 10 aa, Homo sapiens
MFLPLPRTLK

SEQ ID NO: 32961 - protein, 17 aa, Homo sapiens
LGRMMLLAALLILRLKK

SEQ ID NO: 32962 - protein, 19 aa, Homo sapiens
TLFFLKKYTSCLLYFALGT

SEQ ID NO: 32963 - protein, 33 aa, Homo sapiens
LELGLLLATFLLHLLDALPMLLSLQSCREPTSS

SEQ ID NO: 32964 - protein, 14 aa, Homo sapiens
LELGLLLATFLSVS

SEQ ID NO: 32965 - protein, 67 aa, Homo sapiens
LRAALTPTHSRPQLSGSQMSLSGDAEAVQVRGSVHFALHYEPGAAELRVHVIQCQGLAAARRRRSDP

SEQ ID NO: 32966 - protein, 22 aa, Homo sapiens
IEHVLLNFLGSSLLIIQLTLLA

SEQ ID NO: 32967 - protein, 30 aa, Homo sapiens
LTALTTARRKFMPKSNLRIMGNFLRSIPLN

SEQ ID NO: 32968 - protein, 10 aa, Homo sapiens
IWLNYLSLIC

SEQ ID NO: 32969 - protein, 203 aa, Homo sapiens
IRMTEKAPEPHVEEDDDDELDSKLNYKPPPQKSLKELQEMDKDDESLIKYKKTLLGDGPVVTDPKAPNVVVTRLTLVCESAPGPITMDLTGDLEALKKETIVLKEGSEYRVKIHFKVNRDIVSGLKYVQHTYRTGVKVDKATFMVGSYGPRPEEYEFLTPVEEAPKGMLARGTYHNKSFFTDDDKQDHLSWEWNLSIKKEWTE

SEQ ID NO: 32970 - protein, 17 aa, Homo sapiens
LSTCWLSLVAALWDCVK

SEQ ID NO: 32971 - protein, 15 aa, Homo sapiens
IQMAWLLYWTTVRMV

SEQ ID NO: 32972 - protein, 52 aa, Homo sapiens
KQDSKEHLCVFYRLPIIVLGRKKRVRNKTSFHCPARFCGLVLRPRSLCWKRW

SEQ ID NO: 32973 - protein, 11 aa, Homo sapiens
IVLLIQFCTVL

SEQ ID NO: 32974 - protein, 36 aa, Homo sapiens
IAGKSIFVMFLLLIKRSFLSRSYVSVASSLTLFLIH

SEQ ID NO: 32975 - protein, 30 aa, Homo sapiens
KMQPILLLLAFLLLPRADADFSFRGDHRGT

SEQ ID NO: 32976 - protein, 141 aa, Homo sapiens
VKEKPRILLLFWIIFYRRDHRNQSLLPRPALLGFGRGTHQPLVFYFFKKPSPEQPKIPLRWGPTALWWPFGENCSPARQLGPECNPSSTPAWRPGPQPWPGGQASPCGALKEGGHEPTPHPSANRGMAPSAFPVPVSNPTQ

SEQ ID NO: 32977 - protein, 35 aa, Homo sapiens
LFLSCFLGVAPSCLCCVWKWRTRQIQTPCLNYTDL

SEQ ID NO: 32978 - protein, 21 aa, Homo sapiens
LQWPFMWLAVSLVVTSTQLCL

SEQ ID NO: 32979 - protein, 25 aa, Homo sapiens
LDLRKHIFVLSLSLVQTMCFEDVSV

SEQ ID NO: 32980 - protein, 13 aa, Homo sapiens
ILLMAVMCLSPRF

SEQ ID NO: 32981 - protein, 559 aa, Homo sapiens
TAVKMAAAAWLQVLPVILLLLGAHPSPLSFFSAGPATVAAADRSKWHIPIPSGKNYFSFGKILFRNTTIFLKFDGEPCDLSLNITWYLKSADCYNEIYNFKAEEVELYLEKLKEKRGLSGKYQTSSKLFQNCSELFKTQTFSGDFMHRLPLLGEKQEAKENGTNLTFIGDKTAMHEPLQTWQDAPYIFIVHIGISSSKESSKENSLSNLFTMTVEVKGPYEYLTLEDYPLMIFFMVMCIVYVLFGVLWLAWSACYWRDLLRIQFWIGAVIFLGMLEKAVFYAEFQNIRYKGESVQGALILAELLSAVKRSLARTLVIIVSLGYGIVKPRLGVTLHKVVVAGALYLLFSGMEGVLRVTGAQTDLASLAFIPLAFLDTALCWWIFISLTQTMKLLKLRRNIVKLSLYRHFTNTLILAVAASIVFIIWTTMKFRIVTCQSDWRELWVDDAIWRLLFSMILFVIMVLWRPSANNQRFAFSPLSEEEEEDEQKEPMLKESFEGMKMRSTKQEPNGNSKVNKAQEDDLKWVEENVPSSVTDVALPALLDSDEERMITHFERSKME

SEQ ID NO: 32982 - protein, 27 aa, Homo sapiens
LDLLRYAVFILQVVIQSCLLLNHFQAL

SEQ ID NO: 32983 - protein, 10 aa, Homo sapiens
VMGSWWLVVI

SEQ ID NO: 32984 - protein, 32 aa, Homo sapiens
LPAAHLLFLSFLPAFFDANPNRPVGGEKGGKK

SEQ ID NO: 32985 - protein, 38 aa, Homo sapiens
VTVSVELGHLRWGVGVPEGLGSLNFWPPCASRRSSLMT

SEQ ID NO: 32986 - protein, 145 aa, Homo sapiens
LVNEDALQPDEPQARGPRGSWPRRRSSRRGPALPARGAAGAGTTSPGVPRARSPLGFRMVSGEAAGRPRRCHRRKTDVPQNPSPGSDPRSRQPSTPMGACLIVNPSAWTPEPTQLSVCRGPRVRGDAQAVAETTLEMLMKTGLSC

SEQ ID NO: 32987 - protein, 17 aa, Homo sapiens
MIPLSRLRCPCSRHQRQ

SEQ ID NO: 32988 - protein, 11 aa, Homo sapiens
LLSQEEVLPKS

SEQ ID NO: 32989 - protein, 13 aa, Homo sapiens
MLLLWLMHLIFRM

SEQ ID NO: 32990 - protein, 58 aa, Homo sapiens
LSVAMAMFLAGCGGPLLNDLLPCCSEDTAARKGLAHCGASQGTLVAPASDLVLSLVWG

SEQ ID NO: 32991 - protein, 31 aa, Homo sapiens
IIEKWFLTGYLISLVVLFTLDAHFSILDGKC

SEQ ID NO: 32992 - protein, 19 aa, Homo sapiens
LGFLSALLALVLRARAGSK

SEQ ID NO: 32993 - protein, 18 aa, Homo sapiens
LLLRLFWLALHVMLKLPV

SEQ ID NO: 32994 - protein, 27 aa, Homo sapiens
LPASGARAVHLAVPAVPDSLNPARSGS

SEQ ID NO: 32995 - protein, 11 aa, Homo sapiens
MKTTCYILLLV

SEQ ID NO: 32996 - protein, 20 aa, Homo sapiens
IWRLARLLISSSSTLVTCVW

SEQ ID NO: 32997 - protein, 16 aa, Homo sapiens
METSVLHLRKCMQWQN

SEQ ID NO: 32998 - protein, 7 aa, Homo sapiens
LEGSNKG

SEQ ID NO: 32999 - protein, 86 aa, Homo sapiens
KLEARVGNMSESELGRKWDRCLADAVVKIGTGFGLGIVFSLTFFKRRMWPLAFGSGMGLGMAYSNCQHDFQAPYLLHGKYVKEQEQ

SEQ ID NO: 33000 - protein, 72 aa, Homo sapiens
IKFIIPTWTKMSMVHPLKVKMKRWVNIMRPYPEHTIPDYHWQILDKGTMLGKQGRNTVLYRQSMMDTVVKHQ

SEQ ID NO: 33001 - protein, 53 aa, Homo sapiens
IMLLKIKQVGNSRIDWPYHCHCITAHVIALVHLPSQLTCCHLEYISIHYGAEW

SEQ ID NO: 33002 - protein, 8 aa, Homo sapiens
LSTFGFSW

SEQ ID NO: 33003 - protein, 24 aa, Homo sapiens
KQLNMFMALLYIGTWTFWLQPKPP

SEQ ID NO: 33004 - protein, 10 aa, Homo sapiens
IILMTLVPVL

SEQ ID NO: 33005 - protein, 23 aa, Homo sapiens
IPLKITIMAVFLCLKTVKQERII

SEQ ID NO: 33006 - protein, 10 aa, Homo sapiens
IYKILVCLAT

SEQ ID NO: 33007 - protein, 291 aa, Homo sapiens
LEPTGSAVRVFWSMGRGDRNKRSIRGFESYGSSSYGGAGGYTQSPGGFGSPAPSQAEKKSRARAQHIVPCTISQLLSATLVDEVFRIGNVEISQVTIVGIIRHAEKAPTNIVYKIDDMTAAPMDVRQWVDTDDTSSENTVVPPETYVKVAGHLRSFQNKKSLVAFKIMPLEDMNEFTTHILEVINAHMVLSKANSQPSAGRAPISNPGMSEAGNFGGNSFMPANGLTVAQNQVLNLIKACPRPEGLNFQDLKNQLKHMSVSSIKQAVDFLSNEGHIYSTVDDDHFKSTDAE

SEQ ID NO: 33008 - protein, 23 aa, Homo sapiens
IFATRDMSLFLLFIISQPTVRLV

SEQ ID NO: 33009 - protein, 33 aa, Homo sapiens
MRLLAWLIFLANWGGARAEPDEANESQRGHCTC

SEQ ID NO: 33010 - protein, 12 aa, Homo sapiens
LNCLGISLISAL

SEQ ID NO: 33011 - protein, 15 aa, Homo sapiens
LFASIMIGMTKRLKC

SEQ ID NO: 33012 - protein, 15 aa, Homo sapiens
IQVYQIMHFCMVYFL

SEQ ID NO: 33013 - protein, 26 aa, Homo sapiens
VPQVHALHDDASRELLYPSKEACGGV

SEQ ID NO: 33014 - protein, 390 aa, Homo sapiens
LDWSCPFLFFCCFLSCLPQIGLVVFCSDDTPHVPDEKLGEAAVLEIVERLTKLIREVFPDTKVYAALGNHDFHPKNQFPAGSNNIYNQIAELWKPWLSNESIALFKKGAFYCEKLPGPSGAGRIVVLNTNLYYTSNALTADMADPGQQFQWLEDVLTDASKAGDMVYIVGHVPPGFFEKTQNKAWFREGFNEKYLKVVRKHHRVIAGQFFGHHHTDSFRMLYDDAGVPISAMFITPGVTPWKTTLPGVVNGANNPAIRVFEYDRATLSLKDMVTYFMNLSQANAQGTPRWELEYQLTEAYGVPDASAHSMHTVLDRIAGDQSTLQRYYVYNSVSYSAGVCDEACSMQHVCAMRQVDIDAYTTCLYASGTTPVPQLPLLLMALLGLCTLVL

SEQ ID NO: 33015 - protein, 17 aa, Homo sapiens
IQNLFFQILFTMTLIRQ

SEQ ID NO: 33016 - protein, 541 aa, Homo sapiens
LRFVLFCNNTGVRDRSPGPGSSLPALSLSWASGRLKGKTRPFEACEAKGSRSSGLAGLAGLGRWTPGLAAGAEHRAAFSWGSGGGPGTTAGLAPPRTGRDGEVPPTRPRPRAAPRAAPTSFLPRQPRALRAGPNRGGAGEGGGRRAMPWSSRGALLRDLVLGVLGTAAFLLDLGTDLWAAVQYALGGRYLWAALVLALLGLASVALQLFSWLWLRADPAGLHGSQPPRRCLALLHLLQLGYLYRCVQELRQGLLVWQQEEPSEFDLAYADFLALDISMLRLFETFLETAPQLTLVLAIMLQSGRAEYYQWVGICTSFLGISWALLDYHRALRTCLPSKPLLGLGSSVIYFLWNLLLLWPRVLAVALFSALFPSYVALHFLGLWLVLLLWVWLQGTDFMPDPSSEWLYRVTVATILYFSWFNVAEGRTRGRAIIHFAFLLSDSILLVATWVTHSSWLPSGIPLQLWLPVGCGCFFLGLALRLVYYHWLHPSCCWKPDPDQVDGARSLLSPEGYQLPQNRRMTHLAQKFFPKAKDEAASPVKG

SEQ ID NO: 33017 - protein, 10 aa, Homo sapiens
KISWKCLLLV

SEQ ID NO: 33018 - protein, 295 aa, Homo sapiens
KGLEKARRRSRREATVPRRREARPFQTGNQLSVKMAGPELLLDSNIRLWVVLPIVIITFFVGMIRHYVSILLQSDKKLTQEQVSDSQVLIRSRVLRENGKYIPKQSFLTRKYYFNNPEDGFFKKTKRKVVPPSPMTDPTMLTDMMKGNVTNVLPMILIGGWINMTFSGFVTTKVPFPLTLRFKPMLQQGIELLTLDASWVSSASWYFLNVFGLRSIYSLILGQDNAADQSRMMQEQMTGAAMAMPADTNKAFKTEWEALELTDHQWALDDVEEELMAKDLHFEGMFKKELQTSIF

SEQ ID NO: 33019 - protein, 53 aa, Homo sapiens
IQTTGHRTTLCLISSQMRNCARYRSPAPLCLKHPLKLILSTQMRLNRILHQPR

SEQ ID NO: 33020 - protein, 15 aa, Homo sapiens
IKSQLFLRNSSLKGI

SEQ ID NO: 33021 - protein, 17 aa, Homo sapiens
ILRTLIMVILAWTPVNS

SEQ ID NO: 33022 - protein, 70 aa, Homo sapiens
LAAVLQLENLTGAASERRLGLHTLSGPSGHLLQSCSARPGIAGGFHRPVCETDKRETLLPGVLSEGTRWR

SEQ ID NO: 33023 - protein, 11 aa, Homo sapiens
RNCSQKEEGGS

SEQ ID NO: 33024 - protein, 22 aa, Homo sapiens
LGVLPSKAQIRQGTLVSTQSSI

SEQ ID NO: 33025 - protein, 722 aa, Homo sapiens
IYNSTELVTQTLPYMSQYTEKEPAAMDQESGKAVWPKPAGGYQTITGRRYGRRHAYVSFKPCMTRHERSLGRAGDDYEVLELDDVPKENSSGSSPLDQVDSSLPSEPIFEKSETEIPTCGSALNQTTESSQSFVAVHHSEEGRDTLGSSTNLHNHSEGEYIPGACSASSVQNGIALVHTDSYDPDGKHGEDNDHLQLSAEVVEGSRYQESLGNTVFELENREAEAYTGLSPPVPSFNCEVRDEFEELDSVPLVKSSAGDTEFVHQNSQEIQRSSQDEMVSTKQQNNTSQERQTEHSPEDAACGPGHICSEQNTNDREKNHGSSPEQVVRPKVRKLISSSQVDQETGFNRHEAKQRSVQRWREALEVEESGSDDLLIKCEEYDGEHDCMFLDPPYSRVITQRETENNQMTSESGATAGRQEVDNTFWNGCGDYYQLYDKDEDSSECSDGEWSASLPHRFSGTEKDQSSSDESWETLPGKDENEPELQSDSSGPEEENQELSLQEGEQTSLEEGEIPWLQYNEVNESSSDEGNEPANEFAQPAFMLDGNNNLEDDSSVSEDLDVDWSLFDGFADGLGVAEAISYVDPQFLTYMALEERLAQAMETALAHLESLAVDVEVANPPASKESIDGLPETLVLEDHTAIGQEQCCPICCSEYIKDDIATELPCHHFFHKPCVSIWLQKSGTCPVCRRHFPPAVIEASAAPSSEPDPDAPPSNDSIAEAP

SEQ ID NO: 33026 - protein, 22 aa, Homo sapiens
ISREENWSVFLWFWFGCHSVLS

SEQ ID NO: 33027 - protein, 106 aa, Homo sapiens
LLVMSGRGKGGKGLGKGGAKRHRKVLRDNIQGITKPAIRRLARRGGVKRISGLIYEETRGVLKVFLENVIRDAVTYTEHAKRKTVTAMDVVYALKRQGRTLYGFGG

SEQ ID NO: 33028 - protein, 14 aa, Homo sapiens
MVPIKLRQRSMTFI

SEQ ID NO: 33029 - protein, 26 aa, Homo sapiens
LVPRCQSSSPRLWPPLKSVAEFLWLL

SEQ ID NO: 33030 - protein, 51 aa, Homo sapiens
RVSGAQRPARAPLSDLLPPLPTGRQQDGQHQPSRGEYFRESELCQKSLNGR

SEQ ID NO: 33031 - protein, 10 aa, Homo sapiens
MGQYLLLCVF

SEQ ID NO: 33032 - protein, 235 aa, Homo sapiens
RMNHLPEDMENALTGSQSSHASLRNIHSINPTQLMARIESYEGREKKGISDVRRTFCLFVTFDLLFVTLLWIIELNVNGGIENTLEKEVMQYDYYSSYFDIFLLAVFRFKVLILAYAVCRLRHWWAIALTTAVTSAFLLAKVILSKLFSQGAFGYVLPIISFILAWIETWFLDFKVLPQEAEEENRLLIVQDASERAALIPGGLSDGQFYSPPESEAGSEEAEEKQDSEKPLLEL

SEQ ID NO: 33033 - protein, 8 aa, Homo sapiens
ILSWSFLM

SEQ ID NO: 33034 - protein, 13 aa, Homo sapiens
ILSWSFLINLIHW

SEQ ID NO: 33035 - protein, 11 aa, Homo sapiens
ISFSFPLLACV

SEQ ID NO: 33036 - protein, 22 aa, Homo sapiens
IYLIYRLCLMGLLPTKKGPIIS

SEQ ID NO: 33037 - protein, 14 aa, Homo sapiens
VQQLLLMLLWIFQV

SEQ ID NO: 33038 - protein, 246 aa, Homo sapiens
VDIIPGFSRRHYSLKEVYPVPYLTGGSESSCVVFNLDTMEAPPVTMMPVTGGTINMMEYLLQGSVLDHSLESLIHRLRGLCDNMEPETFLDHEMVFLLKGQQASPFVLRARRSMDRAGAPWHLRYLGQPEMGDKNRHALVRNCVDIATSENLTDFLMEMGFRMDHEFVAKGHLFRKGIMKIMVYKIFRILVPGNTDSTEALSLSYLVELSVVAPAGQDMVSDDMKNFAEQLKPLVHLEKIDPKRLM

SEQ ID NO: 33039 - protein, 115 aa, Homo sapiens
KNKMDGEEKTYGGCEGPDAMYVKLISSDGHEFIVKREHALTSGTIKAMLSGPGQFAENETNEVNFREIPSHVLSKVCMYFTYKVRYTNSSTEIPEFPIAPEIALELLMAANFLDC

SEQ ID NO: 33040 - protein, 23 aa, Homo sapiens
IWISKETTKLSSRLQALLAMWAC

SEQ ID NO: 33041 - protein, 13 aa, Homo sapiens
VILTGGKVKPIKA

SEQ ID NO: 33042 - protein, 57 aa, Homo sapiens
VSSSAYGRQLAGRCGVDWRWRERLAARPGGGASGRCAPQTVLKAGAIRDRRLSVAGG

SEQ ID NO: 33043 - protein, 8 aa, Homo sapiens
LAFSLCIL

SEQ ID NO: 33044 - protein, 59 aa, Homo sapiens
LDLLRIPSNSYLERRRSALRILALTFNFRVLYIEGRVGKLIFFFNREGLTIFGRLGAKD

SEQ ID NO: 33045 - protein, 39 aa, Homo sapiens
LDLLRIPSNSYLERRRSALRILALTFNFRVLYIEGRVAT

SEQ ID NO: 33046 - protein, 60 aa, Homo sapiens
LQDLLRIPSNSYLERRRSALRILALTFNFRVLYIEGRVGKLIFFFNREGLTIFGRLGAKD

SEQ ID NO: 33047 - protein, 16 aa, Homo sapiens
MPKMEKFLTILLIMAG

SEQ ID NO: 33048 - protein, 20 aa, Homo sapiens
IQCWILKIRHLILPLYLHSL

SEQ ID NO: 33049 - protein, 535 aa, Homo sapiens
VRTRGRMLLAVLYCLLWSFQTSAGHFPRACVSSKNLMEKECCPPWSGDRSPCGQLSGRGSCQNILLSNAPLGPQFPFTGVDDRESWPSVFYNRTCQCSGNFMGFNCGNCKFGFWGPNCTERRLLVRRNIFDLSAPEKDKFFAYLTLAKHTISSDYVIPIGTYGQMKNGSTPMFNDINIYDLFVWMHYYVSMDALLGGSEIWRDIDFAHEAPAFLPWHRLFLLRWEQEIQKLTGDENFTIPYWDWRDAEKCDICTDEYMGGQHPTNPNLLSPASFFSSWQIVCSRLEEYNSHQSLCNGTPEGPLRRNPGNHDKSRTPRLPSSADVEFCLSLTQYESGSMDKAANFSFRNTLEGFASPLTGIADASQSSMHNALHIYMNGTMSQVQGSANDPIFLLHHAFVDSIFEQWLRRHRPLQEVYPEANAPIGHNRESYMVPFIPLYRNGDFFISSKDLGYDYSYLQDSDPDSFQDYIKSYLEQASRIWSWLLGAAMVGAVLTALLAGLVSLLCRHKRKQLPEEKQPLLMEKEDYHSLYQSHL

SEQ ID NO: 33050 - protein, 200 aa, Homo sapiens
REKMAALGEPVRLERDICRAIELLEKLQRSGEVPPQKLQALQRVLQSEFCNAVREVYEHVYETVDISSSPEVRANATAKATVAAFAASEGHSHPRVVELPKTEEGLGFNIMGGKEQNSPIYISRIIPGGIADRHGGLKRGDQLLSVNGVSVEGEHHEKAVELLKAAQGKVKLVVRYTPKVLEEMESRFEKMRSAKRRQQT

SEQ ID NO: 33051 - protein, 33 aa, Homo sapiens
LWSSWHIIMLWQALFLVVVSIQREIQKSPMDSG

SEQ ID NO: 33052 - protein, 19 aa, Homo sapiens
LWSLEILFIHFLIQILRMT

SEQ ID NO: 33053 - protein, 447 aa, Homo sapiens
LEKFHSTSSKRGVHDGGRGKLGEDRKMSPKRIAKRRSPPADAIPKSKKVKVSHRSHSTEPGLVLTLGQGDVGQLGLGENVMERKKPALVSIPEDVVQAEAGGMHTVCLSKSGQVYSFGCNDEGALGRDTSVEGSEMVPGKVELQEKVVQVSAGDSHTAALTDDGRVFLWGSFRDNNGVIGLLEPMKKSMVPVQVQLDVPVVKVASGNDHLVMLTADGDLYTLGCGEQGQLGRVPELFANRGGRQGLERLLVPKCVMLKSRGSRGHVRFQDAFCGAYFTFAISHEGHVYGFGLSNYHQLGTPGTESCFIPQNLTSFKNSTKSWVGFSGGQHHTVCMDSEGKAYSLGRAEYGRLGLGEGAEEKSIPTLISRLPAVSSVACGASVGYAVTKDGRVFAWGMGTNYQLGTGQDEDAWSPVEMMGKQLENRVVLSVSSGGQHTVLLVKDKEQS

SEQ ID NO: 33054 - protein, 13 aa, Homo sapiens
VVLRLRPKNRDLT

SEQ ID NO: 33055 - protein, 7 aa, Homo sapiens
LFFMICI

SEQ ID NO: 33056 - protein, 16 aa, Homo sapiens
MQDYFWIMIKLFRLIL

SEQ ID NO: 33057 - protein, 14 aa, Homo sapiens
LLEALLRKLSLLVV

SEQ ID NO: 33058 - protein, 20 aa, Homo sapiens
RSWPLLVTIGCTTWFLSSLQ

SEQ ID NO: 33059 - protein, 16 aa, Homo sapiens
VPLSLPMLMFMALTFW

SEQ ID NO: 33060 - protein, 12 aa, Homo sapiens
LFIAFFVMLLRC

SEQ ID NO: 33061 - protein, 60 aa, Homo sapiens
VVFFSFRFMLHVKLSSFVTMDLWSWDNLYGKQKARTPVILGRNNSMLMQKIMQCATELQR

SEQ ID NO: 33062 - protein, 21 aa, Homo sapiens
RSQPLGLWRYDVFCTPWHSPI

SEQ ID NO: 33063 - protein, 51 aa, Homo sapiens
TPPGVEGQPAARREMVGWAPAGPRRRCPEPGLGTPPPAPTERSSASSSPHP

SEQ ID NO: 33064 - protein, 15 aa, Homo sapiens
MFWCCVLTLKLTNIL

SEQ ID NO: 33065 - protein, 18 aa, Homo sapiens
RPENPPAVMGHSRAGEVS

SEQ ID NO: 33066 - protein, 19 aa, Homo sapiens
KEELQLHMVMLFVYLSPWA

SEQ ID NO: 33067 - protein, 12 aa, Homo sapiens
LPGPICSVKGEP

SEQ ID NO: 33068 - protein, 99 aa, Homo sapiens
ISTNFSLCQSVQCPSEETITDLVSVPCQWGELNVPHLPLSLGTLVMSAECAGSQKWVFLHMQSTFLASCTKITLMPRKEKMMEKERKRKKIILTRNSFS

SEQ ID NO: 33069 - protein, 8 aa, Homo sapiens
IISLVLIL

SEQ ID NO: 33070 - protein, 22 aa, Homo sapiens
IRLSLAFILILDGLLFWVPSGC

SEQ ID NO: 33071 - protein, 10 aa, Homo sapiens
IIMVDIMWFI

SEQ ID NO: 33072 - protein, 20 aa, Homo sapiens
LNGFSSQECIMSVKARCSCQ

SEQ ID NO: 33073 - protein, 1961 aa, Homo sapiens
IPLQGGDRRSLPSMAPTWGPGMVSVVGPMGLLVVLLVGGCAAEEPPRFIKEPKDQIGVSGGVASFVCQATGDPKPRVTWNKKGKKVNSQRFETIEFDESAGAVLRIQPLRTPRDENVYECVAQNSVGEITVHAKLTVLREDQLPSGFPNIDMGPQLKVVERTRTATMLCAASGNPDPEITWFKDFLPVDPSASNGRIKQLRSETFESTPIRGALQIESSEETDQGKYECVATNSAGVRYSSPANLYVRELREVRRVAPRFSILPMSHEIMPGGNVNITCVAVGSPMPYVKWMQGAEDLTPEDDMPVGRNVLELTDVKDSANYTCVAMSSLGVIEAVAQITVKSLPKAPGTPMVTENTATSITITWDSGNPDPVSYYVIEYKSKSQDGPYQIKEDITTTRYSIGGLSPNSEYEIWVSAVNSIGQGPPSESVVTRTGEQAPASAPRNVQARMLSATTMIVQWEEPVEPNGLIRGYRVYYTMEPEHPVGNWQKHNVDDSLLTTVGSLLEDETYTVRVLAFTSVGDGPLSDPIQVKTQQGVPGQPMNLRAEARSETSITLSWSPPRQESIIKYELLFREGDHGREVGRTFDPTTSYVVEDLKPNTEYAFRLAARSPQGLGAFTPVVRQRTLQSKPSAPPQDVKCVSVRSTAILVSWRPPPPETHNGALVGYSVRYRPLGSEDPEPKEVNGIPPTTTQILLEALEKWTQYRITTVAHTEVGPGPESSPVVVRTDEDVPSAPPRKVEAEALNATAIRVLWRSPAPGRQHGQIRGYQVHYVRMEGAEARGPPRIKDVMLADAQWETDDTAEYEMVITNLQPETAYSITVAAYTMKGDGARSKPKVVVTKGAVLGRPTLSVQQTPEGSLLARWEPPAGTAEDQVLGYRLQFGREDSTPLATLEFPPSEDRYTASGVHKGATYVFRLAARSRGGLGEEAAEVLSIPEDTPRGHPQILEAAGNASAGTVLLRWLPPVPAERNGAIVKYTVAVREAGALGPARETELPAAAEPGAENALTLQGLKPDTAYDLQVRAHTRRGPGPFSPPVRYRTFLRDQVSPKNFKVKMIMKTSVLLSWEFPDNYNSPTPYKIQYNGLTLDVDGRTTKKLITHLKPHTFYNFVLTNRGSSLGGLQQTVTAWTAFNLLNGKPSVAPKPDADGFIMVYLPDGQSPVPVQSYFIVMVPLRKSRGGQFLTPLGSPEDMDLEELIQDISRLQRRSLRHSRQLEVPRPYIAARFSVLPPTFHPGDQKQYGGFDNRGLEPGHRYVLFVLAVLQKSEPTFAASPFSDPFQLDNPDPQPIVDGEEGLIWVIGPVLAVVFIICIVIAILLYKNKPDSKRKDSEPRTKCLLNNADLAPHHPKDPVEMRRINFQTPDSGLRSPLREPGFHFESMLSHPPIPIADMAEHTERLKANDSLKLSQEYESIDPGQQFTWEHSNLEVNKPKNRYANVIAYDHSRVILQPIEGIMGSDYINANYVDGYRCQNAYIATQGPLPETFGDFWRMVWEQRSATIVMMTRLEEKSRIKCDQYWPNRGTETYGFIQVTLLDTIELATFCVRTFSLHKNGSSEKREVRQFQFTAWPDHGVPEYPTPFLAFLRRVKTCNPPDAGPIVVHCSAGVGRTGCFIVIDAMLERIKPEKTVDVYGHVTLMRSQRNYMVQTEDQYSFIHEALLEAVGCGNTEVPARSLYAYIQKLAQVEPGEHVTGMELEFKRLANSKAHTSRFISANLPCNKFKNRLVNIMPYESTRVCLQPIRGVEGSDYINASFIDGYRQQKAYIATQGPLAETTEDFWRMLWENNSTIVVMLTKLREMGREKCHQYWPAERSARYQYFVVDPMAEYNMPQYILREFKVTDARDGQSRTVRQFQFTDWPEQGVPKSGEGFIDFIGQVHKTKEQFGQDGPISVHCSAGVGRTGVFITLSIVLERMRYEGVVDIFQTVKMLRTQRPAMVQTEDEYQFCYQAALEYLGSFDHYAT

SEQ ID NO: 33074 - protein, 22 aa, Homo sapiens
KSLPFQVAEQRSITFSIKRQEI

SEQ ID NO: 33075 - protein, 18 aa, Homo sapiens
RTAPWTCSLCWTPLRAWP

SEQ ID NO: 33076 - protein, 773 aa, Homo sapiens
RVAMLPGLALLLLAAWTARALEVPTDGNAGLLAEPQIAMFCGRLNMHMNVQNGKWDSDPSGTKTCIDTKEGILQYCQEVYPELQITNVVEANQPVTIQNWCKRGRKQCKTHPHFVIPYRCLVGEFVSDALLVPDKCKFLHQERMDVCETHLHWHTVAKETCSEKSTNLHDYGMLLPCGIDKFRGVEFVCCPLAEESDNVDSADAEEDDSDVWWGGADTDYADGSEDKVVEVAEEEEVAEVEEEEADDDEDDEDGDEVEEEAEEPYEEATERTTSIATTTTTTTESVEEVVREVCSEQAETGPCRAMISRWYFDVTEGKCAPFFYGGCGGNRNNFDTEEYCMAVCGSAMSQSLLKTTQEPLARDPVKLPTTAASTPDAVDKYLETPGDENEHAHFQKAKERLEAKHRERMSQVMREWEEAERQAKNLPKADKKAVIQHFQEKVESLEQEAANERQQLVETHMARVEAMLNDRRRLALENYITALQAVPPRPRHVFNMLKKYVRAEQKDRQHTLKHFEHVRMVDPKKAAQIRSQVMTHLRVIYERMNQSLSLLYNVPAVAEEIQDEVDELLQKEQNYSDDVLANMISEPRISYGNDALMPSLTETKTTVELLPVNGEFSLDDLQPWHSFGADSVPANTENEVEPVDARPAADRGLTTRPGSGLTNIKTEEISEVKMDAEFRHDSGYEVHHQKLVFFAEDVGSNKGAIIGLMVGGVVIATVIVITLVMLKKKQYTSIHHGVVEVDAAVTPEERHLSKMQQNGYENPTYKFFEQMQN

SEQ ID NO: 33077 - protein, 9 aa, Homo sapiens
VSPEDLAKV

SEQ ID NO: 33078 - protein, 16 aa, Homo sapiens
VTSPMWPMGLSLISFV

SEQ ID NO: 33079 - protein, 14 aa, Homo sapiens
ITLLQLPLMTVLTA

SEQ ID NO: 33080 - protein, 506 aa, Homo sapiens
LGPGPAITAVAGMPRVYIGRLSYQARERDVERFFKGYGKILEVDLKNGYGFVEFDDLRDADDAVYELNGKDLCGERVIVEHARGPRRDGSYGSGRSGYGYRRSGRDKYGPPTRTEYRLIVENLSSRCSWQDLKDYMRQAGEVTYADAHKGRKNEGVIEFVSYSDMKRALEKLDGTEVNGRKIRLVEDKPGSRRRRSYSRSRSHSRSRSRSRHSRKSRSRSGSSKSSHSKSRSRSRSGSRSRSKSRSRSQSRSRSKKEKSRSPSKEKSRSRSHSAGKSRSKSKDQAEEKIQNNDNVGKPKSRSPSRHKSKSKSRSRSQERRVEEEKRGSVSRGRSQEKSLRQSRSRSRSKGGSRSRSRSRSKSKDKRKGRKRSREESRSRSRSRSKSERSRKRGSKRDSKAGSSKKKKKEDTDRSQSRSPSRSVSKEREHAKSESSQREGRGESENAGTNQETRSRSRSNSKSKPNLPSESRSRSKSASKTRSRSKSRSRSASRSPSRSRSRSHSRS

SEQ ID NO: 33081 - protein, 42 aa, Homo sapiens
LILPMKIPRQLPQMSKVKVMPHHSLKMRNLHFHILTWPSWMT

SEQ ID NO: 33082 - protein, 70 aa, Homo sapiens
MGPPEWGLHRIILFFLYSSSLLCSEPTHVFGRTRWLTLANGNQKTSESNLVVTYPQLRGASPCPKTRNPH

SEQ ID NO: 33083 - protein, 378 aa, Homo sapiens
LVGASMWVCSTLWRVRTPARQWRGLLPASGCHGPAASSYSASAEPARVRALVYGHHGDPAKVVELKNLELAAVRGSDVRVKMLAAPINPSDINMIQGNYGFLPELPAVGGNEGVAQVVAVGSNVTGLKPGDWVIPANAGLGTWRTEAVFSEEALIQVPSDIPLQSAATLGVNPCTAYRMLMDFEQLQPGDSVIQNASNSGVGQAVIQIAAALGLRTINVVRDRPDIQKLSDRLKSLGAEHVITEEELRRPEMKNFFKDMPQPRLALNCVGGKSSTELLRQLARGGTMVTYGGMAKQPVVASVSLLIFKDLKLRGFWLSQWKKDHSPDQFKELILTLCDLIRRGQLTAPACSQVPLQDYQSALEASMKPFISSKQILTM

SEQ ID NO: 33084 - protein, 506 aa, Homo sapiens
VPAAARAARTMRVLSGTSLMLCSLLLLLQALCSPGLAPQSRGHLCRTRPTDLVFVVDSSRSVRPVEFEKVKVFLSQVIESLDVGPNATRVGMVNYASTVKQEFSLRAHVSKAALLQAVRRIQPLSTGTMTGLAIQFAITKAFGDAEGGRSRSPDISKVVIVVTDGRPQDSVQDVSARARASGVELFAIGVGSVDKATLRQIASEPQDEHVDYVESYSVIEKLSRKFQEAFCVVSDLCATGDHDCEQVCISSPGSYTCACHEGFTLNSDGKTCNVCSGGGGSSATDLVFLIDGSKSVRPENFELVKKFISQIVDTLDVSDKLAQVGLVQYSSSVRQEFPLGRFHTKKDIKAAVRNMSYMEKGTMTGAALKYLIDNSFTVSSGARPGAQKVGIVFTDGRSQDYINDAAKKAKDLGFKMFAVGVGNAVEDELREIASEPVAEHYFYTADFKTINQIGKKLQKKICVEEDPCACESLVKFQAKVEGLLQALTRKLEAVSKRLAILENTVV

SEQ ID NO: 33085 - protein, 21 aa, Homo sapiens
LASDLGLGLQALASLLCVLSI

SEQ ID NO: 33086 - protein, 135 aa, Homo sapiens
MEELTEVITAAEFHPHQCNVFVYSSSKGTIRLCDMRSSALCDRHSKFFEEPEDPSSRSFFSEIISSISDVKFSHSGRYMMTRDPVGEGVGPQHRAGRWRPTRSTSTCAASSALSMRTTASLTSLSVAGTVRIAPS

SEQ ID NO: 33087 - protein, 122 aa, Homo sapiens
LSVSVVRPTVFVRLLSSVRLPVRPSVPQSLCGPFTVLSLARAASQALPQLAPDHLGPSAETGMGAEGAPDFLSCPRVRRVRVVTDHRAELWVGRAGIEGGSGVRGECPVAGSGPVGRPTSVL

SEQ ID NO: 33088 - protein, 193 aa, Homo sapiens
LLGPLELTAPGNWETHPWCSRESLLPTISAPQGPGATMWRCPLGLLLLLPLAGHLALGAQQGRGRRELAPGLHLRGIRDAGGRYCQEQDLCCRGRADDCALPYLGAICYCDLFCNRTVSDCCPDFWDFCLGVPPPFPPIQGCMHGGRIYPVLGTYWDNCNRCTCQENRQWQCDQEPCLVDPDMIKAINQGNYG

SEQ ID NO: 33089 - protein, 284 aa, Homo sapiens
MVLGSSTQVKIGGSWNPAAAGGLKIKLQKALDLVALQCQWAPEGQARAEQEADRATFILQTVLNPGEVLPTAFEASEKWPNLIHEPLDQGNCAGSWAFSTAAVASDRVSIHSLGHMTPVLSPQNLLSCDTHQQQGCRGGRLDGAWWFLRRRGYAATGDVGREEGKELRGHGLGHDALSLSAFAPSCCLCRVVSDHCYPFSGRERDEAGPAPPCMMHSRAMGRGKRQATAHCPNSYVNNNDIYQVTPVYRLGSNDKEIMKELMENGPVQGKPPYPAPWFQKLVPA

SEQ ID NO: 33090 - protein, 473 aa, Homo sapiens
MSVPPPRSERCPWASLLLPCSACGAVPSPLLSSASARNAMASLWSSCVVLPLLALTWMSAVLAMTDRRSVLFQALFAVFNSAQGFVITAVHCFLRREVQDVVKCQMGVCRADESEDSPDSCKNGQLQILSDFEKDVDLACQTVLFKEVNTCNPSTITGTLSRLSLDEDEEPKSCLVGPEGSLSFSPLPGNILVPMAASPGLGEPPPPQEANPVYMCGEGGLRQLDLTWLRPTEPGSEGDYMVLPRRTLSLQPGGGGGGGEDAPRARPEGTPRRAAKTVAHTEGYPSFLSVDHSGLGLGPAYGSLQNPYGMTFQPPPPTPSARQVPEPGERSRTMPRTVPGSTMKMGSLERKKLRYSDLDFEVMHTRKRHSELYHELNQKFHTFDRYRSQSTAKREKRWSVSSGGAAERSVCTDKPSPGERPSLSQHRRHQSWSTFKSMTLGSLPPKPRERLTLHRAAAWEPTEPPDGDFQTEV

SEQ ID NO: 33091 - protein, 26 aa, Homo sapiens
VDRHVPGGGRRRPQHRRPCAQSPTQL

SEQ ID NO: 33092 - protein, 40 aa, Homo sapiens
LYVVGFFGVRRYPSAEIEAQIEFGFKWILNTLLILKREAS

SEQ ID NO: 33093 - protein, 497 aa, Homo sapiens
LRTRAASFPVLSLAGSLGSASVATAPALPPPPTAARASVAAASLSRSLDRTSSQMQRRDDPAARMSRSSGRSGSMDPSGAHPSVRQTPSRQPPLPHRSRGGGGGSRGGARASPATQPPPLLPPSATGPDATVGGPAPTPLLPPSATASVKMEPENKYLPELMAEKDSLDPSFTHAMQLLTAEIEKIQKGDSKKDDEENYLDLFSHKNMKLKERVLIPVKQYPKFNFVGKILGPQGNTIKRLQEETGAKISVLGKGSMRDKAKEEELRKGGDPKYAHLNMDLHVFIEVFGPPCEAYALMAHAMEEVKKFLVPDMMDDICQEQFLELSYLNGVPEPSRGRGVPVRGRGAAPPPPPVPRGRGVGPPRGALVRGTPVRGAITRGATVTRGVPPPPTVRGAPAPRARTAGIQRIPLPPPPAPETYEEYGYDDTYAEQSYEGYEGYYSQSQGDSEYYDYGHGEVQDSYEAYGQDDWNGTRPSLKAPPARPVKGAYREHPYGRY

SEQ ID NO: 33094 - protein, 388 aa, Homo sapiens
LDRTSSQMQRRDDPAARMSRSSGRSGSMDPSGAHPSVRQTPSRQPPLPHRSRGGGGGSRGGARASPATQPPPLLPPSATGPDATVGGPAPTPLLPPSATASVKMEPENKYLPELMAEKDSLDPSFTHAMQLLTAEIEKIQKGDSKKDDEENYLDLFSHKNMKLKERVLIPVKQYPKFNFVGKILGPQGNTIKRLQEETGAKISVLGKGSMRDKAKEEELRKGGDPKYAHLNMDLHVFIEVFGPPCEAYALMAHAMEEVKKFLVPDMMDDICQEQFLELSYLNGVPEPSRGRGVPVRGRGAAPPPPPVPRGRGVGPPRGALVRGTPVRGAITRGATVTRGVPPPPTVRGAPAPRARTAGIQRIPLPPPPAPETYEEYVRNLNNVPFPST

SEQ ID NO: 33095 - protein, 43 aa, Homo sapiens
LPPGRGGDGKHHQPAEEQPSGGRETSVPTISHHTPLLPWRLCS

SEQ ID NO: 33096 - protein, 85 aa, Homo sapiens
MISTLAGCRPSEKLARLHFSLDVCGEEEDDEEEEDGVTEGLPEEQKKTMADRNLDQLLSNLEDLSNSIQKLHLAENAEPEEQSAA

SEQ ID NO: 33097 - protein, 31 aa, Homo sapiens
LNEGWNRGKKVESCEPQPHLTPAHLASSSCQ

SEQ ID NO: 33098 - protein, 94 aa, Homo sapiens
LHSGQVLALVLVAALWGGTQPLLKRASAGLQRVHEPTWAQQLLQEMKTLFLNTEYLMPFLLNQCGSLLYYLTLASTGWSQTSEFRSSCWNPGKH

SEQ ID NO: 33099 - protein, 86 aa, Homo sapiens
LQGHERSITQIKYNREGDLLFTVAKDPIVNVWYSVNGERLGTYMGHTGAVWCVDADWDTKHVLTGSADNSCRLWDCETVWRGVGEC

SEQ ID NO: 33100 - protein, 14 aa, Homo sapiens
LLQPSPYSKHWLLG

SEQ ID NO: 33101 - protein, 557 aa, Homo sapiens
VGAGRQVVATTAKGAETVQAARLGQEDHVNGARGLPGWAGTMGCGCSSHPEDDWMENIDVCENCHYPIVPLDGKGTLLIRNGSEVRDPLVTYEGSNPPASPLQGDPRQQGLKDKACGSLAVGFHLSPTYFLPGLAFLVPHPVTPGFLPIPARFSLMPLVFTDNLVIALHSYEPSHDGDLGFEKGEQLRILEQSGEWWKAQSLTTGQEGFIPFNFVAKANSLEPEPWFFKNLSRKDAERQLLAPGNTHGSFLIRESESTAGSFSLSVRDFDQNQGEVVKHYKIRNLDNGGFYISPRITFPGLHELVRHYTRYYNGHTKVAVKSLKQGSMSPDAFLAEANLMKQLQHQRLVRLYAVVTQEPIYIITEYMENGSLVDFLKTPSGIKLTINKLLDMAAQIAEGMAFIEERNYIHRDLRAANILVSDTLSCKIADFGLARLIEDNEYTAREGAKFPIKWTAPEAINYGTFTIKSDVWSFGILLTEIVTHGRIPYPGMTNPEVIQNLERGYRMVRPDNCPEELYQLMRLCWKERPEDRPTFDYLRSVLEDFFTATEGQYQPQP

SEQ ID NO: 33102 - protein, 550 aa, Homo sapiens
VGAGRQVVATTAKGAETVQAARLGQEDHVNGARGLPGWAGTMGCGCSSHPEDDWMENIDVCENCHYPIVPLDGKGTLLIRNGSEVRDPLVTYEGSNPPASPLQDNLVIALHSYEPSHDGDLGFEKGEQLRILEQSGEWWKAQSLTTGQEGFIPFNFVAKANSLEPEPWFFKNLSRKDAERQLLAPGNTHGSFLIRESESTAGSFSLSVRDFDQNQGEVVKHYKIRNLDNGGFYISPRITFPGLHELVRHYTNASDGLCTRLSRPCQTQKPQKPWWEDEWEVPRETLKLVERLGAGQFGEVWMGYYNGHTKVAVKSLKQGSMSPDAFLAEANLMKQLQHQRLVRLYAVVTQEPIYIITEYMENGSLVDFLKTPSGIKLTINKLLDMAAQIAEGMAFIEERNYIHRDLRAANILVSDTLSCKIADFGLARLIEDNEYTAREGAKFPIKWTAPEAINYGTFTIKSDVWSFGILLTEIVTHGRIPYPGMTNPEVIQNLERGYRMVRPDNCPEELYQLMRLCWKERPEDRPTFDYLRSVLEDFFTATEGQYQPQP

SEQ ID NO: 33103 - protein, 185 aa, Homo sapiens
VATTAKGAETVQAARLGQEDHVNGARGLPGWAGTMGCGCSSHPEDDWMENIDVCENCHYPIVPLDGKGTLLIRNGSEVRDPLVTYEGSNPPASPLQGDPRQQGLKDKACGSLAVGFHLSPTYFLPGLAFLVPHPVTPGFLPIPARFSLMPLVFTDNLVIALHSYEPSHDGDLGFEKGEQLRILEQ

SEQ ID NO: 33104 - protein, 30 aa, Homo sapiens
VSSLPLLFLVSCAVPSGTWAGEDTAPSRFL

SEQ ID NO: 33105 - protein, 41 aa, Homo sapiens
MAQEEEDVRDYNLTEEQKAIKAKYPPVNRKYEYLDHTADVQ

SEQ ID NO: 33106 - protein, 129 aa, Homo sapiens
LPAMADKEAAFDDAVEERVINEEYKIWKKNTPFLYDLVMTHALEWPSLTAQWLPDVTRPEGKDFSIHRLVLGTHTSDEQNHLVIASVQLPNDDAQFDASHYDSEKGGRNLKGERSKDVWVISVMCTLIK

SEQ ID NO: 33107 - protein, 174 aa, Homo sapiens
LPAMADKEAAFDDAVEERVINEEYKIWKKNTPFLYDLVMTHALEWPSLTAQWLPDVTRPEGKDFSIHRLVLGTHTSDEQNHLVIASVQLPNDDAQFDASHYDSEKGEFGGFGSVSGKIEIEIKINHEGEVNRARYMPQNPCIIATKTPSSDVLVFDYTKHPSKPGMCPFLFKYK

SEQ ID NO: 33108 - protein, 235 aa, Homo sapiens
LSGGSRGSGAMGDAPSPEEKLHLITRNLQEVLGEEKLKEILKERELKIYWGTATTGKPHVAYFVPMSKIADFLKAGCEVTILFADLHAYLDNMKAPWELLELRVSYYENVIKAMLESIGVPLEKLKFIKGTDYQLSKEYTLDVYRLSSVVTQHDSKKAGAEVVKQVEHPLLSGLLYPGLQALDEEYLKVDAQFGGIDQRKIFTFAEKMRTLRIEDKKLSNITHTSLHLAIQNGSI

SEQ ID NO: 33109 - protein, 100 aa, Homo sapiens
MNEWWLLLLLHLHPPRVISPFWFIVSVLTACDNCISGELCALMDQVHHMQHSKWQHPSDLTTRNYARRQKHLQRYSLTQWVDRNMRSHHRFQRLPDFSYS

SEQ ID NO: 33110 - protein, 75 aa, Homo sapiens
LPHAPQSSSLCLWGIALVLCVAENVFAVRCAQLTHQLLELRPWWGKSSHHMMRENPELVEGRDLLSCTSSEPLTL

SEQ ID NO: 33111 - protein, 35 aa, Homo sapiens
VLMTLVTKILMWVGLPRTQQMLSKHRWNSEGKCRH

SEQ ID NO: 33112 - protein, 74 aa, Homo sapiens
MASGLEGRLGPRFLDCKGDPQVGGAGSSRSEPFAPECLARTSRAVPWASLSRGVRQLQEAETRGVGDPQDQRVQ

SEQ ID NO: 33113 - protein, 34 aa, Homo sapiens
MATDAPISRLRKRRLRRATSPSGGWPGSAWQRRV

SEQ ID NO: 33114 - protein, 52 aa, Homo sapiens
MMGVGILGGKENFGKRAVLRGGMSARRYFVASVQLSITKKKSIRLSLRHSLR

SEQ ID NO: 33115 - protein, 56 aa, Homo sapiens
LPFMLLCILGYVFHIESMRVSRPLNGICHFWEMHLEAKYCFLQIIAPFVLKRRNAY

SEQ ID NO: 33116 - protein, 296 aa, Homo sapiens
VCKQRNWASHKASDLHSLLRRRPVRSQRQALNIRHPAPRPLCNLSRQLYVIRERRGSRAAGVAPIFALRCCLTGETWKRASLVLCRTCSPWPSATMEYLIGIQGPDYVLVASDRVAASNIVQMKDDHDKMFKMSEKILLLCVGEAGDTVQFAEYIQKNVQLYKMRNGYELSPTAAANFTRRNLADCLRSRTPYHVNLLLAGYDEHEGPALYYMDYLAALAKAPFAAHGYGAFLTLSILDRYYTPTISRERAVELLRKCLEELQKRFILNLPTFSVRIIDKNGIHDLDNISFPKQGS

SEQ ID NO: 33117 - protein, 131 aa, Homo sapiens
LTCNSLSRTSGVRDGKGDKRPGATLYMAEEGARERDRHNGVKTILPPLPGNCWWGNDGEGCLLELMRRSKSHKLAFSKSQQYKALFFFSRLNKLVNTLKFTFPCAVDQRRHLCLLRLVSERVLCRSRPVAH

SEQ ID NO: 33118 - protein, 50 aa, Homo sapiens
LAAGRALAVGAAAGSAAAATEAAGAAARAAGLGRGAEPGPGSRAARVWGT

SEQ ID NO: 33119 - protein, 37 aa, Homo sapiens
MRQSLALSPGWSAVARSRLTATSASRVQAILLPQPPE

SEQ ID NO: 33120 - protein, 397 aa, Homo sapiens
MLRDNSGDPADPHKVYALSRELCWREGPGTDQTEAEAPAAVPPPQGGPPGPFLAHTHAGLQAPGPLPAPAGDKGDLLLQAVQQSCLADHLLTASWGADPVPTKAPGEGQEGLPLTGACAGGPGLPAGELYGWAVETTPSPGPQPAALTTGEAAAPESPHQAEPYLSPSPSACTAVQEPSPGALDVTIMYKGRTVLQKVVGHPSCTFLYGPPDPAVRATDPQQVAFPSPAELPDQKQLRYTEELLRHVAPGLHLELRGPQLWARRMGKCKVYWEVGGPPGSASPSTPACLLPRNCDTPIFDFRVFFQELVEFRARQRRGSPRYTIYLGFGQDLSAGRPKEKSLVLVKLEPWLCRVHLEGTQREGVSSLDSSSLSLCLSSANSLYDDIECFLMELEQPA

SEQ ID NO: 33121 - protein, 154 aa, Homo sapiens
MATESEAVREAAAARARGGPNSVRSGWGRLSLEPDCSSSSKQKQDSKEANANGSSPEPVKAVEARSPGLQKEAVQKEEPIPQEPQWSLPSKELPASLVNGLQPLPAHQENGFSTNGPSGDKSLSRTPETLLPFAEAEAFLKKAVVQSPQVTEVL

SEQ ID NO: 33122 - protein, 961 aa, Homo sapiens
VILSSEMSKTNKSKSGSRSSRSRSASRSRSRSFSKSRSRSRSLSRSRKRRLSSRSRSRSYSPAHNRERNHPRVYQNRDFRGHNRGYRRPYYFRGRNRGFYPWGQYNRGGYGNYRSNWQNYRQAYSPRRGRSRSRSPKRRSPSPRSRSHSRNSDKSSSDRSRRSSSSRSSSNHSRVESSKRKSAKEKKSSSKDSRPSQAAGDNQGDEAKEQTFSGGTSQDTKASESSKPWPDATYGTGSASRASAVSELSPRERSPALKSPLQSVVVRRRSPRPSPVPKPSPPLSSTSQMGSTLPSGAGYQSGTHQGQFDHGSGSLSPSKKSPVGKSPPSTGSTYGSSQKEESAASGGAAYTKRYLEEQKTENGKDKEQKQTNTDKEKIKEKGSFSDTGLGDGKMKSDSFAPKTDSEKPFRGSQSPKRYKLRDDFEKKMADFHKEEMDDQDKDKAKGRKESEFDDEPKFMSKVIGANKNQEEEKSGKWEGLVYAPPGKEKQRKTEELEEESFPERSKKEDRGKRSEGGHRGFVPEKNFRVTAYKAVQEKSSSPPPRKTSESRDKLGAKGDFPTGKSSFSITREAQVNVRMDSFDEDLARPSGLLAQERKLCRDLVHSNKKEQEFRSIFQHIQSAQSQRSPSELFAQHIVTIVHHVKEHHFGSSGMTLHERFTKYLKRGTEQEAAKNKKSPEIHRRIDISPSTFRKHGLAHDEMKSPREPGYKAEGKYKDDPVDLRLDIERRKKHKERDLKRGKSRESVDSRDSSHSRERSAEKTEKTHKGSKKQKKHRRARDRSRSSSSSSQSSHSYKAEEYTEETEEREESTTGFDKSRLGTKDFVGPSERGGGRARGTFQFRARGRGWGRGNYSGNNNNNSNNDFQKRNREEEWDPEYTPKSKKYYLHDDREGEGSDKWVSRGRGRGAFPRGRGRFMFRKSSTSPKWAHDKFSGEEGEIEDDESGTENREEKDNIQPTTE

SEQ ID NO: 33123 - protein, 148 aa, Homo sapiens
MDSFDEDLARPSGLLAQERKLCRDLVHSNKKEQEFRSIFQHIQSAQSQRSPSELFAQHIVTIVHHVKEHHFGSSGMTLHERFTKYLKRGTEQEAAKNKKSPEIHRRIDISPSTFRKHGLAHDEMKSPREPGYKDGHNSKNELQRVNFY

SEQ ID NO: 33124 - protein, 65 aa, Homo sapiens
LKILPPPPTSRTDCTTARGIPGAVSHWTEEAGHGAQGSGPAFEQNTTHWALAVFLICWCVGWGQG

SEQ ID NO: 33125 - protein, 126 aa, Homo sapiens
LPGSGGRPGNHGSPRPGRIPRAEGGRAESGARGRGPAGALGARAGLASRRVWGPLWPLPRAPGAGDPRDPAGLRRGAEAALCAPPRSSCQTPEAPKMVQSELQLQPRAGGRAEAASWGDRGNDKGD

SEQ ID NO: 33126 - protein, 20 aa, Homo sapiens
MEGGGGGGGGGSGGCAGRRR

SEQ ID NO: 33127 - protein, 18 aa, Homo sapiens
MVSPSCCSRREAASPGAR

SEQ ID NO: 33128 - protein, 354 aa, Homo sapiens
LNSSLALLLPGLLLNDIISTMFNRKFMEELFKPQELYSKKALRTVYERLAHASIMKLNQASMDKLYDLMTMAFKYQVLLCPRPKDVLLVTFNHLDTIKGFIRDSPTILQQVDETLRQLTEIYGGLSAGEFQLIRQTLLIFFQDLHIRVSMFLKDKVQNNNGRFVLPVSGPVPWGTEVPGLIRMFNNKGEEVKRIEFKHGGNYVPAPKEGSFELYGDRVLKLGTNMYSVNQPVETHVSGSSKNLASWTQESIAPNPLAKEELNFLARLMGGMEIKKPSGPEPGFRLNLFTTDEEEEQAALTRPEELSYEVINIQATQDQQRSEELARIMGEFEITEQPRLSTSKGDDLLAMMDEL

SEQ ID NO: 33129 - protein, 135 aa, Homo sapiens
LWFVVSVIALSVKIRSYEEHLEKHRKDKAHKRYLLMSIDQRKKMLKNLRNTNYDVFEKICWGLGIEYTFPPLYYRRAHRRFVTKKALCIRVFQETQKLKKRRRALKAAAAAQKQAKRRNPDSPAKAIPKTLKDSQ

SEQ ID NO: 33130 - protein, 27 aa, Homo sapiens
MARLGNCSLTWAALIILLLPGSEYGQG

SEQ ID NO: 33131 - protein, 181 aa, Homo sapiens
MAMHNKAAPPQIPDTRRELAELVKRKQELAETLANLERQIYAFEGSYLEDTQMYGNIIRGWDRYLTNQKNSNSKNDRRNRKFKEAERLFSKSSVTSAAAVSALAGVQDQLIEKREPGSGTESDTSPDFHNQENEPSQEDPEDLDGSVQGVKPQKAASSTSSGSHHSSHKKRKNKNRHRYVY

SEQ ID NO: 33132 - protein, 48 aa, Homo sapiens
LFSLYSYFIYIGVKLCGPGVFLLGRTPEQRILLGFGYHQNNLQYIPKL

SEQ ID NO: 33133 - protein, 81 aa, Homo sapiens
LYKVLVCVLPLCLLSSFLSLWLASLEALGRCPCCASVCFMFSGEVIMPFFLSSYFRYPIECFLLPGRVRKLCVSGDHGYHS

SEQ ID NO: 33134 - protein, 16 aa, Homo sapiens
LLQGWRLLLSGLAATE

SEQ ID NO: 33135 - protein, 21 aa, Homo sapiens
VGVTCLVASFHVCLCLGHGLC

SEQ ID NO: 33136 - protein, 58 aa, Homo sapiens
VSLKWPLCCVSGVLVLSWYPPGMADDNGEPSDDLVPAILDTAHQYSIQVWLPWCILPL

SEQ ID NO: 33137 - protein, 38 aa, Homo sapiens
LGTGVFLFAVLPSAGSSVLFPLEKYLCAPEPNFSQMHI

SEQ ID NO: 33138 - protein, 256 aa, Homo sapiens
LASLRPLRRYTARRAAEQLAAQARPYSVSVGTATTAPARSSATAARSASVQPARSGLAACTAPLPGSRNSRAPGAAGAGLGGRKRRPLREPAGPSLNPTLAATAALIPLHRRAGDIRPGPLPGGSDAPSQLPVQETRPRLCAGQLKGTTTPRRIEGDREAAGVDRGKAGLGLGGRPPPQPPREERAQQLLDAVEQRQRQLLDTIAACEEMLRQLGRRRPEPAGGGNVSAKPGAPPQPAVSARGGFPKDAGDGAAEP

SEQ ID NO: 33139 - protein, 12 aa, Homo sapiens
MEWGPGSDWSRG

SEQ ID NO: 33140 - protein, 321 aa, Homo sapiens
MVVFHKMSPNETLFLESTNKIYKDDISNSSFVNFQIWDFPGQMDFFDPTFDYEMIFRGTGALIYVIDAQDDYMEALTRLHITVSKAYKVNPDMNFEVFIHKVDGLSDDHKIETQRDIHQRANDDLADAGLEKLHLSFYLTSIYDHSIFEAFSKVVQKLIPQLPTLENLLNIFISNSGIEKAFLFDVVSKIYIATDSSPVDMQSYELCCDMIDVVIDVSCIYGLKEDGSGSAYDKESMAIIKLNNTTVLYLKEVTKFLALVCILREESFERKGLIDYNFHCFRKAIHEVFEVGVTSHRSCGHQTSASSLKALTHNGTPRNAI

SEQ ID NO: 33141 - protein, 344 aa, Homo sapiens
MTAVADIFDRDGDGYIDYYEFVAALHPNKDAYRPTTDADKIEDEVTRQVAQCKCAKRFQVEQIGENKYRFGDSQQLRLVRILRSTVMVRVGGGWMALDEFLVKNDPCRARGRTNIELREKFILPEGASQGMTPFRSRGRRSKPSSRAASPTRSSSSASQSNHSCTSMPSSPATPASGTKTSLQFSRCYDKPWLVNSKAGTPIRDSHSPDLQLPTPEVIPSSGSKLKRPTPTFHSSRTSLAGDTSNSSSPASTGAKTNRADPKKSASRPGSRAGSRAGSRASSRRGSDASDFDLLETQSACSDTSESSAAGGQGNSRRGLNKPSKIPTMSKKTTTASPRTPGPKR

SEQ ID NO: 33142 - protein, 445 aa, Homo sapiens
LRDPREPDRRAAQDPRERPAGGQQQRGRGGLRPGPPAGRQAGPSHRLFLRGREHPVREPVPGRRAGAGAHAPGHPGRAHPRGGRRGARLLHPHGLRDPGPGRGRPHPLHPGRPPGAHEPAPRGEGVQRRPLPFGARHPGRLRPGERVEGRPGRKRGLQEKRPQFQRAHVQSCRRHGGGGGGFPPEDIHVPNIYVGRVIKGQKYEKRIERLTIRKEEDGDAGKEEDARTRIIRRAALEFEDGMYANLGIGIPLLASNFISPSMTVHLHSENGILGLGPFPTEDEVDADLINAGKQTVTVLPGGCFFASDDSFAMIRGGHIQLTMLGAMQVSKYGDLANWMIPGKKVKGMGGAMDLVSSQKTRVVVTMQHCTKDNTPKIMEKCTMPLTGKRCVDRIITEKAVFDVHRKKRLTLRELWEGLTVDDIKKSTGCAFAVSPNLRPMQQVVP

SEQ ID NO: 33143 - protein, 626 aa, Homo sapiens
LAGLGVVGGGEMNAAASSYPMASLYVGDLHSDVTEAMLYEKFSPAGPVLSIRVCRDMITRRSLGYAYVNFQQPADAERALDTMNFDVIKGKPIRIMWSQRDPSLRKSGVGNVFIKNLDKSIDNKALYDTFSAFGNILSCKVVCDENGSKGYAFVHFETQEAADKAIEKMNGMLLNDRKVFVGRFKSRKEREAELGAKAKEFTNVYIKNFGEEVDDESLKELFSQFGKTLSVKVMRDPNGKSKGFGFVSYEKHEDANKAVEEMNGKEISGKIIFVGRAQKKVERQAELKRKFEQLKQERISRYQGVNLYIKNLDDTIDDEKLRKEFSPFGSITSAKVMLEDGRSKGFGFVCFSSPEEATKAVTEMNGRIVGSKPLYVALAQRKEERKAHLTNQYMQRVAGMRALPANAILNQFQPAAGGYFVPAVPQAQGRPPYYTPNQLAQMRPNPRWQQGGRPQGFQGMPSAIRQSGPRPTLRHLAPTGVPTAVQNLAPRAAVAAAAPRAVAPYKYASSVRSPHPAIQPLQAPQPAVHVQGQEPLTASMLAAAPPQEQKQMLGERLFPLIQTMHSNLAGKITGMLLEIDNSELLHMLESPESLRSKVDEAVAVLQAHHAKKEAAQKVGAVAAATS

SEQ ID NO: 33144 - protein, 671 aa, Homo sapiens
LAGLGVVGGGEMNAAASSYPMASLYVGDLHSDVTEAMLYEKFSPAGPVLSIRVCRDMITRRSLGYAYVNFQQPADAERALDTMNFDVIKGKPIRIMWSQRDPSLRKSGVGNVFIKNLDKSIDNKALYDTFSAFGNILSCKVVCDENGSKGYAFVHFETQEAADKAIEKMNGMLLNDRKVFVGRFKSRKEREAELGAKAKEFTNVYIKNFGEEVDDESLKELFSQFGKTLSVKVMRDPNGKSKGFGFVSYEKHEDANKAVEEMNGKEISGKIIFVGRAQKKVERQAELKRKFEQLKQERISRYQGVNLYIKNLDDTIDDEKLRKEFSPFGSITSAKVMLEDGRSKGFGFVCFSSPEEATKAVTEMNGRIVGSKPLYVALAQRKEERKAHLTNQYMQRVAGMRALPANAILNQFQPAAGGYFVPAVPQAQGRPPYYTPNQLAQMRPNPRWQQGGRPQGFQGMPSAIRQSGPRPTLRHLAPTGNAPASRGLPTTTQRVGSECPDRLAMDFGGAGAAQQGLTDSCQSGGVPTAVQNLAPRAAVAAAAPRAVAPYKYASSVRSPHPAIQPLQAPQPAVHVQGQEPLTASMLAAAPPQEQKQMLGERLFPLIQTMHSNLAGKITGMLLEIDNSELLHMLESPESLRSKVDEAVAVLQAHHAKKEAAQKVGAVAAATS

SEQ ID NO: 33145 - protein, 655 aa, Homo sapiens
LAGLGVVGGGEMNAAASSYPMASLYVGDLHSDVTEAMLYEKFSPAGPVLSIRVCRDMITRRSLGYAYVNFQQPADAERALDTMNFDVIKGKPIRIMWSQRDPSLRKSGVGNVFIKNLDKSIDNKALYDTFSAFGNILSCKVVCDENGSKGYAFVHFETQEAADKAIEKMNGMLLNDRKVFVGRFKSRKEREAELGAKAKEFTNVYIKNFGEEVDDESLKELFSQFGKTLSVKVMRDPNGKSKGFGFVSYEKHEDANKAVEEMNGKEISGKIIFVGRAQKKVERQAELKRKFEQLKQERISRYQGVNLYIKNLDDTIDDEKLRKEFSPFGSITSAKVMLEDGRSKGFGFVCFSSPEEATKAVTEMNGRIVGSKPLYVALAQRKEERKAHLTNQYMQRVAGMRALPANAILNQFQPAAGGYFVPAVPQAQGRPPYYTPNQLAQMRPNPRWQQGGRPQGFQGMPSAIRQSGPRPTLRHLAPTGSECPDRLAMDFGGAGAAQQGLTDSCQSGGVPTAVQNLAPRAAVAAAAPRAVAPYKYASSVRSPHPAIQPLQAPQPAVHVQGQEPLTASMLAAAPPQEQKQMLGERLFPLIQTMHSNLAGKITGMLLEIDNSELLHMLESPESLRSKVDEAVAVLQAHHAKKEAAQKVGAVAAATS

SEQ ID NO: 33146 - protein, 642 aa, Homo sapiens
LAGLGVVGGGEMNAAASSYPMASLYVGDLHSDVTEAMLYEKFSPAGPVLSIRVCRDMITRRSLGYAYVNFQQPADAERALDTMNFDVIKGKPIRIMWSQRDPSLRKSGVGNVFIKNLDKSIDNKALYDTFSAFGNILSCKVVCDENGSKGYAFVHFETQEAADKAIEKMNGMLLNDRKVFVGRFKSRKEREAELGAKAKEFTNVYIKNFGEEVDDESLKELFSQFGKTLSVKVMRDPNGKSKGFGFVSYEKHEDANKAVEEMNGKEISGKIIFVGRAQKKVERQAELKRKFEQLKQERISRYQGVNLYIKNLDDTIDDEKLRKEFSPFGSITSAKVMLEDGRSKGFGFVCFSSPEEATKAVTEMNGRIVGSKPLYVALAQRKEERKAHLTNQYMQRVAGMRALPANAILNQFQPAAGGYFVPAVPQAQGRPPYYTPNQLAQMRPNPRWQQGGRPQGFQGMPSAIRQSGPRPTLRHLAPTGNAPASRGLPTTTQRVGVPTAVQNLAPRAAVAAAAPRAVAPYKYASSVRSPHPAIQPLQAPQPAVHVQGQEPLTASMLAAAPPQEQKQMLGERLFPLIQTMHSNLAGKITGMLLEIDNSELLHMLESPESLRSKVDEAVAVLQAHHAKKEAAQKVGAVAAATS

SEQ ID NO: 33147 - protein, 103 aa, Homo sapiens
LTASMLAAAPPQEQKQMLGERLFPLIQTMHSNLAGKITGMLLEIDNSELLHMLESPESLRSKVSWGSDPAASVLSLGRLGANLDAQVQQKVGSAAPRTPLVMP

SEQ ID NO: 33148 - protein, 413 aa, Homo sapiens
LSAPAERPRPAMTALPGPLWLLGLALCALGGGGPGLRPPPGCPQRRLGARERRDVQREILAVLGLPGRPRPRAPPAASRLPASAPLFMLDLYHAMAGDDDEDGAPAERRLGRADLVMSFVNMVERDRALGHQEPHWKEFRFDLTQIPAGEAVTAAEFRIYKVPSIHLLNRTLHVSMFQVVQEQSNRESDLFFLDLQTLRAGDEGWLVLDVTAASDCWLLKRHKDLGLRLYVETEDGHSVDPGLAGLLGQRAPRSQQPFVVTFFRASPSPIRTPRAVRPLRRRQPKKSNELPQANRLPGIFDDVHGSHGRQVCRRHELYVSFQDLGWLDWVIAPQGYSAYYCEGECSFPLDSCMNATNHAILQSLVHLMMPDAVPKACCAPTKLSATSVLYYDSSNNVILRKHRNMVVKACGCH

SEQ ID NO: 33149 - protein, 101 aa, Homo sapiens
LGAAFWRKTGSIVVLLLMDGDVEMLHAGIQGVCSHRDGDRLPNTQRLPLLYCHNINFFILCPRKEIKRRNTSHEKHKHRPYSFSCLRWCLGRSPAPPPSLD

SEQ ID NO: 33150 - protein, 225 aa, Homo sapiens [sequence omitted]

SEQ ID NO: 33151 - protein, 484 aa, Homo sapiens
LIAVRRWSIMADMQNLVERLERAVGRLEAVSHTSDMHRGYADSPSKAGAAPYVQAFDSLLAGPVAEYLKISKEIGGDVQKHAEMVHTGLKLERALLVTASQCQQPAENKLSDLLAPISEQIKEVITFREKNRGSKLFNHLSAVSESIQALGWVAMAPKPGPYVKEMNDAAMFYTNRVLKEYKDVDKKHVDWVKAYLSIWTELQAYIKEFHTTGLAWSKTGPVAKELSGLPSGPSAGSCPPPPPPCPPPPPVSTISCSYESASRSSLFAQINQGESITHALKHVSDDMKTHKNPALKAQSGPVRSGPKPFSAPKPQTSPSPKRATKKEPAVLELEGKKWRVENQENVSNLVIEDTELKQVAYIYKCVNTTLQIKGKINSITVDNCKKLGLVFDDVVGIVEIINSKDVKVQVMGKVPTISINKTDGCHAYLSKNSLDCEIVSAKSSEMNVLIPTEGGDFNEFPVPEQFKTLWNGQKLVTTVTEIAG

SEQ ID NO: 33152 - protein, 484 aa, Homo sapiens
LIAVRSRWSIMADMQNLVERLERAVGRLEAVSHTSDMHRGYADSPSKGAAPYVQAFDSLLAGPVAEYLKISKEIGGDVQKHAEMVHTGLKLERALLVTASQCQQPAENKLSDLLAPISEQIKEVITFREKNRGSKLFNHLSAVSESIQALGWVAMAPKPGPYVKEMNDAAMFYTNRVLKEYKDVDKKHVDWVKAYLSIWTELQAYIKEFHTTGLAWSKTGPVAKELSGLPSGPSAGSCPPPPPPCPPPPPVSTISCSYESASRSSLFAQINQGESITHALKHVSDDMKTHKNPALKAQSGPVRSGPKPFSAPKPQTSPSPKRATKKEPAVLELEGKKWRVENQENVSNLVIEDTELKQVAYIYKCVNTTLQIKGKINSITVDNCKKLGLVFDDVVGIVEIINSKDVKVQVMGKVPTISINKTDGCHAYLSKNSLDCEIVSAKSSEMNVLIPTEGGDFNEFPVPEQFKTLWNGQKLVTTVTEIAG

SEQ ID NO: 33153 - protein, 481 aa, Homo sapiens
LSRWSIMADMQNLVERLERAVGRLEAVSHTSDMHRGYADSPSKAGAAPYVQAFDSLLAGPVAEYLKISKEIGGDVQKHAEMVHTGLKLERALLVTASQCQQPAENKLSDLLAPISEQIKEVITFREKNRGSKLFNHLSAVSESIQALGWVAMAPKPGPYVKEMNDAAMFYTNRVLKEYKDVDKKHVDWVKAYLSIWTELQAYIKEFHTTGLAWSKTGPVAKELSGLPSGPSAGSCPPPPPPCPPPPPVSTISCSYESASRSSLFAQINQGESITHALKHVSDDMKTHKNPALKAQSGPVRSGPKPFSAPKPQTSPSPKRATKKEPAVLELEGKKWRVENQENVSNLVIEDTELKQVAYIYKCVNTTLQIKGKINSITVDNCKKLGLVFDDVVGIVEIINSKDVKVQVMGKVPTISINKTDGCHAYLSKNSLDCEIVSAKSSEMNVLIPTEGGDFNEFPVPEQFKTLWNGQKLVTTVTEIAG

SEQ ID NO: 33154 - protein, 480 aa, Homo sapiens
LSRWSIMADMQNLVERLERAVGRLEAVSHTSDMHRGYADSPSKGAAPYVQAFDSLLAGPVAEYLKISKEIGGDVQKHAEMVHTGLKLERALLVTASQCQQPAENKLSDLLAPISEQIKEVITFREKNRGSKLFNHLSAVSESIQALGWVAMAPKPGPYVKEMNDAAMFYTNRVLKEYKDVDKKHVDWVKAYLSIWTELQAYIKEFHTTGLAWSKTGPVAKELSGLPSGPSAGSCPPPPPPCPPPPPVSTISCSYESASRSSLFAQINQGESITHALKHVSDDMKTHKNPALKAQSGPVRSGPKPFSAPKPQTSPSPKRATKKEPAVLELEGKKWRVENQENVSNLVIEDTELKQVAYIYKCVNTTLQIKGKINSITVDNCKKLGLVFDDVVGIVEIINSKDVKVQVMGKVPTISINKTDGCHAYLSKNSLDCEIVSAKSSEMNVLIPTEGGDFNEFPVPEQFKTLWNGQKLVTTVTEIAG

SEQ ID NO: 33155 - protein, 479 aa, Homo sapiens
LRWSIMADMQNLVERLERAVGRLEAVSHTSDMHRGYADSPSKGAAPYVQAFDSLLAGPVAEYLKISKEIGGDVQKHAEMVHTGLKLERALLVTASQCQQPAENKLSDLLAPISEQIKEVITFREKNRGSKLFNHLSAVSESIQALGWVAMAPKPGPYVKEMNDAAMFYTNRVLKEYKDVDKKHVDWVKAYLSIWTELQAYIKEFHTTGLAWSKTGPVAKELSGLPSGPSAGSCPPPPPPCPPPPPVSTISCSYESASRSSLFAQINQGESITHALKHVSDDMKTHKNPALKAQSGPVRSGPKPFSAPKPQTSPSPKRATKKEPAVLELEGKKWRVENQENVSNLVIEDTELKQVAYIYKCVNTTLQIKGKINSITVDNCKKLGLVFDDVVGIVEIINSKDVKVQVMGKVPTISINKTDGCHAYLSKNSLDCEIVSAKSSEMNVLIPTEGGDFNEFPVPEQFKTLWNGQKLVTTVTEIAG

SEQ ID NO: 33156 - protein, 480 aa, Homo sapiens
LRWSIMADMQNLVERLERAVGRLEAVSHTSDMHRGYADSPSKAGAAPYVQAFDSLLAGPVAEYLKISKEIGGDVQKHAEMVHTGLKLERALLVTASQCQQPAENKLSDLLAPISEQIKEVITFREKNRGSKLFNHLSAVSESIQALGWVAMAPKPGPYVKEMNDAAMFYTNRVLKEYKDVDKKHVDWVKAYLSIWTELQAYIKEFHTTGLAWSKTGPVAKELSGLPSGPSAGSCPPPPPPCPPPPPVSTISCSYESASRSSLFAQINQGESITHALKHVSDDMKTHKNPALKAQSGPVRSGPKPFSAPKPQTSPSPKRATKKEPAVLELEGKKWRVENQENVSNLVIEDTELKQVAYIYKCVNTTLQIKGKINSITVDNCKKLGLVFDDVVGIVEIINSKDVKVQVMGKVPTISINKTDGCHAYLSKNSLDCEIVSAKSSEMNVLIPTEGGDFNEFPVPEQFKTLWNGQKLVTTVTEIAG

SEQ ID NO: 33157 - protein, 240 aa, Homo sapiens
LVLALNFLLRMFNMTIAAQRSGMKDRNKVAVVLTALKHVSDDMKTHKNPALKAQSGPVRSGPKPFSAPKPQTSPSPKRATKKEPAVLELEGKKWRVENQENVSNLVIEDTELKQVAYIYKCVNTTLQIKGKINSITVDNCKKLGLVFDDVVGIVEIINSKDVKVQVMGKVPTISINKTDGCHAYLSKNSLDCEIVSAKSSEMNVLIPTEGGDFNEFPVPEQFKTLWNGQKLVTTVTEIAG

SEQ ID NO: 33158 - protein, 1920 aa, Homo sapiens
LVGRGKMADGKGDAAAVAGAGAEAPAVAGAGDGVETESMVRGHRPVSPAPGASGLRPCLWQLETELREQEVSEVSSLNYCRSFCQTLLQYASNKNASEHIVYLLEVYRLAIQSFASARPYLTTECEDVLLVLGRLVLSCFELLLSVSESELPCEVWLPFLQSLQESHDALLEFGNNNLQILVHVTKEGVWKNPVLLKILSQQPVETEEVNKLIAQEGPSFLQMRIKHLLKSNCIPQATALSKLCAESKEISNVSSFQQAYITCLCSMLPNEDAIKEIAKVDCKEVLDIICNLESEGQDNTAFVLCTTYLTQQLQTASVYCSWELTLFWSKLQRRIDPSLDTFLERCRQFGVIAKTQQHLFCLIRVIQTEAQDAGLGVSILLCVRALQLRSSEDEEMKASVCKTIACLLPEDLEVRRACQLTEFLIEPSLDGFNMLEELYLQPDQKFDEENAPVPNSLRCELLLALKAHWPFDPEFWDWKTLKRHCHQLLGQEASDSDDDLSGYEMSINDTDVLESFLSDYDEGKEDKQYRRRDLTDQHKEKRDKKPIGSSERYQRWLQYKFFCLLCKRECIEARILHHSKMHMEDGIYTCPVCIKKFKRKEMFVPHVMEHVKMPPSRRDRSKKKLLLKGSQKGICPKSPSAIPEQNHSLNDQAKGESHEYVTFSKLEDCHLQDRDLYPCPGTDCSRVFKQFKYLSVHLKAEHQNNDENAKHYLDMKNRREKCTYCRRHFMSAFHLREHEQVHCGPQPYMCVSIDCYARFGSVNELLNHKQKHDDLRYKCELNGCNIVFSDLGQLYHHEAQHFRDASYTCNFLGCKKFYYSKIEYQNHLSMHNVENSNGDIKKSVKLEESATGEKQDCINQPHLLNQTDKSHLPEDLFCAESANSQIDTETAENLKENSDSNSSDQLSHSSSASMNEELIDTLDHSETMQDVLLSNEKVFGPSSLKEKCSSMAVCFDGTKFTCGFDGCGSTYKNARGMQKHLRKVHPYHFKPKKIKTKDLFPSLGNEHNQTTEKLDAEPKPCSDTNSDSPDEGLDHNIHIKCKREHQGYSSESSICASKRPCTEDTMLELLLRLKHLSLKNSITHGSFSGSLQGYPSSGAKSLQSVSSISDLNFQNQDENMPSQYLAQLAAKPFFCELQGCKYEFVTREALLMHYLKKHNYSKEKVLQLTMFQHRYSPFQCHICQRSFTRKTHLRIHYKNKHQIGSDRATHKLLDNEKCDHEGPCSVDRLKGDCSAELGGDPSSNSEKPHCHPKKDECSSETDLESSCEETESKTSDISSPIGSHREEQEGREGRGSRRTVAKGNLCYILNKYHKPFHCIHKTCNSSFTNLKGLIRHYRTVHQYNKEQLCLEKDKARTKRELVKCKKIFACKYKECNKRFLCSKALAKHCSDSHNLDHIEEPKVLSEAGSAARFSCNQPQCPAVFYTFNKLKHHLMEQHNIEGEIHSDYEIHCDLNGCGQIFTHRSNYSQHVYYRHKDYYDDLFRSQKVANERLLRSEKVCQTADTQGHEHQTTRRSFNAKSKKCGLIKEKKAPISFKTRAEALHMCVEHSEHTQYPCMVQGCLSVVKLESSIVRHYKRTHQMSSAYLEQQMENLVVCVKYGTKIKEEPPSEADPCIKKEENRSCESERTEHSHSPGDSSAPIQNTDCCHSSERDGGQKGCIESSSVFDADTLLYRGTLKCNHSSKTTSLEQCNIVQPPPPCKIENSIPNPNGTESGTYFTSFQLPLPRIKESETRQHSSGQENTVKNPTHVPKENFRKHSQPRSFDLKTYKPMGFESSFLKFIQESEEKEDDFDDWEPSEHLTLSNSSQSSNDLTGNVVANNMVNDSEPEVDIPHSSSDSTIHENLTAIPPLIVAETTTVPSLENLRVVLDKALTDCGELALKQLHYLRPVVVLERSKFSTPILDLFPTKKTDELCVGSS

SEQ ID NO: 33159 - protein, 61 aa, Homo sapiens
MSAVLAESISSPVGLMIGFIFVCLFIKKMELYTCLVLINTSKYTGASFFKLSVHDCIWNKY

SEQ ID NO: 33160 - protein, 23 aa, Homo sapiens
MNCQLMKEHYLVFGMQLGKKPND

SEQ ID NO: 33161 - protein, 695 aa, Homo sapiens
LVSPPAMAAATASPRSLLVLLQVVVLALAQIRGPPGERGPPGPPGPPGVPGSDGIDGDNGPPGKAGPPGPKGEPGKAGPDGPDGKPGIDGLTGAKGEPGPMGIPGVKGQPGLPGPPGLPGPGFAGPPGPPGPVGLPGEIGIRGPKGDPGPDGPSGPPGPPGKPGRPGTIQGLEGSADFLCPTNCPPGMKGPPGLQGVKGHAGKRGILGDPGHQGKPGPKGDVGASGEQGIPGPPGPQGIRGYPGMAGPKGETGPHGYKGMVGAIGATGPPGEEGPRGPPGRAGEKGDEGSPGIRGPQGITGPKGATGPPGINGKDGTPGTPGMKGSAGQAGQPGSPGHQGLAGVPGQPGTKGGPGDQGEPGPQGLPGFSGPPGKEGEPGPRGEIGPQGIMGQKGDQGERGPVGQPGPQGRQGPKGEQGPPGIPGPQGLPGVKGDKGSPGKTGPRGKVGDPGVAGLPGEKGEKGESGEPGPKGQQGVRGEPGYPGPSGDAGAPGVQGYPGPPGPRGLAGNRGVPGQPGRQGVEGRDATDQHIVDVALKMLQEQLAEVAVSAKREALGAVGMMGPPGPPGPPGYPGKQGPHGHPGPRGVPGIVGAVGQIGNTGPKGKRGEKGDPGEVGRGHPGMPGPPGIPGLPGRPGQAINGKDGDRGSPGAPGEAGRPGLPGPVGLPGFCEPAACLGASAYASARLTEPGSIKGP

SEQ ID NO: 33162 - protein, 561 aa, Homo sapiens
VEVVAELTAAARETEARDARPADRPARGSSASGTQEARGPPLPGLRVSGPAASLGGGPVPKPAKGRRAEGLRSGGRTPPTREGASGGAGGEGSPRSGGAPGRGTGSPQPRTEAGVSGGEEGASPSAPAGTLAMTGKSVKDVDRYQAVLANLLLEEDNKFCADCQSKGPRWASWNIGVFICIRCAGIHRNLGVHISRVKSVNLDQWTQEQIQCMQEMGNGKANRLYEAYLPETFRRPQIDPAVEGFIRDKYEKKKYMDRSLDINAFRKEKDDKWKRGSEPVPEKKLEPVVFEKVKMPQKKEDPQLPRKSSPKSTAPVMDLLGLDAPVACSIANSKTSNTLEKDLDLLASVPSPSSSGSRKVVGSMPTAGSAGSVPENLNLFPEPGSKSEEIGKKQLSKDSILSLYGSQTPQMPTQAMFMAPAQMAYPTAYPSFPGVTPPNSIMGSMMPPPVGMVAQPGASGMVAPMAMPAGYMGGMQASMMGVPNGMMTTQQAGYMAGMAAMPQTVYGVQPAQQLQWNLTQMTQQMAGMNFYGANGMMNYGQSMSGGNGQAANQTLSPQMWK

SEQ ID NO: 33163 - protein, 444 aa, Homo sapiens
VQQERQQSAVGVGIGRRKGFMGKVGRARFAQKDVLQIEEIGPVKLFVRDWPRWASWNIGVFICIRCAGIHRNLGVHISRVKSVNLDQWTQEQIQCMQEMGNGKANRLYEAYLPETFRRPQIDPAVEGFIRDKYEKKKYMDRSLDINAFRKEKDDKWKRGSEPVPEKKLEPVVFEKVKMPQKKEDPQLPRKSSPKSTAPVMDLLGLDAPVACSIANSKTSNTLEKDLDLLASVPSPSSSGSRKVVGSMPTAGSAGSVPENLNLFPEPGSKSEEIGKKQLSKDSILSLYGSQTPQMPTQAMFMAPAQMAYPTAYPSFPGVTPPNSIMGSMMPPPVGMVAQPGASGMVAPMAMPAGYMGGMQASMMGVPNGMMTTQQAGYMAGMAAMPQTVYGVQPAQQLQWNLTQMTQQMAGMNFYGANGMMNYGQSMSGGNGQAANQTLSPQMWK

SEQ ID NO: 33164 - protein, 77 aa, Homo sapiens
LLPLSPSLKRHSLPLKTSRVSTPTPPSLVLPGSKADVILEFWRQVLLDPSSLPFCSSKEYGDMNSNLTNWLPPKESA

SEQ ID NO: 33165 - protein, 66 aa, Homo sapiens
VAAALGLICGKGVPGLYCPHHSSLPWPELLSKKIRPEGQEGAKGDGRAGFPGWSRFHPLACPQASL

SEQ ID NO: 33166 - protein, 78 aa, Homo sapiens
LYSTARLTCLALFTHSTAVFDREQHTLNLPAVNSITYVLRFLEKLCHNLRSDNLFGNQPFTQTHLSLTAIEYSHSHDR

SEQ ID NO: 33167 - protein, 114 aa, Homo sapiens
VINALVEITMKMVPKLLSPLVKDWAPKAFIISFKLETDPAIVINRARKALEIYQHQVVVANILESRQSFVFIVTKDSETKLLLSEEEIEKGVEIEEKIVDNLQSRHTAFIGDRN

SEQ ID NO: 33168 - protein, 44 aa, Homo sapiens
MSDKPDMAEMEKFDKSKLKKTETQEKNPLPSKETIEQEKQAGES

SEQ ID NO: 33169 - protein, 356 aa, Homo sapiens
LSSPTAAAGLVTITPREEPQLPQPAPVTITATMSSEAETQQPPAAPPAAPALSAADTKPGTTGSGAGSGGPGGLTSAAPAGGDKKVIATKVLGTVKWFNVRNGYGFINRNDTKEDVFVHQTAIKKNNPRKYLRSVGDGETVEFDVVEGEKGAEAANVTGPGGVPVQGSKYAADRNHYRRYPRRRGPPRNYQQNYQNSESGEKNEGSESAPEGQAQQRRPYRRRRFPPYYMRRPYGRRPQYSNPPVQGEVMEGADNQGAGEQGRPVRQNMYRGYRPRFRRGPPRQRQPREDGNEEDKENQGDETQGQQPPQRRYRRNFNYRRRRPENPKPQDGKETKAADPPAENSSAPEAEQGGAE

SEQ ID NO: 33170 - protein, 730 aa, Homo sapiens
LEGGASPGGGPSPGVGLRPWWRVAGGSVRSEGAMAVRALKLLTTLLAVVAAASQAEVESEAGWGMVTPDLLFAEGTAAYARGDWPGVVLSMERALRSRAALRALRLRCRTQCAADFPWELDPDWSPSPAQASGAAALRDLSFFGGLLRRAACLRRCLGPPAAHSLSEEMELEFRKRSPYNYLQVAYFKINKLEKAVAAAHTFFVGNPEHMEMQQNLDYYQTMSGVKEADFKDLETQPHMQEFRLGVRLYSEEQPQEAVPHLEAALQEYFVAYEECRALCEGPYDYDGYNYLEYNADLFQAITDHYIQVLNCKQNCVTELASHPSREKPFEDFLPSHYNYLQFAYYNIGNYTQAVECAKTYLLFFPNDEVMNQNLAYYAAMLGEEHTRSIGPRESAKEYRQRSLLEKELLFFAYDVFGIPFVDPDSWTPEEVIPKRLQEKQKSERETAVRISQEIGNLMKEIETLVEEKTKESLDVSRLTREGGPLLYEGISLTMNSKLLNGSQRVVMDGVISDHECQELQRLTNVAATSGDGYRGQTSPHTPNEKFYGVTVFKALKLGQEGKVPLQSAHLYYNVTEKVRRIMESYFRLDTPLYFSYSHLVCRTAIEEVQAERKDDSHPVHVDNCILNAETLVCVKEPPAYTFRDYSAILYLNGDFDGGNFYFTELDAKTVTAEVQPQCGRAVGFSSGTENPHGVKAVTRGQRCAIALWFTLDPRHSERVRAARAGQGAGR

SEQ ID NO: 33171 - protein, 815 aa, Homo sapiens
VAGGSVRSEGAMAVRALKLLTTLLAVVAAASQAEVESEAGWGMVTPDLLFAEGTAAYARGDWPGVVLSMERALRSRAALRALRLRCRTQCAADFPWELDPDWSPSPAQASGAAALRDLSFFGGLLRRAACLRRCLGPPAAHSLSEEMELEFRKRSPYNYLQVAYFKINKLEKAVAAAHTFFVGNPEHMEMQQNLDYYQTMSGVKEADFKDLETQPHMQEFRLGVRLYSEEQPQEAVPHLEAALQEYFVAYEECRALCEGPYDYDGYNYLEYNADLFQAITDHYIQVLNCKQNCVTELASHPSREKPFEDFLPSHYNYLQFAYYNIGNYTQAVECAKTYLLFFPNDEVMNQNLAYYAAMLGEEHTRSIGPRESAKEYRQRSLLEKELLFFAYDVFGIPFVDPDSWTPEEVIPKRLQEKQKSERETAVRISQEIGNLMKEIETLVEEKTKESLDVSRLTREGGPLLYEGISLTMNSKLLNGSQRVVMDGVISDHECQELQRLTNVAATSGDGYRGQTSPHTPNEKFYGVTVFKALKLGQEGKVPLQSAHLYYNVTEKVRRIMESYFRLDTPLYFSYSHLVCRTAIEEVQAERKDDSHPVHVDNCILNAETLVCVKEPPAYTFRDYSAILYLNGDFDGGNFYFTELDAKTVTAEVQPQCGRAVGFSSGTENPHGVKAVTRGQRCAIALWFTLDPRHSERVRAARAGESSWCCGDPFPERPWFAFLFPKSHCQWLRHERSTWDTSSNALSLWSHCLVLPGPAVNGIQVGKEVKTGSDAEFLVPSLGPTSAVLFQRVGPAGKEMSLGPLRNLPCPLGSSS

SEQ ID NO: 33172 - protein, 408 aa, Homo sapiens
MAVRALKLLTTLLAVVAAASQAEVESEAGWGMVTPDLLFAEGTAAYARGDWPGVVLSMERALRSRAALRALRLRCRTQCAADFPWELDPDWSPSPAQASGAAALRDLSFFGGLLRRAACLRRCLGPPAAHSLSEEMELEFRKRSPYNYLQVAYFKINKLEKAVAAAHTFFVGNPEHMEMQQNLDYYQTMSGVKEADFKDLETQPHMQEFRLGVRLYSEEQPQEAVPHLEAALQEYFVAYEECRALCEGPYDYDGYNYLEYNADLFQAITDHYIQVLNCKQNCVTELASHPSREKPFEDFLPSHYNYLQFAYYNIGNYTQAVECAKTYLLFFPNDEVMNQNLAYYAAMLGEEHTRSIGPRESAKEYRQRSLLEKELLFFAYDVFGIPFVDPDSWTPEEVIPKRLQEKQK

SEQ ID NO: 33173 - protein, 374 aa, Homo sapiens
VAGGSVRSEGAMAVRALKLLTTLLAVVAAASQAEVESEAGWGMVTPDLLFAEGTAAYARGDWPGVVLSMERALRSRAALRALRLRCRTQCAADFPWELDPDWSPSPAQASGAAALRDLSFFGGLLRRAACLRRCLGPPAAHSLSEEMELEFRKRSPYNYLQVAYFKINKLEKAVAAAHTFFVGNPEHMEMQQNLDYYQTMSGVKEADFKDLETQPHMQEFRLGVRLYSEEQPQEAVPHLEAALQEYFVAYEECRALCEGPYDYDGYNYLEYNADLFQAITDHYIQVLNCKQNCVTELASHPSREKPFEDFLPSHYNYLQFAYYNIGNYTQAVECAKTYLLFFPNDEVMNQNLAYYAAMLGEEHTRSIGPREQGT

SEQ ID NO: 33174 - protein, 230 aa, Homo sapiens
VAGGSVRSEGAMAVRALKLLTTLLAVVAAASQAEVESEAGWGMVTPDLLFAEGTAAYARGDWPGVVLSMERALRSRAALRALRLRCRTQCAADFPWELDPDWSPSPAQASGAAALRDLSFFGGLLRRAACLRRCLGPPAAHSLSEEMELEFRKRSPYNYLQVAYFKINKLEKAVAAAHTFFVGNPEHMEMQQNLDYYQTMSGVKEADFKDLETQPHMVKKTLSPSFFLSF

SEQ ID NO: 33175 - protein, 147 aa, Homo sapiens
VEIVPLHSSLGDKADEFIRANATNKLTVIAEQIQHLQEQARKVLEDAHRDANLHHVACNIVKKPGNIYYLYKRESGQQYFSIISPKEWGTSCPHDFLGAYKLQHDLSWTPYEDIEKQDAKISMMDTLLSQSVALPPCTEPNFQGLTH

SEQ ID NO: 33176 - protein, 157 aa, Homo sapiens
VFPWLVLGISSGSSLISSALTSSLTAFRDLTRQPLCEHLPLSTLTIIPQGGTVLLPILKMKKHSLREVRSQYHKEVSSRAGIGAPAFVIPEHQQYRLGLGSWVIPSVTPSPSARLCCLPLSVLVRMEMASSAGSWLSGCLIPLVFLRLSVHVSGRSF

SEQ ID NO: 33177 - protein, 31 aa, Homo sapiens
LDRTISFFLAFGLELNIISSLASSLLPSDWN

SEQ ID NO: 33178 - protein, 72 aa, Homo sapiens [sequence omitted]

SEQ ID NO: 33179 - protein, 394 aa, Homo sapiens
LPFPLYPHCYQLLLATPRYPLPPFVSLWVSRPRMYPEALPVGILSNPDTFKRRSGSYSNDKPEVWFAAGSGSPNQKLSSSCVGRACGEMDTPPLSDSESESDESLVTDRELQDAFSRGLLKPGLNVVLEGPKKAVNDVNGLKQCLAEFKRDLEWVERLDVTLGPVPEIGGSEAPAPQNKDQKAVDPEDDFQREMSFYRQAQAAVLAVLPRLHQLKVPTKRPTDYFAEMAKSDLQMQKIRQKLQTKQAAMERSEKAKQLRALRKYGKKVQTEVLQKRQQEKAHMMNAIKKYQKGFSDKLDFLEGDQKPLAQRKKAGAKGQQMRKGPSAKRRYKNQKFGFGGKKKGSKWNTRESYDDVSSFRAKTAHGRGLKRPGKKGSNKRPGKRTREKMKNRTH

SEQ ID NO: 33180 - protein, 98 aa, Homo sapiens
MDTPPLSDSESESDESLVTDRELQDAFSRGLLKPGLNVVLEGPKKAVNDVVSVGTGSGVLGHGMRFRRCWAWETDSCPRKDAPCASPRGSITCLGIGD

SEQ ID NO: 33181 - protein, 40 aa, Homo sapiens
MGPATERARGREVRVTISWTVRGMGLWACSCQAGGRCSRL

SEQ ID NO: 33182 - protein, 549 aa, Homo sapiens
MPSWALFMVTSCLLLAPQNLAQVSSQDVSLLASDSEPLKCFSRTFEDLTCFWDEEEAAPSGTYQLLYAYPREKPRACPLSSQSMPHFGTRYVCQFPDQEEVRLFFPLHLWVKNVFLNQTRTQRVLFVDSVGLPAPPSIIKAMGGSQPGELQISWEEPAPEISDFLRYELRYGPRDPKNSTGPTVIQLIATETCCPALQRPHSASALDQSPCAQPTMPWQDGPKQTSPSREASALTAEGGSCLISGLQPGNSYWLQLRSEPDGISLGGSWGSWSLPVTVDLPGDAVALGLQCFTLDLKNVTCQWQQQDHASSQGFFYHSRARCCPRDRYPIWENCEEEEKTNPGLQTPQFSRCHFKSRNDSIIHILVEVTTAPGTVHSYLGSPFWIHQAVRLPTPNLHWREISSGHLELEWQHPSSWAAQETCYQLRYTGEGHQDWKVLEPPLGARGGTLELRPRSRYRLQLRARLNGPTYQGPWSSWSDPTRVETATETAWISLVTALHLVLGLSAVLGLLLLRWQFPAHYRYRPRQAGDWRWTRWSRRPVNRHSWFAL

SEQ ID NO: 33183 - protein, 288 aa, Homo sapiens
LAPTESLARMEAVVNLYQEVMKHADPRIQGYPLMGSPLLMTSILLTYVYFVLSLGPRIMANRKPFQLRGFMIVYNFSLVALSLYIVYEFLMSGWLSTYTWRCDPVDYSNSPEALRMVRVAWLFLFSKFIELMDTVIFILRKKDGQVTFLHVFHHSVLPWSWWWGVKIAPGGMGSFHAMINSSVHVIMYLYYGLSAFGPVAQPYLWWKKHMTAIQLIQFVLVSLHISQYYFMSSCNYQYPVIIHLIWMYGTIFFMLFSNFWYHSYTKGKRLPRALQQNGAPGIAKVKAN

SEQ ID NO: 33184 - protein, 269 aa, Homo sapiens
VTNLFLLVQREEKQLEASLDALLSQVADLKNSLGSFICKLENEYGRLTCFALLSGQLNTLNKVLKHEKTPLFRNQVIIPLVLSPDRDEDLMRQTEGRVPVFSHEVVPDHLRTKPDPEVEEQEKQLTTDAARIGADAAQKQIQSLNKMCSNLLEKISKEERESESGGLRPNKQTFNPTDTNALVAAVAFGKGLSNWRPSGSSGPGQAGQPGAGTILAGTSGLQQVQMAGAPSQQQPMLSGVQMAQAGQPGKMPSGIKTNIKSASMHPYQR

SEQ ID NO: 33185 - protein, 331 aa, Homo sapiens
VKARVFTALRFSNHEQCSFVRRASKESPAPARRPPPAARRLWIPRTPPGPASPGMAPLRFSANLSWLFPELSGLPARVRAAGSSGFEAVEVAWPYAETPEALARAAREAGLRLVLINTPPGDQEKGEMGLGAVPGRQAAFREGLEQAVRYAKALGCPRIHLMAGRVPQGADRIAVKAEMEAVFLENLRHAAGVLAQEDLVGLLEPINTRITDPQYFLDTPQQAAAILQKVGRPNLQLQMDIFHWQIMDGNLTGNIREFLPIVGHVQVAQVPGRGEPSSPGELNFPYLFQLLEDEGYKGFVGCEYQPRGDTVEGLSWLRSYWDRRGHPEAGQ

SEQ ID NO: 33186 - protein, 301 aa, Homo sapiens
VKARVFTALRFSNHEQCSFVRRASKESPAPARRPPPAARRLWIPRTPPGPASPGMAPLRFSANLSWLFPELSGLPARVRAAGSSGFEAVEVAWPYAETPEALARAAREAGLRLVLINTPPGDQEKGEMGLGAVPGRQAAFREGLEQAVRYAKALGCPRIHLMAGRVPQGADRIAVKAEMEAVFLENLRHAAGVLAQEDLVGLLEPINTRITDPQYFLDTPQQAAAILQKVGRPNLQLQMDIFHWQIMDGNLTGNIREFLPIVGHVQVAQVPGRGEPSSPGELNFPYLFQLLEDEGYKGFVG

SEQ ID NO: 33187 - protein, 272 aa, Homo sapiens
LWLAVELEPWMAPEPAPGRTMVPLVPALVMLGLVAGAHGDSKPVFIKVPEDQTGLSGGVASFVCQATGEPKPRITWMKKGKKVSSQRFEVIEFDDGAGSVLRIQPLRVQRDEAIYECTATNSLGEINTSAKLSVLEEEQLPPGFPSIDMGPQLKVVEKARTATMLCAAGGNPDPEISWFKDFLPVDPATSNGRIKQLRSGALQIESSEESDQGKYECVATNSAGTRYSAPANLYVRGLAAWARSPMGIWSHPIRLLGVCACVCAHTGTLICV

SEQ ID NO: 33188 - protein, 363 aa, Homo sapiens
LWLAVELEPWMAPEPAPGRTMVPLVPALVMLGLVAGAHGDSKPVFIKVPEDQTGLSGGVASFVCQATGEPKPRITWMKKGKKVSSQRFEVIEFDDGAGSVLRIQPLRVQRDEAIYECTATNSLGEINTSAKLSVLEEEQLPPGFPSIDMGPQLKVVEKARTATMLCAAGGNPDPEISWFKDFLPVDPATSNGRIKQLRSGGSPIRGALQIESSEESDQGKYECVATNSAGTRYSAPANLYVRGKDSGSAWPLSPQSCAAPAGLSAQSPWCRHARDCHGPSLFSFLLLSAAAATAPTGQVPGVCHYFAFLPCRPMGKQPLLGAFVSFVGLAAWARSPMGIWSHPIRLLGVCACVCAHTGTLICV

SEQ ID NO: 33189 - protein, 357 aa, Homo sapiens
LWLAVELEPWMAPEPAPGRTMVPLVPALVMLGLVAGAHGDSKPVFIKVPEDQTGLSGGVASFVCQATGEPKPRITWMKKGKKVSSQRFEVIEFDDGAGSVLRIQPLRVQRDEAIYECTATNSLGEINTSAKLSVLEEEQLPPGFPSIDMGPQLKVVEKARTATMLCAAGGNPDPEISWFKDFLPVDPATSNGRIKQLRSGALQIESSEESDQGKYECVATNSAGTRYSAPANLYVRGKDSGSAWPLSPQSCAAPAGLSAQSPWCRHARDCHGPSLFSFLLLSAAAATAPTGQVPGVCHYFAFLPCRPMGKQPLLGAFVSFVGLAAWARSPMGIWSHPIRLLGVCACVCAHTGTLICV

SEQ ID NO: 33190 - protein, 1917 aa, Homo sapiens
LWLAVELEPWMAPEPAPGRTMVPLVPALVMLGLVAGAHGDSKPVFIKVPEDQTGLSGGVASFVCQATGEPKPRITWMKKGKKVSSQRFEVIEFDDGAGSVLRIQPLRVQRDEAIYECTATNSLGEINTSAKLSVLEEEQLPPGFPSIDMGPQLKVVEKARTATMLCAAGGNPDPEISWFKDFLPVDPATSNGRIKQLRSGALQIESSEESDQGKYECVATNSAGTRYSAPANLYVRVRRVAPRFSIPPSSQEVMPGGSVNLTCVAVGAPMPYVKWMMGAEELTKEDEMPVGRNVLELSNVVRSANYTCVAISSLGMIEATAQVTVKALPKPPIDLVVTETTATSVTLTWDSGNSEPVTYYGIQYRAAGTEGPFQEVDGVATTRYSIGGLSPFSEYAFRVLAVNSIGRGPPSEAVRARTGEQAPSSPPRRVQARMLSASTMLVQWEPPEEPNGLVRGYRVYYTPDSRRPPNAWHKHNTDAGLLTTVGSLLPGITYSLRVLAFTAVGDGPPSPTIQVKTQQGVPAQPADFQAEVESDTRIQLSWLLPPQERIIMYELVYWAAEDEDQQHKVTFDPTSSYTLEDLKPDTLYRFQLAARSDMGVGVFTPTIEARTAQSTPSAPPQKVMCVSMGSTTVRVSWVPPPADSRNGVITQYSVAYEAVDGEDRGRHVVDGISREHSSWDLVGLEKWTEYRVWVRAHTDVGPGPESSPVLVRTDEDVPSGPPRKVEVEPLNSTAVHVYWKLPVPSKQHGQIRGYQVTYVRLENGEPRGLPIIQDVMLAEAQWRPEESEDYETTISGLTPETTYSVTVAAYTTKGDGARSKPKIVTTTGAVPGRPTMMISTTAMNTALLQWHPPKELPGELLGYRLQYCRADEARPNTIDFGKDDQHFTVTGLHKGTTYIFRLAAKNRAGLGEEFEKEIRTPEDLPSGFPQNLHVTGLTTSTTELAWDPPVLAERNGRIISYTVVFRDINSQQELQNITTDTRFTLTGLKPDTTYDIKVRAWTSKGSGPLSPSIQSRTMPVEQVFAKNFRVAAAMKTSVLLSWEVPDSYKSAVPFKILYNGQSVEVDGHSMRKLIADLQPNTEYSFVLMNRGSSAGGLQHLVSIRTAPDLLPHKPLPASAYIEDGRFDLSMPHVQDPSLVRWFYIVVVPIDRVGGSMLTPRWSTPEELELDELLEAIEQGGEEQRRRRRQAERLKPYVAAQLDVLPETFTLGDKKNYRGFYNRPLSPDLSYQCFVLASLKEPMDQKRYASSPYSDEIVVQVTPAQQQEEPEMLWVTGPVLAVILIILIVIAILLFKRKRTHSPSSKDEQSIGLKDSLLAHSSDPVEMRRLNYQTPGMRDHPPIPITDLADNIERLKANDGLKFSQEYESIDPGQQFTWENSNLEVNKPKNRYANVIAYDHSRVILTSIDGVPGSDYINANYIDGYRKQNAYIATQGPLPETMGDFWRMVWEQRTATVVMMTRLEEKSRVKCDQYWPARGTETCGLIQVTLLDTVELATYTVRTFALHKSGSSEKRELRQFQFMAWPDHGVPEYPTPILAFLRRVKACNPLDAGPMVVHCSAGVGRTGCFIVIDAMLERMKHEKTVDIYGHVTCMRSQRNYMVQTEDQYVFIHEALLEAATCGHTEVPARNLYAHIQKLGQVPPGESVTAMELEFKLLASSKAHTSRFISANLPCNKFKNRLVNIMPYELTRVCLQPIRGVEGSDYINASFLDGYRQQKAYIATQGPLAESTEDFWRMLWEHNSTIIVMLTKLREMGREKCHQYWPAERSARYQYFVVDPMAEYNMPQYILREFKVTDARDGQSRTIRQFQFTDWPEQGVPKTGEGFIDFIGQVHKTKEQFGQDGPITVHCSAGVGRTGVFITLSIVLERMRYEGVVDMFQTVKTLRTQRPAMVQTEDQYQLCYRAALEYLGSFDHYAT

SEQ ID NO: 33191 - protein, 1908 aa, Homo sapiens
LWLAVELEPWMAPEPAPGRTMVPLVPALVMLGLVAGAHGDSKPVFIKVPEDQTGLSGGVASFVCQATGEPKPRITWMKKGKKVSSQRFEVIEFDDGAGSVLRIQPLRVQRDEAIYECTATNSLGEINTSAKLSVLEEEQLPPGFPSIDMGPQLKVVEKARTATMLCAAGGNPDPEISWFKDFLPVDPATSNGRIKQLRSGALQIESSEESDQGKYECVATNSAGTRYSAPANLYVRVRRVAPRFSIPPSSQEVMPGGSVNLTCVAVGAPMPYVKWMMGAEELTKEDEMPVGRNVLELSNVVRSANYTCVAISSLGMIEATAQVTVKALPKPPIDLVVTETTATSVTLTWDSGNSEPVTYYGIQYRAAGTEGPFQEVDGVATTRYSIGGLSPFSEYAFRVLAVNSIGRGPPSEAVRARTGEQAPSSPPRRVQARMLSASTMLVQWEPPEEPNGLVRGYRVYYTPDSRRPPNAWHKHNTDAGLLTTVGSLLPGITYSLRVLAFTAVGDGPPSPTIQVKTQQGVPAQPADFQAEVESDTRIQLSWLLPPQERIIMYELVYWAAEDEDQQHKVTFDPTSSYTLEDLKPDTLYRFQLAARSDMGVGVFTPTIEARTAQSTPSAPPQKVMCVSMGSTTVRVSWVPPPADSRNGVITQYSVAYEAVDGEDRGRHVVDGISREHSSWDLVGLEKWTEYRVWVRAHTDVGPGPESSPVLVRTDEDVPSGPPRKVEVEPLNSTAVHVYWKLPVPSKQHGQIRGYQVTYVRLENGEPRGLPIIQDVMLAEAQETTISGLTPETTYSVTVAAYTTKGDGARSKPKIVTTTGAVPGRPTMMISTTAMNTALLQWHPPKELPGELLGYRLQYCRADEARPNTIDFGKDDQHFTVTGLHKGTTYIFRLAAKNRAGLGEEFEKEIRTPEDLPSGFPQNLHVTGLTTSTTELAWDPPVLAERNGRIISYTVVFRDINSQQELQNITTDTRFTLTGLKPDTTYDIKVRAWTSKGSGPLSPSIQSRTMPVEQVFAKNFRVAAAMKTSVLLSWEVPDSYKSAVPFKILYNGQSVEVDGHSMRKLIADLQPNTEYSFVLMNRGSSAGGLQHLVSIRTAPDLLPHKPLPASAYIEDGRFDLSMPHVQDPSLVRWFYIVVVPIDRVGGSMLTPRWSTPEELELDELLEAIEQGGEEQRRRRRQAERLKPYVAAQLDVLPETFTLGDKKNYRGFYNRPLSPDLSYQCFVLASLKEPMDQKRYASSPYSDEIVVQVTPAQQQEEPEMLWVTGPVLAVILIILIVIAILLFKRKRTHSPSSKDEQSIGLKDSLLAHSSDPVEMRRLNYQTPGMRDHPPIPITDLADNIERLKANDGLKFSQEYESIDPGQQFTWENSNLEVNKPKNRYANVIAYDHSRVILTSIDGVPGSDYINANYIDGYRKQNAYIATQGPLPETMGDFWRMVWEQRTATVVMMTRLEEKSRVKCDQYWPARGTETCGLIQVTLLDTVELATYTVRTFALHKSGSSEKRELRQFQFMAWPDHGVPEYPTPILAFLRRVKACNPLDAGPMVVHCSAGVGRTGCFIVIDAMLERMKHEKTVDIYGHVTCMRSQRNYMVQTEDQYVFIHEALLEAATCGHTEVPARNLYAHIQKLGQVPPGESVTAMELEFKLLASSKAHTSRFISANLPCNKFKNRLVNIMPYELTRVCLQPIRGVEGSDYINASFLDGYRQQKAYIATQGPLAESTEDFWRMLWEHNSTIIVMLTKLREMGREKCHQYWPAERSARYQYFVVDPMAEYNMPQYILREFKVTDARDGQSRTIRQFQFTDWPEQGVPKTGEGFIDFIGQVHKTKEQFGQDGPITVHCSAGVGRTGVFITLSIVLERMRYEGVVDMFQTVKTLRTQRPAMVQTEDQYQLCYRAALEYLGSFDHYAT

SEQ ID NO: 33192 - protein, 621 aa, Homo sapiens
LPPVRGRRAVCRQMRWSPAPVTSAATDLGVPPLLGGRKPLFHLERPARQGLVPPLSTPPPKQAPHAHGTTPPSVLSHPPPSLSPHVLLSPCHQFQVLHGHTCSHVHIHALGLSLPHCSSLTLMLPVYALPPLGMRDHPPIPITDLADNIERLKANDGLKFSQEYESIDPGQQFTWENSNLEVNKPKNRYANVIAYDHSRVILTSIDGVPGSDYINANYIDGYRKQNAYIATQGPLPETMGDFWRMVWEQRTATVVMMTRLEEKSRVKCDQYWPARGTETCGLIQVTLLDTVELATYTVRTFALHKSGSSEKRELRQFQFMAWPDHGVPEYPTPILAFLRRVKACNPLDAGPMVVHCSAGVGRTGCFIVIDAMLERMKHEKTVDIYGHVTCMRSQRNYMVQTEDQYVFIHEALLEAATCGHTEVPARNLYAHIQKLGQVPPGESVTAMELEFKLLASSKAHTSRFISANLPCNKFKNRLVNIMPYELTRVCLQPIRGVEGSDYINASFLDGYRQQKAYIATQGPLAESTEDFWRMLWEHNSTIIVMLTKLREMGRVSPPFPPGPLSYLGEHQPPLGELPPMLLSPLTPQLLVSMASGARYYYLRHLSQNPVKPGTPPLFLLT

SEQ ID NO: 33193 - protein, 8 aa, Homo sapiens
MSILVLVI

SEQ ID NO: 33194 - protein, 114 aa, Homo sapiens
LPLSGTGIFVLFCVEATLTPVGGGLQFSKPAPMFLDDSFRKWARIREFVPPFGIKGQDNLIKAILSVTKEYRLTPALDSLRCRRCIIVGNGGVLANKSLGSRIDDYDIVVRPRL

SEQ ID NO: 33195 - protein, 76 aa, Homo sapiens [sequence omitted]

SEQ ID NO: 33196 - protein, 34 aa, Homo sapiens
MSKFLERRAPKPPPRRVTTTTTIPSACGSSVALL

SEQ ID NO: 33197 - protein, 14 aa, Homo sapiens
MTKPLPTMAPGRTK

SEQ ID NO: 33198 - protein, 213 aa, Homo sapiens
VPRAEPKVLGSGLGGAPRSEPGTAASVGHAPALPLAVGAGGGARSAPGATRSEEDSGGGGGGPEPGAAGGAPTIPDTPLPSRKVSQLSLQVAMLRALLQEARSSQAPSSRPISDPSSLLAPPPLLKDLLRQELRQLLQGLRHKAICEGRDQAQAWVQYSPRVLHFALEEPRCDLPEQEIFQMRGGGPSGHRDLSIIKDQLNVSNIDQVARHLR

SEQ ID NO: 33199 - protein, 556 aa, Homo sapiens
LEAEPVSVVPVTRAPTHRRHGRKRCQRDAGVGYGMMVVSTYIGIYYNVVICIAFYYFFSSMTHVLPWAYCNNPWNTHDCAGVLDASNLTNGSRPAALPSNLSHLLNHSLQRTSPSEEYWRLYVLKLSDDIGNFGEVRLPLLGCLGVSWLVVFLCLIRGVKSSGKVVYFTATFPYVVLTILFVRGVTLEGAFDGIMYYLTPQWDKILEAKVWGDAASQIFYSLGCAWGGLITMASYNKFHNNCYRDSVIISITNCATSVYAGFVIFSILGFMANHLGVDVSRVADHGPGLAFVAYPEALTLLPISPLWSLLFFFMLILLGLGTQFCLLETLVTAIVDEVGNEWILQKKTYVTLGVAVAGFLLGIPLTSQAGIYWLLLMDNYAASFSLVVISCIMCVAIMYIYGHRNYFQDIQMMLGFPPPLFFQICWRFVSPAIIFFILVFTVIQYQPITYNHYQYPGWAVAIGFLMALSSVLCIPLYAMFRLCRTDGDTLLQRLKNATKPSRDWGPALLEHRTGRYAPTIAPSPEDGFEVQPLHPDKAQIPIVGSNGSSRLQDSRI

SEQ ID NO: 33200 - protein, 116 aa, Homo sapiens
VRFLMKLSHETVTIALKNRTQVHGTVTGVDVSMNTHLKAVKMTPKNREPVQLETLSIRGNNIRYFILLDSLPLDTLLVDVEPKVKSKKREAVAGRGRGRGRGRGRGRGRGRGGPRR

SEQ ID NO: 33201 - protein, 553 aa, Homo sapiens
VVVGAAAAGPRCGSARAQVAEGAVRNIQAVGHRQIPDLTWTTLLLLARPFNSPPLRSGLAPPPDLSLVLLQALTLDLRWLPHLSGAMATGADVRDILELGGPEGDAASGTISKKDIINPDKKKSKKSSETLTFKRPEGMHREVYALLYSDKKDAPPLLPSDTGQGYRTVKAKLGSKKVRPWKWMPFTNPARKDGAMFFHWRRAAEEGKDYPFARFNKTVQVPVYSEQEYQLYLHDDAWTKAETDHLFDLSRRFDLRFVVIHDRYDHQQFKKRSVEDLKERYYHICAKLANVRAVPGTDLKIPVFDAGHERRRKEQLERLYNRTPEQVAEEEYLLQELRKIEARKKEREKRSQDLQKLITAADTTAEQRRTERKAPKKKLPQKKEAEKPAVPETAGIKFPDFKSAGVTLRSQRMKLPSSVGQKKIKALEQMLLELGVELSPTPTEELVHMFNELRSDLVLLYELKQACANCEYELQMLRHRHEALARAGVLGGPATPASGPGPASAEPAVTEPGLGPDPKDTIIDVVGAPLTPNSRKRRESASSSSSVKKAKKP

SEQ ID NO: 33202 - protein, 85 aa, Homo sapiens
LRGSTAPSLTPTESLDLYMQSQAAREHKPGASRLLLLLLLPLPPPPPPLPPPALRTRDFSCTTLSACFPPCPEKCDRSPKEFPRS

SEQ ID NO: 33203 - protein, 99 aa, Homo sapiens
LYMQSQAAREHKPGASRLLLLLLLPLPPPPPPLPPPALRTRDFSCTTLSACFPPCPEKCDRSPKEFPRQVLGGNDSPVIFPALTQSAGWPPSQGRLLLA

SEQ ID NO: 33204 - protein, 280 aa, Homo sapiens
LTLSFLFLHLPAIFSQTFLRVRANRQTRLNARIGKMKRRKQDEGQREGSCMAEDDAVDIEHENNNRFEEYEWCGQKRIRATTLLEGGFRGSGFIMCSGKENPDSDADLDVDGDDTLEYGKPQYTEADVIPCTGEEPGEAKEREALRGAVLNGGPPSTRITPEFSKWASDEMPSTSNGESSKQEAMQKTCKNSDIEKITEDSAVTTFEALKARVRELERQLSRGDRYKCLICMDSYSMPLTSIQCWHVHCEECWLRTLGAKKLCPQCNTITAPGDLRRIYL

SEQ ID NO: 33205 - protein, 68 aa, Homo sapiens [sequence omitted]

SEQ ID NO: 33206 - protein, 245 aa, Homo sapiens
LRFLGIARFSSLLTLRMAMDSSLQARLFPGLAIKIQRSNGLIHSANVRTVNLEKSCVSVEWAEGGATKGKEIDFDDVAAINPELLQLLPLHPKDNLPLQENVTIQKQKRRSVNSKIPAPKESLRSRSTRMSTVSELRITAQENDMEVELPAAANSRKQFSVPLRRKSCLVKEVEKMKNKREEKKAQNSEMRMKRAQEYDSSFPNWEFARMIKEFRATLECHPLTMTDPGAPPEILSFCRIGQERN

SEQ ID NO: 33207 - protein, 741 aa, Homo sapiens
LRFLGIARFSSLLTLRMAMDSSLQARLFPGLAIKIQRSNGLIHSANVRTVNLEKSCVSVEWAEGGATKGKEIDFDDVAAINPELLQLLPLHPKDNLPLQENVTIQKQKRRSVNSKIPAPKESLRSRSTRMSTVSELRITAQENDMEVELPAAANSRKQFSVPPAPTRPSCPAVAEIPLRMVSEEMEEQVHSIRGSSSANPVNSVRRKSCLVKEVEKMKNKREEKKAQNSEMRMKRAQEYDSSFPNWEFARMIKEFRATLECHPLTMTDPIEEHRICVCVRKRPLNKQELAKKEIDVISIPSKCLLLVHEPKLKVDLTKYLENQAFCFDFAFDETASNEVVYRFTARPLVQTIFEGGKATCFAYGQTGSGKTHTMGGDLSGKAQNASKGIYAMASRDVFLLKNQPCYRKLGLEVYVTFFEIYNGKLFDLLNKKAKLRVLEDGKQQVQVVGLQEHLVNSADDVIKMIDMGSACRTSGQTFANSNSSRSHACFQIILRAKGRMHGKFSLVDLAGNERGADTSSADRQTRMEGAEINKSLLALKECIRALGQNKAHTPFRESKLTQVLRDSFIGENSRTCMIATISPGISSCEYTLNTLRYADRVKELSPHSGPSGEQLIQMETEEMEACSNGALIPGNLSKEEEELSSQMSSFNEAMTQIRELEEKAMEELKEIIQQGPDWLELSEMTEQPDYDLETFVNKAESALAQQAKHFSALRDVIKALRLAMQLEEQASRQISSKKRPQ

SEQ ID NO: 33208 - protein, 72 aa, Homo sapiens
MGISRDNWHKRRKTGGKRKPYHKKRKYELGRPAANTKIGPRRIHTVRVRGGNKKYRALRLDVGNFSWGSECE

SEQ ID NO: 33209 - protein, 70 aa, Homo sapiens
LHRAHRQHTVPTVTPEEEEILNKKRSKKIQKKYDERKKNAKISSLLEEQFQQGKLLGEKAVVLEVGSRRD

SEQ ID NO: 33210 - protein, 31 aa, Homo sapiens
MEPLGLVVHGKAEPFSAALRSLVNNPRYRWP

SEQ ID NO: 33211 - protein, 55 aa, Homo sapiens
VPSEPGAGRTVVCHAQPLVRDQARVGEVGSGRAGLGLGLPEGVKLENEDFLRSTP

SEQ ID NO: 33212 - protein, 76 aa, Homo sapiens
LTVLTLLGLLHGLVLLPVLLSILGPPPEVIQMYKESPEILSPPAPQGGGLRVGSLQVNISYWKELLWCQDLRPEEI

SEQ ID NO: 33213 - protein, 58 aa, Homo sapiens
LSVLPLRHPSLGGLLFSMGLLCAFHRVSRPSRACAIGLSVRGGVEIAGSGCGVPGAEL

SEQ ID NO: 33214 - protein, 134 aa, Homo sapiens
LTMEANGLGPQGFPELKNDTFLRAAWGEETDYTPVWCMRQAGRYLPEFRETRAAQDFFSTCRSPEACCELTLQVRGPQKRERFMPSVCHLATCLLFPTATASLPSGCCHHFLRHPCCTPGTHSNLILEYNPRTP

SEQ ID NO: 33215 - protein, 137 aa, Homo sapiens
LTMEANGLGPQGFPELKNDTFLRAAWGEETDYTPVWCMRQAGRYLPEFRETRAAQDFFSTCRSPEACCELTLQPLRRFPLDAAIIFSDILVVPQMFSPPPGTGHGGDHGTWQRTQLPRAIKRRAGPRTPTGSRSGSL

SEQ ID NO: 33216 - protein, 300 aa, Homo sapiens
LTMEANGLGPQGFPELKNDTFLRAAWGEETDYTPVWCMRQAGRYLPEFRETRAAQDFFSTCRSPEACCELTLQPLRRFPLDAAIIFSDILVVPQALGMEVTMVPGKGPSFPEPLREEQDLERLRDPEVVASELGYVFQAITLTRQRLAGRVPLIGFAGAPWTLMTYMVEGGGSSTMAQAKRWLYQRPQASHQLLRILTDALVPYLVGQVVAGAQALQLFESHAGHLGPQLFNKFALPYIRDVAKQVKARLREAGLAPVPMIIFAKDGHFALEELAQAGYEVVGLDWTVAPKKARRRSGSW

SEQ ID NO: 33217 - protein, 369 aa, Homo sapiens
LTMEANGLGPQGFPELKNDTFLRAAWGEETDYTPVWCMRQAGRYLPEFRETRAAQDFFSTCRSPEACCELTLQPLRRFPLDAAIIFSDILVVPQALGMEVTMVPGKGPSFPEPLREEQDLERLRDPEVVASELGYVFQAITLTRQRLAGRVPLIGFAGAPWTLMTYMVEGGGSSTMAQAKRWLYQRPQASHQLLRILTDALVPYLVGQVVAGAQALQLFESHAGHLGPQLFNKFALPYIRDVAKQVKARLREAGLAPVPMIIFAKDGHFALEELAQAGYEVVGLDWTVAPKKARECVGKTVTLQGNLDPCALYASEEEIGQLVKQMLDDFGPHRYIANLGHGLYPDMDPEHVGAFVDAVHKHSRLLRQN

SEQ ID NO: 33218 - protein, 323 aa, Homo sapiens
LTMEANGLGPQGFPELKNDTFLRAAWGEETDYTPVWCMRQAGRYLPEFRETRAAQDFFSTCRSPEACCELTLQPLRRFPLDAAIIFSDILVVPQALGMEVTMVPGKGPSFPEPLREEQDLERLRDPEVVASELGYVFQAITLTRQRLAGRVPLIGFAGAPWTLMTYMVEGGGSSTMAQAKRWLYQRPQASHQLLRILTDALVPYLVGQVVAGAQIIFAKDGHFALEELAQAGYEVVGLDWTVAPKKARECVGKTVTLQGNLDPCALYASEEEIGQLVKQMLDDFGPHRYIANLGHGLYPDMDPEHVGAFVDAVHKHSRLLRQN

SEQ ID NO: 33219 - protein, 137 aa, Homo sapiens
MVVLGEMKRKVLPLHFLPFMRLLVVYPWTQRFFDSFGNLSSASAIMGNPKVKAHGKKVLTSLGDAIKHLDDLKGTFAQLSELHCDKLHVDPENFKLLGNVLVTVLAIHFGKEFTPEVQASWQKMVTGVASALSSRYH

SEQ ID NO: 33220 - protein, 49 aa, Homo sapiens
VGRGYLLCTVYLALTLDTHQSTRESVLALKSFFTVKFRKYTLMERIKVM

SEQ ID NO: 33221 - protein, 43 aa, Homo sapiens
MLPLCRRLLLLPAQAPLWLLSPASVSNQKRSKIQQKFMCGVPS

SEQ ID NO: 33222 - protein, 225 aa, Homo sapiens
LSAAHTPLVGPPRRCGNLVEPQADRKMSSGNAKIGHPAPNFKATAVMPDGQFKDISLSDYKGKYVVFFFYPLDFTFVCPTEIIAFSDRAEEFKKLNCQVIGASVDSHFCHLAWVNTPKKQGGLGPMNIPLVSDPKRTIAQDYGVLKADEGISFRGLFIIDDKGILRQITVNDLPVGRSVDETLRLVQAFQFTDKHGEVCPAGWKPGSDTIKPDVQKSKEYFSKQK

SEQ ID NO: 33223 - protein, 233 aa, Homo sapiens
LAIKAAPRRALARLVLAWCRWLVSATCVGTADRKMSSGNAKIGHPAPNFKATAVMPDGQFKDISLSDYKGKYVVFFFYPLDFTFVCPTEIIAFSDRAEEFKKLNCQVIGASVDSHFCHLAWVNTPKKQGGLGPMNIPLVSDPKRTIAQDYGVLKADEGISFRGLFIIDDKGILRQITVNDLPVGRSVDETLRLVQAFQFTDKHGEVCPAGWKPGSDTIKPDVQKSKEYFSKQK

SEQ ID NO: 33224 - protein, 50 aa, Homo sapiens
VWAVRPLRSEARRALLACCLFLLLSGARPRSGGGAVMREAAGGGPESETA

SEQ ID NO: 33225 - protein, 141 aa, Homo sapiens
VPREELFVTSKLWNTKHHPEDVEPALRKTLADLQLEYLDLYLMHWPYAFERGDNPFPKNADGTICYDSTHYKETWKALEALVAKGLVQALGLSNFNSRQIDDILSVASVRPAVLQVAGPAESDLHPQKYHSFSNPSEHQGV

SEQ ID NO: 33226 - protein, 160 aa, Homo sapiens
LFFSQALFRSLVRHLRGTMAMESTATAAVAAELVSADKIEDVPAPSTSADKVESLDVDSEAKKLLGLGQKHLVMGDIPAAVNAFQEAASLLGKKYGETANECGEAFFFYGKSLLELARMENGVLGNALEGVHVEEEEGEKTEDESLVENNDNIDGMWSCM

SEQ ID NO: 33227 - protein, 211 aa, Homo sapiens
MLSIYLLFFFSLLENYVQAVEEFQSCLNLQEQYLEAHDRLLAETHYQLGLAYGYNSQYDEAVAQFSKSIEVIENRMAVLNEQVKEAEGSSAEYKKEIEELKELLPEIREKIEDAKESQRSGNVAELALKATLVGSVNILIIACLVPFMLMFYLPGTFHHDLVSRELVGSSNYSYQVMQWLRGNTLEPQTIWVLIPYLRVAMGLSLPQLTDL

SEQ ID NO: 33228 - protein, 7 aa, Homo sapiens
MILFLLG

SEQ ID NO: 33229 - protein, 7 aa, Homo sapiens
MGNSPFN

SEQ ID NO: 33230 - protein, 67 aa, Homo sapiens [sequence omitted]

SEQ ID NO: 33231 - protein, 117 aa, Homo sapiens
LGEVLGWRERSKAPPPPSSCLQLKCCGFTNYTDFEDSPYFKENSAFPPFCCNDNVTNTANETCTKQKAHDQKVEGCFNQLLYDIRTNAVTVGGVAAGIGGLELAAMIVSMYLYCNLQ

SEQ ID NO: 33232 - protein, 85 aa, Homo sapiens
MGDRILPFLAAVWLCQLAFCTDPLTTVREQCEQLEKCVKARERLELCDERVSSRSHTEEDCTEELFDFLHARDHCVAHKLFNNLK

SEQ ID NO: 33233 - protein, 49 aa, Homo sapiens [sequence omitted]

SEQ ID NO: 33234 - protein, 66 aa, Homo sapiens
MRNEGALDFFFFLLMFHSMTSRSDPAAFESRLEKRSEFRKQPVGHSRQGDFIKCVEQKDGAQNKLV

SEQ ID NO: 33235 - protein, 175 aa, Homo sapiens
LFVFVLPFKMGDRSATLKRQSLDQVTNRTDTVKIQSIKKEDSSNSQVSKLREKLQLISALTNKPESNRPPETADEEQVESFTSKPSALPKFSQFLGDPVEKAAQLRPISLPGVSSTEDLQDLFRKTGQDVDGKLTYQEIWTSLGSAMPEPESLRAFDSDGDGRYSFLELRVALGI

SEQ ID NO: 33236 - protein, 168 aa, Homo sapiens
MLSRCRSGLLHVLGLSFLLQTRRPILLCSPRLMKPLVVFVLGGPGAGKGTQCARIVEKYGYTHLSAGELLRDERKNPDSQYGELIEKYIKEGKIVPVEITISLLKREMDQTMAANAQKNKFLIDGFPRNQDNLQGWNKTMDGKADVSFVLFFDCNNEVMKIFICPHRL

SEQ ID NO: 33237 - protein, 415 aa, Homo sapiens
VAAATVAEPQSELESESGETLRTSSRPPRSAPPSLRSLGPDRPAGKMRLKNQIISTMEPQVSNGPTSNTSNGPSSNNRNCPSPMQTGATTDDSKTNLIVNYLPQNMTQEEFRSLFGSIGEIESCKLVRDKITGQSLGYGFVNYIDPKDAEKAINTLNGLRLQTKTIKVSYARPSSASIRDANLYVSGLPKTMTQKELEQLFSQYGRIITSRILVDQVTGVSRGVGFIRFDKRIEAEEAIKGLNGQKPSGATEPITVKFANNPSQKSSQALLSQLYQSPNRRYPGPLHHQAQRFRLDNLLNMAYGVKRFSPITIDGMTSLVGMNIPGHTGTGWCIFVYNLSPDSDESVLWQLFGPFGAVNNVKVIRDFNTNKCKGFGFVTMTNYDEAAMAIASLNGYRLGDRVLQVSFKTNKAHKS

SEQ ID NO: 33238 - protein, 924 aa, Homo sapiens
LRPLPPPPPRPEPQSARLPSPPLHDGNTMAAAAQLSLTQLSSGNPVYEKYYRQVDTGNTGRVLASDAAAFLKKSGLPDLILGKIWDLADTDGKGILNKQEFFVALRLVACAQNGLEVSLSSLNLAVPPPRFHDTSSPLLISGTSAAELPWAVKPEDKAKYDAIFDSLSPVNGFLSGDKVKPVLLNSKLPVDILGRVWELSDIDHDGMLDRDEFAVAMFLVYCALEKEPVPMSLPPALVPPSKRKTWVVSPAEKAKYDEIFLKTDKDMDGFVSGLEVREIFLKTGLPSTLLAHIWSLCDTKDCGKLSKDQFALAFHLISQKLIKGIDPPHVLTPEMIPPSDRASLQKNIIGSSPVADFSAIKELDTLNNEIVDLQREKNNVEQDLKEKEDTIKQRTSEVQDLQDEVQRENTNLQKLQAQKQQVQELLDELDEQKAQLEEQLKEVRKKCAEEAQLISSLKAELTSQESQISTYEEELAKAREELSRLQQETAELEESVESGKAQLEPLQQHLQDSQQEISSMQMKLMEMKDLENHNSQLNWCSSPHSILVNGATDYCSLSTSSSETANLNEHVEGQSNLESEPIHQESPARSSPELLPSGVTDENEVTTAVTEKVCSELDNNRHSKEEDPFNVDSSSLTGPVADTNLDFFQSDPFVGSDPFKDDPFGKIDPFGGDPFKGSDPFASDCFFRQSTDPFATSSTDPFSAANNSSITSVETLKHNDPFAPGGTVVAASDSATDPFASVFGNESFGGGFADFSTLSKVNNEDPFRSATSSSVSNVVITKNVFEETSVKSEDEPPALPPKIGTPTRPCPLPPGKRSINKLDSPDPFKLNDPFQPFPGNDSPKEKDPEIFCDPFTSATTTTNKEADPSNFANFSAYPSEEDMIEWAKRESEREEEQRLARLNQQEQEDLELAIALSKSEISEA

SEQ ID NO: 33239 - protein, 13 aa, Homo sapiens
MMETPWLRRPSSL

SEQ ID NO: 33240 - protein, 968 aa, Homo sapiens
LKNRSAPVQHLAGWQAEEQQGETDTVLSAAALCVGVGSFADPDDLPGLAHFLEHMVFMGSLKYPDENGFDAFLKKHGGSDNASTDCERTVFQFDVQRKYFKEALDRWAQFFIHPLMIRDAIDREVEAVDSEYQLARPSDANRKEMLFGSLARPGHPMGKFFWGNAETLKHEPRKNNIDTHARLREFWMRYYSSHYMTLVVQSKETLDTLEKWVTEIFSQIPNNGLPRPNFGHLTDPFDTPAFNKLYRVVPIRKIHALTITWALPPQQQHYRVKPLHYISWLVGHEGKGSILSFLRKKCWALALFGGNGETGFEQNSTYSVFSISITLTDEGYEHFYEVAYTVFQYLKMLQKLGPEKRIFEEIRKIEDNEFHYQEQTDPVEYVENMCENMQLYPLQDILTGDQLLFEYKPEVIGEALNQLVPQKANLVLLSGANEGKCDLKEKWFGTQYSIEDIENSWAELWNSNFELNPDLHLPAENKYIATDFTLKAFDCPETEYPVKIVNTPQGCLWYKKDNKFKIPKAYIRFHLISPLIQKSAANVVLFDIFVNILTHNLAEPAYEADVAQLEYKLVAGEHGLIIRVKGFNHKLPLLFQLIIDYLAEFNSTPAVFTMITEQLKKTYFNILIKPETLAKDVRLLILEYARWSMIDKYQALMDGLSLESLLSFVKEFKSQLFVEGLVQGNVTSTESMDFLKYVVDKLNFKPLEQEMPVQFQVVELPSGHHLCKVKALNKGDANSEVTVYYQSGTRSLREYTLMELLVMHMEEPCFDFLRTKQTLGYHVYPTCRNTSGILGFSVTVGTQATKYNSEVVDKKIEEFLSSFEEKIENLTEEAFNTQVTALIKLKECEDTHLGEEVDRNWNEVVTQQYLFDRLAHEIEALKSFSKSDLVNWFKAHRGPGSKMLSVHVVGYGKYELEEDGTPSSEDSNSSCEVMQLTYLPTSPLLADCIIPITDIRAFTTTLNLLPYHKIVK

SEQ ID NO: 33241 - protein, 108 aa, Homo sapiens
LEASLRIPACRTSVVPPQPCAPGPARRRSSGIRVAAAARAPMRLGGCRALAAVAAAAAATAAPTGVGGFAAAPGAAPVPSGGGFRLRDDPRGHAEAEAAAARGSNRAY

SEQ ID NO: 33242 - protein, 44 aa, Homo sapiens
LVSEYMSKKIKVDEFVTHNLSFEEINKAFELMHSGKSIRTVVKI

SEQ ID NO: 33243 - protein, 36 aa, Homo sapiens
LLALPVATAAAQGPREPRAVPGETRPGFGSDSPRGI

SEQ ID NO: 33244 - protein, 27 aa, Homo sapiens
LARSFLFSFHLLFISSETHALVLAFGP

SEQ ID NO: 33245 - protein, 561 aa, Homo sapiens
MLISRNKLILLLGIVFFERGKSATLSLPKAPSCGQSLVKVQPWNYFNIFSRILGGSQVEKGSYPWQVSLKQRQKHICGGSIVSPQWVITAAHCIANRNIVSTLNVTAGEYDLSQTDPGEQTLTIETVIIHPHFSTKKPMDYDIALLKMAGAFQFGHFVGPICLPELREQFEAGFICTTAGWGRLTEGGVLSQVLQEVNLPILTWEECVAALLTLKRPISGKTFLCTGFPDGGRDACQGDSGGSLMCRNKKGAWTLAGVTSWGLGCGRGWRNNVRKSDQGSPGIFTDISKVLPWIHEHIQTGNRRKSSRAWCSEQDVIVSGAEGKLHFPESLHLYYESKQRCVWTLLVPEEMHVLLSFSHLDVESCHHSYLSMYSLEDRPIGKFCGESLPIGSNSLRLKFVSDATDNAAGFNLTYKALKPNYIPDSGCSYLTVLFEEGLIQSLNYPENYSDKANCDWIFQASKHHLIKLSFQSLEIEESGDCTSDYVTVHSDVERKKEIARLCGYDVPTPVLSPSSIMLISFQSDENGTCRGFQATVSFIPKAVYPDLNISISEDESMFLET

SEQ ID NO: 33246 - protein, 87 aa, Homo sapiens
LKSFFFKLGLRNILPITTAKVPIVKFEHRRSGLEGDISLYNTLAQHNTRMLATYAAIDPRVQYLGYTMKVFAKVFMKKLMICFVHDN

SEQ ID NO: 33247 - protein, 148 aa, Homo sapiens
MVAATVAAAWLLLWAAACAQQEQDFYDFKAVNIRGKLVSLEKYRGSVSLVVNVASECGFTDQHYRALQQLQRDLGPHHFNVLAFPCNQFGQQEPDSNKEIESFARRTYSVSFPMFSKIAVTGTGAHPAFKYLARKSWSLHPLTPPLAG

SEQ ID NO: 33248 - protein, 114 aa, Homo sapiens [sequence omitted]

SEQ ID NO: 33249 - protein, 61 aa, Homo sapiens
MTSAPIAVRLGKVAIDRGTEVDIASGMAIEGMCYAQNIPTRDRLEGMAAFREKRTPKFVGK

SEQ ID NO: 33250 - protein, 93 aa, Homo sapiens
LVGGTQRLPRCLGVALAKELIFTGRRLSGTEAHVLGLVNHAVAQNEEGDAAYQRARALAQEILPQAPIAVRLGKVAIDRGTEVRGFWVGTWVH

SEQ ID NO: 33251 - protein, 523 aa, Homo sapiens
VGACDPAPGVRGGGWHDQGKKALADAQIPYSAVDQACVGYVFGDSTCGQRAIYHSLGMTGIPIINVNNNCATGSTALFMARQLIQGGVAECVLALGFEKMSKGSLGIKFSDRTIPTDKHVDLLINKYGLSAHPVAPQMFGYAGKEHMEKYGTKIEHFAKIGWKNHKHSVNNPYSQFQDEYSLDEVMASKEVFDFLTILQCCPTSDGAAAAILASEAFVQKYGLQSKAVEILAQEMMTDLPSSFEEKSIIKMVGFDMSKEAARKCYEKSGLTPNDIDVIELHDCFSTNELLTYEALGLCPEGQGATLVDRGDNTYGGKWVINPSGGLISKGHPLGATGLAQCAELCWQLRGEAGKRQVPGAKVALQHNLGIGGAVVVTLYKMGFPEAASSFRTHQIEAVPTSSASDGFKANLVFKEIEKKLEEEGEQFVKKIGGIFAFKVKDGPGGKEATWVVDVKNGKGSVLPNSDKKADCTITMADSDFLALMTGKMNPQSAFFQGKLKITGNMGLAMKLQNLQLQPGNAKL

SEQ ID NO: 33252 - protein, 39 aa, Homo sapiens [sequence omitted]

SEQ ID NO: 33253 - protein, 502 aa, Homo sapiens
MLFFSFYFLGPWFDMYLSARDSVVLNFNPFMAFNPDPKSEYNDQLTRATNMTVSAIRFLKTLRAGLLEPEVFHLNPAKSDTITFKRLIRFVPSSLSWYGAYLVNAYPLDMSQYFRLFNSTRLPKPSRDELFTDDKARHLLVLRKGNFYIFDVLDQDGNIVSPSEIQAHLKYILSDSSPAPEFPLAYLTSENRDIWAELRQKLMSSGNEESLRKVDSAVFCLCLDDFPIKDLVHLSHNMLHGDGTNRWFDKSFNLIIAKDGSTAVHFEHSWGDGVAVLRFFNEVFKDSTQTPAVTPQSQPATTDSTVTVQKLNFELTDALKTGITAAKEKFDATMKTLTIDCVQFQRGGKEFLKKQKLSPDAVAQLAFQMAFLRQYGQTVATYESCSTAAFKHGRTETIRPASVYTKRCSEAFVREPSRHSAGELQQMMVECSKYHGQLTKEAAMGEAGVGSMPLGLVLSAWVSKPKSFYSKSDFYPFTRFNPSPTPQIFLFYPSSLNSHTSH

SEQ ID NO: 33254 - protein, 28 aa, Homo sapiens
LISVLNRSLLSGSMRKYLTRHIKCSGFS

SEQ ID NO: 33255 - protein, 103 aa, Homo sapiens
LGAMESDFYLRYYVGHKGKFGHEFLEFEFRPDGKLRYANNSNYKNDVMIRKEAYVHKSVMEELKRIIDDSEITKEDDALWPPPDRVGRQVCFIDYPVVQKSYK

SEQ ID NO: 33256 - protein, 212 aa, Homo sapiens
VLTIRLTLCSFPPLPQMSPWKDGGSLVEVYLLDTSIQSDHREIEGRVMVTDFENVPEEDGTRFHRQASKCDSHGTHLAGVVSGRDAGVAKGASMRSLRVLNCQGKGTVSGTLIGLEFIRKSQLVQPVGPLVVLLPLAGGYSRVLNAACQRLARAGVVLVTAAGNFRDDACLYSPASAPEGRTSLVPPATAAPALCHRVGHHRLLPTWLALQP

SEQ ID NO: 33257 - protein, 288 aa, Homo sapiens
LSSFGLLFVVFYFTHLEVSPITGRSKLLLLGKEQFRLLSELEYEAWMEEFKNDMLTEKDARYLAVKEVLCHLIECNKDVPGISQINWVIHVVDSPIINAFVLPNGQMFVFTGFLNSVTDIHQLSFLLGHEIAHAVLGHAAEKAGMVHLLDFLGMIFLTMIWAICPRDSLALLCQWIQSKLQEYMFNRPYSRKLEAEADKIGLLLAAKACADIRASSVFWQQMEFVDSLHGQPKMPEWLSTHPSHGNRVEYLDRLIPQLVREEKFIEQPEQIAELTLNSFIQNTEICRS

SEQ ID NO: 33258 - protein, 397 aa, Homo sapiens
LAFRGTGRGAGCVTQIPVGTVGGGTSRAGRVEYKSRRERPGGRRLQTIPDAGARAPTSPRASSARVRSAFLRPTMARGPGLAPPPLRLPLLLLVLAAVTGHTAAQDNCTCPTNKMTVCSPDGPGGRCQCRALGSGMAVDCSTLTSKCLLLKARMSAPKNARTLVRPSEHALVDNDGLYDPDCDPEGRFKARQCNQTSVCWCVNSVGVRRTDKGDLSLRCDELVRTHHILIDLRHRPTAGAFNHSDLDAELRRLFRERYRLHPKFVAAVHYEQPTIQIELRQNTSQKAAGDVDIGDAAYYFERDIKGESLFQGRGGLDLRVRGEPLQVERTLIYYLDEIPPKFSMKRLTAGLIAVIVVVVVALVAGMAVLVITNRRKSGKYKKVEIKELGELRKEPSL

SEQ ID NO: 33259 - protein, 20 aa, Homo sapiens
LIPLTLVSKQTREKEKHQKV

SEQ ID NO: 33260 - protein, 555 aa, Homo sapiens
LPPPPLPPPPLPPPGRLVSHPPGRCSRDVVESPVSSSGLRQATGGGTAMSGGEQKPERYYVGVDVGTGSVRAALVDQSGVLLAFADQPIKNWEPQFNHHEQSSEDIWAACCVVTKKVVQGIDLNQIRGLGFDATCSLVVLDKQFHPLPVNQEGDSHRNVIMWLDHRAVSQVNRINETKHSVLQYVGGVMSVEMQAPKLLWLKENLREICWDKAGHFFDLPDFLSWKATGVTARSLCSLVCKWTYSAEKGWDDSFWKMIGLEDFVADNYSKIGNQVLPPGASLGNGLTPEAARDLGLLPGIAVAASLIDAHAGGLGVIGADVRGHGLICEGQPVTSRLAVICGTSSCHMGISKDPIFVPGVWGPYFSAMVPGFWLNEGGQSVTGKLIDHMVQGHAAFPELQVKATARCQSIYAYLNSHLDLIKKAQPVGFLTVDLHVWPDFHGNRSPLADLTLKGMVTGLKLSQDLDDLAILYLATVQAIALGTRFIIEAMEAAGHSISTLFLCGGLSKNPLFVQMHADITGMPVVLSQEVESVLVGAAVLGACASGDFASVQWGK

SEQ ID NO: 33261 - protein, 545 aa, Homo sapiens
VGQPHGESVLSSGLAGVETSLDAGWPGGGTAMSGGEQKPERYYVGVDVGTGSVRAALVDQSGVLLAFADQPIKNWEPQFNHHEQSSEDIWAACCVVTKKVVQGIDLNQIRGLGFDATCSLVVLDKQFHPLPVNQEGDSHRNVIMWLDHRAVSQVNRINETKHSVLQYVGGVMSVEMQAPKLLWLKENLREICWDKAGHFFDLPDFLSWKATGVTARSLCSLVCKWTYSAEKGWDDSFWKMIGLEDFVADNYSKIGNQVLPPGASLGNGLTPEAARDLGLLPGIAVAASLIDAHAGGLGVIGADVRGHGLICEGQPVTSRLAVICGTSSCHMGISKDPIFVPGVWGPYFSAMVPGFWLNEGGQSVTGKLIDHMVQGHAAFPELQVKATARCQSIYAYLNSHLDLIKKAQPVGFLTVDLHVWPDFHGNRSPLADLTLKGMVTGLKLSQDLDDLAILYLATVQAIALGTRFIIEAMEAAGHSISTLFLCGGLSKNPLFVQMHADITGMPVVLSQEVESVLVGAAVLGACASGDFASVQIRKTKHRAIK

SEQ ID NO: 33262 - protein, 123 aa, Homo sapiens
LGLMPRVLWLFWISSFTHYQSTRKNLREICWDKAGHFFDLPDFLSWKATGVTARSLCSLVCKWTYSAEKGWDDSFWKMIGLEDFVADNYSKIDSQKDCFQLLALPGIALKSQKGKGVTLTTSW

SEQ ID NO: 33263 - protein, 556 aa, Homo sapiens
LIFFSPPFSLSLSLSLPLSLFLLSHPHSRTPPNRTPRRTRIPQRPAVMYSPLCLTQDEFHPFIEALLPHVRAFAYTWFNLQARKRKYFKKHEKRMSKEEERAVKDELLSEKPEVKQKWASRLLAKLRKDIRPEYREDFVLTVTGKKPPCCVLSNPDQKGKMRRIDCLRQADKVWRLDLVMVILFKGIPLESTDGERLVKSPQCSNPGLCVQPHHIGVSVKELDLYLAYFVHAADSSQSESPSQPSDADIKDQPENGHLGFQDSFVTSGVFSVTELVRVSQTPIAAGTGPNFSLSDLESSSYYSMSPGAMRRSLPSTSSTSSTKRLKSVEDEMDSPGEEPFYTGQGRSPGSGSQSSGWHEVEPGMPSPTTLKKSEKSGFSSPSPSQTSSLGTAFTQHHRPVITGPRASPHATPSTLHFPTSPIIQQPGPYFSHPAIRYHPQETLKEFVQLVCPDAGQQAGQVGFLNPNGSSQGKVHNPFLPTPMLPPPPPPPMARPVPLPVPDTKPPTTSTEGGAASPTSPTYSTPSTSPANRFVSVGPRDPSFVNIPQQTQSWYLG

SEQ ID NO: 33264 - protein, 545 aa, Homo sapiens
LIFFSPPFSLSLSLSLPLSLFLLSHPHSRTPPNRTPRRTRIPQRPAVMYSPLCLTQDEFHPFIEALLPHVRAFAYTWFNLQARKRKYFKKHEKRMSKEEERAVKDELLSEKPEVKQKWASRLLAKLRKDIRPEYREDFVLTVTGKKPPCCVLSNPDQKGKMRRIDCLRQADKVWRLDLVMVILFKGIPLESTDGERLVKSPQCSNPGLCVQPHHIGVSVKELDLYLAYFVHAADSSQSESPSQPSDADIKDQPENGHLGFQDSFVTSGVFSVTELVRVSQTPIAAGTGPNFSLSDLESSSYYSMSPGAMRRSLPSTSSTSSTKRLKSVEDEMDSPGEEPFYTGQGRSPGSGSQSSGWHEVEPGMPSPTTLKKSEKSGFSSPSPSQTSSLGTAFTQHHRPVITGPRASPHATPSTLHFPTSPIIQQPGPYFSHPAIRYHPQETLKEFVQLVCPDAGQQAGQVGFLNPNGSSQGKVHNPFLPTPMLPPPPPPPMARPVPLPVPDTKPPTTSTEGGAASPTSPILVPGIKVAASHHPPDRPPDPFSTL

SEQ ID NO: 33265 - protein, 92 aa, Homo sapiens
VTARLVGVLWFVSVTTGPWGAVATSAGGEESLKCEDLKVGQYPLWRTPPHGGEVELGSQGLTLSPWLEYSGTISAHCSLRLPGSVNSPASAS

SEQ ID NO: 33266 - protein, 806 aa, Homo sapiens
LVITTFLYKLTLDTPWDLKKKMPGVIPSESNGLSRGSPSKKNRLSLKFFQKKETKRALDFTDSQENEEKASEYRASEIDQVVPAAQSSPINCEKRENLLPFVGLNNLGNTCYLNSILQVLYFCPGFKSGVKHLFNIISRKKEALKDEANQKDKGNCKEDSLASYELICSLQSLIISVEQLQASFLLNPEKYTDELATQPRRLLNTLRELNPMYEGYLQHDAQEVLQCILGNIQETCQLLKKEEVKNVAELPTKVEEIPHPKEEMNGINSIEMDSMRHSEDFKEKLPKGNGKRKSDTEFGNMKKKVKLSKEHQSLEENQRQTRSKRKATSDTLESPPKIIPKYISENESPRPSQKKSRVKINWLKSATKQPSILSKFCSLGKITTNQGVKGQSKENECDPEEDLGKCESDNTTNGCGLESPGNTVTPVNVNEVKPINKGEEQIGFELVEKLFQGQLVLRTRCLECESLTERREDFQDISVPVQEDELSKVEESSEISPEPKTEMKTLRWAISQFASVERIVGEDKYFCENCHHYTEAERSLLFDKMPEVITIHLKCFAASGLEFDCYGGGLSKINTPLLTPLKLSLEEWSTKPTNDSYGLFAVVMHSGITISSGHYTASVKVTDLNSLELDKGNFVVDQMCEIGKPEPLNEEEARGVVENYNDEEVSIRVGGNTQPSKVLNKKNVEAIGLLGGQKSKADYELYNKASNPDKVASTAFAENRNSETSDTTGTHESDRNKESSDQTGINISGFENKISYVVQSLKEYEGKWLLFDDSEVKVTEEKDFLNSLSPSTSPTSTPYLLFYKKL

SEQ ID NO: 33267 - protein, 63 aa, Homo sapiens
LASVLIPGKTPAEMSFSPSPNQTTQVLPALSRLDAGVFSCMYFFVRPQKASAGVPEGQKMAID

SEQ ID NO: 33268 - protein, 281 aa, Homo sapiens
MEKWYLMTVVVLIGLTVRWTVSLNSYSGAGKPPMFGDYEAQRHWQEITFNLPVKQWYFNSSDNNLQYWGLDYPPLTAYHSLLCAYVAKFINPDWIALHTSRGYESQAHKLFMRTTVLIADLLIYIPAVVLYCCCLKEISTKKKIANALCILLYPGLILIDYGHFQNIYNSVSLGFALWGVLGISCDCDLLGSLAFCLAINYKQMELYHALPFFCFLLGKCFKKGLKGKGFVLLVKLACIVVASFVLCWLPFFTEREQTLQVLRRLFPVDRGLFEASFVLRF

SEQ ID NO: 33269 - protein, 509 aa, Homo sapiens
MEKWYLMTVVVLIGLTVRWTVSLNSYSGAGKPPMFGDYEAQRHWQEITFNLPVKQWYFNSSDNNLQYWGLDYPPLTAYHSLLCAYVAKFINPDWIALHTSRGYESQAHKLFMRTTVLIADLLIYIPAVVLYCCCLKEISTKKKIANALCILLYPGLILIDYGHFQNIYNSVSLGFALWGVLGISCDCDLLGSLAFCLAINYKQMELYHALPFFCFLLGKCFKKGLKGKGFVLLVKLACIVVASFVLCWLPFFTEREQTLQVLRRLFPVDRGLFEDKVANIWCSFNVFLKIKDILPRHIQLIMSFCSTFLSLLPACIKLILQPSSKGFKFTLVSCALSFFLFSFQVHEKSILLVSLPVCLVLSEIPFMSTWFLLVSTFSMLPLLLKDELLMPSVVTTMAFFIACVTSFSIFEKTSEEELQLKSFSISVRKYLPCFTFLSRIIQYLFLISVITMVLLTLMTVTLDPPQKLPDLFSVLVCFVSCLNFLFFLVYFNIIIMWDSKSGRNQKKIS

SEQ ID NO: 33270 - protein, 406 aa, Homo sapiens
LGAAAAAASARGGMHRPRRRGTRPPLLALLAALLLAARGAAAQETELSVSAELVPTSSWNISSELNKDSYLTLDEPMNNITTSLGQTAELHCKVSGNPPPTIRWFKNDAPVVQEPRRLSFRSTIYGSRLRIRNLDTTDTGYFQCVATNGKEVVSSTGVLFVKFGPPPTASPGYSDEYEEDGFCQPYRGIACARFIGNRTVYMESLHMQGEIENQITAAFTMIGTSSHLSDKCSQFAIPSLCHYAFPYCDETSSVPKPRDLCRDECEILENVLCQTEYIFARSNPMILMRLKLPNCEDLPQPESPEAANCIRIGIPMADPINKNHKCYNSTGVDYRGTVSVTKSGRQCQPWNSQYPHTHTFTALRFPELNGGHSYCRNPGNQKEAPWCFTLDENFKSDLCDIPACGK

SEQ ID NO: 33271 - protein, 950 aa, Homo sapiens
LGAAAAAASARGGMHRPRRRGTRPPLLALLAALLLAARGAAAQETELSVSAELVPTSSWNISSELNKDSYLTLDEPMNNITTSLGQTAELHCKVSGNPPPTIRWFKNDAPVVQEPRRLSFRSTIYGSRLRIRNLDTTDTGYFQCVATNGKEVVSSTGVLFVKFGPPPTASPGYSDEYEEDGFCQPYRGIACARFIGNRTVYMESLHMQGEIENQITAAFTMIGTSSHLSDKCSQFAIPSLCHYAFPYCDETSSVPKPRDLCRDECEILENVLCQTEYIFARSNPMILMRLKLPNCEDLPQPESPEAANCIRIGIPMADPINKNHKCYNSTGVDYRGTVSVTKSGRQCQPWNSQYPHTHTFTALRFPELNGGHSYCRNPGNQKEAPWCFTLDENFKSDLCDIPACDSKDSKEKNKMEILYILVPSVAIPLAIALLFFFICVCRNNQKSSSAPVQRQPKHVRGQNVEMSMLNAYKPKSKAKELPLSAVRFMEELGECAFGKIYKGHLYLPGMDHAQLVAIKTLKDYNNPQQWTEFQQEASLMAELHHPNIVCLLGAVTQEQPVCMLFEYINQGDLHEFLIMRSPHSDVGCSSDEDGTVKSSLDHGDFLHIAIQIAAGMEYLSSHFFVHKDLAARNILIGEQLHVKISDLGLSREIYSADYYRVQSKSLLPIRWMPPEAIMYGKFSSDSDIWSFGVVLWEIFSFGLQPYYGFSNQEVIEMVRKRQLLPCSEDCPPRMYSLMTECWNEIPSRRPRFKDIHVRLRSWEGLSSHTSSTTPSGGNATTQTTSLSASPVSNLSNPRYPNYMFPSQGITPQGQIAGFIGPPIPQNQRFIPINGYPIPPGYAAFPAAHYQPTGPPRVIQHCPPPKSRSPSSASGSTSTGHVTSLPSSGSNQEANIPLLPHMSIPNHPGGMGITVFGNKSQKPYKIDSKQASLLGDANIHGHTESMISAEL

SEQ ID NO: 33272 - protein, 1253 aa, Homo sapiens
LLCLVACWLLGAGAEADFSILDEAQVLASQMRRLAAEELGVVTMQRIFNSFVYTEKISNGESEVQQLAKKIREKFNRYLDVVNRNKQVVEASYTAHLTSPLTAIQDCCTIPPSMMEFDGNFNTNVSRTISCDRLSTTVNSRAFNPGRDLNSVLADNLKSNPGIKWQYFSSEEGIFTVFPAHKFRCKGSYEHRSRPIYVSTVRPQSKHIVVILDHGASVTDTQLQIAKDAAQVILSAIDEHDKISVLTVADTVRTCSLDQCYKTFLSPATSETKRKMSTFVSSVKSSDSPTQHAVGFQKAFQLIRSTNNNTKFQANTDMVIIYLSAGITSKDSSEEDKKATLQVINEENSFLNNSVMILTYALMNDGVTGLKELAFLRDLAEQNSGKYGVPDRMALPVIKGSMMVLNQLSNLETTVGRFYTNLPNRMIDEAVFSLPFSDEMGDGLIMTVSKPCYFGNLLLGIVGVDVNLAYILEDVTYYQDSLASYTFLIDDKGYTLMHPSLTRPYLLSEPPLHTDIIHYENIPKFELVRQNILSLPLGSQIIAVPVNSSLSWHINKLRETGKEAYNVSYAWKMVQDTSFILCIVVIQPEIPVKQLKNLNTVPSSKLLYHRLDLLGQPSACLHFKQLATLESPTIMLSAGSFSSPYEHLSQPETKRMVEHYTAYLSDNTRLIANPGLKFSVRNEVMATSHVTDEWMTQMEMSSLNTYIVRRYIATPNGVLRIYPGSLMDKAFDPTRRQWYLHAVANPGLISLTGPYLDVGGAGYVVTISHTIHSSSTQLSSGHTVAVMGIDFTLRYFYKVLMDLLPVCNQDGGNKIRCFIMEDRGYLVAHPTLIDPKGHAPVEQQHITHKEPLVANDILNHPNFVKKNLCNSFSDRTVQRFYKFNTSLAGDLTNLVHGSHCSKYRLARIPGTNAFVGIVNETCDSLAFCACSMVDRLCLNCHRMEQNECECPCECPLEVNECTGNLTNAENRNPSCEVHQEPVTYTAIDPGLQDALHQCVNSRCSQRLESGDCFGVLDCEWCMVDSDGKTHLDKPYCAPQKECFGGIVGAKSPYVDDMGAIGDEVITLNMIKSAPVGPVAGGIMGCIMVLVLAVYAYRHQIHRRSHQHMSPLAAQEMSVRMSNLENDRDERDDDSHEDRGIISNTRFIAAVIERHAHSPERRRRYWGRSGTESDHGYSTMSPQEDSENPPCNNDPLSAGVDVGNHDEDLDLDTPPQTAALLSHKFHHYRSHHPTLHHSHHLQAAVTVHTVDAEC

SEQ ID NO: 33273 - protein, 343 aa, Homo sapiens
VPPPFPIVRLMTCSVTHIVSFSLPFLNPSHPASTPGHTENEQPSLVWFDRGKFYLTFEGSSRGPSPLTMGAQDTLPVAAAFTETVNAYFKGADPSKCIVKITGEMVLSFPAGITRHFANNPSPAALTFRVINFSRLEHVLPNPQLLCCDNTQNDANTKEFWVNMPNLMTHLKKVSEQKPQATYYNVDMLKYQVSAQGIQSTPLNLAVNWRCEPSSTDLRIDYKYNTDAMTTAVALNNVQFLVPIDGGVTKLQAVLPPAVWNAEQQRILWKIPDISQKSENGGVGSLLARFQLSEGPSKPSPLVVQFTSEGSTLSGCDIELVGAGYRFSLIKKRFAAGKYLADN

SEQ ID NO: 33274 - protein, 387 aa, Homo sapiens
LPPLSKKSLLPPTMILRPYQPCGTVKEFDTNFTYVQQSEFYLEPNIKYVFQVRCQETGKRYWQPWSSLFFHKTPETVPQVTSKAFQHDTWNSGLTVASISTGHLTSDNRGDIGLLLGMIVFAVMLSILSLIGIFNRSFRTGIKRRILLLIPKWLYEDIPNMKNSNVVKMLQENSELMNNNSSEQVLYVDPMITEIKEIFIPEHKPTDYKKENTGPLETRDYPQNSLFDNTTVVYIPDLNTGYKPQISNFLPEGSHLSNNNEITSLTLKPPVDSLDSGNNPRLQKHPNFAFSVSSVNSLSNTIFLGELSLILNQGECSSPDIQNSVEEETTMLLENDSPSETIPEQTLLPDEFVSCLGIVNEELPSINTYFPQNILESHFNRISLLEK

SEQ ID NO: 33275 - protein, 412 aa, Homo sapiens
MLGIIPLPFGKPQPQSRRRPLRPPSASSASRPARGSLRRAMATSPQKSPSVPKSPTPKSPPSRKKDDSFLGKLGGTLARRKKAKEVSELQEEGMNAINLPLSPIPFELDPEDTMLEENEVRTMVDPNSRSDPKLQELMKVLIDWINDVLVGERIIVKDLAEDLYDGQVLQKLFEKLESEKLNVAEVTQSEIAQKQKLQTVLEKINETLKLPPRSIKWNVDSVHAKSLVAILHLLVALSQYFRAPIRLPDHVSIQVVVVQKREGILQSRQIQEEITGNTEALSGRHERDAFDTLFDHAPDKLNVVKKTLITFVNKHLNKLNLEVTELETQFADGVYLVLLMGLLEGYFVPLHSFFLTPDSFEQKVLNVSFAFELMQDGGLEKPKPRPEDIVNCDLKSTLRVLYNLFTKYRNVE

SEQ ID NO: 33276 - protein, 74 aa, Homo sapiens
LKMSSKTASTNNIAQARRTVQQLRLEASIERIKVSKASADLMSYCEEHARSDPLLIGIPTSENPFKDKKTCIIL

SEQ ID NO: 33277 - protein, 832 aa, Homo sapiens
LLPLNLKTKKKMTKMLGKLRIAPSFPQPLDSKPLLSQREAVPPGNIPQRPDRLPMSDTFTDNWTDGSHYDNTGFVAEETTAENANSNPLLSSKSRSTSSHGRRPLIRQDRIVGVPLELEQSTHRHTPETEVPPSNPWQNWTRTPSPFEDRTAFPSKLETTPTTSPLPERKEHIKESTEIPSPFSPGVPWEYHDSNPNRSLSNVFSQIHCRPESSKGVISISKSTERLSPLMKDIKSNKFKKSQSIDEIDIGTYKVYNIPLENYASGSDHLGSHERPDKMLGPEHGMSSMSRSQSVPMLDDEMLTYGSSKGPQQQKASMTKKVYQFDQSFNPQGSVEVKAEKRIPPPFQHNPEYVQQASKNIAKDLISPRAYRGYPPMEQMFSFSQPSVNEDAVVNAQFASQGARAGFLRRADSLVSATEMAMFRRVNEPHELPPTDRYGRPPYRGGLDRQSSVTVTESQFLKRNGRYEDEHPSYQEVKAQAGSFPVKNLTQRRPLSARSYSTESYGASQTRPVSARPTMAALLEKIPSDYNLGNYGDKPSDNSDLKTRPTPVKGEESCGKMPADWRQQLLRHIEARRLDRNAAYKHNTVNLGMLPYGGISAMHAGRSMTLNLQTKSKFDHQELPLQKTPSQQSNILDNGQEDVSPSGQWNPYPLGRRDVPPDTITKKAGSHIQTLMGSQSLQHRSREQQPYEGNINKVTIQQFQSPLPIQIPSSQATRGPQPGRCLIQTKGQRSMDGYPEQFCVRIEKNPGLGFSISGGISGQGNPFKPSDKGIFVTRVQPDGPASNLLQPGDKILQANGHSFVHMEHEKAVLLLKSFQNTVDLVIQRELTV

SEQ ID NO: 33278 - protein, 38 aa, Homo sapiens
LLDIKLNRILLNTVLWHLKNKTFLSWATCQKKKETKIY

SEQ ID NO: 33279 - protein, 8 aa, Homo sapiens
LFVVCLMC

SEQ ID NO: 33280 - protein, 8 aa, Homo sapiens
MAVPCFSV

SEQ ID NO: 33281 - protein, 11 aa, Homo sapiens
MLFFILGYKWF

SEQ ID NO: 33282 - protein, 542 aa, Homo sapiens
LALFPRCGQPRRPTERARGGNAENQTRTIRDCPERGCDPSPGRSDGARKGHGACVGYPAPGTAATPPSAAPRPSAAQPPLPAPPHPAHGLQWAGPEESRVRGVCQGRDPCIIVRVAGTGANMAAGFGRCCRVLRSISRFHWRSQHTKANRQREPGLGFSFEFTEQQKEFQATARKFAREEIIPVAAEYDKTGEYPVPLIRRAWELGLMNTHIPENCGGLGLGTFDACLISEELAYGCTGVQTAIEGNSLGQMPIIIAGNDQQKKKYLGRMTEEPLMCAYCVTEPGAGSDVAGIKTKAEKKGDEYIINGQKMWITNGGKANWYFLLARSDPDPKAPANKAFTGFIVEADTPGIQIGRKELNMGQRCSDTRGIVFEDVKVPKENVLIGDGAGFKVAMGAFDKTRPVVAAGAVGLAQRALDEATKYALERKTFGKLLVEHQAISFMLAEMAMKVELARMSYQRAAWEVDSGRRNTYYASIAKAFAGDIANQLATDAVQILGGNGFNTEYPVEKLMRDAKIYQIYEGTSQIQRLIVAREHIDKYKN

SEQ ID NO: 33283 - protein, 249 aa, Homo sapiens [sequence omitted]

SEQ ID NO: 33284 - protein, 14 aa, Homo sapiens
LTFLFLTAFSVWRL

SEQ ID NO: 33285 - protein, 56 aa, Homo sapiens
LKDIYWMLMIMKQSSKDKKPFAHSAPLPAIFHKAPDSLTVSSLVEECLEDHKQDRE

SEQ ID NO: 33286 - protein, 57 aa, Homo sapiens
LGMKSTVTSQRLPGGWRGEYGPVHQKAPGTLSSTSINAEGTPEDVFLQLCTAIDSIF

SEQ ID NO: 33287 - protein, 21 aa, Homo sapiens
VYQAFKKHCRILSILMLIELS

SEQ ID NO: 33288 - protein, 306 aa, Homo sapiens
MSEVTRSLLQRWGASFRRGADFDSWGQLVEAIDEYQILARHLQKEAQAQHNNSEFTEEQKKTIGKIATCLELRSAALQSTQSQEEFKLEDLKKLEPILKNILTYNKEFPFDVQPVPLRRILAPGEEENLEFEEDEEEGGAGAGSPDSFPARVPGTLLPRLPSEPGMTLLTIRIAKIGLKDAGQCIDPYITVSVKDLNGIDLTPVQDTPVASRKEDTYVHFNVDIELQKHVEKLTKGAAIFFEFKPYKPKKRFTSTKCFAFMEMDEIKPGPIVIELYKKPTDFKRKKLQLLTKKPLYLHLHQTLHKE

SEQ ID NO: 33289 - protein, 45 aa, Homo sapiens [sequence omitted]

SEQ ID NO: 33290 - protein, 92 aa, Homo sapiens
VILKREKYMISLGRKALCGCSINVPTLDGRNIPMSVNDIVKPGMRRRIIGYGLPFPKNPDQRGDLLIEFEVSFPDTISSSSKEVLRKHLPAS

SEQ ID NO: 33291 - protein, 349 aa, Homo sapiens
LLLPARGPGRKVRGAGGRRRRTAAQVGPRSRPCKMPLKLRGKKKAKSKETAGLVEGEPTGAGGGSLSASRAPARRLVFHAQLAHGSATGRVEGFSSIQELYAQIAGAFEISPSEILYCTLNTPKIDMERLLGGQLGLEDFIFAHVKGIEKEVNVYKSEDSLGLTITDNGVGYAFIKRIKDGGVIDSVKTICVGDHIESINGENIVGWRHYDVAKKLKELKKEELFTMKLIEPKKAFEIELRSKAGKSSGEKIGCGRATLRLRSKGPATVEEMPSETKAKAIEKIDDVLELYMGIRDIDLATTMFEAGKDKVNPDEFAVALDETLGDFAFPDEFVFDVWGVIGDAKRRGL

SEQ ID NO: 33292 - protein, 366 aa, Homo sapiens
LAFISTTMSMNNSKQLVSPAAALLSNTTCQTENRLSVFFSVIFMTVGILSNSLAIAILMKAYQRFRQKSKASFLLLASGLVITDFFGHLINGAIAVFVYASDKEWIRFDQSNVLCSIFGICMVFSGLCPLLLGSVMAIERCIGVTKPIFHSTKITSKHVKMMLSGVCLFAVFIALLPILGHRDYKIQASRTWCFYNTEDIKDWEDRFYLLLFSFLGLLALGVSLLCNAITGITLLRVKFKSQQHRQGRSHHLEMVIQLLAIMCVSCICWSPFLVTMANIGINGNHSLETCETTLFALRMATWNQILDPWVYILLRKAVLKNLYKLASQCCGVHVISLHIWELSSIKNSLKVAAISESPVAEKSAST

SEQ ID NO: 33293 - protein, 218 aa, Homo sapiens [sequence omitted]

SEQ ID NO: 33294 - protein, 83 aa, Homo sapiens
MMPFVNTFSGLEEVQRKLGFALSDISVVSNYSSEWELDPVKDVLILSALRRMLWAADDFLEDLPFEQIGNLREEIINCAQGKK

SEQ ID NO: 33295 - protein, 695 aa, Homo sapiens
LRPPPMKRLPLLVVFSTLLNCSYTQNCTKTPCLPNAKCEIRNGIEACYCNMGFSGNGVTICEDDNECGNLTQSCGENANCTNTEGSYYCMCVPGFRSSSNQDRFITNDGTVCIENVNANCHLDNVCIAANINKTLTKIRSIKEPVALLQEVYRNSVTDLSPTDIITYIEILAESSSLLGYKNNTISAKDTLSNSTLTEFVKTVNNFVQRDTFVVWDKLSVNHRRTHLTKLMHTVEQATLRISQSFQKTTEFDTNSTDIALKVFFFDSYNMKHIHPHMNMDGDYINIFPKRKAAYDSNGNVAVAFVYYKSIGPLLSSSDNFLLKPQNYDNSEEEERVISSVISVSMSSNPPTLYELEKITFTLSHRKVTDRYRSLCAFWNYSPDTMNGSWSSEGCELTYSNETHTSCRCNHLTHFAILMSSGPSIGIKDYNILTRITQLGIIISLICLAICIFTFWFFSEIQSTRTTIHKNLCCSLFLAELVFLVGINTNTNKLFCSIIAGLLHYFFLAAFAWMCIEGIHLYLIVVGVIYNKGFLHKNFYIFGYLSPAVVVGFSAALGYRYYGTTKVCWLSTENNFIWSFIGPACLIILVNLLAFGVIIYKVFRHTAGLKPEVSCFENIRSCARGALALLFLLGTTWIFGVLHVVHASVVTAYLFTVSNAFQGMFIFLFLCVLSRKIQEEYYRLFKNVPCCFGCLR

SEQ ID NO: 33296 - protein, 383 aa, Homo sapiens
MVSSGCRMRSLWFIIVISFLPNTEGFSRAALPFGLVRRELSCEGYSIDLRCPGSDVIMIESANYGRTDDKICDADPFQMENTDCYLPDAFKIMTQRCNNRTQCIVVTGSDVFPDPCPGTYKYLEVQYECVPYRHSLNNARDTSAMDTLPLNGNFNNSYSLHKGDYNDSVQVVDCGLSLNDTAFEKMIISELVHNNLRGSSKTHNLELTLPVKPVIGGSSSEDDAIVADASSLMHSDNPGLELHHKELEAPLIPQRTHSLLYQPQKKVKSEGTDSYVSQLTAEAEDHLQSPNRDSLYTSMPNLRDSPYPESSPDMEEDLSPSRRSENEDIYYKSMPNLGAGHQLQMCYQISRGNSDGYIIPINKEGCIPEGDVREGQMQLVTSL

SEQ ID NO: 33297 - protein, 174 aa, Homo sapiens
LSLLVLAFPIPGGPRPSDPRRPALDYNSRRAARVRPAAPGLCAWRPPSSARGKPPGAAMRGVAEVKEPCSLPMLSVDMENKENGSVGVKNSMENGRPPDPADWAVMDVVNYFRTVGFEEQASAFQEQEIDGKSLLLMTRNDVLTGLQLKLGPALKIYEYHVKPLQTKHLKNNSS

SEQ ID NO: 33298 - protein, 21 aa, Homo sapiens
MNFYFTRVIVLYTLAAAYNKT

SEQ ID NO: 33299 - protein, 108 aa, Homo sapiens [sequence omitted]

SEQ ID NO: 33300 - protein, 878 aa, Homo sapiens
LRFCISSKKMLLLLLLLLVPLSQVRTMAPKQKKKTSRGKKRLKPVLAASEDMEPVNMESMGHPEIYPLVLTTKTQEIFNCRIDEDVTDEQPYKLINKEDIFEDLRNRAAVSDFHPVKKIVQEYPGNELLLVYDKDFKYGLNFYLIATEEGKENYLNPPEVPEEQEEYKEHIPEDVYIYKPPVSKPWVSLGSEKEIEEESVTESTKQITYMISRKRSEFGAPIKFSDQNASSVKDAYIECTAYPDKNFTLKQLEKDVGMQVIPQIKDISTQTKCVEIALQQNEIMNTFIDDWKYLAEEEGTFGDKTDTHLKEYQSFTDLHSPTEKMITCVSWHPTIYGLIAVSVAVRLSFEDRVHFSGKLLLQPSLILFWSFSDPIHPQLMLESPDDIFCFKFCPSDPNIIAGGCINGQIVMWDITAHADRIENIKAGGSRSKRATLKPMFLLEPESNKEAMYIRHCAVSSIENGHKKVITDIHWLSDTFEINRMGSVFENRSGICCQLVTCSADCTICFWDIRPQKPLTPQTTEKKKEESIEIPFDVPSTFLHLDLSWKPLTKVRLSKGETSLDHCPTKISLNEDHLLCKTQDKMLAQSKTEKAEEMNPYHNLESGMANLLKPIDDFCTKFFVGTEEGEVIYTDWKMEKDPETGRLMSKKPVSHHTIHDGTVHTIQRSPFYNDIILTVGGWNVAIWKEGVMTGPLLQSCCAPKRYTSGHWSLTRPGVFYIGREDGYIDIWDLLEKTHEPAQSQNICITMITYIKPWIFSSKQQFIATADYYGTLHILEIPWTLSRPSTNEMASVNHYFEREVKHLEYVEQRKKIREQEKKEMELEMAKKKVKTYQKSKEQMQAELKMDYESYLELEKTVLINLGLIKVTEKGSYMEVM

SEQ ID NO: 33301 - protein, 16 aa, Homo sapiens
VCVTILFLMLFEQVGH

SEQ ID NO: 33302 - protein, 15 aa, Homo sapiens
MLQNTKQELFSRKTF

SEQ ID NO: 33303 - protein, 23 aa, Homo sapiens
MCKCLWFHLYGKGALVTLAKTFQ

SEQ ID NO: 33304 - protein, 445 aa, Homo sapiens
LKDRVAAEAKDRELMEFAAENEGKSGGGLHSVAEGVRLSPEPGREGVRDLAGAEEFGGGEEGTGLTGIKEIGDGEEGSGQRPEEIPMDLTVVKQETDSSLVVKEAKVGEPEVKEEKVKEEVMDWSEVKEEKDNLEIKQEEKFVGQCIKEELMHGECVKEEKDFLKKEIVDDTKVKEEPPINHPVGCKRKLAMSRCETCGTEEAKYRCPRCMRYSCSLPCVKKHKAELTCNGVRDKTAYISIQQFTEMNLLSDYRFLEDVARTADHISRDAFLKRPISNKYMYFMKNRARRQGINLKLLPNGFTKRKENSTFFDKKKQQFCWHVKLQFPQSQAEYIEKRVPDDKTINEILKPYIDPEKSDPVIRQRLKAYIRSQTGVQILMKIEYMQQNLVRYYELDPYKSLLDNLRNKVIIEYPTLHVVLKGSNNDMKVLHQVKSESTKNVGNEN

SEQ ID NO: 33305 - protein, 513 aa, Homo sapiens
MLLENLTDNESENTNLKKKVFEKEAHIQELSCLFQSEKANTLKANRFSQSVKVVHERLQIQIHKREAENDKLKEYVKSLETKIAKWNLQSRMNKNEAIVMKEASRQKTVALKKASKVYKQRLDHFTGAIEKLTSQIRDQEAKLSETISASNAWKSHYEKIVIEKTELEVQIETMKKQIINLLEDLKKMEDHGKNSCEEILRKVHSIEYENETLNLENTKLKTTLAALKDEVVSVENELSELQEVEKKQKTLIEMYKTQVQKLQEAAEIVKSRCENLLHKNNQITKTKNKNVEKMRGQMESHLKELERVCDSLTAAERRLHECQESLQCCKGKCADQEHTIRELQGQVDGNHNLLTKLSLEEENCLIQLKCENLQQKLEQMDAENKELEKKLANQEECLKHSNLKFKEKSAEYTALARQLEAALEEGRQKVAEEIEKMSSRESALQIKILDLETELRKKNEEQNQLVCKMNSKAQHQEVCLKEVQNSLEKSENQNESIKNYLQFLKTSYVTMFE

SEQ ID NO: 33306 - protein, 13 aa, Homo sapiens
LYLMTFKLSYAVI

SEQ ID NO: 33307 - protein, 210 aa, Homo sapiens
LLLRELPPSLQLRQPRRPFPGSRAASLAFHRRRLSQYCNIGEKQTMVNPGSSSQPPPVTAGSLSWKRCAGCGGKIADRFLLYAMDSYWHSRCLKCSCCQAQLGDIGTSCYTKSGMILCRNDYIRLFGNSGACSACGQSIPASELVMRAQGNVYHLKCFTCSTCRNRLVPGDRFHYINGSLFCEHDRPTALINGHLNSLQSNPLLPDQKVC

SEQ ID NO: 33308 - protein, 650 aa, Homo sapiens
LRLHESLVVFFFFFLSPLLTPTPSPVPPSPFARGGRVQVRSPYRSAMASNPERGEILLTELQGDSRSLPFSENVSAVQKLDFSDTMVQQKLDDIKDRIKREIRKELKIKEGAENLRKVTTDKKSLAYVDNILKKSNKKLEELHHKLQELNAHIVVSDPEDITDCPRTPDTPNNDPRCSTSNNRLKALQKQLDIELKVKQGAENMIQMYSNGSSKDRKLHGTAQQLLQDSKTKIEVIRMQILQAVQTNELAFDNAKPVISPLELRMEELRHHFRIEFAVAEGAKNVMKLLGSGKVTDRKALSEAQARFNESSQKLDLLKYSLEQRLNEVPKNHPKSRIIIEELSLVAASPTLSPRQSMISTQNQYSTLSKPAALTGTLEVRLMGCQDILENVPGRSKATSVALPGWSPSETRSSFMSRTSKSKSGSSRNLLKTDDLSNDVCAVLKLDNTVVGQTSWKPISNQSWDQKFTLELDRSRELEISVYWRDWRSLCAVKFLRLEDFLDNQRHGMCLYLEPQGTLFAEVTFFNPVIERRPKLQRQKKIFSKQQGKTFLRAPQMNINIATWGRLVRRAIPTVNHSGTFSPQAPVPTTVPVVDVRIPQLAPPARYVSEILSISYTKLLGHSYVLIIAGVLSLAFFPSSILKVVFCLLKK

SEQ ID NO: 33309 - protein, 1030 aa, Homo sapiens
LRLHESLVVFFFFFLSPLLTPTPSPVPPSPFARGGRVQVRSPYRSAMASNPERGEILLTELQGDSRSLPFSENVSAVQKLDFSDTMVQQKLDDIKDRIKREIRKELKIKEGAENLRKVTTDKKSLAYVDNILKKSNKKLEELHHKLQELNAHIVVSDPEDITDCPRTPDTPNNDPRCSTSNNRLKALQKQLDIELKVKQGAENMIQMYSNGSSKDRKLHGTAQQLLQDSKTKIEVIRMQILQAVQTNELAFDNAKPVISPLELRMEELRHHFRIEFAVAEGAKNVMKLLGSGKVTDRKALSEAQARFNESSQKLDLLKYSLEQRLNEVPKNHPKSRIIIEELSLVAASPTLSPRQSMISTQNQYSTLSKPAALTGTLEVRLMGCQDILENVPGRSKATSVALPGWSPSETRSSFMSRTSKSKSGSSRNLLKTDDLSNDVCAVLKLDNTVVGQTSWKPISNQSWDQKFTLELDRSRELEISVYWRDWRSLCAVKFLRLEDFLDNQRHGMCLYLEPQGTLFAEVTFFNPVIERRPKLQRQKKIFSKQQGKTFLRAPQMNINIATWGRLVRRAIPTVNHSGTFSPQAPVPTTVPVVDVRIPQLAPPASDSTVTKLDFDLEPEPPPAPPRASSLGEIDESSELRVLDIPGQDSETVFDIQNDRNSILPKSQSEYKPDTPQSGLEYSGIQELEDRRSQQRFQFNLQDFRCCAVLGRGHFGKVLLAEYKNTNEMFAIKALKKGDIVARDEVDSLMCEKRIFETVNSVRHPFLVNLFACFQTKEHVCFVMEYAAGGDLMMHIHTDVFSEPRAVFYAACVVLGLQYLHEHKIVYRDLKLDNLLLDTEGFVKIADFGLCKEGMGYGDRTSTFCGTPEFLAPEVLTETSYTRAVDWWGLGVLIYEMLVGESPFPGDDEEEVFDSIVNDEVRYPRFLSTEAISIMRRLLRRNPERRLGASEKDAEDVKKHPFFRLIDWSALMDKKVKPPFIPTIRGREDVSNFDDEFTSEAPILTPPREPRILSEEEQEMFRDFDYIADWC

SEQ ID NO: 33310 - protein, 597 aa, Homo sapiens
LDMAPEIHMTGPMCLIENTNGELVANPEALKILSAITQPVVVVAIVGLYRTGKSYLMNKLAGKNKGFSLGSTVKSHTKGIWMWCVPHPKKPEHTLVLLDTEGLGDVKKGDNQNDSWIFTLAVLLSSTLVYNSMGTINQQAMDQLYYVTELTHRIRSKSSPDENENEDSADFVSFFPDFVWTLRDFSLDLEADGQPLTPDEYLEYSLKLTQGTSQKDKNFNLPRLCIRKFFPKKKCFVFDLPIHRRKLAQLEKLQDEELDPEFVQQVADFCSYIFSNSKTKTLSGGIKVNGPRLESLVLTYINAISRGDLPCMENAVLALAQIENSAAVQKAIAHYDQQMGQKVQLPAETLQELLDLHRVSEREATEVYMKNSFKDVDHLFQKKLAAQLDKKRDDFCKQNQEASSDRCSALLQVIFSPLEEEVKAGIYSKPGGYCLFIQKLQDLEKKYYEEPRKGIQAEEILQTYLKSKESVTDAILQTDQILTEKEKEIEVECVKAESAQASAKMVEEMQIKYQQMMEEKEKSYQEHVKQLTEKMERERAQLLEEQEKTLTSKLQEQARVLKERCQGESTQLQNEIQKLQKTLKKKTKRYMSHKLKI

SEQ ID NO: 33311 - protein, 160 aa, Homo sapiens [sequence omitted]

SEQ ID NO: 33312 - protein, 28 aa, Homo sapiens
MSVNPAGLSASKNSPFLEDPGAGGQSNG

SEQ ID NO: 33313 - protein, 651 aa, Homo sapiens
LFLDLRCYRAGSSRLAVAMESGPKMLAPVCLVENNNEQLLVNQQAIQILEKISQPVVVVAIVGLYRTGKSYLMNHLAGQNHGFPLGSTVQSETKGIWMWCVPHPSKPNHTLVLLDTEGLGDVEKGDPKNDSWIFALAVLLCSTFVYNSMSTINHQALEQLHYVTELTELIKAKSSPRPDGVEDSTEFVSFFPDFLWTVRDFTLELKLNGHPITEDEYLENALKLIQGNNPRVQTSNFPRECIRRFFPKRKCFVFDRPTNDKDLLANIEKVSEKQLDPKFQEQTNIFCSYIFTHARTKTLREGITVTGNRLGTLAVTYVEAINSGAVPCLENAVITLAQRENSAAVQRAADYYSQQMAQRVKLPTDTLQELLDMHAACEREAIAIFMEHSFKDENQEFQKKFMETTMNKKGDFLLQNEESSVQYCQAKLNELSKGLMESISAGSFSVPGGHKLYMETKERIEQDYWQVPRKGVKAKEVFQRFLESQMVIEESILQSDKALTDREKAVAVDRAKKEAAEKEQELLKQKLQEQQQQMEAQDKSRKENIAQLKEKLQMEREHLLREQIMMLEHTQKVQNDWLHEGFKKKYEEMNAEISQFKRMIDTTKNDDTPWIARTLDNLADELTAILSAPAKLIGHGVKGVSSLFKKHKLPF

SEQ ID NO: 33314 - protein, 194 aa, Homo sapiens
LVLTYVNAISSGDLPCMENAVLALAQIENSAAVQKAIAHYEKQMGQKVQLPTETLQELLDLHRDSESKATEVFIRSSFKDVDHLFQKELAAQLDKKRDDFCKQNQEASSDRCSALLQVIFSPLEEEVKAGIYSKPGGYRLFIQKLQDLEKKYYEEPRKGIQGPKAEEILQTYLKSKESMTDAILQTDQTLTWNV

SEQ ID NO: 33315 - protein, 88 aa, Homo sapiens
MLQQMQRKNEQMMEQKERSYQEHLKQLTEKMESDRVQLLEEQERTLALKLQEQERLLKERFENVSRRIQNEIQNLQRTMIQPRTCTIN

SEQ ID NO: 33316 - protein, 131 aa, Homo sapiens
MDKKRFSFVFKPVFNTSLLFLQCELTLCTKMEKHPQKLPKCVPPDEACTSLDASIIWAMMQNKKTFTKPLAVIHHEAESKEKGPSMKEPNPISPPIFHGLDTLTVMGIAFAAFVIGALLTGALWYIYSHTG

SEQ ID NO: 33317 - protein, 105 aa, Homo sapiens
MAMGLSRTSSLHLSTGAAKAVGKVIPKSNRKLNGVAFHVPTANMLVMNLTCSLEKPAKYDDIKVVKQHQRGPSRASGATMSTRLSPPTLTVTPTLPPSVLGLALP

SEQ ID NO: 33318 - protein, 813 aa, Homo sapiens
LLIMVTNKMTAAFRNPSGKQVATDKVAEKLSSTLSWVKNTVSHTVSQMASQVASPSTSLHTTSSSTTLSTPALSPSSPSQLSPDDLELLAKLEEQNRLLETDSKSLRSVNGSRRNSGSSLVSSSSASSNLSHLEEDSWILWGRIVNEWEDVRKKKEKQVKELVHKGIPHHFRAIVWQLLCSAQSMPIKDQYSELLKMTSPCEKLIRRDIARTYPEHNFFKEKDSLGQEVLFNVMKAYSLVDREVGYCQGSAFIVGLLLMQMPEEEAFCVFVKLMQDYRLRELFKPSMAELGLCMYQFECMIQEHLPELFVHFQSQSFHTSMYASSWFLTIFLTTFPLPIATRIFDIFMSEGLEIVFRVGLALLQMNQAELMQLDMEGMLQHFQKVIPHQFDGVPDKLIQAAYQVKYNSKKMKKLEKEYTTIKTKEMEEQVEIKRLRTENRLLKQRIETLEKHKCSSNYNEDFVLQLEKELVQARLSEAESQCALKEMQDKVLDIEKRNNSLPDENNIARLQEELIAVKLREAEAIMGLKELRQQVKDLEEHWQRHLARTTGRWKDPPKKNAMNELQDELMTIRLREAETQAEIREIKQRMMEMETQNQINSNHLRRAEQEVISLQEKVQYLSAQNKGLLTQLSEAKRKQAEIECKNKEEVMAVRLREADSIAAVAELRQHIAELEIQKEEGKLQGQLNKSDSNQYIGELKDQIAELNHELRCLKGQRGFSGQPPFDGIHIVNHLIGDDESFHSSDEDFIDNSLQETGVGFPLHGKSGSMSLDPAVADGSESETEDSVLETRESNQVVQKERPPRRRESYSTTV

SEQ ID NO: 33319 - protein, 824 aa, Homo sapiens
LLIMVTNKMTAAFRNPSGKQVATDKVAEKLSSTLSWVKNTVSHTVSQMASQVASPSTSLHTTSSSTTLSTPALSPSSPSQLSPDDLELLAKLEEQNRLLETDSKSLRSVNGSRRNSGSSLVSSSSASSNLSHLEEDSWILWGRIVNEWEDVRKKKEKQVKELVHKGIPHHFRAIVWQLLCSAQSMPIKDQYSELLKMTSPCEKLIRRDIARTYPEHNFFKEKDSLGQEVLFNVMKAYSLVDREVGYCQGSAFIVGLLLMQMPEEEAFCVFVKLMQDYRLRELFKPSMAELGLCMYQFECMIQEHLPELFVHFQSQSFHTSMYASSWFLTIFLTTFPLPIATRIFDIFMSEGLEIVFRVGLALLQMNQAELMQLDMEGMLQHFQKVIPHQFDGVPDKLIQAAYQVKYNSKKMKKLEKEYTTIKTKEMEEQVEIKRLRTENRLLKQRIETLEKESASLADRLIQHKCSSNYNEDFVLQLEKELVQARLSEAESQCALKEMQDKVLDIEKRNNSLPDENNIARLQEELIAVKLREAEAIMGLKELRQQVKDLEEHWQRHLARTTGRWKDPPKKNAMNELQDELMTIRLREAETQAEIREIKQRMMEMETQNQINSNHLRRAEQEVISLQEKVQYLSAQNKGLLTQLSEAKRKQAEIECKNKEEVMAVRLREADSIAAVAELRQHIAELEIQKEEGKLQGQLNKSDSNQYIGELKDQIAELNHELRCLKGQRGFSGQPPFDGIHIVNHLIGDDESFHSSDEDFIDNSLQETGVGFPLHGKSGSMSLDPAVADGSESETEDSVLETRESNQVVQKERPPRRRESYSTTV

SEQ ID NO: 33320 - protein, 55 aa, Homo sapiens [sequence omitted]

SEQ ID NO: 33321 - protein, 22 aa, Homo sapiens
VSVVLLGTRDGRPVEPGAGPRR

SEQ ID NO: 33322 - protein, 79 aa, Homo sapiens
MLILLVSNSWPQVICPPQPPKCWDYRRALRDFISVLLMKSTFIQGLLWKTSPKVAEQKTFESQQKSSTLHGSLDVKSSI

SEQ ID NO: 33323 - protein, 70 aa, Homo sapiens
VQWHDLGSLQPLPPEFRRALRDFISVLLMKSTFIQGLLWKTSPKVAEQKTFESQQKSSTLHGSLDVKSSI

SEQ ID NO: 33324 - protein, 92 aa, Homo sapiens
MRFRHVGRAGLEVLTSGDSPTSASRRTGFTGMSHRSRPRRALRDFISVLLMKSTFIQGLLWKTSPKVAEQKTFESQQKSSTLHGSLDVKSSI

SEQ ID NO: 33325 - protein, 61 aa, Homo sapiens
LGRQTTYKRALRDFISVLLMKSTFIQGLLWKTSPKVAEQKTFESQQKSSTLHGSLDVKSSI

SEQ ID NO: 33326 - protein, 74 aa, Homo sapiens
LPSFQAQSYSSSWSCTPWTKLRALRDFISVLLMKSTFIQGLLWKTSPKVAEQKTFESQQKSSTLHGSLDVKSSI

SEQ ID NO: 33327 - protein, 118 aa, Homo sapiens
LVILRSLCISWTALLELSSKSTVGWVGGSADFSLDFHIWDELAVISSRKGVAVLHWLFSSHSSSRRALRDFISVLLMKSTFIQGLLWKTSPKVAEQKTFESQQKSSTLHGSLDVKSSI

SEQ ID NO: 33328 - protein, 98 aa, Homo sapiens
LQPLPPEFRRALRDFISVLLMKSTFIQGLLWKTSPKGEVLLCCPGWSAVVQSQPTAASASQVQAILLPQPPEQLGLQLLNRRLLRVSRNLPLCMVLLM

SEQ ID NO: 33329 - protein, 128 aa, Homo sapiens
MRFRHVGRAGLEVLTSGDSPTSASRRTGFTGMSHRSRPRRALRDFISVLLMKSTFIQGLLWKTSPKGEVLLCCPGWSAVVQSQPTAASASQVQAILLPQPPEQLGLQLLNRRLLRVSRNLPLCMVLLM

SEQ ID NO: 33330 - protein, 56 aa, Homo sapiens
VQWHDLGSLQPLPPEFRRALRDFISVLLMKSTFIQGLLWKTSPKGMRLHTLKNQKA

SEQ ID NO: 33331 - protein, 39 aa, Homo sapiens
LGRQTTYKRALRDFISVLLMKSTFIQGLLWKTSPKGVLY

SEQ ID NO: 33332 - protein, 65 aa, Homo sapiens
LVILRSLCISWTALLELSSKSTVGWVGGSADFSLDFHIWDELAVISSRKGVAVLHWLFSSHSSSR

SEQ ID NO: 33333 - protein, 52 aa, Homo sapiens
LCRCLKRYLLCLITWLLFPTCTMTKMPSTYLIQPFQYNSYTCHLSKPKGTSS

SEQ ID NO: 33334 - protein, 95 aa, Homo sapiens
LVILRSLCISWTALLELSSKSTVGWVGGSADFSLDFHIWDELAVISSRKGVAVLHWLFSSHSSSRYCNKELEKYSQMGSSPCCQGACHLMGETGK

SEQ ID NO: 33335 - protein, 113 aa, Homo sapiens
MVWPRRRQRLLAAATAPAPLRRHEGGSPAAQISGPPRFPLLSLGCALSRILGPPLSSQTHPKSLTHASVPSPQASCSSVHFLHPLRKAPPGITLRGRLFEKSRWSSGPELGSF

SEQ ID NO: 33336 - protein, 343 aa, Homo sapiens
VPSFPAAAQPPSGLPRARAQTRLQPRGAGSLALPLGSLSGLGHRVLWGGRLPARPPAAPSLRGPWAAAAMGTDSRAAKALLARARTLHLQTGNLLNWGRLRKKCPSTHSEELHDCIQKTLNEWSSQINPDLVREFPDVLECTVSHAVEKINPDEREEMKVSAKLFIVESNSSSSTRSAVDMACSVLGVAQLDSVIIASPPIEDGVNLSLEHLQPYWEELENLVQSKKIVAIGTSDLDKTQLEQLYQWAQVKPNSNQVNLASCCVMPPDLTAFAKQFDIQLLTHNDPKELLSEASFQEALQESIPDIQAHEWVPLWLLRYSVIVKSRGIIKSKGYILQAKRRGS

SEQ ID NO: 33337 - protein, 321 aa, Homo sapiens
VPSFPAAAQPPSGLPRARAQTRLQPRGAGSLALPLGSLSGLGHRVLWGGRLPARPPAAPSLRGPWAAAAMGTDSRAAKALLARARTLHLQTGNLLNWGRLRKKCPSTHSEEEFPDVLECTVSHAVEKINPDEREEMKVSAKLFIVESNSSSSTRSAVDMACSVLGVAQLDSVIIASPPIEDGVNLSLEHLQPYWEELENLVQSKKIVAIGTSDLDKTQLEQLYQWAQVKPNSNQVNLASCCVMPPDLTAFAKQFDIQLLTHNDPKELLSEASFQEALQESIPDIQAHEWVPLWLLRYSVIVKSRGIIKSKGYILQAKRRGS

SEQ ID NO: 33338 - protein, 1266 aa, Homo sapiens
LLHERMIAHKQKKTKKKRAWASGQLSTDITTSEMGLKSLSSNSIFDPDYIKELVNDIRKFSHMLLYLKEAIFSDCFKEVIHIRLEELLRVLKSIMNKHQNLNSVDLQNAAEMLTAKVKAVNFTEVNEENKNDLFQEVFSSIETLAFTFGNILTNFLMGDVGNDSLLRLPVSRETKSFENVSVESVDSSSEKGNFSPLELDNVLLKNTDSIELALSYAKTWSKYTKNIVSWVEKKLNLELESTRNMVKLAEATRTNIGIQEFMPLQSLFTNALLNDIESSHLLQQTIAALQANKFVQPLLGRKNEMEKQRKEIKELWKQEQNKMLEAENALKKAKLLCMQRQDEYEKAKSSMFRAEEEHLSSSGGLAKNLNKQLEKKRRLEEEALQKVEEANELYKVCVTNVEERRNDLENTKREILAQLRTLVFQCDLTLKAVTVNLFHMQHLQAASLADSLQSLCDSAKLYDPGQEYSEFVKATNSTEEEKVDGNVNKHLNSSQPSGFGPANSLEDVVRLPDSSNKIEEDRCSNSADITGPSFIRSWTFGMFSDSESTGGSSESRSLDSESISPGDFHRKLPRTPSSGTMSSADDLDEREPPSPSETGPNSLGTFKKTLMSKAALTHKFRKLRSPTKCRDCEGIVVFQGVECEECLLVCHRKCLENLVIICGHQKLPGKIHLFGAEFTQVAKKEPDGIPFILKICASEIENRALCLQGIYRVCGNKIKTEKLCQALENGMHLVDISEFSSHDICDVLKLYLRQLPEPFILFRLYKEFIDLAKEIQHVNEEQETKKNSLEDKKWPNMCIEINRILLKSKDLLRQLPASNFNSLHFLIVHLKRVVDHAEENKMNSKNLGVIFGPSLIRPRPTTAPITISSLAEYSNQARLVEFLITYSQKIFDGSLQPQDVMCSIGVVDQGCFPKPLLSPEERDIERSMKSLFFSSKEDIHTSESESKIFERATSFEESERKQNALGKCDACLSDKAQLLLDQEAESASQKIEDGKTPKPLSLKSDRSTNNVERHTPRTKIRPVSLPVDRLLLASPPNERNGRNMGNVNLDKFCKNPAFEGVNRKDAATTVCSKFNGFDQQTLQKIQDKQYEQNSLTAKTTMIMPSALQEKGVTTSLQISGDHSINATQPSKPYAEPVRSVREASERRSSDSYPLAPVRAPRTLQPQHWTTFYKPHAPIISIRGNEEKPASPSAAVPPGTDHDPHGLVVKSMPDPDKASACPGQATGQPKEDSEELGLPDVNPMCQRPRLKRMQQFEDLEGEIPQFV

SEQ ID NO: 33339 - protein, 24 aa, Homo sapiens
LFPILGLGLMFTDFPSAPTVAPLS

SEQ ID NO: 33340 - protein, 22 aa, Homo sapiens
MENKLLKHLILYRILLIVYMLV

SEQ ID NO: 33341 - protein, 324 aa, Homo sapiens
LAGPGRLQPNLPSPTGATEPARSRRQLVDMETPAWPRVPRPETAVARTLLLGWVFAQVAGASGTTNTVAAYNLTWKSTNFKTILEWEPKPVNQVYTVQISTKSGDWKSKCFYTTDTECDLTDEIVKDVKQTYLARVFSYPAGNVESTGSAGEPLYENSPEFTPYLETNLGQPTIQSFEQVGTKVNVTVEDERTLVRRNNTFLSLRDVFGKDLIYTLYYWKSSSSGKKTAKTNTNEFLIDVDKGENYCFSVQAVIPSRTVNRKSTDSPVECMGQEKGEFREIFYIIGAVVFVVIILVIILAISLHKCRKAGVGQSWKENSPLNVS

SEQ ID NO: 33342 - protein, 10 aa, Homo sapiens
MICPKSHSNL

SEQ ID NO: 33343 - protein, 209 aa, Homo sapiens
LAVATATGAGGAAGQRSRRTQRTRQPGAPGGAEPRPPVVGSAGRAAREANEDKTMFANLKYVSLGILVFQTTSLVLTMRYSRTLKEEGPRYLSSTAVVVAELLKIMACILLVYKDSKCSLRALNRVLHDEILNKPMETLKLAIPSGIYTLQNNLLYVALSNLDAATYQVTYQLKILTTALFSVSMLSKKLGVYQWLSLVILMTGVAFVQ

SEQ ID NO: 33344 - protein, 274 aa, Homo sapiens
LAVATATGAGGAAGQRSRRTQRTRQPGAPGGAEPRPPVVGSAGRAAREANEDKTMFANLKYVSLGILVFQTTSLVLTMRYSRTLKEEGPRYLSSTAVVVAELLKIMACILLVYKDSKCSLRALNRVLHDEILNKPMETLKLAIPSGIYTLQNNLLYVALSNLDAATYQVTYQLKILTTALFSVSMLSKKLGVYQWLSLVILMTGVAFVQWPSDSQLDSKELSAGSQFVGLMAVLTACFSSGFAGVYFEKILKETKQSVWIRNIQLVSFSLEPSL

SEQ ID NO: 33345 - protein, 282 aa, Homo sapiens
LAVATATGAGGAAGQRSRRTQRTRQPGAPGGAEPRPPVVGSAGRAAREANEDKTMFANLKYVSLGILVFQTTSLVLTMRYSRTLKEEGPRYLSSTAVVVAELLKIMACILLVYKDSKCSLRALNRVLHDEILNKPMETLKLAIPSGIYTLQNNLLYVALSNLDAATYQWPSDSQLDSKELSAGSQFVGLMAVLTACFSSGFAGVYFEKILKETKQSVWIRNIQLGFFGSIFGLMGVYIYDGELVSKNGFFQGYNRLTWIVVVLQCLFPWSHPCNNSYFFVWL

SEQ ID NO: 33346 - protein, 323 aa, Homo sapiens
LAVATATGAGGAAGQRSRRTQRTRQPGAPGGAEPRPPVVGSAGRAAREANEDKTMFANLKYVSLGILVFQTTSLVLTMRYSRTLKEEGPRYLSSTAVVVAELLKIMACILLVYKDSKCSLRALNRVLHDEILNKPMETLKLAIPSGIYTLQNNLLYVALSNLDAATYQVTYQLKILTTALFSVSMLSKKLGVYQWLSLVILMTGVAFVQWPSDSQLDSKELSAGSQFVGLMAVLTACFSSGFAGVYFEKILKETKQSVWIRNIQLGFFGSIFGLMGVYIYDGELVSKNGFFQGYNRLTWIVVVLQCLFPWSHPCNNSYFFVWL

SEQ ID NO: 33347 - protein, 425 aa, Homo sapiens
LAVATATGAGGAAGQRSRRTQRTRQPGAPGGAEPRPPVVGSAGRAAREVSPQRTWGGAGTRRLAAAGRPGKLLEEEEEEACEGADVKSVGVKGTANEDKTMFANLKYVSLGILVFQTTSLVLTMRYSRTLKEEGPRYLSSTAVVVAELLKIMACILLVYKDSKCSLRALNRVLHDEILNKPMETLKLAIPSGIYTLQNNLLYVALSNLDAATYQVTYQLKILTTALFSVSMLSKKLGVYQWLSLVILMTGVAFVQWPSDSQLDSKELSAGSQFVGLMAVLTACFSSGFAGVYFEKILKETKQSVWIRNIQLGFFGSIFGLMGVYIYDGELVSKNGFFQGYNRLTWIVVVLQALGGLVIAAVIKYADNILKGFATSLSIILSTLISYFWLQDFVPTSVFFLGAILVITATFLYGYDPKPAGNPTKA

SEQ ID NO: 33348 - protein, 341 aa, Homo sapiens
LAVATATGAGGAAGQRSRRTQRTRQPGAPGGAEPRPPVVGSAGRAAREANEDKTMFANLKYVSLGILVFQTTSLVLTMRYSRTLKEEGPRYLSSTAVVVAELLKIMACILLVYKDSKCSLRALNRVLHDEILNKPMETLKLAIPSGIYTLQNNLLYVALSNLDAATYQWPSDSQLDSKELSAGSQFVGLMAVLTACFSSGFAGVYFEKILKETKQSVWIRNIQLGFFGSIFGLMGVYIYDGELVSKNGFFQGYNRLTWIVVVLQALGGLVIAAVIKYADNILKGFATSLSIILSTLISYFWLQDFVPTRVSLCRQAGVLWRDLGLLQPPTPWFKGFSCLSL

SEQ ID NO: 33349 - protein, 272 aa, Homo sapiens
LAVATATGAGGAAGQRSRRTQRTRQPGAPGGAEPRPPVVGSAGRAAREANEDKTMFANLKYVSLGILVFQTTSLVLTMRYSRTLKEEGPRYLSSTAVVVAELLKIMACILLVYKDSKCSLRALNRVLHDEILNKPMETLKLAIPSGIYTLQNNLLYVALSNLDAATYQVTYQLKILTTALFSVSMLSKKLGVYQWLSLVILMTGVAFVQWPSDSQLDSKELSAGSQFVGLMAVLTACFSSGFAGVYFEKILKETKQSVWIRNIQLASRNRFS

SEQ ID NO: 33350 - protein, 743 aa, Homo sapiens
LAVATATGAGGAAGQRSRRTQRTRQPGAPGGAEPRPPVVGSAGRAAREANEDKTMFANLKYVSLGILVFQTTSLVLTMRYSRTLKEEGPRYLSSTAVVVAELLKIMACILLVYKDSKCSLRALNRVLHDEILNKPMETLKLAIPSGIYTLQNNLLYVALSNLDAATYQVTYQLKILTTALFSVSMLSKKLGVYQWLSLVILMTGVAFVQWPSDSQLDSKELSAGSQFVGLMAVLTACFSSGFAGVYFEKILKETKQSVWIRNIQLGFFGSIFGLMGVYIYDGELVSKNGFFQGYNRLTWIVVVLQPQGIGSPSVYHAVIVIFLEFFAWGLLTAPTLVVLHETFPKHTFLMNGLIQGVKGLLSFLSAPLIGALSDVWGRKSFLLLTVFFTCAPIPLMKISPWWYFAVISVSGVFAVTFSVVFAYVADITQEHERSMAYGLVSATFAASLVTSPAIGAYLGRVYGDSLVVVLATAIALLDICFILVAVPESLPEKMRPASWGAPISWEQADPFASLKKVGQDSIVLLICITVFLSYLPEAGQYSSFFLYLRQTIVLSLLMRSIGNKNTILLGLGFQILQLAWYGFGSEPWMMWAAGAVAAMSSITFPAVSALVSRTADADQQGVVQGMITGIRGLCNGLGPALYGFIFYIFHVELKELPITGTDLGTNTSPQHHFEQNSIIPGPPFLFGACSVLLALLVALFIPEHTNLSLRSSSWRKHCGSHSHPHNTQAPGEAKEPLLQDTNV

SEQ ID NO: 33351 - protein, 11 aa, Homo sapiens
LMAICIQFILM

SEQ ID NO: 33352 - protein, 55 aa, Homo sapiens
LFVQVDGKHRKKNSVFERLQIDIQHLCLNKIPVLREEKLPVVGIGKHLCGMATGT

SEQ ID NO: 33353 - protein, 140 aa, Homo sapiens
MPLQGLWVCHVCHCGGGRCSHECKATQGGWKSCGTKESCLKRRLSETSAHLTVKKIFVAGIKEYTEEHHLRDYFKQYGKTEVIEIMTDQGNGKKKGFAFVSMTVDKTVILKYHTVNGHNCEIREAVSNQEMPSASSSRKG

SEQ ID NO: 33354 - protein, 15 aa, Homo sapiens
LAFPLLALILTLAAL

SEQ ID NO: 33355 - protein, 164 aa, Homo sapiens
MLISVMLHSLWLVIHLDTWRPESFFDKVKKNRQNGMHTLCLLDIKVKEQSLENLIKGRKIYEPPRYMSVNQAAQQLLEIVQNQRIRGEEPAVTEETLCVGLARVGADDQKIAAGTLRQMCTVDLGEPLHSLIITGGSIHPMEMEMLSLFSIPENSSESQSINGL

SEQ ID NO: 33356 - protein, 296 aa, Homo sapiens
LLLVSLLLKFEMLYLIGLGLGDAKDITVKGLEVVRRCSRVYLEAYTSVLTVGKEALEEFYGRKLVVADREEVEQEADNILKDADISDVAFLVVGDPFGATTHSDLVLRATKLGIPYRVIHNASIMNAVGCCGLQLYKFGETVSIVFWTDTWRPESFFDKVKKNRQNGMHTLCLLDIKVKEQSLENLIKGRKIYEPPRYMSVNQAAQQLLEIVQNQRIRGEEPAVTEETLCVGLARVGADDQKIAAGTLRQMCTVDLGEPLHSLIITGGSIHPMEMEMLSLFSIPENSSESQSINGL

SEQ ID NO: 33357 - protein, 57 aa, Homo sapiens
LLLVSLLLKFEMLYLIGLGLGDAKDITVKGLEVVRRCSRVYLEAYTSVLTVGKEALG

SEQ ID NO: 33358 - protein, 84 aa, Homo sapiens
LLGQGGERSVGREESVEPPFHSLRERIGRAHEPSNPWLKHPLPKPGFLCLCLKNMVPCEILHVEESFTLRELSGYNYFRQILGT

SEQ ID NO: 33359 - protein, 23 aa, Homo sapiens
LPAFGLMLSFTWYFLSVATPMKL

SEQ ID NO: 33360 - protein, 436 aa, Homo sapiens
LRFPRPSPAKEKLHKKPGSLIEPPLKPVKALSPRPLAFVWSSATPASWGHRVGTMGPTSVPLVKAHRSSVSDYVNYDIIVRHYNYTGKLNISADKENSIKLTSVVFILICCFIILENIFVLLTIWKTKKFHRPMYYFIGNLALSDLLAGVAYTANLLLSGATTYKLTPAQWFLREGSMFVALSASVFSLLAIAIERYITMLKMKLHNGSNNFRLFLLISACWVISLILGGLPIMGWNCISALSSCSTVLPLYHKHYILFCTTVFTLLLLSIVILYCRIYSLVRTRSRRLTFRKNISKASRSSEKSLALLKTVIIVLSVFIACWAPLFILLLLDVGCKVKTCDILFRAEYFLVLAVLNSGTNPIIYTLTNKEMRRAFIRIMSCCKCPSGDSAGKFKRPIIAGMEFSRSKSDNSSHPQKDEGDNPETIMSSGNVNSSS

SEQ ID NO: 33361 - protein, 235 aa, Homo sapiens
MSPPLLKLGAVLSTMAMISNWMSQTLPSLVGLNTTRLSTPDTLTQISPKEGWQVYSSAQDPDGRCICTVVAPEQNLCSRDAKSRQLRQLLEKVQNMSQSIEVLNLRTQRDFQYVLKMETQMKGLKAKFRQIEDDRKTLMTKHFQELKEKMDELLPLIPVLEQYKTDAKLITQFKEEIRNLSAVLTGIQEEIGAYDYEELHQRVLSLETRLRDCMKKLIDLKKRKEEEKRQQKGEA

SEQ ID NO: 33362 - protein, 215 aa, Homo sapiens
MQATSNLLNLLLLSLFAGLDPSKTQISPKEGWQVYSSAQDPDGRCICTVVAPEQNLCSRDAKSRQLRQLLEKVQNMSQSIEVLNLRTQRDFQYVLKMETQMKGLKAKFRQIEDDRKTLMTKHFQELKEKMDELLPLIPVLEQYKTDAKLITQFKEEIRNLSAVLTGIQEEIGAYDYEELHQRVLSLETRLRDCMKKLIDLKKRKEEEKRQQKGEA

SEQ ID NO: 33363 - protein, 1016 aa, Homo sapiens
VTEEKLVKLAQEGKMALKDPKVEQAQLETQVLQVKQEKRENLEFQDYQDIQEDKVQRISDVIGSTGFPGFPGANGEKGARGVAGKPGPRGQRGPTGPRGSRGARGPTGKPGPKGTSGGDGPPGPPGERGPQGPQGPVGFPGPKGPPGPPGKDGLPGHPGQRGETGFQGKTGPPGPGGVVGPQGPTGETGPIGERGHPGPPGPPGEQGLPGAAGKEGAKGDPGPQGISGKDGPAGLRGFPGERGLPGAQGAPGLKGGEGPQGPPGPVGSPGERGSAGTAGPIGLPGRPGPQGPPGPAGEKGAPGEKGPQGPAGRDGVQGPVGLPGPAGPAGSPGEDGDKGEIGEPGQKGSKGDKGENGPPGPPGLQGPVGAPGIAGGDGEPGPRGQQGMFGQKGDEGARGFPGPPGPIGLQGLPGPPGEKGENGDVGPMGPPGPPGPRGPQGPNGADGPQGPPGSVGSVGGVGEKGEPGEAGNPGPPGEAGVGGPKGERGEKGEAGPPGAAGPPGAKGPPGDDGPKGNPGPVGFPGDPGPPGEPGPAGQDGVGGDKGEDGDPGQPGPPGPSGEAGPPGPPGKRGPPGAAGAEGRQGEKGAKGEAGAEGPPGKTGPVGPQGPAGKPGPEGLRGIPGPVGEQGLPGAAGQDGPPGPMGPPGLPGLKGDPGSKGEKGHPGLIGLIGPPGEQGEKGDRGLPGTQGSPGAKGDGGIPGPAGPLGPPGPPGLPGPQGPKGNKGSTGPAGQKGDSGLPGPPGSPGPPGEVIQPLPILSSKKTRRHTEGMQADADDNILDYSDGMEEIFGSLNSLKQDIEHMKFPMGTQTNPARTCKDLQLSHPDFPDGEYWIDPNQGCSGDSFKVYCNFTSGGETCIYPDKKSEGVRISSWPKEKPGSWFSEFKRGKLLSYLDVEGNSINMVQMTFLKLLTASARQNFTYHCHQSAAWYDVSSGSYDKALRFLGSNDEEMSYDNNPFIKTLYDGCASRKGYEKTVIEINTPKIDQVPIVDVMINDFGDQNQKFGFEVGPVCFLG

SEQ ID NO: 33364 - protein, 85 aa, Homo sapiens
LETALLWRSRGGWGVEGGGPVASAPRGRGAAAAAAGAAPATATASGTELGPLGAHRSRGCWCQKKRMIDGKQTPGYRHSSFCFRY

SEQ ID NO: 33365 - protein, 364 aa, Homo sapiens
MYLSRFLSIHALWVTVSSVMQPYPLVWGHYDLCKTQIYTEEGKVWDYMACQPESTDMTKYLKVKLDPPDITCGDPPETFCAMGNPYMCNNECDASTPELAHPPELMFDFEGRHPSTFWQSATWKEYPKPLQVNITLSWSKTIELTDNIVITFESGRPDQMILEKSLDYGRTWQPYQYYATDCLDAFHMDPKSVKDLSQHTVLEIICTEEYSTGYTTNSKIIHFEIKDRFAFFAGPRLRNMASLYGQLDTTKKLRDFFTVTDLRIRLLRPAVGEIFVDELHLARYFYAISDIKVRGRCKCNLHATVCVYDNSKLTCECEHNTTGPDCGKCKKNYQGRPWSPGSYLPIPKGTANTCIPSISSIGSK

SEQ ID NO: 33366 - protein, 27 aa, Homo sapiens
LAHFVFKFQCSPFKILAKGCLSVCLTF

SEQ ID NO: 33367 - protein, 22 aa, Homo sapiens
LRTLAAPRRALFFRLGMLLTAG

SEQ ID NO: 33368 - protein, 625 aa, Homo sapiens
LPARLLRGVLAVWVSLSALGPGSFCRRRVPSLAQLGHSEAAPSPDDVRWSRVPDRCPEERDRAWPPPPPPSLPPSFRRNMANNSPALTGNSQPQHQAAAAAAQQQQQCGGGGATKPAVSGKQGNVLPLWGNEKTMNLNPMILTNILSSPYFKVQLYELKTYHEVVDEIYFKVTHVEPWEKGSRKTAGQTGMCGGVRGVGTGGIVSTAFCLLYKLFTLKLTRKQVMGLITHTDSPYIRALGFMYIRYTQPPTDLWDWFESFLDDEEDLDVKAGGGCVMTIGEMLRSFLTKLEWFSTLFPRIPVPVQKNIDQQIKTRPRKIKKDGKEGAEEIDRHVERRRSRSPRRSLSPRRSPRRSRSRSHHREGHGSSSFDRELEREKERQRLEREAKEREKERRRSRSIDRGLERRRSRSRERHRSRSRSRDRKGDRRDRDREREKENERGRRRDRDYDKERGNEREKERERSRERSKEQRSRGEVEEKKHKEDKDDRRHRDDKRDSKKEKKHSRSRSRERKHRSRSRSRNAGKRSRSRSKEKSSKHKNESKEKSNKRSRSGSQGRTDSVEKSKKREHSPSKEKSRKRSRSKERSHKRDHSDSKDQSDKHDRRRSQSIEQESQEKQHKNKDETV

SEQ ID NO: 33369 - protein, 93 aa, Homo sapiens
MANNSPALTGNSQPQHQAAAAAAQQQQQCGGGGATKPAVSGKQGNVLPLWGNEKTMNLNPMILTNILSSPYFKVQLYELKTYHEVVDEIYFKD

SEQ ID NO: 33370 - protein, 84 aa, Homo sapiens
LMPTELAALKLLQYQSFRKCSAKDNFVLRTKLKTHSLSSRKILNSALDHALRTATILKETTDQMIKTIAEDLAKAQRWRNRLKY

SEQ ID NO: 33371 - protein, 538 aa, Homo sapiens
VRRSQAECCGAILASLSVGPGGKKMVLDLDLFRVDKGGDPALIRETQEKRFKDPGLVDQLVKADSEWRRCRFRADNLNKLKNLCSKTIGEKMKKKEPVGDDESVPENVLSFDDLTADALANLKVSQIKKVRLLIDEAILKCDAERIKLEAERFENLREIGNLLHPSVPISNDEDVDNKVERIWGDCTVRKKYSHVDLVVMVDGFEGEKGAVVAGSRGYFLKGVLVFLEQALIQYALRTLGSRGYIPIYTPFFMRKEVMQEVAQLSQFDEELYKVIGKGSEKSDDNSYDEKYLIATSEQPIAALHRDEWLRPEDLPIKYAGLSTCFRQEVGSHGRDTRGIFRVHQFEKIEQFVYSSPHDNKSWEMFEEMITTAEEFYQSLGIPYHIVNIVSGSLNHAASKKLDLEAWFPGSGAFRELVSCSNCTDYQARRLRIRYGQTKKMMDKVEFVHMLNATMCATTRTICAILENYQTEKGITVPEKLKEFMPPGLQELIPFVKPAPIEQEPSKKQKKQHEGSKKKAAARDVTLENRLQNMEVTDA

SEQ ID NO: 33372 - protein, 2926 aa, Homo sapiens
LGEMRSPATGVPLPTPPPPLLLLLLLLLPPPLLGDQVGPCRSLGSRGRGSSGACAPMGWLCPSSASNLWLYTSRCRDAGTELTGHLVPHHDGLRVWCPESEAHIPLPPAPEGCPWSCRLLGIGGHLSPQGKLTLPEEHPCLKAPRLRCQSCKLAQAPGLRAGERSPEESLGGRRKRNVNTAPQFQPPSYQATVPENQPAGTPVASLRAIDPDEGEAGRLEYTMDALFDSRSNQFFSLDPVTGAVTTAEELDRETKSTHVFRVTAQDHGMPRRSALATLTILVTDTNDHDPVFEQQEYKESLRENLEVGYEVLTVRATDGDAPPNANILYRLLEGSGGSPSEVFEIDPRSGVIRTRGPVDREEVESYQLTVEASDQGRDPGPRSTTAAVFLSVEDDNDNAPQFSEKRYVVQVREDVTPGAPVLRVTASDRDKGSNAVVHYSIMSGNARGQFYLDAQTGALDVVSPLDYETTKEYTLRVRAQDGGRPPLSNVSGLVTVQVLDINDNAPIFVSTPFQATVLESVPLGYLVLHVQAIDADAGDNARLEYRLAGVGHDFPFTINNGTGWISVAAELDREEVDFYSFGVEARDHGTPALTASASVSVTVLDVNDNNPTFTQPEYTVRLNEDAAVGTSVVTVSAVDRDAHSVITYQITSGNTRNRFSITSQSGGGLVSLALPLDYKLERQYVLAVTASDGTRQDTAQIVVNVTDANTHRPVFQSSHYTVNVNEDRPAGTTVVLISATDEDTGENARITYFMEDSIPQFRIDADTGAVTTQAELDYEDQVSYTLAITARDNGIPQKSDTTYLEILVNDVNDNAPQFLRDSYQGSVYEDVPPFTSVLQISATDRDSGLNGRVFYTFQGGDDGDGDFIVESTSGIVRTLRRLDRENVAQYVLRAYAVDKGMPPARTPMEVTVTVLDVNDNPPVFEQDEFDVFVEENSPIGLAVARVTATDPDEGTNAQIMYQIVEGNIPEVFQLDIFSGELTALVDLDYEDRPEYVLVIQATSAPLVSRATVHVRLLDRNDNPPVLGNFEILFNNYVTNRSSSFPGGAIGRVPAHDPDISDSLTYSFERGNELSLVLLNASTGELKLSRALDNNRPLEAIMSVLVSDGVHSVTAQCALRVTIITDEMLTHSITLRLEDMSPERFLSPLLGLFIQAVAATLATPPDHVVVFNVQRDTDAPGGHILNVSLSVGQPPGPGGGPPFLPSEDLQERLYLNRSLLTAISAQRVLPFDDNICLREPCENYMRCVSVLRFDSSAPFIASSSVLFRPIHPVGGLRCRCPPGFTGDYCETEVDLCYSRPCGPHGRCRSREGGYTCLCRDGYTGEHCEVSARSGRCTPGVCKNGGTCVNLLVGGFKCDCPSGDFEKPYCQVTTRSFPAHSFITFRGLRQRFHFTLALSFATKERDGLLLYNGRFNEKHDFVALEVIQEQVQLTFSAGESTTTVSPFVPGGVSDGQWHTVQLKYYNKPLLGQTGLPQGPSEQKVAVVTVDGCDTGVALRFGSVLGNYSCAAQGTQGGSKKSLDLTGPLLLGGVPDLPESFPVRMRQFVGCMRNLQVDSRHIDMADFIANNGTVPGCPAKKNVCDSNTCHNGGTCVNQWDAFSCECPLGFGGKSCAQEMANPQHFLGSSLVAWHGLSLPISQPWYLSLMFRTRQADGVLLQAITRGRSTITLQLREGHVMLSVEGTGLQASSLRLEPGRANDGDWHHAQLALGASGGPGHAILSFDYGQQRAEGNLGPRLHGLHLSNITVGGIPGPAGGVARGFRGCLQGVRVSDTPEGVNSLDPSHGESINVEQGCSLPDPCDSNPCPANSYCSNDWDSYSCSCDPGYYGDNCTNVCDLNPCEHQSVCTRKPSAPHGYTCECPPNYLGPYCETRIDQPCPRGWWGHPTCGPCNCDVSKGFDPDCNKTSGECHCKENHYRPPGSPTCLLCDCYPTGSLSRVCDPEDGQCPCKPGVIGRQCDRCDNPFAEVTTNGCEVNYDSCPRAIEAGIWWPRTRFGLPAAAPCPKGSFGTAVRHCDEHRGWLPPNLFNCTSITFSELKGFAERLQRNESGLDSGRSQQLALLLRNATQHTAGYFGSDVKVAYQLATRLLAHESTQRGFGLSATQDVHFTENLLRVGSALLDTANKRHWELIQQTEGGTAWLLQHYEAYASALAQNMRHTYLSPFTIVTPNIVISVVRLDKGNFAGAKLPRYEALRGEQPPDLETTVILPESVFRETPPVVRPAGPGEAQEPEELARRQRRHPELSQGEAVASVIIYRTLAGLLPHNYDPDKRSLRVPKRPIINTPVVSISVHDDEELLPRALDKPVTVQFRLLETEERTKPICVFWNHSILVSGTGGWSARGCEVVFRNESHVSCQCNHMTSFAVLMDVSRRENGEILPLKTLTYVALGVTLAALLLTFFFLTLLRILRSNQHGIRRNLTAALGLAQLVFLLGINQADLPFACTVIAILLHFLYLCTFSWALLEALHLYRALTEVRDVNTGPMRFYYMLGWGVPAFITGLAVGLDPEGYGNPDFCWLSIYDTLIWSFAGPVAFAVSMSVFLYILAARASCAAQRQGFEKKGPVSGLQPSFAVLLLLSATWLLALLSVNSDTLLFHYLFATCNCIQGPFIFLSYVVLSKEVRKALKLACSRKPSPDPALTTKSTLTSSYNCPSPYADGRLYQPYGDSAGSLHSTSRSGKSQPSYIPFLLREESALNPGQGPPGLGDPGSLFLEGQDQQHDPDTDSDSDLSLEDDQSGSYASTHSSDSEEEEEEEEEEAAFPGEQGWDSLLGPGAERLPLHSTPKDGGPGPGKAPWPGDFGTTAKESSGNGAPEERLRENGDALSREGSLGPLPGSSAQPHKGILKKKCLPTISEKSSLLRLPLEQCTGSSRGSSASEGSRGGPPPRPPPRQSLQEQLNGVMPIAMSIKAGTVDEDSSGSEFLFFNFLH

SEQ ID NO: 33373 - protein, 124 aa, Homo sapiens
LSLCKVWAFLFLFFKGNEMEFEGTFSLTPLLCVLHGACPRASANSSISSHSVLGTIPGLCWRDETAVEMKTGCRGWHSLAGFSPSGDSPTPRTLHTSSSHRSHLLFFFFSETTDHSDFSFPLFN

SEQ ID NO: 33374 - protein, 730 aa, Homo sapiens
LKHVFDDLRGSVSLSWVGDSTGVILVLTTFHVPLVIMTFGQSKLYRSEDYGKNFKDITDLINNTFIRTEFGMAIGPENSGKVVLTAEVSGGSRGGRIFRSSDFAKNFVQTDLPFHPLTQMMYSPQNSDYLLALSTENGLWVSKNFGGKWEEIHKAVCLAKWGSDNTIFFTTYANGSCTDLGALELWRTSDLGKSFKTIGVKIYSFGLGGRFLFASVMADKDTTRRIHVSTDQGDTWSMAQLPSVGQEQFYSILAANDDMVFMHVDEPGDTGFGTIFTSDDRGIVYSKSLDRHLYTTTGGETDFTNVTSLRGVYITSVLSEDNSIQTMITFDQGGRWTHLRKPENSECDATAKNKNECSLHIHASYSISQKLNVPMAPLSEPNAVGIVIAHGSVGDAISVMVPDVYISDDGGYSWTKMLEGPHYYTILDSGGIIVAIEHSSRPINVIKFSTDEGQCWQTYTFTRDPIYFTGLASEPGARSMNISIWGFTESFLTSQWVSYTIDFKDILERNCEEKDYTIWLAHSTDPEDYEDGCILGYKEQFLRLRKSSVCQNGRDYVVTKQPSICLCSLEDFLCDFGYYRPENDSKCVEQPELKGHDLEFCLYGREEHLTTNGYRKIPGDKCQGGVNPVREVKDLKKKCTSNFLSPEKQNSKSNSVPIILAIVGLMLVTVVAGVLIVKKYVCGGRFLVHRYSVLQQHAEANGVDGVDALDTASHTNKSGYHDDSDEDLLE

SEQ ID NO: 33375 - protein, 263 aa, Homo sapiens
VYGPAGHGHAAPGGRSGSRSSWGAETDPLAAERQWDLGAPGSFGLHHLSDSAVPARNQSFLLAPCIHGLGGCMRAPPFSQASKPDMRLTGSLLCSQFCLCMAEAILLFSPEHSLFFFCSRKARIRLHWAGQTLAILCAALGLGFIISSRTRSELPHLVSWHSWVGALTLLATAVQALCGLCLLCPRAARVSRVARLKLYHLTCGLVVYLMATVTVLLGMYSVWFQAQIKGAAWYLCLALPVYPALVIMHQISRSYLPRKKMEM

SEQ ID NO: 33376 - protein, 22 aa, Homo sapiens
LNLGGTLALNIMVPLVIYKGSI

SEQ ID NO: 33377 - protein, 84 aa, Homo sapiens
LCRGVLFLSLSLSSLLSNSPVWCELRRNGYWGCMENFTCGDFDPGTASPLSSSQPVLRGSFYLPQGRRARQSSPACSKSKQAMP

SEQ ID NO: 33378 - protein, 684 aa, Homo sapiens
LLKMNPGTMITATFHWALTSCQALCKGTLRLIFTVTPLSECQGRGPWSDLAGVCGPIPLPSLRTRAFCCTDFSWAASPRNSGIMASEARGGLGAPPLQSARSLPGPAPCLKHFPLDLRTSMDGKCKEIAEELFTRSLAESELRSAPYEFPEESPIEQLEERRQRLERQISQDVKLEPDILLRAKQDFLKTDSDSDLQLYKEQGEGQGDRSLRERDVLEREFQRVTISGEEKCGVPFTDLLDAAKSVVRALFIREKYMALSLQSFCPTTRRYLQQLAEKPLETRTYEQGPDTPVSADAPVHPPALEQHPYEHCEPSTMPGDLGLGLRMVRGVVHVYTRREPDEHCSEVELPYPDLQEFVADVNVLMALIINGPIKSFCYRRLQYLSSKFQMHVLLNEMKELAAQKKVPHRDFYNIRKVDTHIHASSCMNQKHLLRFIKRAMKRHLEEIVHVEQGREQTLREVFESMNLTAYDLSVDTLDVHADRNTFHRFDKFNAKYNPIGESVLREIFIKTDNRVSGKYFAHIIKEVMSDLEESKYQNAELRLSIYGRSRDEWDKLARWAVMHRVHSPNVRWLVQVPRLFDVYRTKGQLANFQEMLENIFLPLFEATVHPASHPELHLFLEHVDGFDSVDDESKPENHVFNLESPLPEAWVEEDNPPYAYYLYYTFANMAMLNHLRRGASTRLC

SEQ ID NO: 33379 - protein, 92 aa, Homo sapiens
LSAESTPTSIMSMTLGYWDIRGLAHAIRLLLEYTDSSYEEKKYTMGDGNDTLVSGLCPLTLSWHQATHGGHLWLPLQASPAGAAGCPFPEPR

SEQ ID NO: 33380 - protein, 85 aa, Homo sapiens
LSAESTPTSIMSMTLGYWDIRGLAHAIRLLLEYTDSSYEEKKYTMGDAPDYDRSQWLNEKFKLGLDFPNVGAGEGAVLGESATCL

SEQ ID NO: 33381 - protein, 117 aa, Homo sapiens
LSAESTPTSIMSMTLGYWDIRGLAHAIRLLLEYTDSSYEEKKYTMGDAPDYDRSQWLNEKFKLGLDFPNIRGVRIRSLLPNSSHSWLSTQPLHDVLCPSSFVHVTVFLCQACHERAQ

SEQ ID NO: 33382 - protein, 103 aa, Homo sapiens
LSAESTPTSIMSMTLGYWDIRGLAHAIRLLLEYTDSSYEEKKYTMGDAPDYDRSQWLNEKFKLGLDFPNVGRQKRRRFVWTFWRTRLWTSPISWPESATALTL

SEQ ID NO: 33383 - protein, 228 aa, Homo sapiens
LSAESTPTSIMSMTLGYWDIRGLAHAIRLLLEYTDSSYEEKKYTMGDAPDYDRSQWLNEKFKLGLDFPNLPYLIDGAHKITQSNAILCYIARKHNLCGETEEEKIRVDILENQAMDVSNQLARVCYSPDFEKLKPEYLEELPTMMQHFSQFLGKRPWFVGDKITFVDFLAYDVLDLHRIFEPNCLDAFPNLKDFISRFEGLEKISAYMKSSRFLPKPLYTRVAVWGNK

SEQ ID NO: 33384 - protein, 247 aa, Homo sapiens
LSAESTPTSIMSMTLGYWDIRGLAHAIRLLLEYTDSSYEEKKYTMGDAPDYDRSQWLNEKFKLGLDFPNGMLGSLLAQLSFPGFPSIQLPYLIDGAHKITQSNAILCYIARKHNLCGETEEEKIRVDILENQAMDVSNQLARVCYSPDFEKLKPEYLEELPTMMQHFSQFLGKRPWFVGDKITFVDFLAYDVLDLHRIFEPNCLDAFPNLKDFISRFEGLEKISAYMKSSRFLPKPLYTRVAVWGNK

SEQ ID NO: 33385 - protein, 205 aa, Homo sapiens
LSAESTPTSIMSMTLGYWDIRGLAHAIRLLLEYTDSSYEEKKYTMGDAPDYDRSQWLNEKFKLGLDFPNLPYLIDGAHKITQSNAILCYIARKHNLCGETEEEKIRVDILENQAMDVSNQLARVCYSPDFEKLKPEYLEELPTMMQHFSQFLGKRPWFVGDKITFVDFLAYDVLDLHRIFEPNCLDAFPNLKDFISRFEVSCGIM

SEQ ID NO: 33386 - protein, 161 aa, Homo sapiens
LSAESTATSTMPMTLGYWNIRGLAHSIRLLLEYTDSSYEEKKYTMGDAPDYDRSQWLNEKFKLGLDFPNLPYLIDGTHKITQSNAILRYIARKHNLCGESEKEQIREDILENQFMDSRMQLAKLCYDPDFVSPPTPLPVSPSLLPVSPFPAEFVSKIDSFW

SEQ ID NO: 33387 - protein, 233 aa, Homo sapiens
LLGLGLSAESAPTSTMPMILGYWDIRGLAHAIRLLLEYTDSSYEEKKYTMGDAPDYDRSQWLNEKFKLGLDFPNLPYLIDGAHKITQSNAILCYIARKHNLCGETEEEKIRVDILENQTMDNHMQLGMICYNPEFEKLKPKYLEELPEKLKLYSEFLGKRPWFAGNKITFVDFLVYDVLDLHRIFEPKCLDAFPNLKDFISRFEGLEKISAYMKSSRFLPRPVFSKMAVWGNK

SEQ ID NO: 33388 - protein, 252 aa, Homo sapiens
LLGLGLSAESAPTSTMPMILGYWDIRGLAHAIRLLLEYTDSSYEEKKYTMGDAPDYDRSQWLNEKFKLGLDFPNGMLGSLVAQLSFAGFPSIQLPYLIDGAHKITQSNAILCYIARKHNLCGETEEEKIRVDILENQTMDNHMQLGMICYNPEFEKLKPKYLEELPEKLKLYSEFLGKRPWFAGNKITFVDFLVYDVLDLHRIFEPKCLDAFPNLKDFISRFEGLEKISAYMKSSRFLPRPVFSKMAVWGNK

SEQ ID NO: 33389 - protein, 222 aa, Homo sapiens
VGAAQSLNRCLPQLAHAIRLLLEFTDTSYEEKRYTCGEAPDYDRSQWLDVKFKLDLDFPNLPYLLDGKNKITQSNAILRYIARKHNMCGETEEEKIRVDIIENQVMDFRTQLIRLCYSSDHEKLKPQYLEELPGQLKQFSMFLGKFSWFAGEKLTFVDFLTYDILDQNRIFDPKCLDEFPNLKAFMCRFEALEKIAAYLQSDQFCKMPINNKMAQWGNKPVC

SEQ ID NO: 33390 - protein, 198 aa, Homo sapiens
VRVVYGSRVLGYSWAPDYDRSQWLDVKFKLDLDFPNLPYLLDGKNKITQSNAILRYIARKHNMCGETEEEKIRVDIIENQVMDFRTQLIRLCYSSDHEKLKPQYLEELPGQLKQFSMFLGKFSWFAGEKLTFVDFLTYDILDQNRIFDPKCLDEFPNLKAFMCRFEALEKIAAYLQSDQFCKMPINNKMAQWGNKPVC

SEQ ID NO: 33391 - protein, 117 aa, Homo sapiens
MDFRTQLIRLCYSSDHEKLKPQYLEELPGQLKQFSMFLGKFSWFAGEKLTFVDFLTYDILDQNRIFDPKCLDEFPNLKAFMCRFEVTFPAPFSYKNTHRLPWDLQDPIVEDSSPAFA

SEQ ID NO: 33392 - protein, 497 aa, Homo sapiens
LWSTSLSFLPVLGLPLSLQHLMTCKQGSQRVQGPEDALQKLFEMDAQGRVWSQDLILQVRDGWLQLLDIETKEELDSYRLDSIQAMNVALNTCSYNSILSITVQEPGLPGTSTLLFQCQEVGAERLKTSLQKALEEELEQSRPRLGGLQPGQDRWRGPAMERPLPMEQARYLEPGIPPEQPHQRTLEHSPWSPYTAGLPPSPRPLPRHTSAREPSAFTLPPPRRSSSPEDPERDEEVLNHVLRDIELFMGKLEKAQAKTSRKKKFGKKNKDQGGLTQAQYIDCFQKIKHSFNLLGRLATWLKETSAPELVHILFKSLNFILARCPEAGLAAQVISPLLTPKAINLLQSCLSPPESNLWMGLGPAWTTSRADWTGDEPLPYQPTFSDDWQLPEPSSQAPLGYQDPVSLRPSSPKPAQPALKMQVLYEFEARNPRELTVVQGEKLEVLDHSKRWWLVKNEAGRSGYIPSNILEPLQPGTPGTQGQSPSRVLPSLDYPEP

SEQ ID NO: 33393 - protein, 628 aa, Homo sapiens
MPPSPLLKGCAEGWPVRLGPGKVKVCLGPLGARAALRIPGQRCGPRPGRPLRSSQRASERARAADAPGRDPAARMTAPGAAGRCPPTTWLGSLLLLVCLLASRSITEEVSEYCSHMIGSGHLQSLQRLIDSQMETSCQITFEFVDQEQLKDPVCYLKKAFLLVQDIMEDTMRFRDNTPNAIAIVQLQELSLRLKSCFTKDYEEHDKACVRTFYETPLQLLEKVKNVFNETKNLLDKDWNIFSKNCNNSFAECSSQDVVTKPDCNCLYPKAIPSSDPASVSPHQPLAPSMAPVAGLTWEDSEGTEGSSLLPGEQPLHTVDPGSAKQRPPRSTCQSFEPPETPVVKDSTIGGSPQPRPSVGAFNPGMEDILDSAMGTNWVPEEASGEASEIPVPQGTELSPSRPGGGSMQTEPARPSNFLSASSPLPASAKGQQPADVTGTALPRVGPVRPTGQDWNHTPQKTDHPSALLRDPPEPGSPRISSLRPQGLSNPSTLSAQPQLSRSHSSGSVLPLGELEGRRSTRDRRSPAEPEGGPASEGAARPLPRFNSVPLTDTGHERQSEGSFSPQLQESVFHLLVPSVILVLLAVGGLLFYRWRRRSHQEPQRADSPLEQPEGSPLTQDDRQVELPV

SEQ ID NO: 33394 - protein, 55 aa, Homo sapiens
VVALRPRQRATGLPVAPGFLCAAVCLLSCRPLSSAKRPCPTWPLGPVTFPSCPGK

SEQ ID NO: 33395 - protein, 651 aa, Homo sapiens
VPFLPASSPSRELPVLDVASPPSTLALRACLRTAEVAARAGRSSELLFWFSCGRRRCPAALGCRTDKAWATAPQKPTQLDAGAGRRVGDRVSEGAARAGGRAPEGERGGGGGSAAGRAGRGMSMPDAMPLPGVGEELKQAKEIEDAEKYSFMATVTKAPKKQIQFADDMQEFTKFPTKTGRRSLSRSISQSSTDSYSSAASYTDSSDDEVSPREKQQTNSKGSSNFCVKNIKQAEFGRREIEIAEQDMSALISLRKRAQGEKPLAGAKIVGCTHITAQTAVLIETLCALGAQCRWSACNIYSTQNEVAAALAEAGVAVFAWKGESEDDFWWCIDRCVNMDGWQANMILDDGGDLTHWVYKKYPNVFKKIRGIVEESVTGVHRLYQLSKAGKLCVPAMNVNDSVTKQKFDNLYCCRESILDGLKRTTDVMFGGKQVVVCGYGEVGKGCCAALKALGAIVYITEIDPICALQACMDGFRVVKLNEVIRQVDVVITCTGNKNVVTREHLDRMKNSCIVCNMGHSNTEIDVTSLRTPELTWERVRSQVDHVIWPDGKRVVLLAEGRLLNLSCSTVPTFVLSITATTQALALIELYNAPEGRYKQDVYLLPKKMDEYVASLHLPSFDAHLTELTDDQAKYLGLNKNGPFKPNYYRY

SEQ ID NO: 33396 - protein, 217 aa, Homo sapiens
LRACLRTAEVAARAGRSSELLFWFSCGRRRCPAALGCRTDKAWATAPQKPTQLDAGAGRRVGDRVSEGAARAGGRAPEGERGGGGGSAAGRAGRGMSMPDAMPLPGVGEELKQAKEIEDAEKYSFMATVTKAPKKVRGLWVAAGARAPASRKGREQARALASLGLLGVTGDGGGDVGGGGCAAPGLSRAERPPLTSLSFVPRPKSSGIVLKPDRARP

SEQ ID NO: 33397 - protein, 1235 aa, Homo sapiens
MDHTASQNAQDLIGIPHLGVSGSSTKWHSELSPTEGPHSAGSSTPGFLSPMAELSHPSPPPPALGSLLQLPDGSPSWSMLEVASGPASTQQIKAGVPGRVHNGVSLPTFKNTETATHEAEPPLFQTAESGAIEMTSRKLASATANDSANPLHLSAAPENSRGPALSAEHTSSLVPSLHITTLGQEQAILSGAVPASPSTGTADFPSILTFLQPTENHASPSPVPEMPTLPAEGSDGSPPATRDLLLSSKVPNLLSTSWTFPRWKKDSVTAILGKNEEANVTIPLQAFPRKEVLSLHTVNGFVSDFSTGSVSSPIITAPRTNPLPSGPPLPSILSIQATQTVFPSLGFSSTKPEAYAAAVDHSGLPASASKQVRASPSSMDVYDSLTIGDMKKPATTDVFWSSLSAETGSLSTESIISGLQQQTNYDLNGHTISTTSWETHLAPTAPPNGLTSAADAIKSQDFKDTAGHSVTAEGFSIQDLVLGTSIEQPVQQSDMTMVGSHIDLWPTSNNNHSRDFQTAEVAYYSPTTRHSVSHPQLQLPNQPAHPLLLTSPGPTSTGSLQEMLSDGTDTGSEISSDINSSPERNASTPFQNILGYHSAAESSISTSVFPRTSSRVLRASQHPKKWTGAATNAADTVSSKVQPTAAAAVTLFLRKSSPPALSAALVAKGTSSSPLAVASGPAKSSSMTTLAKNVTNKAASGPKRTPGAVHTAFPFTPTYMYARTGHTTSTHTAMQGNMDTASGLLSTTYLPRKPQAMHTGLPNPTNLEMPRASTPRPLTVTAALTSITASVKATRLPPLRAENTDAVLPAASAAVVTTGKMASNLECQMSSKLLVKTVLFLTQRRVQISESLKFSIAKGLTQALRKAFHQNDVSAHVDILEYSHNVTVGYYATKGKLVYLPAVVIEMLGVYGVSNVTADLKQHTPHLQSVAVLASPWNPQPAGYFQLKTVLQFVSQADNIQSCKFAQTMEQRLQKAFQDAERKVLNTKSNLTIQIVSTSNASQAVTLVYVVGNQSTFLNGTVASSLLSQLSAELVGFYLTYPPLTIAEPLEYPNLDISETTRDYWVITVLQGVDNSLVGLHNQSFARVMEQRLAQLFMMSQQQGRRFKRATTLGSYTVQMVKMQRVPGPKDPAELTYYTLYNGKPLLGTAAAKILSTIDSQRMALTLHHVVLLQADPVVKNPPNNLWIIAAVLAPIAVVTVIIIIITAVLCRKNKNDFKPDTMINLPQRAKQVAQ

SEQ ID NO: 33398 - protein, 64 aa, Homo sapiens
LALVLRVLLNIMYLIVETVHQECEGDKAEWRTMRQTFRAELGRTLGILSRGPAWKLRRKALGGS

SEQ ID NO: 33399 - protein, 42 aa, Homo sapiens
LLPSLPQYMIALLKILLAAAPTSKAKTDSINILADVLPEEMP

SEQ ID NO: 33400 - protein, 109 aa, Homo sapiens
LVHRTPVCLYLFKSFFSHYVLQLSCVPGIRMKNPSIVGVLCTDSQGLNLGCRGTLSDEHAGVISVLAQQAAKLTSDPTDIPVVCLESDNGNIMIQKHDGITVAVHKMAS

SEQ ID NO: 33401 - protein, 179 aa, Homo sapiens
VPAGSAMEPGAGHLDGHRAGSPSLRQALCDGSAVMFSSKERGRCTVINFVPLEAPLRSTPRSRQVTEACGGEGRAVPLGSEPEWSVGGMEATLEQHLEDTMKNPSIVGVLCTDSQGLNLGCRGTLSDEHAGVISVLAQQAAKLTSDPTDIPVVCLESDNGNIMIQKHDGITVAVHKMAS

SEQ ID NO: 33402 - protein, 39 aa, Homo sapiens
LSVGSVGILTKTLVLIMEECLHLCIPSATEHDKNSTNIY

SEQ ID NO: 33403 - protein, 22 aa, Homo sapiens
MSNNLRRVFLKPAEENSGNASR

SEQ ID NO: 33404 - protein, 72 aa, Homo sapiens
VGSVGPSFPMGREPERGNVGLELPTATVRGSTLTEGDSGLSRGCIPRLRDEVAHRAETGRLLAVDCALTALR

SEQ ID NO: 33405 - protein, 98 aa, Homo sapiens
LSMLATGMSNISYICHHTRNGLNIKNQQGQNRYIHRSRRYFCLVASTTSIYNKDLLYYCIQDYITDLTKFLIILLLSKTILIKRAAVNTMGQFLLHLE

SEQ ID NO: 33406 - protein, 111 aa, Homo sapiens
LLLVIWCGVSALSMLTCSSVLHSGNFGTDLEQKLHWNPEDKGYVLHMITTAAEWSMSFSFFGFFLTYIRDFQVRRHNIRFIQSDFLLLVQEGRLRELSIGNSPAFLKINCL

SEQ ID NO: 33407 - protein, 62 aa, Homo sapiens
LLVLASAAFLGPVTSFLLNHWVHRMETSIPSLEDSAWLGFTELWLETEAAPFSGLLSPVCLC

SEQ ID NO: 33408 - protein, 58 aa, Homo sapiens
MCIPEEAGQGYGSNHHGPEVSLGRCSGLAASPGRICLQTGLLLYQLVPGPAGTRKIHP

SEQ ID NO: 33409 - protein, 690 aa, Homo sapiens
LHLWTHSYQTIEMWKLLLWVGLVLVLKHHDGAAHKLVCYFTNWAHSRPGPASILPHDLDPFLCTHLIFAFASMNNNQIVAKDLQDEKILYPEFNKLKERNRELKTLLSIGGWNFGTSRFTTMLSTFANREKFIASVISLLRTHDFDGLDLFFLYPGLRGSPMHDRWTFLFLIEELLFAFRKEALLTMRPRLLLSAAVSGVPHIVQTSYDVRFLGRLLDFINVLSYDLHGSWERFTGHNSPLFSLPEDPKSSAYAMNYWRKLGAPSEKLIMGIPTYGRTFRLLKASKNGLQARAIGPASPGKYTKQEGFLAYFEICSFVWGAKKHWIDYQYVPYANKGKEWVGYDNAISFSYKAWFIRREHFGGAMVWTLDMDDVRGTFCGTGPFPLVYVLNDILVRAEFSSTSLPQFWLSSAVNSSSTDPERLAVTTAWTTDSKILPPGGEAGVTEIHGKCENMTITPRGTTVTPTKETVSLGKHTVALGEKTEITGAMTMTSVGHQSMTPGEKALTPVGHQSVTTGQKTLTSVGYQSVTPGEKTLTPVGHQSVTPVSHQSVSPGGTTMTPVHFQTETLRQNTVAPRRKAVAREKVTVPSRNISVTPEGQTMPLRGENLTSEVGTHPRMGNLGLQMEAENRMMLSSSPVIQLPEQTPLAFDNRFVPIYGNHSSVNSVTPQTSPLSLKKEIPENSAVDEEA

SEQ ID NO: 33410 - protein, 344 aa, Homo sapiens
VEMRKETPPPLVPPAAREWNLPPNAPACMERQLEAARYRSDGALLLGASSLSGRCWAGSLWLFKDPCAAPNEGFCSAGVQTEAGVADLTWVGERGILVASDSGAVELWELDENETLIVSKFCKYEHDDIVSTVSVLSSGTQAVSGSKDICIKVWDLAQQVVLSSYRAHAAQVTCVAASPHKDSVFLSCSEDNRILLWDTRCPKPASQIGCSAPGYLPTSLAWHPQQSEVFVFGDENGTVSLVDTKSTSCVLSSAVHSQCVTGLVFSPHSVPFLASLSEDCSLAVLDSSLSELFRSQAHRDFVRDATWSPLNHSLLTTVGWDHQVVHHVVPTEPLPAPGPASVTE

SEQ ID NO: 33411 - protein, 328 aa, Homo sapiens
LLSGCRPHAIGSQRYLTLLAIIFFKNLPRKVEGRVQNFHLARLVSGHLGPALTDSPIGVTGTLRLLPGLSLTMLSRVVLSAAATAAPSLKNAAFLGPGVLQATRTFHTGQPHLVPVPPLPEYGGKVRYGLIPEEFFQFLYPKTGVTGPYVLGTGLILYALSKEIYVISAETFTALSVLGVMVYGIKKYGPFVADFADKLNEQKLAQLEEAKQASIQHIQNAIDTEKSQQALVQKRHYLFDVQRNNIAMALEVTYRERLYRVYKEVKNRLDYHISVQNMMRRKEQEHMINWVEKHVVQSISTQQEKETIAKCIADLKLLAKKAQAQPVM

SEQ ID NO: 33412 - protein, 203 aa, Homo sapiens
LLPGLSLTMLSRVVLSAAATAGPYVLGTGLILYALSKEIYVISAETFTALSVLGVMVYGIKKYGPFVADFADKLNEQKLAQLEEAKQASIQHIQNAIDTEKSQQALVQKRHYLFDVQRNNIAMALEVTYRERLYRVYKEVKNRLDYHISVQNMMRRKEQEHMINWVEKHVVQSISTQQEKETIAKCIADLKLLAKKAQAQPVM

SEQ ID NO: 33413 - protein, 159 aa, Homo sapiens
MREYKLVVLGSGGVGKSALTVQFVQGIFVEKYDPTIEDSYRKQVEVDCQQCMLEILDTAGTEQFTAMRDLYMKNGQGFALVYSITAQSTFNDLQDLREQILRVKDTEDVPMILVGNKCDLEDERVVGKEQGQNLARQWCNCAFLESSAKSKINVNEIFL

SEQ ID NO: 33414 - protein, 307 aa, Homo sapiens
LFEPNPTNGRMTMESREMDCYLRRLKQELMSMKEVGDGLQDQMNCMMGALQELKLLQVQTALEQLEISGGGPVPGSPEGPRTQCEHPCWEGGRGPARPTVCSPSSQPSLGSSTKFPSHRSVCGRDLAPLPRTQPHQSCAQQGPERVEPDDWTSTLMSRGRNRQPLVLGDNVFADLVGNWLDLPELEKGGEKGETGGAREPKGEKGQPQELGRRFALTANIFKKFLRSVRPDRDRLLKEKPGWVTPMVPESRTGRSQKVKKRSLSKGSGHFPFPGTGEHRRGENPPTSCPKALEHSPSGFDINTAVWV

SEQ ID NO: 33415 - protein, 439 aa, Homo sapiens
LNIIFVKMIYYLTFSLLLGTLGLTVTYCCRGEEENMMMRIAQKCNINLLPLPDPIPSGLMEECVDWDVEVKAAVHTYGIASVPNQPLKKQIQKIERTLQIQKAHGDHMASSRNNSVSGLSVKSKNNTKQKLPVKSHSECGIIEKATSPKELGCDRQSEEQMKNSVQTPVENSTNSQHQVKEALPVSLPQIPCLSSFKIHQPYTLTFAELVEDYEHYIKEGLEKPVEIIRHYTGPGDQTVNPQNGFVRNKVIEQRVPVLASSSQSGDSESDSDSYSSRTSSQSKGNKSYLEGSSDNQLKDSESTPVDDRISLEQPPNGSDTPNPEKYQESPGIQMKTRLKEGASQRAKQSRRNLPRRSSFRLQTEAQEDDWYDCHREIRLSFSDTYQDYEEYWRAYYRAWQEYYAAASHSYYWNAQRHPSWMAAYHMNTIYLQEMMHSNQ

SEQ ID NO: 33416 - protein, 664 aa, Homo sapiens
LEAVTLRGHISVQFLQNRRCCPPLPCPTKEQVAPILRHAPPPSKSSRSRFPRTQPSQRPTSGPPLSQDSRLPVSCPSPLPAPGACDSGKMADRGGVGEAAAVGASPASVPGLNPTLGWRERLRAGLAGTGASLWFVAGLGLLYALRIPLRLCENLAAVTVFLNSLTPKFYVALTGTSSLISGLIFIFEWWYFHKHGTSFIEQVSVSHLQPLMGGTESSISEPGSPSRNRENETSRQNLSECKVWRNPLNLFRGAEYRRYTWVTGKEPLTYYDMNLSAQDHQTFFTCDTDFLRPSDTVMQKAWRERNPPARIKAAYQALELNNDCATAYVLLAEEEATTIVDAERLFKQALKAGETIYRQSQQCQHQSPQHEAQLRRDTNVLVYIKRRLAMCARKLGRIREAVKIMRDLMKEFPPLTMLNIHENLLESLLELQAYPDVQAVLAKYDDISLPKSAAICYTAALLKTRTVSEKFSPETASRRGLSTAEINAVEAIHRAVEFNPHVPKYLLEMKSLILPPEHILKRGDSEAIAYAFFHLQHWKRIEGALNLLQCTWEGTFRMIPYPLEKGHLFYPYPSCTETADRELLPTFHHVSVYPKKELPLFIHFTAGFCSSTAMIAILTHQFPEIMGIFAKAVLGLWCPQPWASSGFEENTQDLKSEDLGLSSG

SEQ ID NO: 33417 - protein, 260 aa, Homo sapiens
MADRGGVGEAAAVGASPASVPGLNPTLGWRERLRAGLAGTGASLWFVAGLGLLYALRIPLRLCENLAAVTVFLNSLTPKFYVALTGTSSLISGLIFIFEWWYFHKHGTSFIEQVSVSHLQPLMGGTESSISEPGSPSRNRENETSRQNLSDGISLLLPRLECNVAILAHCNLHLPGSSDSPAPASRVAGITSTCHHARVIFVFLVEMGFRHVGQTGLKPLTSDDSSTSASQSAGITGMSHQAWPILSSFLSTFIAPYLGP

SEQ ID NO: 33418 - protein, 163 aa, Homo sapiens
MADRGGVGEAAAVGASPASVPGLNPTLGWRERLRAGLAGTGASLWFVAGLGLLYALRIPLRLCENLAAVTVFLNSLTPKFYVALTGTSSLISGLIFIFEWWYFHKHGTSFIEQVSVSHLQPLMGGTESSISEPGSPSRNRENETSRQNLSGDYFSNVFSELCI

SEQ ID NO: 33419 - protein, 324 aa, Homo sapiens
LVGVSGRVLPTAAAVIPSLGFLPGLPRARSRAGPEQPKMADFDDRVSDEEKVRIAAKFITHAPPGEFNEVFNDVRLLLNNDNLLREGAAHAFAQYNMDQFTPVKIEGYEDQVLITEHGDLGNSRFLDPRNKISFKFDHLRKEASDPQPEEADGGLKSWRESCDSALRAYVKDHYSNGFCTVYAKTIDGQQTIIACIESHQFQPKNFWNGRWRSEWKFTITPPTAQVVGVLKIQVHYYEDGNVQLVSHKDVQDSLTVSNEAQTAKEFIKIIENAENEYQTAISENYQTMSDTTFKALRRQLPVTRTKIDWNKILSYKIGKEMQNA

SEQ ID NO: 33420 - protein, 139 aa, Homo sapiens
VANHLFLVLIANSAMLCVCFNRNGRWRSEWKFTITPPTAQVVGVLKIQVHYYEDGNVQLVSHKDVQDSLTVSNEAQTAKEFIKIIENAENEYQTAISENYQTMSDTTFKALRRQLPVTRTKIDWNKILSYKIGKEMQNA

SEQ ID NO: 33421 - protein, 161 aa, Homo sapiens
LGRVPLPLGLSSPTCKMGMMVELALWDTAGQEDYDRLRPLSYPDTDVILMCFSIDSPDSLENIPEKWTPEVKHFCPNVPIILVGNKKDLRQDEHTRRELAKMKQEPVRSEEGRDMANRISAFGYLECSAKTKEGVREVFEMATRAGLQVRKNKRRRGCPIL

SEQ ID NO: 33422 - protein, 247 aa, Homo sapiens
LGGGRTASAPPRAAARGPGPAGRGSGLLSLDFISAPEPALSSCSLGTSAGWSPTMAAIRKKLVIVGDGACGKTCLLIVFSKDQFPEVYVPTVFENYIADIEVDGKQVELALWDTAGQEDYDRLRPLSYPDTDVILMCFSIDSPDSLENIPEKWTPEVKHFCPNVPIILVGNKKDLRQDEHTRRELAKMKQEPVRSEEGRDMANRISAFGYLECSAKTKEGVREVFEMATRAGLQVRKNKRRRGCPIL

SEQ ID NO: 33423 - protein, 315 aa, Homo sapiens
VLPPLARLLRSPGISPWLSPTWRGGRPWPPVPGLRRGPVAAALRGAGAGRAKGRPRPTLPLPGPPSPPRRWRRAGRGPGVSLSLRHRPRSWRRRSGSLDFISAPEPALSSCSLGTSAGWSPTMAAIRKKLVIVGDGACGKTCLLIVFSKDQFPEVYVPTVFENYIADIEVDGKQVELALWDTAGQEDYDRLRPLSYPDTDVILMCFSIDSPDSLENIPEKWTPEVKHFCPNVPIILVGNKKDLRQDEHTRRELAKMKQEPVRSEEGRDMANRISAFGYLECSAKTKEGVREVFEMATRAGLQVRKNKRRRGCPIL

SEQ ID NO: 33424 - protein, 292 aa, Homo sapiens
VLPPLARLLRSPGISPWLSPTWRGGRPWPPVPGLRRGPVAAALRGAGAGRAKGRPRPTLPLPGPPSPPRRWRRAGRGPGVSLSLRHRPRSWRRRSGSPTMAAIRKKLVIVGDGACGKTCLLIVFSKDQFPEVYVPTVFENYIADIEVDGKQVELALWDTAGQEDYDRLRPLSYPDTDVILMCFSIDSPDSLENIPEKWTPEVKHFCPNVPIILVGNKKDLRQDEHTRRELAKMKQEPVRSEEGRDMANRISAFGYLECSAKTKEGVREVFEMATRAGLQVRKNKRRRGCPIL

SEQ ID NO: 33425 - protein, 54 aa, Homo sapiens
MCFLMLPWGCALVCICLSGRVTLLLNMLDCPSLQNGPEKTSLLRCSTLLSKEQK

SEQ ID NO: 33426 - protein, 68 aa, Homo sapiens
LINSHLSLSLVFPLYFFLLILGICNSCPPNKPAESVQSNNSSSFLNFGFANRFSKPKGPRNPPPTWNI

SEQ ID NO: 33427 - protein, 121 aa, Homo sapiens
LCSCTLACIVVVVQTFRDLVWLCPQCTEAVCQALPGCEENIQDSEGKQALIWLLGVHGERIPNAPYVLEDFVENVKSETFPAVKMELLTALLRLFLSRPAECQDMLGRLLYYCIGGFFRRK

SEQ ID NO: 33428 - protein, 1281 aa, Homo sapiens [sequence omitted]

SEQ ID NO: 33429 - protein, 1095 aa, Homo sapiens
LQSVLCDRPRESIQLHFRLSMASQLQVFSPPSVSSSAFCSAKKLKIEPSGWDVSGQSSNDKYYTHSKTLPATQGQANSSHQVANFNIPAYDQGLLLPAPAVEHIVVTAADSSGSAATSTFQSSQTLTHRSNVSLLEPYQKCGLKRKSEEVDSNGSVQIIEEHPPLMLQNRTVVGAAATTTTVTTKSSSSSGEGDYQLVQHEILCSMTNSYEVLEFLGRGTFGQVAKCWKRSTKEIVAIKILKNHPSYARQGQIEVSILSRLSSENADEYNFVRSYECFQHKNHTCLVFEMLEQNLYDFLKQNKFSPLPLKYIRPILQQVATALMKLKSLGLIHADLKPENIMLVDPVRQPYRVKVIDFGSASHVSKAVCSTYLQSRYYRAPEIILGLPFCEAIDMWSLGCVIAELFLGWPLYPGASEYDQIRYISQTQGLPAEYLLSAGTKTTRFFNRDPNLGYPLWRLKTPEEHELETGIKSKEARKYIFNCLDDMAQVNMSTDLEGTDMLAEKADRREYIDLLKKMLTIDADKRITPLKTLNHQFVTMTHLLDFPHSNHVKSCFQNMEICKRRVHMYDTVSQIKSPFTTHVAPNTSTNLTMSFSNQLNTVHNQASVLASSSTAAAATLSLANSDVSLLNYQSALYPSSAAPVPGVAQQGVSLQPGTTQICTQTDPFQQTFIVCPPAFQTGLQATTKHSGFPVRMDNAVPIVPQAPAAQPLQIQSGVLTQGSCTPLMVATLHPQVATITPQYAVPFTLSCAAGRPALVEQTAAVLQAWPGGTQQILLPSTWQQLPGVALHNSVQPTAMIPEAMGSGQQLADWRNAHSHGNQYSTIMQQPSLLTNHVTLATAQPLNVGVAHVVRQQQSSSLPSKKNKQSAPVSSKSSLDVLPSQVYSLVGSSPLRTTSSYNSLVPVQDQHQPIIIPDTPSPPVSVITIRSDTDEEEDNKYKPSSSGLKPRSNVISYVTVNDSPDSDSSLSSPYSTDTLSALRGNSGSVLEGPGRVVADGTGTRTIIVPPLKTQLGDCTVATQASGLLSNKTKPVASVSGQSSGCCITPTGYRAQRGGTSAAQPLNLSQVSAMGYCLLFGPCTVVTFWRTLLLAGC

SEQ ID NO: 33430 - protein, 1185 aa, Homo sapiens
LQSVLCDRPRESIQLHFRLSMASQLQVFSPPSVSSSAFCSAKKLKIEPSGWDVSGQSSNDKYYTHSKTLPATQGQANSSHQVANFNIPAYDQGLLLPAPAVEHIVVTAADSSGSAATSTFQSSQTLTHRSNVSLLEPYQKCGLKRKSEEVDSNGSVQIIEEHPPLMLQNRTVVGAAATTTTVTTKSSSSSGEGDYQLVQHEILCSMTNSYEVLEFLGRGTFGQVAKCWKRSTKEIVAIKILKNHPSYARQGQIEVSILSRLSSENADEYNFVRSYECFQHKNHTCLVFEMLEQNLYDFLKQNKFSPLPLKYIRPILQQVATALMKLKSLGLIHADLKPENIMLVDPVRQPYRVKVIDFGSASHVSKAVCSTYLQSRYYRAPEIILGLPFCEAIDMWSLGCVIAELFLGWPLYPGASEYDQIRYISQTQGLPAEYLLSAGTKTTRFFNRDPNLGYPLWRLKTPEEHELETGIKSKEARKYIFNCLDDMAQVNMSTDLEGTDMLAEKADRREYIDLLKKMLTIDADKRITPLKTLNHQFVTMTHLLDFPHSNHVKSCFQNMEICKRRVHMYDTVSQIKSPFTTHVAPNTSTNLTMSFSNQLNTVHNQASVLASSSTAAAATLSLANSDVSLLNYQSALYPSSAAPVPGVAQQGVSLQPGTTQICTQTDPFQQTFIVCPPAFQTGLQATTKHSGFPVRMDNAVPIVPQAPAAQPLQIQSGVLTQQAWPGGTQQILLPSTWQQLPGVALHNSVQPTAMIPEAMGSGQQLADWRNAHSHGNQYSTIMQQPSLLTNHVTLATAQPLNVGVAHVVRQQQSSSLPSKKNKQSAPVSSKSSLDVLPSQVYSLVGSSPLRTTSSYNSLVPVQDQHQPIIIPDTPSPPVSVITIRSDTDEEEDNKYKPSSSGLKPRSNVISYVTVNDSPDSDSSLSSPYSTDTLSALRGNSGSVLEGPGRVVADGTGTRTIIVPPLKTQLGDCTVATQASGLLSNKTKPVASVSGQSSGCCITPTGYRAQRGGTSAAQPLNLSQNQQSSAAPTSQERSSNPAPRRQQAFVAPLSQAPYTFQHGSPLHSTGHPHLAPAPAHLPSQAHLYTYAAPTSAAALGSTSSIAHLFSPQGSSRHAAAYTTHPSTLVHQVPVSVGPSLLTSASVAPAQYQHQFATQSYIGSSRGSTIYTGYPLSPTKISQYSYL

SEQ ID NO: 33431 - protein, 135 aa, Homo sapiens
MGPSTPLLILFLLSWSGPLQGQQHHLVEYMERRLAALEERLAQCQDQSSRHAAELRDFKNKMLPLLEVAEKEREALRTEADTISGRVDRLEREVDYLETQNPALPCVEFDEKVTGGPGTKGKGRRNEKYDMVTGK

SEQ ID NO: 33432 - protein, 317 aa, Homo sapiens [sequence omitted]

SEQ ID NO: 33433 - protein, 54 aa, Homo sapiens
LLKRILVYLKILLFPQIKCLASCHKLHIPFGFFKGYMFKSENKMFCLKATMPDL

SEQ ID NO: 33434 - protein, 9 aa, Homo sapiens
LLLPQLSVV

SEQ ID NO: 33435 - protein, 28 aa, Homo sapiens
VGWGVTLLQLVSMVQNFMQMRSASSVII

SEQ ID NO: 33436 - protein, 141 aa, Homo sapiens
MSCTIEKILTDAKTLLERLREHDAAAESLVDQSAALHRRVAAMREAGTALPDQYQEDASDMKDMSKYKPHILLSQENTQIRDLQQENRELWISLEEHQDALELIMSKYRKQMLQLMVAKKAVDAEPVLKAHQSHSAVRNFE

SEQ ID NO: 33437 - protein, 12 aa, Homo sapiens
LSPAGAGVVLLL

SEQ ID NO: 33438 - protein, 217 aa, Homo sapiens
LPLPALVARAWGLGIPPPGRSMGRFRGGLRCIKYLLLGFNLLFWLAGSAVIAFGLWFRFGGAIKELSSEDKSPEYFYVGLYVLVGAGALMMAVGFFGCCGAMRESQCVLGSAIRHVQTMYEEAYNDYLKDRGKGNGTLITFHSTFQCCGKESSEQVQPTCPKELLGHKNCIDEIETIISVKLQLIGIVGIGIAGLTIFGMIFSMVLCCAIRNSRDVI

SEQ ID NO: 33439 - protein, 214 aa, Homo sapiens
MADNSFSDGVPSDFVEAAKNASKTEKLTDQVMQNPGVLAALQERLDNAPHTPSSYIETLPKAVKRRINALKQIQVRCAHIEAKFYEEVHDLERKYAALYQPLFDERREFITGDVEPTSDMESEWHRENEEEEKLAGDRKNKVVITEKAAATAEEPNPKGIPEFWFTIFRNVDMLSELVQEYDEPILKYLQDIKVKFSDPGQPMSFILRVPLSTQ

SEQ ID NO: 33440 - protein, 1222 aa, Homo sapiens
LCLLEAADMKCFFPVLSCLAVLGVVSAQRQVTVQEGPLYRTEGSHITIWCNVSGYQGPSEQNFQWSIYLPSSPEREVQIVSTMDSSFPYAIYTQRVRGGKIFIERVQGNSTLLHITDLQARDAGEYECHTPSTDKQYFGSYSAKMNLVVIPDSLQTTAMPQTLHRVEQDPLELTCEVASETIQHSHLSVAWLRQKVGEKPVEVISLSRDFMLHSSSEYAQRQSLGEVRLDKLGRTTFRLTIFHLQPSDQGEFYCEAAEWIQDPDGSWYAMTRKRSEGAVVNVQPTDKEFTVRLETEKRLHTVGEPVEFRCILEAQNVPDRYFAVSWAFNSSLIATMGPNAVPVLNSEFAHREARGQLKVAKESDSVFVLKIYHLRQEDSGKYNCRVTEREKTVTGEFIDKESKRPKNIPIIVLPLTDNWVVKVPQHHQLLSQGHLESSISVEVASNASVILEGEDLRFSCSVRTAGRPQGRFSVIWQLVDRQNRRSNIMWLDRDGTVQPGSSYWERSSFGGVQMEQVQPNSFSLGIFNSRKEDEGQYECHVTEWVRAVDGEWQIVGERRASTPISITALEMGFAVTAISRTPGVTYSDSFDLQCIIKPHYPAWVPVSVTWRFQPVGTVEFHDLVTFTRDGGVQWGDRSSSFRTRTAIEKAESSNNVRLSISRASDTEAGKYQCVAELWRKNYNNTWTRLAERTSNLLEIRVLQPVTKLQVSKSKRTLTLVENKPIQLNCSVKSQTSQNSHFAVLWYVHKPSDADGKLILKTTHNSAFEYGTYAEEEGLRARLQFERHVSGGLFSLTVQRAEVSDSGSYYCHVEEWLLSPNYAWYKLAEEVSGRTEVTVKQPDSRLRLSQAQGNLSVLETRQVQLECVVLNRTSITSQLMVEWFVWKPNHPERETVARLSRDATFHYGEQAAKNNLKGRLHLESPSPGVYRLFIQNVAVQDSGTYSCHVEEWLPSPSGMWYKRAEDTAGQTALTVMRPDASLQVDTVVPNATVSEKAAFQLDCSIVSRSSQDSRFAVAWYSLRTKAGGKRSSPGLEEQEEEREEEEEEDDDDDDDPTERTALLSVGPDAVFGPEGSPWEGRLRFQRLSPVLYRLTVLQASPQDTGNYSCHVEEWLPSPQKEWYRLTEEESAPIGIRVLDTSPTLQSIICSNDALFYFVFFYPFPIFGILIITILLVRFKSRNSSKNSDGKNGVPLLWIKEPHLNYSPTCLEPPVLSIHPGAID

SEQ ID NO: 33441 - protein, 35 aa, Homo sapiens
MSPVSLSGRKTTFEHLTEVQEWKNPPCSFSAVWLA

SEQ ID NO: 33442 - protein, 59 aa, Homo sapiens
LILLFFFFFLCVPIGMGLQCIMSQPSKDPYYSATLENATGSMTYPHLSKIDTNMSCPKH

SEQ ID NO: 33443 - protein, 71 aa, Homo sapiens
VVDPFSKKDWYDVKALAMFNIRNTGKMLVTRTQGIKIASDGFEGCVLEVSLTDLQNDEVAFRKFKLITEDV

SEQ ID NO: 33444 - protein, 53 aa, Homo sapiens
MEPLSTHSLQGSRRVSLRRKCDDGNRGWKMEEDPESRNADGVLLCCPGWSAVD

SEQ ID NO: 33445 - protein, 22 aa, Homo sapiens
LVTRATFNSGKVDIIAIDDPFI

SEQ ID NO: 33446 - protein, 43 aa, Homo sapiens [sequence omitted]

SEQ ID NO: 33447 - protein, 136 aa, Homo sapiens
LGSGSWRILPSYSSAPGRTAASWLRYFYSQRPIPRPTPAMAFANLRKVLISDSLDPCCRKILQDGGLQVVEKQNLSKEELIAELQDCEGLIVRSATKVTADVINAAEKLQVVGRAGTGVDNVDLEAATRKGILVMK

SEQ ID NO: 33448 - protein, 204 aa, Homo sapiens
LGSGSWRILPSYSSAPGRTAASWLRYFYSQRPIPRPTPAMAFANLRKVLISDSLDPCCRKILQDGGLQVVEKQNLSKEELIAELQDCEGLIVRSATKVTADVINAAEKLQVVGRAGTGVDNVDLEAATRKGILVMNTPNGNSLSAAELTCGMIMCLARPETFRDQEITFPMARPAFPPAGGGSGGIYLCSNSSLQFPSELSGIH

SEQ ID NO: 33449 - protein, 572 aa, Homo sapiens
LGSGSWRILPSYSSAPGRTAASWLRYFYSQRPIPRPTPAMAFANLRKVLISDSLDPCCRKILQDGGLQVVEKQNLSKEELIAELQDCEGLIVRSATKVTADVINAAEKLQVVGRAGTGVDNVDLEAATRKGILVMNTPNGNSLSAAELTCGMIMCLARQIPQATASMKDGKWERKKFMGTELNGKTLGILGLGRIGREVATRMQSFGMKTIGYDPIISPEVSASFGVQQLPLEEIWPLCDFITVHTPLLPSTTGLLNDNTFAQCKKGVRVVNCARGGIVDEGALLRALQSGQCAGAALDVFTEEPPRDRALVDHENVISCPHLGASTKEAQSRCGEEIAVQFVDMVKGKSLTGVVNAQALTSAFSPHTKPWIGLAEALGTLMRAWAGSPKGTIQVITQGTSLKNAGNCLSPAVIVGLLKEASKQADVNLVNAKLLVKEAGLNVTTSHSPAAPGEQGFGECLLAVALAGAPYQAVGLVQGTTPVLQGLNGAVFRPEVPLRRDLPLLLFRTQTSDPAMLPTMIGLLAEAGVRLLSYQTSLVSDGETWHVMGISSLLPSLEAWKQHVTEAFQFHF

SEQ ID NO: 33450 - protein, 175 aa, Homo sapiens
LDCAADQPENLAEGTLVIVVLMPPEQLLQDARSFLRALGTLLHTNLRIKRDSQGELMVYPYYGEKSAAMKKQRMTRRSLPGEQEQEVAGSKVFLEIDNRQCVQDSDHCFKNTDAAAALLASHAIQGTLSYPLVSVVSEWHWCKGERWRGKSVNWGNNFHYVALYFFRTVEVKVAL

SEQ ID NO: 33451 - protein, 7 aa, Homo sapiens
LSLILWL

SEQ ID NO: 33452 - protein, 103 aa, Homo sapiens
LHRVALPVEAVGEKKEGGGGGDAAATEGGTGAAASRALQQCGQLQKLIVIFIGSLCGLCTKCAVSNDLTQQEIQTLEANTTSWKNAMDNPLVREHLKWYFAIF

SEQ ID NO: 33453 - protein, 73 aa, Homo sapiens
LVAGKSWAKVHLMFDENGKTICEPYPSMAEGIIGWRDLPSAGDEILEVEPELRACEVLTGGSMNKNRRKVNRI

SEQ ID NO: 33454 - protein, 28 aa, Homo sapiens
LGRKKLLPFALEIRGQGFSFSQAASPPG

SEQ ID NO: 33455 - protein, 172 aa, Homo sapiens
LNEQSPTRCTLEAGAMTFHYIIEQGVCDLVLCEAAFPKTLAFAYLEDLHSEFDEQHGKKVPTVSRPYSFIEFDTFIQKTKKLYIDSCARRNLGSINTELQDVQRIMVANIEEVLQRGEALSALDSKANNLSSLSKKYRQDAKYLNMHSTYAKLAAVAVFFIMLIVYVRFWWL

SEQ ID NO: 33456 - protein, 20 aa, Homo sapiens
LMRIIISVLKMGKQSQQEAK

SEQ ID NO: 33457 - protein, 10 aa, Homo sapiens
LALLDLIGAR

SEQ ID NO: 33458 - protein, 68 aa, Homo sapiens
MCQWTLPLYLCTTSCWMFPLPPLCLPHQPRSSFGPYPSLYTYLQISAYTLISELYSPVCSYSFVAYPE

SEQ ID NO: 33459 - protein, 310 aa, Homo sapiens
MNGLSLSELCCLFCCPPCPGRIAAKLAFLPPEATYSLVPEPELGPGGAGAAPLGTLRASSGAPGRWKLHLTERADFQYSQRELDTIEVFPTKSARGNRVSCMYVRCVPGARYTVLFSHGNAVDLGQMSSFYIGLGSRLHCNIFTYDSSGYGASSGRPSERNLYADIDATWQALRTRYGISPDSIILYGQSIGTVPTMDLASRYECAAVVLHSPLTSGMRVAFRDTKKTYCFDAFPNIEKVSKITSPVLIIHGREDEVIDFSHGLALYERCPKAVEPLWVEGAGHNDIELYSQYLERLRRFISQELPSQRA

SEQ ID NO: 33460 - protein, 461 aa, Homo sapiens
MCLRRPALFPGVALLLAAARLAAASDVLGLRDDNLESRISDTGSAGLMLVEFFAPWCGHCKRLAPEYEAAATRLKGIVPLAKADCTANTNTCNKYGVSGYPTLNMFRDGEEAGAYDGPRTADGIVSHLKKQAGPASVPLRTEEEFKKFISDKDASIVGFFDDSFSEAHSEFLKAASNLRDNYRFAHTNVESLVNEYDDNGDGIILFRPSHLTNKLEDKTVAYTVQKMTSGKIKKFIQENIFGICPHMTEDNKDLIQGKDLLIAYYDVDYEKNAKGSNYWRNRVMMVAKKFLDAGHKLNFAVASRKTFSHELSDFGLESTAGEIPVVAIRTAKGEKFVMQEDFSRDGNALERFLQDYFDGNLKRYLKSEPIPESNDGPVKVVVAENFDEIVNNENKDVLIEFYAPWCGHCKNLEPKYKELGEKLSKDLNIVIAKMDATANDVPSPYEVRVFLPYTSLQPTRS

SEQ ID NO: 33461 - protein, 238 aa, Homo sapiens [sequence omitted]

SEQ ID NO: 33462 - protein, 87 aa, Homo sapiens
LSLALGTVSMTGLTAYFGLLDICGVKGGETVMVNAAAGAVGSVLGQITKLKGCKVVGAVGSDEKTACLKKLGSDVFNYKTVESLKKL

SEQ ID NO: 33463 - protein, 65 aa, Homo sapiens
MGCADPCQMRFQVLRAALRSSRSTYYWSCNRRTETRGLLWGRGELENVWIYLKTNYSFNQQVCFF

SEQ ID NO: 33464 - protein, 30 aa, Homo sapiens
LLFHCTVDVLILRLTQMGEIWLHNNSGELR

SEQ ID NO: 33465 - protein, 172 aa, Homo sapiens [sequence omitted]

SEQ ID NO: 33466 - protein, 19 aa, Homo sapiens
MITKVVFSGRGLSVMFRVY

SEQ ID NO: 33467 - protein, 340 aa, Homo sapiens [sequence omitted]

SEQ ID NO: 33468 - protein, 210 aa, Homo sapiens
MWFLTTLLLWVPVDGQVDTTKAVITLQPPWVSVFQEETVTLHCEVLHLPGSSSTQWFLNGTATQTSTPSYRITSASVNDSGEYRCQRGLSGRSDPIQLEIHRGWPLLQVSSRVFTEGEPLALRCHAWKDKLVYNVLYYRNGKAFKFFHWNSNLTILKTNISHNGTYHCSGKGKHHYTSAGISQYTVKELFPAPVLNASVTSPLLGGIWSP

SEQ ID NO: 33469 - protein, 136 aa, Homo sapiens
VTTIAVMSGRGKQGGKARAKAKSRSSRAGLQFPVGRVHRLLRKGNYAERVGAGAPVYMAAVLEYLTAEILELAGNAARDNKKTRIIPRHLQLAIRNDEELNKLLGKVTIAQGGVLPNIQAVLLPKKTESHHKAKGK

SEQ ID NO: 33470 - protein, 11 aa, Homo sapiens
LALSGNRSGRG

SEQ ID NO: 33471 - protein, 434 aa, Homo sapiens
LLGDGGISFAMAAGPISERNQDATVYVGGLDEKVSEPLLWELFLQAGPVVNTHMPKDRVTGQHQGYGFVEFLSEEDADYAIKIMNMIKLYGKPIRVNKASAHNKNLDVGANIFIGNLDPEIDEKLLYDTFSAFGVILQTPKIMRDPDTGNSKGYAFINFASFDASDAAIEAMNGQYLCNRPITVSYAFKKDSKGERHGSAAERLLAAQNPLSQADRPHQLFADAPPPPSAPNPVVSSLGSGLPPPGMPPPGSFPPPVPPPGALPPGIPPAMPPPPMPPGAAGHGPPSAGTPGAGHPGHGHSHPHPFPPGGMPHPGMSQMQLAHHGPHGLGHPHAGPPGSGGQPPPRPPPGMPHPGPPPMGMPPRGPPFGSPMGHPGPMPPHGMRGPPPLMPPHGYTGPPRPPPYGYQRGPLPPPRPTPRPPVPPRGPLRGPLPQ

SEQ ID NO: 33472 - protein, 192 aa, Homo sapiens
LSLDVGGLCVTILFLASSVQLNSYTQVYTPGYSQPPAGNSFNLQLSVWDWDLRYSNAQILQFQNPGYDPEHCPDSWLPRPQPSFMVPGPPSSVWLFSRGALTPLNQLCPWRDSPSLLAVSSRWLPRPAISSESLADQEWGLPSHWGACPLPPGLLLPGYLGPQIRLWRRCYLRGRPEVQVRRENRLGVGQGT

SEQ ID NO: 33473 - protein, 39 aa, Homo sapiens
LWEPGWKLLSVCTQECCQAGKSRSGLDGTSGAVLFLCRA

SEQ ID NO: 33474 - protein, 394 aa, Homo sapiens
VSPEPPPERGSLPPGERSPAASKPPSSPSGPQDGNQQPAPPEKVGWVRKFCGKGIFREIWKNRYVVLKGDQLYISEKEVKDEKNIQEVFDLSDYEKCEELRKSKSRSKKNHSKFTLAHSKQPGNTAPNLIFLAVSPEEKESWINALNSAITRAKNRILDEASTSTSDGMLTLDLIQEEDPSPEEPTSCAESFRVDLDKSVAQLAGSRRRADSDRIQPSADRASSLSRPWEKTDKGATYTPQAPKKLTPTEKGRCASLEEILSQRDAASARTLQLRAEEPPTPALPNPGQLSRIQDLVARKLEETQELLAEVQGLGDGKRKAKDPPRSPPDSESEQLLLETERLLGEASSNWSQAKRVLQEVRELRDLYRQMDLQTPDSHLRQTTPHSQYRKSLM

SEQ ID NO: 33475 - protein, 73 aa, Homo sapiens
LLLMAGLISVPFSLVPDLGGKEGSACLGTGITGTNGFNLLNHQHPSSPQGEVEGAVVSWPLQSCSATGGVRLP

SEQ ID NO: 33476 - protein, 99 aa, Homo sapiens
LRGPTSECPVVSCPRMGTTARAALVLTYLAVASAASEGGFTATGQRQLRPEHFQEVGYAAPPSPPLSRSLPMDHPDSSQHGPPFEGQSQGKVTIPCPPQ

SEQ ID NO: 33477 - protein, 582 aa, Homo sapiens
LRGPTSECPVVSCPRMGTTARAALVLTYLAVASAASEGGFTATGQRQLRPEHFQEVGYAAPPSPPLSRSLPMDHPDSSQHGPPFEGQSGKEGRGPRPHSQPWLGERVGCSHIPPSIVQPPPSQEATPLQQEKLLPAQLPAEKEVGPPLPQEAVPLQKELPSLQHPNEQKEGTPAPFGDQSHPEPESWNAAQHCQQDRSQGGWGHRLDGFPPGRPSPDNLNQICLPNRQHVVYGPWNLPQSSYSHLTRQGETLNFLEIGYSRCCHCRSHTNRLECAKLVWEEAMSRFCEAEFSVKTRPHWCCTRQGEARFSCFQEEAPQPHYQLRACPSHQPDISSGLELPFPPGVPTLDNIKNICHLRRFRSVPRNLPATDPLQRELLALIQLEREFQRCCRQGNNHTCTWKAWEDTLDKYCDREYAVKTHHHLCCRHPPSPTRDECFARRAPYPNYDRDILTIDIGRVTPNLMGHLCGNQRVLTKHKHIPGLIHNMTARCCDLPFPEQACCAEEEKLTFINDLCGPRRNIWRDPALCCYLSPGDEQVNCFNINYLRNVALVSGDTENAKGQGEQGSTGGTNISSTSEPKEE

SEQ ID NO: 33478 - protein, 555 aa, Homo sapiens
LRGPTSECPVVSCPRMGTTARAALVLTYLAVASAASEGGFTATGQRQLRPEHFQEVGYAAPPSPPLSRSLPMDHPDSSQHGPPFEGQSQVQPPPSQEATPLQQEKLLPAQLPAEKEVGPPLPQEAVPLQKELPSLQHPNEQKEGTPAPFGDQSHPEPESWNAAQHCQQDRSQGGWGHRLDGFPPGRPSPDNLNQICLPNRQHVVYGPWNLPQSSYSHLTRQGETLNFLEIGYSRCCHCRSHTNRLECAKLVWEEAMSRFCEAEFSVKTRPHWCCTRQGEARFSCFQEEAPQPHYQLRACPSHQPDISSGLELPFPPGVPTLDNIKNICHLRRFRSVPRNLPATDPLQRELLALIQLEREFQRCCRQGNNHTCTWKAWEDTLDKYCDREYAVKTHHHLCCRHPPSPTRDECFARRAPYPNYDRDILTIDIGRVTPNLMGHLCGNQRVLTKHKHIPGLIHNMTARCCDLPFPEQACCAEEEKLTFINDLCGPRRNIWRDPALCCYLSPGDEQVNCFNINYLRNVALVSGDTENAKGQGEQGSTGGTNISSTSEPKEE

SEQ ID NO: 33479 - protein, 430 aa, Homo sapiens
LRGPTSECPVVSCPRMGTTARAALVLTYLAVASAASEGGFTATGQRQLRPEHFQEVGYAAPPSPPLSRSLPMDHPDSSQHGPPFEGQSQVQPPPSQEATPLQQEKLLPAQLPAEKEVGPPLPQEAVPLQKELPSLQHPNEQKEGTPAPFGDQSHPEPESWNAAQHCQQDRSQGGWGHRLDGFPPGRPSPDNLNQICLPNRQHVVYGPWNLPQSSYSHLTRQGETLNFLEIGYSRCCHCRSHTNRLECAKLVWEDTLDKYCDREYAVKTHHHLCCRHPPSPTRDECFARRAPYPNYDRDILTIDIGRVTPNLMGHLCGNQRVLTKHKHIPGLIHNMTARCCDLPFPEQACCAEEEKLTFINDLCGPRRNIWRDPALCCYLSPGDEQVNCFNINYLRNVALVSGDTENAKGQGEQGSTGGTNISSTSEPKEE

SEQ ID NO: 33480 - protein, 124 aa, Homo sapiens
MSPLPTVFPIPGTPAPFGDQSHPEPESWNAAQHCQQDRSQGGWGHRLDGFPPGRPSPDNLNQICLPNRQHVVYGPWNLPQSSYSHLTRQGETLNFLEIGYSRCCHCRSHTNRLECAKLVVRLGS

SEQ ID NO: 33481 - protein, 18 aa, Homo sapiens
VLLLGLLVTHTGLSLVCQ

SEQ ID NO: 33482 - protein, 49 aa, Homo sapiens
MTVSLSTVQGKLFLSLISFPSILLRKSKCSGLLYLLYFGLVSMILTLLA

SEQ ID NO: 33483 - protein, 22 aa, Homo sapiens
VGDMEEYELGLGVGKNIPDYPS

SEQ ID NO: 33484 - protein, 76 aa, Homo sapiens
VRMTTLTHRARRTEISKNSEKKMESEEDSNWEKSPDNEDSGDSKDIRLTLMEEVLLLGLKDKEVMQLGLLGYLKDY

SEQ ID NO: 33485 - protein, 197 aa, Homo sapiens
LDHHWHLWKKTYGKQYKEKNEEAVRRLIWEKNLKFVMLHNLEHSMGMHSYDLGMNHLGDMTSEEVMSLMSSLRVPSQWQRNITYKSNPNRILPDSVDWREKGCVTEVKYQGSCGACWAFSAVGALEAQLKLKTGKLVSLSAQNLVDCSTEKYGNKGCNGGFMTTAFQYIIDNKGIDSDASYPYKAMVSTMNHPVLRM

SEQ ID NO: 33486 - protein, 44 aa, Homo sapiens
LVLLLLMKARNLPPLLVTLLHPKPGLGKSLRLVNTFSAPQPSPF

SEQ ID NO: 33487 - protein, 34 aa, Homo sapiens
VDSAGREEKRGGGEGERERGSGENKAISVSFPGT

SEQ ID NO: 33488 - protein, 49 aa, Homo sapiens
LAGSVEAWPAASRTRRDSVLLSHPGWSAVIIAHRILELLGLSYPPALAS

SEQ ID NO: 33489 - protein, 26 aa, Homo sapiens
LAGSVEAWPAASRTRRCLWWTWERGC

SEQ ID NO: 33490 - protein, 45 aa, Homo sapiens
LAGSVEAWPAASRTRSYLKTFVPMHKDVFGGLGKEVARSSKKRPR

SEQ ID NO: 33491 - protein, 67 aa, Homo sapiens
LAVTPAIPQRWLRGQEREGLFPLPSNGRIWKGESRPGLSHVLQMGCVKQLGFFQGRVIFSPGQELRS

SEQ ID NO: 33492 - protein, 41 aa, Homo sapiens
VVRKDGEGAFAPLGLFMPRFFFRCGLVWAQGPSSQLKLTLL

SEQ ID NO: 33493 - protein, 108 aa, Homo sapiens
VKPSPSKKFRSGSSFSRRAGSSGNSCITYQPSVSGEHKAQVTTKAEVEPGVHLGRPDVLPQTPPLEEISEGSPIPDPSFSPLVGETLQMLTTSTTLEKLEVAESEFTH

SEQ ID NO: 33494 - protein, 18 aa, Homo sapiens
LPSRGPSLHLLLIWLFFS

SEQ ID NO: 33495 - protein, 328 aa, Homo sapiens
VIAPSRAPSWCCPVSSPLASMWWTWALSPGPQSCTRHVIEPKDIHAKCELAFLHTSHCLASGEVMISSLGDVKGNGKGLYGSHLYVWDWQRHEIVQTLSLKDGLIPLEIRFLHNPDAAQGFVGCALSSTIQRFYKNEGGTWSVEKVIQVPPKKVKGWLLPEMPGLITDILLSLDDRFLYFSNWLHGDLRQYDISDPQRPRLTGQLFLGGSIVKGGPVQVLEDEELKSQPEPLVVKGKRVAGGPQMIQLSLDGKRLYITTSLYSAWDKQFYPDLIREGSVMLQVDVDTVKGGLKLNPNFLVDFGKEPLGPALAHELRYPGGDCSSDIWI

SEQ ID NO: 33496 - protein, 96 aa, Homo sapiens
LPSLLPAFYRAGPREEIVYLPCIYRNTGTEAPDYLATVDVDPKSPQYCQVRRGLGASYFETIAALIPGPGPPLPSSILLGPPWGCLCTLNLGQGEC

SEQ ID NO: 33497 - protein, 55 aa, Homo sapiens
VSLLCLSYIVSILFFSGIKLACTSCTFVTSVGDAMAKHLVFNPSHRSSSILPRGK

SEQ ID NO: 33498 - protein, 83 aa, Homo sapiens
LLPLLLPLPRRSPLPLLAVNTAFDFLTVPWLHPGLRAPVSHHSQAPGHSKLGRRSTSTYSRHCSPLEDIVLQAGARAISIFLQ

SEQ ID NO: 33499 - protein, 47 aa, Homo sapiens
MLRVLHQLIDAMSPVQARLPALPGQRYLPPALHDDRALAARKATHHL

SEQ ID NO: 33500 - protein, 159 aa, Homo sapiens
LRQENRLNPGGGGCDPKLMKEEQMSQAQLFTRSFDDGLGFEYVMFYNDIEKRMVCLFQGGPYLEGPPGFIHGGAIATMIDATVGMCAMMAGGIVMTANLNINYKRPIPLCSVVMINSQLDKVEGRKFFVSCNVQSVDEKTLYSEATSLFIKLNPAKSLT

SEQ ID NO: 33501 - protein, 198 aa, Homo sapiens
LSGAGEASARRVRERGQGVGRAPGVGGVGGRKRGRRQGWGSALPSARQAPPAPAPPPSTHPPHVLRKAHSPPRSPLRPASSSPSSPSVRRASAKASTDHTKMPSQMEHAMETMMFTFHKFAGDKGYLTKEDLRVLMEKEFPGFLENQKDPLAVDKIMKDLDQCRDGKVGFQSFFSLIAGLTIACNDYFVVHMKQKGKK

SEQ ID NO: 33502 - protein, 113 aa, Homo sapiens
LASGVDEKQAKISSPTETERCIESLIAVFQKYAGKDGYNYTLSKTEFLSFMNTELAAFTKNQKDPGVLDRMMKKLDTNSDGQLDFSEFLNLIGGLAMACHDSFLKAVPSQKRT

SEQ ID NO: 33503 - protein, 83 aa, Homo sapiens
LSLTCLLLVHLSIAHLHHARINALLCNHTHPASRSIHPRASNITRIHQDHETTRSSGSSYSQDSIIFPSAVVGGCIFPNLCLA

SEQ ID NO: 33504 - protein, 126 aa, Homo sapiens
LCGSSALTECKTMTCKMSQLERNIETIINTFHQYSVKLGHPDTLNQGEFKELVRKDLQNFLKKENKNEKVIEHIMEDLDTNADKQLSFEEFIMLMARLTWASHEKMHEGDEGPGHHHKPGLGEGTP

SEQ ID NO: 33505 - protein, 127 aa, Homo sapiens
LAKPNRYKKELPLSPACLLSAVFQKTWWGKSVGIMLTELEKALNSIIDVYHKYSLIKGNFHAVYRDDLKKLLETECPQYIRKKGADVWFKELDINTDGAVNFQEFLILVIKMGVAAHKKSHEESHKE

SEQ ID NO: 33506 - protein, 74 aa, Homo sapiens
LVSGTVWVGPALWASLGEGQGSGAAFLREERESSGRSGAKILLEVGSEAGIRKESILQHLPVGKGTLSPRLDFS

SEQ ID NO: 33507 - protein, 113 aa, Homo sapiens
VTLPSSGFLKAKMSNTQAERSIIGMIDMFHKYTRRDDKIEKPSLLTMMKENFPNFLSACDKKGTNYLADVFEKKDKNEDKKIDFSEFLSLLGDIATDYHKQSHGAAPCSGGSQ

SEQ ID NO: 33508 - protein, 101 aa, Homo sapiens
VLCQLQAQPSAMACPLDQAIGLLVAIFHKYSGREGDKHTLSKKELKELIQKELTIGSKLQDAEIARLMEDLDRNKDQEVNFQEYVTFLGALALIYNEALKG

SEQ ID NO: 33509 - protein, 139 aa, Homo sapiens
VGLAELASGAPTAIRPVGLRHSPSPRPLASHLAASLPALCCQLQAQPSAMACPLDQAIGLLVAIFHKYSGREGDKHTLSKKELKELIQKELTIGSKLQDAEIARLMEDLDRNKDQEVNFQEYVTFLGALALIYNEALKG

SEQ ID NO: 33510 - protein, 134 aa, Homo sapiens
VGLAELASGAPTAIRPVGLRHSPSPRPLASHLAASLPLQAQPSAMACPLDQAIGLLVAIFHKYSGREGDKHTLSKKELKELIQKELTIGSKLQDAEIARLMEDLDRNKDQEVNFQEYVTFLGALALIYNEALKG

SEQ ID NO: 33511 - protein, 78 aa, Homo sapiens
LAASLPLQAQPSAMACPLDQAIGLLVAIFHKYSGREGDKHTLSKKELKELIQKELTIGSVSGLLPRTPFPTLVLWKQD

SEQ ID NO: 33512 - protein, 108 aa, Homo sapiens
VLILTAVMACPLEKALDVMVSTFHKYSGKEGDKFKLNKSELKELLTRELPSFLGKRTDEAAFQKLMSNLDSNRDNEVDFQEYCVFLSCIAMMCNEFFEGFPDKQPRKK

SEQ ID NO: 33513 - protein, 12 aa, Homo sapiens
MWACTRCCYSTC

SEQ ID NO: 33514 - protein, 114 aa, Homo sapiens
LSHCLGIWAWNLGHRSMMCSSLEQALAVLVTTFHKYSCQEGDKFKLSKGEMKELLHKELPSFVGEKVDEEGLKKLMGSLDENSDQQVDFQEYAVFLALITVMCNDFFQGCPDRP

SEQ ID NO: 33515 - protein, 119 aa, Homo sapiens
LGLAPALGPASRRSREMSDCYTELEKAVIVLVENFYKYVSKYSLVKNKISKSSFREMLQKELNHMLSDTGNRKAADKLIQNLDANHDGRISFDEYWTLIGGITGPIAKLIHEQEQQSSS

SEQ ID NO: 33516 - protein, 150 aa, Homo sapiens
LWWGLTEQPFLPNLTVACSGPYGGCDPVLSISFHQDPPGPASRRSREMSDCYTELEKAVIVLVENFYKYVSKYSLVKNKISKSSFREMLQKELNHMLSDTGNRKAADKLIQNLDANHDGRISFDEYWTLIGGITGPIAKLIHEQEQQSSS

SEQ ID NO: 33517 - protein, 122 aa, Homo sapiens
LLERRQTEAAGPASRRSREMSDCYTELEKAVIVLVENFYKYVSKYSLVKNKISKSSFREMLQKELNHMLSDTGNRKAADKLIQNLDANHDGRISFDEYWTLIGGITGPIAKLIHEQEQQSSS

SEQ ID NO: 33518 - protein, 72 aa, Homo sapiens
LLERRQTEAAGPASRRSREMSDCYTELEKAVIVLVENFYKYVSKYSLVKNKISKSSFREMLQKELNHMLSHC

SEQ ID NO: 33519 - protein, 107 aa, Homo sapiens
VGTMGQCRSANAEDAQEFSDVERAIETLIKNFHQYSVEGGKETLTPSELRDLVTQQLPHLMPSNCGLEEKIANLGSCNDSKLEFRSFWELIGEAAKSVKLERPVRGH

SEQ ID NO: 33520 - protein, 29 aa, Homo sapiens
MGGWLDAGRQLLLGVQNKMAATSSACLTG

SEQ ID NO: 33521 - protein, 42 aa, Homo sapiens
VVAAPGGALASVSFDSRDSKMAAQSAPKVVLKSTTKMSLNER

SEQ ID NO: 33522 - protein, 96 aa, Homo sapiens
VVAAPGGALASVSFDSRDSKMAAQSAPKVVLKSTTKMSLNERFTNMLKNKQPTPVNIRASMQQQQQLASARNRRLAQQMENRPSVQAALKLKQVGV

SEQ ID NO: 33523 - protein, 269 aa, Homo sapiens
VVAAPGGALASVSFDSRDSKMAAQSAPKVVLKSTTKMSLNERFTNMLKNKQPTPVNIRASMQQQQQLASARNRRLAQQMENRPSVQAALKLKQKSLKQRLGKSNIQARLGRPIGALARGAIGGRGLPIIQRGLPRGGLRGGRATRTLLRGGMSLRGQNLLRGGRAVAPRMGLRRGGVRGRGGPGRGGLGRGAMGRGGIGGRGRGMIGRGRGGFGGRGRGRGRGRGALARPVLTKEQLDNQLDAYMSKTKGHLDAELDAYMAQTDPETND

SEQ ID NO: 33524 - protein, 268 aa, Homo sapiens
VVAAPGGALASVSFDSRDSKMAAQSAPKVVLKSTTKMSLNERFTNMLKNKQPTPVNIRASMQQQQQLASARNRRLAQQMENRPSVQAALKLKQSLKQRLGKSNIQARLGRPIGALARGAIGGRGLPIIQRGLPRGGLRGGRATRTLLRGGMSLRGQNLLRGGRAVAPRMGLRRGGVRGRGGPGRGGLGRGAMGRGGIGGRGRGMIGRGRGGFGGRGRGRGRGRGALARPVLTKEQLDNQLDAYMSKTKGHLDAELDAYMAQTDPETND

SEQ ID NO: 33525 - protein, 222 aa, Homo sapiens
VVAAPGGALASVSFDSRDSKMAAQSAPKVVLKSTTKMSLNERFTNMLKNKQPTPVNIRASMQQQQQLASARNRRLAQQMENRPSVQAALKLKQSLKQRLGKSNIQARLGRPIGALARGAIGGRGLPIIQRGLPRGGLRGGRATRTLLRGGMSLRGRGMIGRGRGGFGGRGRGRGRGRGALARPVLTKEQLDNQLDAYMSKTKGHLDAELDAYMAQTDPETND

SEQ ID NO: 33526 - protein, 117 aa, Homo sapiens
LVPPLYRGQGPRWRGPQAATFSPKGCWSSCDPLCSSSTLTYTPSELCRINEDQKVALDLDPYVKKLLNARRRVVLVNNILQNAQERLRRLNHSVAKETARRRAMLDSGIYPPGSPGK

SEQ ID NO: 33527 - protein, 43 aa, Homo sapiens
MRGDRGRGRGGRFGSRGGPGGGFRPFVPHIPFDFYLLFTSGLV

SEQ ID NO: 33528 - protein, 17 aa, Homo sapiens
MAASVWCGETLVLPVLP

SEQ ID NO: 33529 - protein, 72 aa, Homo sapiens [sequence omitted]

SEQ ID NO: 33530 - protein, 37 aa, Homo sapiens
LNCAMLLFWGLGRLASHLPTLWEDGVDQAVFEVREAP

SEQ ID NO: 33531 - protein, 32 aa, Homo sapiens
VQMSPYDNLLLCQPVSSPLPLRYVIRLWGGEL

SEQ ID NO: 33532 - protein, 120 aa, Homo sapiens
MGPQFFLFFFFILIFGDRVSLCCPGWSAVVRSRFHAAPDLPGSGDSPASAPRAARTTGASHCVRPAGLICQAGIGFRQPKGRGKRQNMNRREAGRKLRETLSSQVACSARSRSRSLIAPN

SEQ ID NO: 33533 - protein, 236 aa, Homo sapiens
LAWAPCRSVCQPSSPAYQCRALPTPPPAPPVSAMAKAYDHLFKLLLIGDSGVGKTCLIIRFAEDNFNNTYISTIGIDFKIRTVDIEGKKIKLQVWDTAGQERFKTITTAYYRGAMGIILVYDITDEKSFENIQNWMKSIKENASAGVERLLLGNKCDMEAKRKVQKEQADKLAREHGIRFFETSAKSSMNVDEAFSSLARDILLKSGGRRSGNGNKPPSTDLKTCDKKNTNKCSLG

SEQ ID NO: 33534 - protein, 233 aa, Homo sapiens
MPRQEGCLNPGVGGQPGRHRETLSLKQINLKKKSGVCFGHFANLLGNLRARVDINCSPVGTFWALINKVSAECICICASLLHSRLPDITYHDHGGVLFPFFEFFFFVLLLVFLLCSFLTFLPPHNLACAIPVTITNSRCREMDEQIRLMDQNLKCLSAAEEKYSQKEDKYEEEIKILTDKLKEAETRAEFAERSVAKLEKTIDDLEDKLKCTKEEHLCTQRMLDQTLLDLNEM

SEQ ID NO: 33535 - protein, 207 aa, Homo sapiens
LRGAEAEVASLNRRIQLVEEELDRAQERLATALQKLEEAEKAADESERGMKVIENRALKDEEKMELQEIQLKEAKHIAEEADRKYEEVARKLVIIEGDLERTEERAELAESKCSELEEELKNVTNNLKSLEAQAEKYSQKEDKYEEEIKILTDKLKEAETRAEFAERSVAKLEKTIDDLEDKLKCTKEEHLCTQRMLDQTLLDLNEM

SEQ ID NO: 33536 - protein, 235 aa, Homo sapiens
VGTMAGITTIEAVKRKIQVLQQQADDAEERAERLQREVEGERRAREQAEAEVASLNRRIQLVEEELDRAQERLATALQKLEEAEKAADEEKMELQEIQLKEAKHIAEEADRKYEEVARKLVIIEGDLERTEERAELAESRCREMDEQIRLMDQNLKCLSAAEEKYSQKEDKYEEEIKILTDKLKEAETRAEFAERSVAKLEKTIDDLEDKLKCTKEEHLCTQRMLDQTLLDLNEM

SEQ ID NO: 33537 - protein, 86 aa, Homo sapiens
VYAKHSLIPFWMAMKQPAMGQGVKARIGSSQRHHQSAAKDLTQSPEVSPTTIQVTYLPSSQKSKRAKHFLELKSFKDNYNTLESTL

SEQ ID NO: 33538 - protein, 65 aa, Homo sapiens
LKFLPVHLSPFFLWTLSLLLLHLSALPDLDSQVSQEGLGPVLQPQPKSYFKSISVTKITKPDGVS

SEQ ID NO: 33539 - protein, 121 aa, Homo sapiens
LKFLPVHLSPFFLWTLSLLLLHLSALPDLDSQVSQEGLGPVLQPQPKSYFKSISVTKITKPDGIVEERRTVVDSEGRTETTVTRHEADSSPRGDPESPRPPALDDAFSILDLFLGRWFRSR

SEQ ID NO: 33540 - protein, 83 aa, Homo sapiens
LVWVSLFALAMPTDRNRRAQWRPPALSPAISKGVAAGLESGSHCGCPLPLCGTHRPENNQRGTVSCQPKTGRLQKVLGSDRRV

SEQ ID NO: 33541 - protein, 746 aa, Homo sapiens
LVQVAATAASGTSATMASCPDSDNSWVLAGSESLPVETLGPASRMDPESERALQAPHSPSKTDGKELAGTMDGEGTLFQTESPQSGSILTEETEVKGTLEGDVCGVEPPGPGDTVVQGDLQETTVVTGLGPDTQDLEGQSPPQSLPSTPKAAWIREEGRCSSSDDDTDVDMEGLRRRRGREAGPPQPMVPLAVENQAGGEGAGGELGISLNMCLLGALVLLGLGVLLFSGGLSESETGPMEEVERQVLPDPEVLEAVGDRQDGLREQLQAPVPPDSVPSLQNMGLLLDKLAKENQDIRLLQAQLQAQKEELQSLMHQPKGLEEENAQLRGALQQGEAFQRALESELQQLRARLQGLEADCVRGPDGVCLSGGRGPQGDKAIREQGPREQEPELSFLKQKEQLEAEAQALRQELERQRRLLGSVQQDLERSLQDASRGDPAHAGLAELGHRLAQKLQGLENWGQDPGVSANASKAWHQKSHFQNSREWSGKEKWWDGQRDRKAEHWKHKKEESGRERKKNWGGQEDREPAGRWKEGRPRVEESGSKKEGKRQGPKEPPRKSGSFHSSGEKQKQPRWREGTKDSHDPLPSWAELLRPKYRAPQGCSGVDECARQEGLTFFGTELAPVRQQELASLLRTYLARLPWAGQLTKELPLSPAFFGEDGIFRHDRLRFRDFVDALEDSLEEVAVQQTGDDDEVDDFEDFIFSHFFGDKALKKRSGKKDKHSQSPRAAGPREGHSHSHHHHHRG

SEQ ID NO: 33542 - protein, 36 aa, Homo sapiens
LLFQGDFFDVWLLVLVSTGFPSPWGRNSGSWEQKRN

SEQ ID NO: 33543 - protein, 621 aa, Homo sapiens
LGHRGPTRLRAWGYPLPGPLAQTGRGARLGSSPSFTSTMDLLPPKPKYNPLRNESLSSLEEGASGSTPPEELPSPSASSLGPILPPLPGDDSPTTLCSFFPRMSNLRLANPAGGRPGSKGEPGRAADDGEGIVGAAMPDSGPLPLLQDMNKLSGGGGRRTRVEGGQLGGEEWTRHGSFVNKPTRGWLHPNDKVMGPGVSYLVRYMGCVEVLQSMRALDFNTRTQVTREAISLVCEAVPGAKGATRRRKPCSRPLSSILGRSNLKFAGMPITLTVSTSSLNLMAADCKQIIANHHMQSISFASGGDPDTAEYVAYVAKDPVNQRACHILECPEGLAQDVISTIGQAFELRFKQYLRNPPKLVTPHDRMAGFDGSAWDEEEEEPPDHQYYNDFPGKEPPLGGVVDMRLREGAAPGAARPTAPNAQTPSHLGATLPVGQPVGGDPEVRKQMPPPPPCPGRELFDDPSYVNVQNLDKARQAVGGAGPPNPAINGSAPRDLFDMKPFEDALRVPPPPQSVSMAEQLRGEPWFHGKLSRREAEALLQLNGDFLVRESTTTPGQYVLTGLQSGQPKHLLLVDPEGVVRTKDHRFESVSHLISYHMDNHLPIISAGSELCLQQPVERKL

SEQ ID NO: 33544 - protein, 622 aa, Homo sapiens
LGHRGPTRLRAWGYPLPGPLAQTGRGARLGSSPSFTSTMDLLPPKPKYNPLRNESLSSLEEGASGSTPPEELPSPSASSLGPILPPLPGDDSPTTLCSFFPRMSNLRLANPAGGRPGSKGEPGRAADDGEGIVGAAMPDSGPLPLLQDMNKLSGGGGRRTRVEGGQLGGEEWTRHGSFVNKPTRGWLHPNDKVMGPGVSYLVRYMGCVEVLQSMRALDFNTRTQVTREAISLVCEAVPGAKGATRRRKPCSRPLSSILGRSNLKFAGMPITLTVSTSSLNLMAADCKQIIANHHMQSISFASGGDPDTAEYVAYVAKDPVNQRACHILECPEGLAQDVISTIGQAFELRFKQYLRNPPKLVTPHDRMAGFDGSAWDEEEEEPPDHQYYNDFPGKEPPLGGVVDMRLREGAAPGAARPTAPNAQTPSHLGATLPVGQPVGGDPEVRKQMPPPPPCPAGRELFDDPSYVNVQNLDKARQAVGGAGPPNPAINGSAPRDLFDMKPFEDALRVPPPPQSVSMAEQLRGEPWFHGKLSRREAEALLQLNGDFLVRESTTTPGQYVLTGLQSGQPKHLLLVDPEGVVRTKDHRFESVSHLISYHMDNHLPIISAGSELCLQQPVERKL

SEQ ID NO: 33545 - protein, 61 aa, Homo sapiens
LGHRGPTRLRAWGYPLPGPLAQTGRGARLGSSPSFTSTMDLLPPKPKYNPLRNESLYPGEE

SEQ ID NO: 33546 - protein, 218 aa, Homo sapiens
VKRRPARSSAPSFPVNKMPCGTEEQQAESEKAPREPLEPQVLQDDLPISLKKVLQTSLPEPLRIKLELDGDSHILELLQNRELVPGRPTLVWYQPDGTRVVSEGHTLENCCYQGRVRGYAGSWVSICTCSGLRGLVVLTPERSYTLEQGPGDLQGPPIISRIQDLHLPGHTCALSWRESVHTQKPPEHPLGQRHIRRSRSGCLLVSPAQLLAASGRFA

SEQ ID NO: 33547 - protein, 98 aa, Homo sapiens
LFRTCCPRPARSAAAMRLALLWALGLLGAGSPLPSWPLPNIGGTEEQQAESEKAPREPLEPQVLQDDLPISLKKVLQGVGPRPPNPGVVPARWHSGGQ

SEQ ID NO: 33548 - protein, 144 aa, Homo sapiens
LFRTCCPRPARSAAAMRLALLWALGLLGAGSPLPSWPLPNIGGTEEQQAESEKAPREPLEPQVLQDDLPISLKKVLQTSLPEPLRIKLELDGDSHILELLQNRELVPGRPTLVWYQPDGTRVVSEGHTLLGSSVPVLVCSLRQH

SEQ ID NO: 33549 - protein, 829 aa, Homo sapiens
LFRTCCPRPARSAAAMRLALLWALGLLGAGSPLPSWPLPNIGGTEEQQAESEKAPREPLEPQVLQDDLPISLKKVLQTSLPEPLRIKLELDGDSHILELLQNRELVPGRPTLVWYQPDGTRVVSEGHTLENCCYQGRVRGYAGSWVSICTCSGLRGLVVLTPERSYTLEQGPGDLQGPPIISRIQDLHLPGHTCALSWRESVHTQKPPEHPLGQRHIRRRRDVVTETKTVELVIVADHSEAQKYRDFQHLLNRTLEVALLLDTFFRPLNVRVALVGLEAWTQRDLVEISPNPAVTLENFLHWRRAHLLPRLPHDSAQLVTGTSFSGPTVGMAIQNSICSPDFSGGVNMDHSTSILGVASSIAHELGHSLGLDHDLPGNSCPCPGPAPAKTCIMEASTDFLPGLNFSNCSRRALEKALLDGMGSCLFERLPSLPPMAAFCGNMFVEPGEQCDCGFLDDCVDPCCDSLTCQLRPGAQCASDGPCCQNCQLRPSGWQCRPTRGDCDLPEFCPGDSSQCPPDVSLGDGEPCAGGQAVCMHGRCASYAQQCQSLWGPGAQPAAPLCLQTANTRGNAFGSCGRNPSGSYVSCTPRDAICGQLQCQTGRTQPLLGSIRDLLWETIDVNGTELNCSWVHLDLGSDVAQPLLTLPGTACGPGLVCIDHRCQRVDLLGAQECRSKCHGHGVCDSNRHCYCEEGWAPPDCTTQLKATSSLTTGLLLSLLVLLVLVMLGASYWYRARLHQRLCQLKGPTCQYRAAQSGPSERPGPPQRALLARGTKSQGPAKPPPPRKPLPADPQGRCPSGDLPGPGAGIPPLVVPSRPAPPPPTVSSLYL

SEQ ID NO: 33550 - protein, 535 aa, Homo sapiens
LFRTCCPRPARSAAAMRLALLWALGLLGAGSPLPSWPLPNIGGTEEQQAESEKAPREPLEPQVLQDDLPISLKKVLQTSLPEPLRIKLELDGDSHILELLQNRELVPGLNFSNCSRRALEKALLDGMGSCLFERLPSLPPMAAFCGNMFVEPGEQCDCGFLDDCVDPCCDSLTCQLRPGAQCASDGPCCQNCQLRPSGWQCRPTRGDCDLPEFCPGDSSQCPPDVSLGDGEPCAGGQAVCMHGRCASYAQQCQSLWGPGAQPAAPLCLQTANTRGNAFGSCGRNPSGSYVSCTPRDAICGQLQCQTGRTQPLLGSIRDLLWETIDVNGTELNCSWVHLDLGSDVAQPLLTLPGTACGPGLVCIDHRCQRVDLLGAQECRSKCHGHGVCDSNRHCYCEEGWAPPDCTTQLKATSSLTTGLLLSLLVLLVLVMLGASYWYRARLHQRLCQLKGPTCQYRAAQSGPSERPGPPQRALLARGTKSQGPAKPPPPRKPLPADPQGRCPSGDLPGPGAGIPPLVVPSRPAPPPPTVSSLYL

SEQ ID NO: 33551 - protein, 104 aa, Homo sapiens
LLPSPGPERRCHAAGAALGPGAPGRGQPSAFLAAPKYSLSMQCGSPSGGTEEQQAESEKAPREPLEPQVLQDDLPISLKKVLQGVGPRPPNPGVVPARWHSGGQ

SEQ ID NO: 33552 - protein, 145 aa, Homo sapiens
MRLALLWALGLLGAGSPLPSWPLPNIGGTEEQQAESEKAPREPLEPQVLQDDLPISLKKVLQTSLPEPLRIKLELDGDSHILELLQNRELVPGRPTLVWYQPDGTRVVSEGHTLENCCYQGRVRGYAGSWVSICTCSGLRYTGRI

SEQ ID NO: 33553 - protein, 204 aa, Homo sapiens
MRLALLWALGLLGAGSPLPSWPLPNIGGTEEQQAESEKAPREPLEPQVLQDDLPISLKKVLQTSLPEPLRIKLELDGDSHILELLQNRELVPGRPTLVWYQPDGTRVVSEGHTLENCCYQGRVRGYAGSWVSICTCSGLRGLVVLTPERSYTLEQGPGDLQGPPIISRIQDLHLPGHTCALSWRESVHTQKPPEHPLGQRHIRR

SEQ ID NO: 33554 - protein, 59 aa, Homo sapiens
LHWKCLRMKVFVCCASKDFEGENPQVPKLEKSISGTSPKREHLPLAVGIAFFLMTFLAS

SEQ ID NO: 33555 - protein, 301 aa, Homo sapiens
LRGQRSALRSFLHPQPPRLPTPPLLHLPSPQAPRQPRAGRGEGGAGCRAAPAQKAESLGEGARSVSPALTAPRRKPVGTQTHRRPASPLGLARPRAMEFLWAPLLGLCCSLAAADRHTVFWNSSNPKFRNEDYTIHVQLNDYVDIICPHYEDHSVADAAMEQYILYLVEHEEYQLCQPQSKDQVRWQCNRPSAKHGPEKLSEKFQRFTPFTLGKEFKEGHSYYYISKPIHQHEDRCLRLKVTVSGKITHSPQAHDNPQEKRLAADDPEVRVLHSIGHSAAPRLFPLAWTVLLLPLLLLQTP

SEQ ID NO: 33556 - protein, 220 aa, Homo sapiens
LTAPRRKPVGTQTHRRPASPLGLARPRAMEFLWAPLLGLCCSLAAADRHTVFWNSSNPKFRNEDYTIHVQLNDYVDIICPHYEDHSVADAAMEQYILYLVEHEEYQLCQPQSKDQVRWQCNRPSAKHGPEKLSEKFQRFTPFTLGKEFKEGHSYYYISKPIHQHEDRCLRLKVTVSGKISECQSPVGLLPPSLCWVRSSDLGWYRSLAAQPTHTYSPLPL

SEQ ID NO: 33557 - protein, 191 aa, Homo sapiens
VGAVPSWGPGGCAHLTRFRNEDYTIHVQLNDYVDIICPHYEDHSVADAAMEQYILYLVEHEEYQLCQPQSKDQVRWQCNRPSAKHGPEKLSEKFQRFTPFTLGKEFKEGHSYYYISKPIHQHEDRCLRLKVTVSGKITHSPQAHDNPQEKRLAADDPEVRVLHSIGHSAAPRLFPLAWTVLLLPLLLLQTP

SEQ ID NO: 33558 - protein, 192 aa, Homo sapiens
LAWLLNDHLLLPPVCVPRFRNEDYTIHVQLNDYVDIICPHYEDHSVADAAMEQYILYLVEHEEYQLCQPQSKDQVRWQCNRPSAKHGPEKLSEKFQRFTPFTLGKEFKEGHSYYYISKPIHQHEDRCLRLKVTVSGKITHSPQAHDNPQEKRLAADDPEVRVLHSIGHSAAPRLFPLAWTVLLLPLLLLQTP

SEQ ID NO: 33559 - protein, 125 aa, Homo sapiens
LARGAGWTHGRGMMVVGTGTSLALSSLLSLLLFAGMQMYSRQLASTEWLTIQGGLLGSGLFVFSLTEAPGWQMPTGAMTFLSSPYSFIFSMVGLYYINKISSTLYQAAAPVLTPAKVTGKSKKRN

SEQ ID NO: 33560 - protein, 162 aa, Homo sapiens
MRIANRTRFSSPFLARGAGWTHGRGMMVVGTGTSLALSSLLSLLLFAGMQMYSRQLASTEWLTIQGGLLGSGLFVFSLTAFNNLENLVFGKGFQAKIFPEILLCLLLALFASGLIHRVCVTTCFIFSMVGLYYINKISSTLYQAAAPVLTPAKVTGKSKKRN

SEQ ID NO: 33561 - protein, 35 aa, Homo sapiens
LLGSGLFVFSLTAFNNLENLVFGKGFQAKIFPENA

SEQ ID NO: 33562 - protein, 110 aa, Homo sapiens
MRIANRTRFSSPFLARGAGWTHGRGMMVVGTGTSLALSSLLSLLLFAGMQMYSRQLASTEWLTIQGGLLGSGLFVFSLTVSSLQLEGAGHVGMCPSPSPHSSVPVAHPTP

SEQ ID NO: 33563 - protein, 93 aa, Homo sapiens
LGAIWQLWAVVLGVLMPIPIANQKNRLVKVPNFVSPPRGQLARKSACFLSHPLVHTLPNTTPYLTFLLTSAAGNLSSPRPTSTSLPPYFTETS

SEQ ID NO: 33564 - protein, 55 aa, Homo sapiens
MEFLPWALITLWMSSGLLLILQPEVPESEGIWRGRDRCRCPQHPCPVTPCPEFAT

SEQ ID NO: 33565 - protein, 365 aa, Homo sapiens
LLRQGRGGQRAAEAAVANMAQSRDGGNPFAEPSELDNPFQDPAVIQHRPSRQYATLDVYNPFETREPPPAYEPPAPAPLPPPSAPSLQPSRKLSPTEPKNYGSYSTQASAAAATAELLKKQEELNRKAEELDRRERELQHAALGGTATRQNNWPPLPSFCPVQPCFFQDISMEIPQEFQKTVSTMYYLWMCSTLALLLNFLACLASFCVETNNGAGFGLSILWVLLFTPCSFVCWYRPMYKAFRSDSSFNFFVFFFIFFVQDVLFVLQAIGIPGWGFSGWISALVVPKGNTAVSVLMLLVALLFTGIAVLGIVMLKRIHSLYRRTGASFQKAQQEFAAGVFSNPAVRTAAANAAAGAAENAFRAP

SEQ ID NO: 33566 - protein, 339 aa, Homo sapiens
LLRQGRGGQRAAEAAVANMAQSRDGGNPFAEPSELDNPFQPPPAYEPPAPAPLPPPSAPSLQPSRKLSPTEPKNYGSYSTQASAAAATAELLKKQEELNRKAEELDRRERELQHAALGGTATRQNNWPPLPSFCPVQPCFFQDISMEIPQEFQKTVSTMYYLWMCSTLALLLNFLACLASFCVETNNGAGFGLSILWVLLFTPCSFVCWYRPMYKAFRSDSSFNFFVFFFIFFVQDVLFVLQAIGIPGWGFSGWISALVVPKGNTAVSVLMLLVALLFTGIAVLGIVMLKRIHSLYRRTGASFQKAQQEFAAGVFSNPAVRTAAANAAAGAAENAFRAP

SEQ ID NO: 33567 - protein, 193 aa, Homo sapiens
LLRQGRGGQRAAEAAVANMAQSRDGGNPFAEPSELDNPFQPPPAYEPPAPAPLPPPSAPSLQPSRKLSPTEPKNYGSYSTQASAAAATAELLKKQEELNRKAEELDRRERELQHAALGGTARHLHGDPPRISEDCIHHVLPLDVQHAGSSPELPRLPGQLLCGNQQWRRLWAFYPLGPPFHSLLLCLLVPPHV

SEQ ID NO: 33568 - protein, 569 aa, Homo sapiens
LGLMPLTTQQCGADPQRGRPREVCSGMEGPAGYLRRASVAQLTQELGTAFFQQQQLPAAMADTFLEHLCLLDIDSEPVAARSTSIIATIGPASRSVERLKEMIKAGMNIARLNFSHGSHEYHAESIANVREAVESFAGSPLSYRPVAIALDTKGPEIRTGILQGGPESEVELVKGSQVLVTVDPAFRTRGNANTVWVDYPNIVRVVPVGGRIYIDDGLISLVVQKIGPEGLVTQVENGGVLGSRKGVNLPGAQVDLPGLSEQDVRDLRFGVEHGVDIVFASFVRKASDVAAVRAALGPEGHGIKIISKIENHEGVKRFDEILEVSDGIMVARGDLGIEIPAEKVFLAQKMMIGRCNLAGKPVVCATQMLESMITKPRPTRAETSDVANAVLDGADCIMLSGETAKGNFPVEAVKMQHAIAREAEAAVYHRQLFEELRRAAPLSRDPTEVTAIGAVEAAFKCCAAAIIVLTTTGRSAQLLSRYRPRAAVIAVTRSAQAARQVHLCRGVFPLLYREPPEAIWADDVDRRVQFGIESGKLRGFLRVGDLVIVVTGWRPGSGYTNIMRVLSIS

SEQ ID NO: 33569 - protein, 149 aa, Homo sapiens
LLLGVPANKRDRAGIRIWEQVLEYNAIGGKYNRGLTVVVAFRELVEPRKQDADSLQRAWTVGWCVELLQAFFLVADDIMDSSLTRRGQICWYQKPGVGLDAINDANLLEACIYRLLKLYCREQPYYLNLIELFLQVYCRQGPMPRGCPW

SEQ ID NO: 33570 - protein, 326 aa, Homo sapiens
LLLGVPANKRDRAGIRIWEQVLEYNAIGGKYNRGLTVVVAFRELVEPRKQDADSLQRAWTVGWCVELLQAFFLVADDIMDSSLTRRGQICWYQKPGVGLDAINDANLLEACIYRLLKLYCREQPYYLNLIELFLQSSYQTEIGQTLDLLTAPQGNVDLVRFTEKRYKSIVKYKTAFYSFYLPIAAAMYMAGIDGEKEHANAKKILLEMGEFFQIQDDYLDLFGDPSVTGKIGTDIQDNKCSWLVVQCLQRATPEQYQILKENYGQKEAEKVARVKALYEELDLPAVFLQYEEDSYSHIMALIEQYAAPLPPAVFLGLARKIYKRRK

SEQ ID NO: 33571 - protein, 46 aa, Homo sapiens
LRILPVIVPKHIPQEGGALWAKAGVGVIWGAATMPLPLVLAPAGSA

SEQ ID NO: 33572 - protein, 198 aa, Homo sapiens
LEACIYRLLKLYCREQPYYLNLIELFLQSSYQTEIGQTLDLLTAPQGNVDLVRFTEKRYKSIVKYKTAFYSFYLPIAAAMYMAGIDGEKEHANAKKILLEMGEFFQIQDNKCSWLVVQCLQRATPEQYQILKENYGQKEAEKVARVKALYEELDLPAVFLQYEEDSYSHIMALIEQYAAPLPPAVFLGLARKIYKRRK

SEQ ID NO: 33573 - protein, 158 aa, Homo sapiens
LRRGGPVEQRSMAGGAREVLTLQLGHFAGFVGAHWWNQQDAALGRATDSKEPPGELCPDVLYRTGRTLHGQETYTPRLILMDLKGSLSSLKEEGGLYRDKQLDAAIAWQGKLTTHKEELYPKNPYLQDFLSAEVRASVLNFLTRCHNPRVSIGAGSAE

SEQ ID NO: 33574 - protein, 241 aa, Homo sapiens
LRRGGPVEQRSMAGGAREVLTLQLGHFAGFVGAHWWNQQDAALGRATDSKEPPGELCPDVLYRTGRTLHGQETYTPRLILMDLKGSLSSLKEEGGLYRDKQLDAAIAWQGKLTTHKEELYPKNPYLQDFLSAEGVLSSDGVWRVKSIPNGKGSSPLPTATTPKPLIPTEASIRVWSDFLRVHLHPRSICMIQKYNHDGYGDPRGFEGSRSAGGFWPRGKCPKGTQVPGRAGGQAAFLRGGM

SEQ ID NO: 33575 - protein, 449 aa, Homo sapiens
MGVLSSDGVWRVKSIPNGKGSSPLPTATTPKPLIPTEASIRVWSDFLRVHLHPRSICMIQKYNHDGEAGRLEAFGQGESVLKEPKYQEELEDRLHFYVEECDYLQGFQILCDLHDGFSGVGAKAAELLQDEYSGRGIITWGLLPGPYHRGEAQRNIYRLLNTAFGLVHLTAHSSLVCPLSLGGSLGLRPEPPVSFPYLHYDATLPFHCSAILATALDTVTVPYRLCSSPVSMVHLADMLSFCGKKVVTAGAIIPFPLAPGQSLPDSLMQFGGATPWTPLSACGEPSGTRCFAQSVVLRGIDRACHTSQLTPGTPPPSALHACTTGEEILAQYLQQQQPGVMSSSHLLLTPCRVAPPYPHLFSSCSPPGMVLDGSPKGAAVESIPVFGALCSSSSLHQTLEALARDLTKLDLRRWASFMDAGVEHDDVAELLQELQSLAQCYQGGDSLVD

SEQ ID NO: 33576 - protein, 131 aa, Homo sapiens
MKQLETLLRSLLLLLPHLRLLQKWRPAELHQVSHRACNKWGSWGLASKDTSKLLLLYDEDILEQDPLREQKDLAFAQVYLTFEEQQAFEKSRKFLRQLEICFAENPSHHQKIIKVLQGCADCLPQEITEGL

SEQ ID NO: 33577 - protein, 17 aa, Homo sapiens
LETGSLHFGLRLVAHRV

SEQ ID NO: 33578 - protein, 49 aa, Homo sapiens
LMEDLFETFQDEMGFSNMEDDGPEEEERVAEPQANFNTPQALRQLLLLM

SEQ ID NO: 33579 - protein, 75 aa, Homo sapiens
LGSSPRRCGSPPPPWDRGEGIEGGLAPLCRPVVGGRGGCALSRFLPDDPTLFCSLRTGALEPAPGSVCRSPSLEN

SEQ ID NO: 33580 - protein, 46 aa, Homo sapiens
LLYAGPSKMRKSGSTQEEEPGPCTYGIGQDCSWLWTCIKMGFTVNA

SEQ ID NO: 33581 - protein, 142 aa, Homo sapiens [sequence omitted]

SEQ ID NO: 33582 - protein, 13 aa, Homo sapiens
VILLSVFPQLLWI

SEQ ID NO: 33583 - protein, 9 aa, Homo sapiens
LLMLVLFFV

SEQ ID NO: 33584 - protein, 96 aa, Homo sapiens
MPTMRLLSFVVLALFAVTQAEEGARLLASKSLLNRYAVEGRDLTLQYNIYNVGSSAALDVELSDDSFPPEDFGIVSGMLNVKWDRIAPWTGQPLGS

SEQ ID NO: 33585 - protein, 163 aa, Homo sapiens
MPTMRLLSFVVLALFAVTQAEEGARLLASKSLLNRYAVEGRDLTLQYNIYNVGSSAALDVELSDDSFPPEDFGIVSGMLNVKWDRIAPASNVSHTVVLRPLKAGYFNFTSATITYLAQEDGPVVIGSTSAPGQGGILAQREFDRRFSPHFVSFLVFSLISSLV

SEQ ID NO: 33586 - protein, 136 aa, Homo sapiens
MPTMRLLSFVVLALFAVTQAEEGARLLASKSLLNRYAVEGRDLTLQYNIYNVGSSAALDVELSDDSFPPEDFGIVSGMLNVKWDRIAPASNVSHTVVLRPLKAGYFNFTSATITYLAQEDGPVVNQPQDSLVLPGS

SEQ ID NO: 33587 - protein, 90 aa, Homo sapiens
MPTMRLLSFVVLALFAVTQAEEGARLLASKSLLNRYAVEGRDLTLQYNIYNVGSSAALDVELSDDSFPPEDFGIVSGMLNVKWDRIAPQC

SEQ ID NO: 33588 - protein, 94 aa, Homo sapiens
MPTMRLLSFVVLALFAVTQAEEGARLLASKSLLNRYAVEGRDLTLQYNIYNVGSSAALDVELSDDSFPPEDFGIVSGMLNVKWDRIAPYPLGTW

SEQ ID NO: 33589 - protein, 93 aa, Homo sapiens
MPTMRLLSFVVLALFAVTQAEEGARLLASKSLLNRYAVEGRDLTLQYNIYNVGSSAALDVELSDDSFPPEDFGIVSGMLNVKWDRIAPYPLGT

SEQ ID NO: 33590 - protein, 86 aa, Homo sapiens [sequence omitted]

SEQ ID NO: 33591 - protein, 133 aa, Homo sapiens
VFAGAPHLHQPTQIPRSDSARPRSPRLPGASREPAGRRTPTPSSLCPSTRAPRPFRDPCPAGSAANLPAMETPSQRRATRSGAQASSTPLSPTRITRLQEKEDLQELNDRLAVYIDRVRSAELQGGRTEHCSQ

SEQ ID NO: 33592 - protein, 556 aa, Homo sapiens
VFAGAPHLHQPTQIPRSDSARPRSPRLPGASREPAGRRTPTPSSLCPSTRAPRPFRDPCPAGSAANLPAMETPSQRRATRSGAQASSTPLSPTRITRLQEKEDLQELNDRLAVYIDRVRSLETENAGLRLRITESEEVVSREVSGIKAAYEAELGDARKTLDSVAKERARLQLELSKVREEFKELKARNTKKEGDLIAAQARLKDLEALLNSKEAALSTALSEKRTLEGELHDLRGQVAKLEAALGEAKKQLQDEMLRRVDAENRLQTMKEELDFQKNIYSEELRETKRRHETRLVEIDNGKQREFESRLADALQELRAQHEDQVEQYKKELEKTYSAKLDNARQSAERNSNLVGAAHEELQQSRIRIDSLSAQLSQLQKQLAAKEAKLRDLEDSLARERDTSRRLLAEKEREMAEMRARMQQQLDEYQELLDIKLALDMEIHAYRKLLEGEEERLRLSPSPTSQRSRGRASSHSSQTQGGGSVTKKRKLESTESRSSFSQHARTSGNSLRTALINSTGEEVAMRKLVRSVTVVEDDEDEDGDDLLHHHHVSGSRR

SEQ ID NO: 33593 - protein, 703 aa, Homo sapiens
VFAGAPHLHQPTQIPRSDSARPRSPRLPGASREPAGRRTPTPSSLCPSTRAPRPFRDPCPAGSAANLPAMETPSQRRATRSGAQASSTPLSPTRITRLQEKEDLQELNDRLAVYIDRVRSLETENAGLRLRITESEEVVSREVSGIKAAYEAELGDARKTLDSVAKERARLQLELSKVREEFKELKARNTKKEGDLIAAQARLKDLEALLNSKEAALSTALSEKRTLEGELHDLRGQVAKLEAALGEAKKQLQDEMLRRVDAENRLQTMKEELDFQKNIYSEELRETKRRHETRLVEIDNGKQREFESRLADALQELRAQHEDQVEQYKKELEKTYSAKLDNARQSAERNSNLVGAAHEELQQSRIRIDSLSAQLSQLQKQLAAKEAKLRDLEDSLARERDTSRRLLAEKEREMAEMRARMQQQLDEYQELLDIKLALDMEIHAYRKLLEGEEERLRLSPSPTSQRSRGRASSHSSQTQGGGSVTKKRKLESTESRSSFSQHARTSGRVAVEEVDEEGKFVRLRNKSNEDQSMGNWQIKRQNGDDPLLTYRFPPKFTLKAGQVVTIWAAGAGATHSPPTDLVWKAQNTWGCGNSLRTALINSTGEGSHCSSSGDPAEYNLRSRTVLCGTCGQPADKASASGSGAQVGGPISSGSSASSVTVTRSYRSVGGSGGGSFGDNLVTRSYLLGNSSPRTQSPQNCSIM

SEQ ID NO: 33594 - protein, 733 aa, Homo sapiens
VFAGAPHLHQPTQIPRSDSARPRSPRLPGASREPAGRRTPTPSSLCPSTRAPRPFRDPCPAGSAANLPAMETPSQRRATRSGAQASSTPLSPTRITRLQEKEDLQELNDRLAVYIDRVRSLETENAGLRLRITESEEVVSREVSGIKAAYEAELGDARKTLDSVAKERARLQLELSKVREEFKELKARNTKKEGDLIAAQARLKDLEALLNSKEAALSTALSEKRTLEGELHDLRGQVAKLEAALGEAKKQLQDEMLRRVDAENRLQTMKEELDFQKNIYSEELRETKRRHETRLVEIDNGKQREFESRLADALQELRAQHEDQVEQYKKELEKTYSAKLDNARQSAERNSNLVGAAHEELQQSRIRIDSLSAQLSQLQKQLAAKEAKLRDLEDSLARERDTSRRLLAEKEREMAEMRARMQQQLDEYQELLDIKLALDMEIHAYRKLLEGEEERLRLSPSPTSQRSRGRASSHSSQTQGGGSVTKKRKLESTESRSSFSQHARTSGRVAVEEVDEEGKFVRLRNKSNEDQSMGNWQIKRQNGDDPLLTYRFPPKFTLKAGQVVTIWAAGAGATHSPPTDLVWKAQNTWGCGNSLRTALINSTGEEVAMRKLVRSVTVVEDDEDEDGDDLLHHHHGSHCSSSGDPAEYNLRSRTVLCGTCGQPADKASASGSGAQVGGPISSGSSASSVTVTRSYRSVGGSGGGSFGDNLVTRSYLLGNSSPRTQSPQNCSIM

SEQ ID NO: 33595 - protein, 657 aa, Homo sapiens
LPGASREPAGRRTPTPSSLCPSTRAPRPFRDPCPAGSAANLPAMETPSQRRATRSGAQASSTPLSPTRITRLQEKEDLQELNDRLAVYIDRVRSLETENAGLRLRITESEEVVSREVSGIKAAYEAELGDARKTLDSVAKERARLQLELSKVREEFKELKARNTKKEGDLIAAQARLKDLEALLNSKEAALSTALSEKRTLEGELHDLRGQVAKLEAALGEAKKQLQDEMLRRVDAENRLQTMKEELDFQKNIYSEELRETKRRHETRLVEIDNGKQREFESRLADALQELRAQHEDQVEQYKKELEKTYSAKLDNARQSAERNSNLVGAAHEELQQSRIRIDSLSAQLSQLQKQLAAKEAKLRDLEDSLARERDTSRRLLAEKEREMAEMRARMQQQLDEYQELLDIKLALDMEIHAYRKLLEGEEERLRLSPSPTSQRSRGRASSHSSQTQGGGSVTKKRKLESTESRSSFSQHARTSGRVAVEEVDEEGKFVRLRNKSNEDQSMGNWQIKRQNGDDPLLTYRFPPKFTLKAGQVVTIWAAGAGATHSPPTDLVWKAQNTWGCGNSLRTALINSTGEEVAMRKLVRSVTVVEDDEDEDGDDLLHHHHGSHCSSSGDPAEYNLRSRTVLCGTCGQPADKASASGSGAQSPQNCSIM

SEQ ID NO: 33596 - protein, 577 aa, Homo sapiens
LGHIWRLKAGAQMDLEAWDPHLEPDAEAMVDGNTKKEGDLIAAQARLKDLEALLNSKEAALSTALSEKRTLEGELHDLRGQVAKLEAALGEAKKQLQDEMLRRVDAENRLQTMKEELDFQKNIYSEELRETKRRHETRLVEIDNGKQREFESRLADALQELRAQHEDQVEQYKKELEKTYSAKLDNARQSAERNSNLVGAAHEELQQSRIRIDSLSAQLSQLQKQLAAKEAKLRDLEDSLARERDTSRRLLAEKEREMAEMRARMQQQLDEYQELLDIKLALDMEIHAYRKLLEGEEERLRLSPSPTSQRSRGRASSHSSQTQGGGSVTKKRKLESTESRSSFSQHARTSGRVAVEEVDEEGKFVRLRNKSNEDQSMGNWQIKRQNGDDPLLTYRFPPKFTLKAGQVVTIWAAGAGATHSPPTDLVWKAQNTWGCGNSLRTALINSTGEEVAMRKLVRSVTVVEDDEDEDGDDLLHHHHGSHCSSSGDPAEYNLRSRTVLCGTCGQPADKASASGSGAQVGGPISSGSSASSVTVTRSYRSVGGSGGGSFGDNLVTRSYLLGNSSPRTQSPQNCSIM

SEQ ID NO: 33597 - protein, 126 aa, Homo sapiens [sequence omitted]

SEQ ID NO: 33598 - protein, 248 aa, Homo sapiens
LPRPGEHTQATLPLPPLLSQESAACPPSPHHSLCLTPPTGDERRALSFFHQKGLQDFDTLLLSGDGNTLYVGAREAILALDIQDPGVPRLKNMIPWPASDRKKSECAFKKKSNETQCFNFIRVLVSYNVTHLYTCGTFAFSPACTFIVSSLVPSAQAPKHPFSHLPTTFLCSSGKLWPSRCRTLMNFLAPDQFPSMSLSLPSSSPSFPRCETLAFWPPSLSPHLGTSRFLPVAHLGGQGHGGKRPKPL

SEQ ID NO: 33599 - protein, 8 aa, Homo sapiens
MEPGESLK

SEQ ID NO: 33600 - protein, 512 aa, Homo sapiens
LHRVAMMGHRPVLVLSQNTKRESGRKVQSGNINAAKIQVQHPAAKSMIEISRTQDEEVGDGTTSVIILAGEMLSVAEHFLEQQMHPTVVISAYRKALDDMISTLKKISIPVDISDSDMMLNIINSSITTKAISRWSSLACNIALDAVKMVQFEENGRKEIDIKKYARVEKIPGGIIEDSCVLRGVMINKDVTHPRMRRYIKNPRIVLLDSSLEYKKGESQTDIEITREEDFTRILQMEEEYIQQLCEDIIQLKPDVVITEKGISDLAQHYLMRANITAIRRVRKTDNNRIARACGARIVSRPEELREDDVGTGAGLLEIKKIGDEYFTFITDCKDPKACTILLRGASKEILSEVERNLQDAMQVCRNVLLDPQLVPGGGASEMAVAHALTEKSKAMTGVEQWPYRAVAQALEVIPRTLIQNCGASTIRLLTSLRAKHTQENCETWGVNGETGTLVDMKELGIWEPLAVKLQTYKTAVETAVLLLRIDDIVSGHKKKGDDQSRQGGAPDAGQE

SEQ ID NO: 33601 - protein, 570 aa, Homo sapiens
LSGSLSPEGSAGSPSSGYPALHRVAMMGHRPVLVLSQNTKRESGRKVQSGNINAAKTIADIIRTCLGPKSMMKMLLDPMGGIVMTNDGNAILREIQVQHPAAKSMIEISRTQDEEVGDGTTSVIILAGEMLSVAEHFLEQQMHPTVVISAYRKALDDMISTLKKISIPVDISDSDMMLNIINSSITTKAISRWSSLACNIALDAVKMVQFEENGRKEIDIKKYARVEKIPGGIIEDSCVLRGVMINKDVTHPRMRRYIKNPRIVLLDSSLEYKKGESQTDIEITREEDFTRILQMEEEYIQQLCEDIIQLKPDVVITEKGISDLAQHYLMRANITAIRRVRKTDNNRIARACGARIVSRPEELREDDVGTGAGLLEIKKIGDEYFTFITDCKDPKACTILLRGASKEILSEVERNLQDAMQVCRNVLLDPQLVPGGGASEMAVAHALTEKSKAMTGVEQWPYRAVAQALEVIPRTLIQNCGASTIRLLTSLRAKHTQENCETWGVNGETGTLVDMKELGIWEPLAVKLQTYKTAVETAVLLLRIDDIVSGHKKKGDDQSRQGGAPDAGQE

SEQ ID NO: 33602 - protein, 193 aa, Homo sapiens
LSGSLSPEGSAGSPSSGYPALHRVAMMGHRPVLVLSQNTKRESGRKVQSGNINAAKTIADIIRTCLGPKSMMKMLLDPMGGIVMTNDGNAILREIQVQHPAAKSMIEISRTQDEEVGDGTTSVIILESHSVTMLECGGAILAHCNLCLPGSSDSPASASQVAGTIVTCHHAQLIFVFLVETGFHHVGQMVSIS

SEQ ID NO: 33603 - protein, 34 aa, Homo sapiens
LRRQRFLGFCLVLSLQKVLPVPPALGTRLCIASP

SEQ ID NO: 33604 - protein, 39 aa, Homo sapiens
LFSGVIVGGHLWLLGPKRRMYFIWLGWIPSDKPSQLTER

SEQ ID NO: 33605 - protein, 26 aa, Homo sapiens
LLLPWQLAAILYLRALAPIWIFPRGS

SEQ ID NO: 33606 - protein, 48 aa, Homo sapiens
LACKVFRKTRKSLHLLVLQAAQAIVESPPGVQNGASASCHSGPLKSPM

SEQ ID NO: 33607 - protein, 52 aa, Homo sapiens
LQVAPMQKRTGCMTGILHLLVLQAAQAIVESPPGVQNGASASCHSGPLKSPM

SEQ ID NO: 33608 - protein, 42 aa, Homo sapiens
MPKRDAKGPAFLSFFVLLPPALAPQPGPPPCWAEASERKRQG

SEQ ID NO: 33609 - protein, 91 aa, Homo sapiens
LACKVFRKTRKRWNRLLPLSEVVWREGLRDRAYLAVAGKPMGEKARGQPSARAQRPGDGHKESPEASGSHANWNGAWERPFCVPRPASPTP

SEQ ID NO: 33610 - protein, 168 aa, Homo sapiens
MPVTVPVSNQSSLQFSNPSGSLVTPSLVTSSLTDPRLLSPQQPALQRNSVSPGLPQRPASAGAMLGGDLNSANGACPSPVGNGYVSARASPGLLPVANGNSLNKVIPAKSPPPPTHSTQLGAPSRKPDLRVITSQAGKGLMHHLVSGCLGQGWGLGNGRVGTGERADL

SEQ ID NO: 33611 - protein, 74 aa, Homo sapiens
VLPKPLLPLWMLSLTLTHHCASLQTPRAQDWARPRDSHPFPSWEELACLATDSVSSNWLKWALPRVQLCGFYHA

SEQ ID NO: 33612 - protein, 142 aa, Homo sapiens
LVGTAAAELGWPLGLRGHGEHGGEVPEEEAQAVDQELFNEYQFSVDQLMELAGLSCATAIAKAYPPTSMSRSPPTVLVICGPGNNGGDGLVCARHLKLFGYEPTIYYPKRPNKPLFTALVTQCQKMDIPFLGEMPAEVGGSS

SEQ ID NO: 33613 - protein, 29 aa, Homo sapiens
LDPSGRPRSSITRITFFPRVYYRPPHVGQ

SEQ ID NO: 33614 - protein, 95 aa, Homo sapiens
VRSGSGGGGGGGVGGGGGGMRSPAPLAPWWYNAKVWEGRDKPELQPAGHLRLHFRKRRGVYGKGRELELGPPRCELSSAARFCGVTALLPRPTCL

SEQ ID NO: 33615 - protein, 182 aa, Homo sapiens
LDYLRYRSVWPLTLLALKSTACALAFTRMPGFQTPSEFLENPSQSSRLTAPFRKHVRPKKQHEIRRLGEGHLSRFMALGLGLMVKSIEGDQRLVERAQRLDQELLQALEKEEKRNPQICAAGATASGARSPAATESGCPSGPRGPGEPCGGLLQPGSTACPTGGDAYSTGPAAVPSGTGFPC

SEQ ID NO: 33616 - protein, 9 aa, Homo sapiens
MLHGVFRFP

SEQ ID NO: 33617 - protein, 307 aa, Homo sapiens
LPRSAPAPSVRRAGGDAVAAPELGPGATIEAGAARGPERSGAATAARANLGSRFPARRGARGARSPAMSRSNRQKEYKCGDLVFAKMKGYPHWPARIDEMPEAAVKSTANKYQVFFFGTHETAFLGPKDLFPYEESKEKFGKPNKRKGFSEGLWEIENNPTVKASGYQSSQKKSCVEEPEPEPEAAEGDGDKKGNAEGSSDEEGKLVIDEPAKEKNEKGALKRRAGDLLEDSPKRPKEAENPEGEEKEAATLEVERPLPMEVEKNSTPSEPGSGRGPPQEEEEEEDEEEEATKEDAEAPGIRDHESL

SEQ ID NO: 33618 - protein, 229 aa, Homo sapiens
LGVKGEEVDISFEPNNKQIDEMPEAAVKSTANKYQVFFFGTHETAFLGPKDLFPYEESKEKFGKPNKRKGFSEGLWEIENNPTVKASGYQSSQKKSCVEEPEPEPEAAEGDGDKKGNAEGSSDEEGKLVIDEPAKEKNEKGALKRRAGDLLEDSPKRPKEAENPEGEEKEAATLEVERPLPMEVEKNSTPSEPGSGRGPPQEEEEEEDEEEEATKEDAEAPGIRDHESL

SEQ ID NO: 33619 - protein, 816 aa, Homo sapiens
MSGEAWQLQLGAHRRLPRLSEAGAAAMLRGGRRGQLGWHSWAAGPGSLLAWLILASAGAAPCPDACCPHGSSGLRCTRDGALDSLHHLPGAENLTELYIENQQHLQHLELRDLRGLGELRNLTIVKSGLRFVAPDAFHFTPRLSRLNLSFNALESLSWKTVQGLSLQELVLSGNPLHCSCALRWLQRWEEEGLGGVPEQKLQCHGQGPLAHMPNASCGVPTLKVQVPNASVDVGDDVLLRCQVEGRGLEQAGWILTELEQSATVMKSGGLPSLGLTLANVTSDLNRKNVTCWAENDVGRAEVSVQVNVSFPASVQLHTAVEMHHWCIPFSVDGQPAPSLRWLFNGSVLNETSFIFTEFLEPAANETVRHGCLRLNQPTHVNNGNYTLLAANPFGQASASIMAAFMDNPFEFNPEDPIPDTNSTSGDPVEKKDETPFGVSVAVGLAVFACLFLSTLLLVLNKCGRRNKFGINRPAVLAPEDGLAMSLHFMTLGGSSLSPTEGKGSGLQGHIIENPQYFSDACVHHIKRRDIVLKWELGEGAFGKVFLAECHNLLPEQDKMLVAVKALKEASESARQDFQREAELLTMLQHQHIVRFFGVCTEGRPLLMVFEYMRHGDLNRFLRSHGPDAKLLAGGEDVAPGPLGLGQLLAVASQVAAGMVYLAGLHFVHRDLATRNCLVGQGLVVKIGDFGMSRDIYSTDYYRVGGRTMLPIRWMPPESILYRKFTTESDVWSFGVVLWEIFTYGKQPWYQLSNTEAIDCITQGRELERPRACPPEVYAIMRGCWQREPQQRHSIKDVHARLQALAQAPPVYLDVLG

SEQ ID NO: 33620 - protein, 807 aa, Homo sapiens
LPRLSEAGAAAMLRGGRRGQLGWHSWAAGPGSLLAWLILASAGAAPCPDACCPHGSSGLRCTRDGALDSLHHLPGAENLTELYIENQQHLQHLELRDLRGLGELRNLTIVKSGLRFVAPDAFHFTPRLSRLNLSFNALESLSWKTVQGLSLQELVLSGNPLHCSCALRWLQRWEEEGLGGVPEQKLQCHGQGPLAHMPNASCGVPTLKVQVPNASVDVGDDVLLRCQVEGRGLEQAGWILTELEQSATVMKSGGLPSLGLTLANVTSDLNRKNVTCWAENDVGRAEVSVQVNVSFPASVQLHTAVEMHHWCIPFSVDGQPAPSLRWLFNGSVLNETSFIFTEFLEPAANETVRHGCLRLNQPTHVNNGNYTLLAANPFGQASASIMAAFMDNPFEFNPEDPIPVSFSPVDTNSTSGDPVEKKDETPFGVSVAVGLAVFACLFLSTLLLVLNKCGRRNKFGINRPAVLAPEDGLAMSLHFMTLGGSSLSPTEGKGSGLQGHIIENPQYFSDACVHHIKRRDIVLKWELGEGAFGKVFLAECHNLLPEQDKMLVAVKALKEASESARQDFQREAELLTMLQHQHIVRFFGVCTEGRPLLMVFEYMRHGDLNRFLRSHGPDAKLLAGGEDVAPGPLGLGQLLAVASQVAAGMVYLAGLHFVHRDLATRNCLVGQGLVVKIGDFGMSRDIYSTDYYRVGGRTMLPIRWMPPESILYRKFTTESDVWSFGVVLWEIFTYGKQPWYQLSNTEAIDCITQGRELERPRACPPEVYAIMRGCWQREPQQRHSIKDVHARLQALAQAPPVYLDVLG

SEQ ID NO: 33621 - protein, 804 aa, Homo sapiens
LPRLSEAGAAAMLRGGRRGQLGWHSWAAGPGSLLAWLILASAGAAPCPDACCPHGSSGLRCTRDGALDSLHHLPGAENLTELYIENQQHLQHLELRDLRGLGELRNLTIVKSGLRFVAPDAFHFTPRLSRLNLSFNALESLSWKTVQGLSLQELVLSGNPLHCSCALRWLQRWEEEGLGGVPEQKLQCHGQGPLAHMPNASCGVPTLKVQVPNASVDVGDDVLLRCQVEGRGLEQAGWILTELEQSATVMKSGGLPSLGLTLANVTSDLNRKNVTCWAENDVGRAEVSVQVNVSFPASVQLHTAVEMHHWCIPFSVDGQPAPSLRWLFNGSVLNETSFIFTEFLEPAANETVRHGCLRLNQPTHVNNGNYTLLAANPFGQASASIMAAFMDNPFEFNPEDPIPDTNSTSGDPVEKKDETPFGVSVAVGLAVFACLFLSTLLLVLNKCGRRNKFGINRPAVLAPEDGLAMSLHFMTLGGSSLSPTEGKGSGLQGHIIENPQYFSDASPSGVHHIKRRDIVLKWELGEGAFGKVFLAECHNLLPEQDKMLVAVKALKEASESARQDFQREAELLTMLQHQHIVRFFGVCTEGRPLLMVFEYMRHGDLNRFLRSHGPDAKLLAGGEDVAPGPLGLGQLLAVASQVAAGMVYLAGLHFVHRDLATRNCLVGQGLVVKIGDFGMSRDIYSTDYYRVGGRTMLPIRWMPPESILYRKFTTESDVWSFGVVLWEIFTYGKQPWYQLSNTEAIDCITQGRELERPRACPPEVYAIMRGCWQREPQQRHSIKDVHARLQALAQAPPVYLDVLG

SEQ ID NO: 33622 - protein, 120 aa, Homo sapiens
MLRGGRRGQLGWHSWAAGPGSLLAWLILASAGAAPCPDACCPHGSSGLRCTRDGALDSLHHLPGAENLTELYIENQQHLQHLELRDLRGLGELRNLTIVKSGLRFVAPDAFHFTPRLSRL

SEQ ID NO: 33623 - protein, 1041 aa, Homo sapiens
LASAMSPPLCPLLLLAVGLRLAGTLNPSDPNTCSFWESFTTTTKESHSRPFSLLPSEPCERPWEGPHTCPQPTVVYRTVYRQVVKTDHRQRLQCCHGFYESRGFCVPLCAQECVHGRCVAPNQCQCVPGWRGDDCSSECAPGMWGPQCDKPCSCGNNSSCDPKSGVCSCPSGLQPPNCLQPCTPGYYGPACQFRCQCHGAPCDPQTGACFCPAERTGPSCDVSCSQGTSGFFCPSTHSCQNGGVFQTPQGSCSCPPGWMGTICSLPCPEGFHGPNCSQECRCHNGGLCDRFTGQCRCAPGYTGDRCREECPVGRFGQDCAETCDCAPDARCFPANGACLCEHGFTGDRCTDRLCPDGFYGLSCQAPCTCDREHSLSCHPMNGECSCLPGWAGLHCNESCPQDTHGPGCQEHCLCLHGGVCQATSGLCQCAPGYTGPHCASLCPPDTYGVNCSARCSCENAIACSPIDGECVCKEGWQRGNCSVPCPPGTWGFSCNASCQCAHEAVCSPQTGACTCTPGWHGAHCQLPCPKGQFGEGCASRCDCDHSDGCDPVHGRCQCQAGWMGARCHLSCPEGLWGVNCSNTCTCKNGGTCLPENGNCVCAPGFRGPSCQRSCQPGRYGKRCVPCKCANHSFCHPSNGTCYCLAGWTGPDCSQPCPPGHWGENCAQTCQCHHGGTCHPQDGSCICPLGWTGHHCLEGCPLGTFGANCSQPCQCGPGEKCHPETGACVCPPGHSGAPCRIGIQEPFTVMPTTPVAYNSLGAVIGIAVLGSLVVALVALFIGYRHWQKGKEHHHLAVAYSSGRLDGSEYVMPDVPPSYSHYYSNPSYHTLSQCSPNPPPPNKVPGPLFASLQNPERPGGAQGHDNHTTLPADWKHRREPPPGPLDRGSSRLDRSYSYSYSNGPGPFYNKGLISEEELGASVASLSSENPYATIRDLPSLPGGPRESSYMEMKGPPSGSPPRQPPQFWDSQRRRQPQPQRDSGTYEQPSPLIHDRDSVGSQPPLPPGLPPGHYDSPKNSHIPGHYDLPPVRHPPSPPLRRQDR

SEQ ID NO: 33624 - protein, 45 aa, Homo sapiens
LAPEPALHSLLPSYSLPPWTSHLHKMGIMGVSYPTYVPLFPTLSL

SEQ ID NO: 33625 - protein, 22 aa, Homo sapiens
LIFILFFFLVQLAHLRISKHLM

SEQ ID NO: 33626 - protein, 71 aa, Homo sapiens
LENLLARSYFDPREAYPDGSSKEKRRAAIAQALAGEVSVVPPSRLMALLGQALKWQQHQGLLPPGMTIDLF

SEQ ID NO: 33627 - protein, 70 aa, Homo sapiens
LCLFSLQLKMEPQSSSGLFACVASQHTSCLQNLPVKVSDPLWYGSRNLMFPSSLLEDDQSTSLKMQIRLF

SEQ ID NO: 33628 - protein, 765 aa, Homo sapiens
LVVQVFMLLWVILLVLAPVSGQFARTPRPIIFLQPPWTTVFQGERVTLTCKGFRFYSPQKTKWYHRYLGKEILRETPDNILEVQESGEYRCQAQGSPLSSPVHLDFSSASLILQAPLSVFEGDSVVLRCRAKAEVTLNNTIYKNDNVLAFLNKRTDFHIPHACLKDNGAYRCTGYKESCCPVSSNTVKIQVQEPFTRPVLRASSFQPISGNPVTLTCETQLSLERSDVPLRFRFFRDDQTLGLGWSLSPNFQITAMWSKDSGFYWCKAATMPYSVISDSPRSWIQVQIPASHPVLTLSPEKALNFEGTKVTLHCETQEDSLRTLYRFYHEGVPLRHKSVRCERGASISFSLTTENSGNYYCTADNGLGAKPSKAVSLSVTVPVSHPVLNLSSPEDLIFEGAKVTLHCEAQRGSLPILYQFHHEGAALERRSANSAGGVAISFSLTAEHSGNYYCTADNGFGPQRSKAVSLSVTVPVSHPVLTLSSAEALTFEGATVTLHCEVQRGSPQILYQFYHEDMPLWSSSTPSVGRVSFSFSLTEGHSGNYYCTADNGFGPQRSEVVSLFVTVPVSRPILTLRVPRAQAVVGDLLELHCEAPRGSPPILYWFYHEDVTLGSSSAPSGGEASFNLSLTAEHSGNYSCEANNGLVAQHSDTISLSVIVPVSRPILTFRAPRAQAVVGDLLELHCEALRGSSPILYWFYHEDVTLGKISAPSGGGASFNLSLTTEHSGIYSCEADNGLEAQRSEMVTLKVAGEWALPTSSTSEN

SEQ ID NO: 33629 - protein, 598 aa, Homo sapiens
LVVQVFMLLWVILLVLAPVSGQFARTPRPIIFLQPPWTTVFQGERVTLTCKGFRFYSPQKTKWYHRYLGKEILRETPDNILEVQESGEYRCQAQGSPLSSPVHLDFSSASLILQAPLSVFEGDSVVLRCRAKAEVTLNNTIYKNDNVLAFLNKRTDFHIPHACLKDNGAYRCTGYKESCCPVSSNTVKIQVQEPFTRPVLRASSFQPISGNPVTLTCETQLSLERSDVPLRFRFFRDDQTLGLGWSLSPNFQITAMWSKDSGFYWCKAATMPYSVISDSPRSWIQVQIPASHPVLTLSPEKALNFEGTKVTLHCETQEDSLRTLYRFYHEGVPLRHKSVRCERGASISFSLTTENSGNYYCTADNGLGAKPSKAVSLSVTVPVSHPVLNLSSPEDLIFEGAKVTLHCEAQRGSLPILYQFHHEGAALERRSANSAGGVAISFSLTAEHSGNYYCTADNGFGPQRSKAVSLSVTVPVSHPVLTLSSAEALTFEGATVTLHCEVQRGSPQILYQFYHEDMPLWSSSTPSVGRVSFSFSLTEGHSGNYYCTADNGFGPQRSEVVSLFVTGKCWVLASHPPLAEFSLTHSFKNLFALSSFLP

SEQ ID NO: 33630 - protein, 130 aa, Homo sapiens
LVVQVFMLLWVILLVLAPVSGQFARTPRPIIFLQPPWTTVFQGERVTLTCKGFRFYSPQKTKWYHRYLGKEILRETPDNILEVQESGEYRCQAQGSPLSSPVHLDFSSEMGFPHAAQANVELLGSSDLLT

SEQ ID NO: 33631 - protein, 744 aa, Homo sapiens
VPMLLWLLLLILTPGREQSGVAPKAVLLLNPPWSTAFKGEKVALICSSISHSLAQGDTYWYHDEKLLKIKHDKIQITEPGNYQCKTRGSSLSDAVHVEFSPDWLILQALHPVFEGDNVILRCQGKDNKNTHQKVYYKDGKQLPNSYNLEKITVNSVSRDNSKYHCTAYRKFYILDIEVTSKPLNIQVQELFLHPVLRASSSTPIEGSPMTLTCETQLSPQRPDVQLQFSLFRDSQTLGLGWSRSPRLQIPAMWTEDSGSYWCEVETVTHSIKKRSLRSQIRVQRVPVSNVNLEIRPTGGQLIEGENMVLICSVAQGSGTVTFSWHKEGRVRSLGRKTQRSLLAELHVLTVKESDAGRYYCAADNVHSPILSTWIRVTVRIPVSHPVLTFRAPRAHTVVGDLLELHCESLRGSPPILYRFYHEDVTLGNSSAPSGGGASFNLSLTAEHSGNYSCDADNGLGAQHSHGVSLRVTVPVSRPVLTLRAPGAQAVVGDLLELHCESLRGSFPILYWFYHEDDTLGNISAHSGGGASFNLSLTTEHSGNYSCEADNGLGAQHSKVVTLNVTGTSRNRTGLTAAGITGLVLSILVLAAAAALLHYARARRKPGGLSATGTSSHSPSECQEPSSSRPSRIDPQEPTHSKPLAPMELEPMYSNVNPGDSNPIYSQIWSIQHTKENSANCPMMHQEHEELTVLYSELKKTHPDDSAGEASSRGRAHEEDDEENYENILNPRKNKVQDFPCLCNT

SEQ ID NO: 33632 - protein, 641 aa, Homo sapiens
VPMLLWLLLLILTPGREQSGVAPKAVLLLNPPWSTAFKGEKVALICSSISHSLAQGDTYWYHDEKLLKIKHDKIQITEPGNYQCKTRGSSLSDAVHVEFSPDWLILQALHPVFEGDNVILRCQGKDNKNTHQKVYYKDGKQLPNSYNLEKITVNSVSRDNSKYHCTAYRKFYILDIEVTSKPLNIQVQGVPVSNVNLEIRPTGGQLIEGENMVLICSVAQGSGTVTFSWHKEGRVRSLGRKTQRSLLAELHVLTVKESDAGRYYCAADNVHSPILSTWIRVTVRIPVSHPVLTFRAPRAHTVVGDLLELHCESLRGSPPILYRFYHEDVTLGNSSAPSGGGASFNLSLTAEHSGNYSCDADNGLGAQHSHGVSLRVTVPVSRPVLTLRAPGAQAVVGDLLELHCESLRGSFPILYWFYHEDDTLGNISAHSGGGASFNLSLTTEHSGNYSCEADNGLGAQHSKVVTLNVTGTSRNRTGLTAAGITGLVLSILVLAAAAALLHYARARRKPGGLSATGTSSHSPSECQEPSSSRPSRIDPQEPTHSKPLAPMELEPMYSNVNPGDSNPIYSQIWSIQHTKENSANCPMMHQEHEELTVLYSELKKTHPDDSAGEASSRGRAHEEDDEENYENVPRVLLASDH

SEQ ID NO: 33633 - protein, 742 aa, Homo sapiens
VPMLLWLLLLILTPGREQSGVAPKAVLLLNPPWSTAFKGEKVALICSSISHSLAQGDTYWYHDEKLLKIKHDKIQITEPGNYQCKTRGSSLSDAVHVEFSPDWLILQALHPVFEGDNVILRCQGKDNKNTHQKVYYKDGKQLPNSYNLEKITVNSVSRDNSKYHCTAYRKFYILDIEVTSKPLNIQVQELFLHPVLRASSSTPIEGSPMTLTCETQLSPQRPDVQLQFSLFRDSQTLGLGWSRSPRLQIPAMWTEDSGSYWCEVETVTHSIKKRSLRSQIRVQRVPVSNVNLEIRPTGGQLIEGENMVLICSVAQGSGTVTFSWHKEGRVRSLGRKTQRSLLAELHVLTVKESDAGRYYCAADNVHSPILSTWIRVTVRTLLSPSVPVSHPVLTFRAPRAHTVVGDLLELHCESLRGSPPILYRFYHEDVTLGNSSAPSGGGASFNLSLTAEHSGNYSCDADNGLGAQHSHGVSLRVTVPVSRPVLTLRAPGAQAVVGDLLELHCESLRGSFPILYWFYHEDDTLGNISAHSGGGASFNLSLTTEHSGNYSCEADNGLGAQHSKVVTLNVTGTSRNRTGLTAAGITGLVLSILVLAAAAALLHYARARRKPGGLSATGTSSHSPSECQEPSSSRPSRIDPQEPTHSKPLAPMELEPMYSNVNPGDSNPIYSQIWSIQHTKENSANCPMMHQEHEELTVLYSELKKTHPDDSAGEASSRGRAHEEDDEENYENVPRVLLASDH

SEQ ID NO: 33634 - protein, 736 aa, Homo sapiens
VPMLLWLLLLILTPGREQSGVAPKAVLLLNPPWSTAFKGEKVALICSSISHSLAQGDTYWYHDEKLLKIKHDKIQITEPGNYQCKTRGSSLSDAVHVEFSPDWLILQALHPVFEGDNVILRCQGKDNKNTHQKVYYKDGKQLPNSYNLEKITVNSVSRDNSKYHCTAYRKFYILDIEVTSKPLNIQVQELFLHPVLRASSSTPIEGSPMTLTCETQLSPQRPDVQLQFSLFRDSQTLGLGWSRSPRLQIPAMWTEDSGSYWCEVETVTHSIKKRSLRSQIRVQRVPVSNVNLEIRPTGGQLIEGENMVLICSVAQGSGTVTFSWHKEGRVRSLGRKTQRSLLAELHVLTVKESDAGRYYCAADNVHSPILSTWIRVTVRIPVSHPVLTFRAPRAHTVVGDLLELHCESLRGSPPILYRFYHEDVTLGNSSAPSGGGASFNLSLTAEHSGNYSCDADNGLGAQHSHGVSLRVTVPVSRPVLTLRAPGAQAVVGDLLELHCESLRGSFPILYWFYHEDDTLGNISAHSGGGASFNLSLTTEHSGNYSCEADNGLGAQHSKVVTLNVTGTSRNRTGLTAAGITGLVLSILVLAAAAALLHYARARRKPGGLSATGTSSHSPSECQEPSSSRPSRIDPQEPTHSKPLAPMELEPMYSNVNPGDSNPIYSQIWSIQHTKENSANCPMMHQEHEELTVLYSELKKTHPDDSAGEASSRGRAHEEDDEENYENVPRVLLASDH

SEQ ID NO: 33635 - protein, 171 aa, Homo sapiens
LVLSILVLAAAAALLHYARARRKPGGLSATGTSSHSPSECQEPSSSRPSRIDPQEPTHSKPLAPMELEPMYSNVNPGDSNPIYSQIWSIQHTKENSESNRGNSQEIKQIKKIGLEYFFYVGLEESSRGNSKRSSKSRRLVWNAVCVRCKLEYIAHSLILFFATPTQQLIVQ

SEQ ID NO: 33636 - protein, 201 aa, Homo sapiens
VPMLLWLLLLILTPGREQSGVAPKAVLLLNPPWSTAFKGEKVALICSSISHSLAQGDTYWYHDEKLLKIKHDKIQITEPGNYQCKTRGSSLSDAVHVEFSPDWLILQALHPVFEGDNVILRCQGKDNKNTHQKVYYKDGKQLPNSYNLEKITVNSVSRDNSKYHCTAYRKFYILDIEVTSKPLNIQVQEARCPAAILPLQR

SEQ ID NO: 33637 - protein, 191 aa, Homo sapiens
VPMLLWLLLLILTPGREQSGVAPKAVLLLNPPWSTAFKGEKVALICSSISHSLAQGDTYWYHDEKLLKIKHDKIQITEPGNYQCKTRGSSLSDAVHVEFSPDWLILQALHPVFEGDNVILRCQGKDNKNTHQKVYYKDGKQLPNSYNLEKITVNSVSRDNSKYHCTAYRKFYILDIEVTSKPLNIQVQGNG

SEQ ID NO: 33638 - protein, 202 aa, Homo sapiens [sequence omitted]

SEQ ID NO: 33639 - protein, 431 aa, Homo sapiens
LVLMLPRLLLLICAPLCEPAELFLIASPSHPTEGSPVTLTCKMPFLQSSDAQFQFCFFRDTRALGPGWSSSPKLQIAAMWKEDTGSYWCEAQTMASKVLRSRRSQINVHRVPVADVSLETQPPGGQVMEGDRLVLICSVAMGTGDITFLWYKGAVGLNLQSKTQRSLTAEYEIPSVRESDAEQYYCVAENGYGPSPSGLVSITVRIPVSRPILMLRAPRAQAAVEDVLELHCEALRGSPPILYWFYHEDITLGSRSAPSGGGASFNLSLTEEHSGNYSCEANNGLGAQRSEAVTLNFTVPTGARSNHLTSGVIEGLLSTLGPATVALLFCYGLKRKIGRRSARDPLRSLPSPLPQEFTYLNSPTPGQLQPIYENVNVVSGDEVYSLAYYNQPEQESVAETLGTHMEDKVSLDIYSRLRKANITDVDYEDAM

SEQ ID NO: 33640 - protein, 142 aa, Homo sapiens
LVLMLPRLLLLICAPLCEPAELFLIASPSHPTEGSPVTLTCKMPFLQSSDAQFQFCFFRDTRALGPGWSSSPKLQIAAMWKEDTGSYWCEAQTMASKVLRSRRSQINVHRVPVADVSLETQPPGGQGSQGPGCSGGCAGASL

SEQ ID NO: 33641 - protein, 16 aa, Homo sapiens
LPKRSLFLQEIETRRL

SEQ ID NO: 33642 - protein, 300 aa, Homo sapiens
LPRNPSFNRASMLLLFLLFEGLCCPGENTADPFEIQILAGCRMNAPQIFLNMAYQGSDFLSFQGISWEPSPGAGIRAQNICKVLNRYLDIKEILQSLLGHTCPRFLAGLMEAGESELKRKVKPEAWLSCGPSPGPGRLQLVCHVSGFYPKPVWVMWMRGEQEQRGTQRGDVLPNADETWYLRATLDVAAGEAAGLSCRVKHSSLGGHDLIIHWGGYSIFLILICLTVIVTLVILVVVDSRLKKQSSNKNILSPHTPSPVFLMGANTQDTKNSRHQFCLAQVSWIKNRVLKKWKTRLNQLW

SEQ ID NO: 33643 - protein, 399 aa, Homo sapiens
LPRNPSFNRASMLLLFLLFEGLCCPGENTAAPQALQSYHLAAEEQLSFRMLQTSSFANHSWAHSEGSGWLGDLQTHGWDTVLGTIRFLKPWSHGNFSKQELKNLQSLFQLYFHSFIQIVQASAGQFQLEYPFEIQILAGCRMNAPQIFLNMAYQGSDFLSFQGISWEPSPGAGIRAQNICKVLNRYLDIKEILQSLLGHTCPRFLAGLMEAGESELKRKVKPEAWLSCGPSPGPGRLQLVCHVSGFYPKPVWVMWMRGEQEQRGTQRGDVLPNADETWYLRATLDVAAGEAAGLSCRVKHSSLGGHDLIIHWGGYSIFLILICLTVIVTLVILVVVDSRLKKQSSNKNILSPHTPSPVFLMGANTQDTKNSRHQFCLAQVSWIKNRVLKKWKTRLNQLW

SEQ ID NO: 33644 - protein, 210 aa, Homo sapiens
LPRNPSFNRASMLLLFLLFEGLCCPGENTAVKPEAWLSCGPSPGPGRLQLVCHVSGFYPKPVWVMWMRGEQEQRGTQRGDVLPNADETWYLRATLDVAAGEAAGLSCRVKHSSLGGHDLIIHWGGYSIFLILICLTVIVTLVILVVVDSRLKKQSSNKNILSPHTPSPVFLMGANTQDTKNSRHQFCLAQVSWIKNRVLKKWKTRLNQLW

SEQ ID NO: 33645 - protein, 309 aa, Homo sapiens
LPRNPSFNRASMLLLFLLFEGLCCPGENTAAPQALQSYHLAAEEQLSFRMLQTSSFANHSWAHSEGSGWLGDLQTHGWDTVLGTIRFLKPWSHGNFSKQELKNLQSLFQLYFHSFIQIVQASAGQFQLELKPEAWLSCGPSPGPGRLQLVCHVSGFYPKPVWVMWMRGEQEQRGTQRGDVLPNADETWYLRATLDVAAGEAAGLSCRVKHSSLGGHDLIIHWGGYSIFLILICLTVIVTLVILVVVDSRLKKQSSNKNILSPHTPSPVFLMGANTQDTKNSRHQFCLAQVSWIKNRVLKKWKTRLNQLW

SEQ ID NO: 33646 - protein, 198 aa, Homo sapiens
LPRNPSFNRASMLLLFLLFEGLCCPGENTAVKPEAWLSCGPSPGPGRLQLVCHVSGFYPKPVWVMWMRGEQEQRGTQRGDVLPNADETWYLRATLDVAAGEAAGLSCRVKHSSLGGHDLIIHWGGYSIFLILICLTVIVTLVILVVVDSRLKKQSPVFLMGANTQDTKNSRHQFCLAQVSWIKNRVLKKWKTRLNQLW

SEQ ID NO: 33647 - protein, 332 aa, Homo sapiens
LPRNPSFNRASMLLLFLLFEGLCCPGENTAAPQALQSYHLAAEEQLSFRMLQTSSFANHSWAHSEGSGWLGDLQTHGWDTVLGTIRFLKPWSHGNFSKQELKNLQSLFQLYFHSFIQIVQASAGQFQLEYPFEIQILAGCRMNAPQIFLNMAYQGSDFLSFQGISWEPSPGAGIRAQNICKVLNRYLDIKEILQSLLGHTCPRFLAGLMEAGESELKRKVKPEAWLSCGPSPGPGRLQLVCHVSGFYPKPVWVMWMRGGYSIFLILICLTVIVTLVILVVVDSRLKKQSPVFLMGANTQDTKNSRHQFCLAQVSWIKNRVLKKWKTRLNQLW

SEQ ID NO: 33648 - protein, 14 aa, Homo sapiens
MVSLKDYCTRMKEN

SEQ ID NO: 33649 - protein, 8 aa, Homo sapiens
MRKPALVK

SEQ ID NO: 33650 - protein, 789 aa, Homo sapiens
MSVKMGKKYKNIVLLKGLEVINDYHFRMVKSLLSNDLKLNLKMREEYDKIQIADLMEEKFRGDAGLGKLIKIFEDIPTLEDLAETLKKEKLKVKGPALSRKRKKEVDATSPAPSTSSTVKTEGAEATPGAQKRKKSTKEKAGPKGSKVSEEQTQPPSPAGAGMSTAMGRSPSPKTSLSAPPNSSSTENPKTVAKCQVTPRRNVLQKRPVIVKVLSTTKPFEYETPEMEKKIMFHATVATQTQFFHVKVLNTSLKEKFNGKKIIIISDYLEYDSLLEVNEESTVSEAGPNQTFEVPNKIINRAKETLKIDILHKQASGNIVYGVFMLHKKTVNQKTTIYEIQDDRGKMDVVGTGQCHNIPCEEGDKLQLFCFRLRKKNQMSKLISEMHSFIQIKKKTNPRNNDPKSMKLPQEQRQLPYPSEASTTFPESHLRTPQMPPTTPSSSFFTKKSEDTISKMNDFMRMQILKEGSHFPGPFMTSIGPAESHPHTPQMPPSTPSSSFLTTKSEDTISKMNDFMRMQILKEGSHFPGPFMTSIGPAESHPHTPQMPPSTPSSSFLTTLKPRLKTEPEEVSIEDSAQSDLKEVMVLNATESFVYEPKEQKKMFHATVATENEVFRVKVFNIDLKEKFTPKKIIAIANYVCRNGFLEVYPFTLVADVNADRNMEIPKGLIRSASVTPKINQLCSQTKGSFVNGVFEVHKKNVRGEFTYYEIQDNTGKMEVVVHGRLTTINCEEGDKLKLTCFELAPKSGNTGELRSVIHSHIKVIKTRKNKKDILNPDSSMETSPDFFF

SEQ ID NO: 33651 - protein, 260 aa, Homo sapiens
MKKMAPAMESPTLLCVALLFFAPDGVLAVPQKPKVSLNPPWNRIFKGENVTLTCNGNNFFEVSSTKWFHNGSLSEETNSSLNIVNAKFEDSGEYKCQHQQVNESEPVYLEVFSDWLLLQASAEVVMEGQPLFLRCHGWRNWDVYKVIYYKDGEALKYWYENHNISITNATVEDSGTYYCTGKVWQLDYESEPLNITVIKAPREKYWLQFFIPLLVVILFAVDTGLFISTQQQVTFLLKIKRTRKGFRLLNPHPKPNPKNN

SEQ ID NO: 33652 - protein, 227 aa, Homo sapiens
MKKMAPAMESPTLLCVALLFFAPDGVLAVSSTKWFHNGSLSEETNSSLNIVNAKFEDSGEYKCQHQQVNESEPVYLEVFSDWLLLQASAEVVMEGQPLFLRCHGWRNWDVYKVIYYKDGEALKYWYENHNISITNATVEDSGTYYCTGKVWQLDYESEPLNITVIKAPREKYWLQFFIPLLVVILFAVDTGLFISTQQQVTFLLKIKRTRKGFRLLNPHPKPNPKNN

SEQ ID NO: 33653 - protein, 38 aa, Homo sapiens
VGDRGFSFWPKDFQVIRVHGPSKVNCSCRHRGWLTTHG

SEQ ID NO: 33654 - protein, 1171 aa, Homo sapiens
LGEQASWAMVWCLGLAVLSLVISQGADGRGKPEVVSVVGRAGESVVLGCDLLPPAGRPPLHVIEWLRFGFLLPIFIQFGLYSPRIDPDYVGRVRLQKGASLQIEGLRVEDQGWYECRVFFLDQHIPEDDFANGSWVHLTVNSPPQFQETPPAVLEVQELEPVTLRCVARGSPLPHVTWKLRGKDLGQGQGQVQVQNGTLRIRRVERGSSGVYTCQASSTEGSATHATQLLVLGPPVIVVPPKNSTVNASQDVSLACHAEAYPANLTYSWFQDNINVFHISRLQPRVRILVDGSLRLLATQPDDAGCYTCVPSNGLLHPPSASAYLTVLCMPGVIRCPVRANPPLLFVSWTKDGKALQLDKFPGWSQGTEGSLIIALGNEDALGEYSCTPYNSLGTAGPSPVTRVLLKAPPAFIERPKEEYFQEVGRELLIPCSAQGDPPPVVSWTKVGRGLQGQAQVDSNSSLILRPLTKEAHGHWECSASNAVARVATSTNVYVLGTSPHVVTNVSVVALPKGANVSWEPGFDGGYLQRFSVWYTPLAKRPDRMHHDWVSLAVPVGAAHLLVPGLQPHTQYQFSVLAQNKLGSGPFSEIVLSAPEGLPTTPAAPGLPPTEIPPPLSPPRGLVAVRTPRGVLLHWDPPELVPKRLDGYVLEGRQGSQGWEVLDPAVAGTETELLVPGLIKDVLYEFRLVAFAGSFVSDPSNTANVSTSGLEVYPSRTQLPGLLPQPVLAGVVGGVCFLGVAVLVSILAGCLLNRRRAARRRRKRLRQDPPLIFSPTGKSAAPSALGSGSPDSVAKLKLQGSPVPSLRQSLLWGDPAGTPSPHPDPPSSRGPLPLEPICRGPDGRFVMGPTVAAPQERSGREQAEPRTPAQRLARSFDCSSSSPSGAPQPLCIEDISPVAPPPAAPPSPLPGPGPLLQYLSLPFFREMNVDGDWPPLEEPSPAAPPDYMDTRRCPTSSFLRSPETPPVSPRESLPGAVVGAGATAEPPYTALADWTLRERLLPGLLPAAPRGSLTSQSSGRGSASFLRPPSTAPSAGGSYLSPAPGDTSSWASGPERWPRREHVVTVSKRRNTSVDENYEWDSEFPGDMELLETLHLGLASSRLRPEAEPELGVKTPEEGCLLNTAHVTGPEARCAALREEFLAFRRRRDATRARLPAYRQPVPHPEQATLL

SEQ ID NO: 33655 - protein, 1187 aa, Homo sapiens
LGEQASWAMVWCLGLAVLSLVISQGADGRGKPEVVSVVGRAGESVVLGCDLLPPAGRPPLHVIEWLRFGFLLPIFIQFGLYSPRIDPDYVGRVRLQKGASLQIEGLRVEDQGWYECRVFFLDQHIPEDDFANGSWVHLTVNSPPQFQETPPAVLEVQELEPVTLRCVARGSPLPHVTWKLRGKDLGQGQGQVQVQNGTLRIRRVERGSSGVYTCQASSTEGSATHATQLLVLGPPVIVVPPKNSTVNASQDVSLACHAEAYPANLTYSWFQDNINVFHISRLQPRVRILVDGSLRLLATQPDDAGCYTCVPSNGLLHPPSASAYLTVLYPAQVTAMPPETPLPIGMPGVIRCPVRANPPLLFVSWTKDGKALQLDKFPGWSQGTEGSLIIALGNEDALGEYSCTPYNSLGTAGPSPVTRVLLKAPPAFIERPKEEYFQEVGRELLIPCSAQGDPPPVVSWTKVGRGLQGQAQVDSNSSLILRPLTKEAHGHWECSASNAVARVATSTNVYVLGTSPHVVTNVSVVALPKGANVSWEPGFDGGYLQRFSVWYTPLAKRPDRMHHDWVSLAVPVGAAHLLVPGLQPHTQYQFSVLAQNKLGSGPFSEIVLSAPEGLPTTPAAPGLPPTEIPPPLSPPRGLVAVRTPRGVLLHWDPPELVPKRLDGYVLEGRQGSQGWEVLDPAVAGTETELLVPGLIKDVLYEFRLVAFAGSFVSDPSNTANVSTSGLEVYPSRTQLPGLLPQPVLAGVVGGVCFLGVAVLVSILAGCLLNRRRAARRRRKRLRQDPPLIFSPTGKSAAPSALGSGSPDSVAKLKLQGSPVPSLRQSLLWGDPAGTPSPHPDPPSSRGPLPLEPICRGPDGRFVMGPTVAAPQERSGREQAEPRTPAQRLARSFDCSSSSPSGAPQPLCIEDISPVAPPPAAPPSPLPGPGPLLQYLSLPFFREMNVDGDWPPLEEPSPAAPPDYMDTRRCPTSSFLRSPETPPVSPRESLPGAVVGAGATAEPPYTALADWTLRERLLPGLLPAAPRGSLTSQSSGRGSASFLRPPSTAPSAGGSYLSPAPGDTSSWASGPERWPRREHVVTVSKRRNTSVDENYEWDSEFPGDMELLETLHLGLASSRLRPEAEPELGVKTPEEGCLLNTAHVTGPEARCAALREEFLAFRRRRDATRARLPAYRQPVPHPEQATLL

SEQ ID NO: 33656 - protein, 725 aa, Homo sapiens
LGEQASWAMVWCLGLAVLSLVISQGADGRGKPEVVSVVGRAGESVVLGCDLLPPAGRPPLHVIEWLRFGFLLPIFIQFGLYSPRIDPDYVGRVRLQKGASLQIEGLRVEDQGWYECRVFFLDQHIPEDDFANGSWVHLTVNSPPQFQETPPAVLEVQELEPVTLRCVARGSPLPHVTWKLRGKDLGQGQGQVQVQNGTLRIRRVERGSSGVYTCQASSTEGSATHATQLLVLGPPVIVVPPKNSTVNASQDVSLACHAEAYPANLTYSWFQDNINVFHISRLQPRVRILVDGSLRLLATQPDDAGCYTCVPSNGLLHPPSASAYLTVLYPAQVTAMPPETPLPIGMPGVIRCPVRANPPLLFVSWTKDGKALQLDKFPGWSQGTEGSLIIALGNEDALGEYSCTPYNSLGTAGPSPVTRVLLKAPPAFIERPKEEYFQEVGRELLIPCSAQGDPPPAAPPSPLPGPGPLLQYLSLPFFREMNVDGDWPPLEEPSPAAPPDYMDTRRCPTSSFLRSPETPPVSPRESLPGAVVGAGATAEPPYTALADWTLRERLLPGLLPAAPRGSLTSQSSGRGSASFLRPPSTAPSAGGSYLSPAPGDTSSWASGPERWPRREHVVTVSKRRNTSVDENYEWDSEFPGDMELLETLHLGLASSRLRPEAEPELGVKTPEEGCLLNTAHVTGPEARCAALREEFLAFRRRRDATRARLPAYRQPVPHPEQATLL

SEQ ID NO: 33657 - protein, 369 aa, Homo sapiens
LVPGHRRLTDHRPGERGCPGRILLHPLQQSWYRRALSCDPRAAQGSPSFYRAAQGRIFPRSRAGAAHPLLRPRGPSSCCLLDQGTSPHVVTNVSVVALPKGANVSWEPGFDGGYLQRFSVWYTPLAKRPDRMHHDWVSLAVPVGAAHLLVPGLQPHTQYQFSVLAQNKLGSGPFSEIVLSAPEGLPTTPAAPGLPPTEIPPPLSPPRGLVAVRTPRGVLLHWDPPELVPKRLDGYVLEGRQGSQGWEVLDPAVAGTETELLVPGLIKDVLYEFRLVAFAGSFVSDPSNTANVSTSGLEVYPSRTQLPGLLPQPVLAGVVGGVCFLGVAVLVSILAGCLLNRRRAARRRRKRLRQDPPLIFSPTGKSAAP

SEQ ID NO: 33658 - protein, 536 aa, Homo sapiens
LGEQASWAMVWCLGLAVLSLVISQGADGRGKPEVVSVVGRAGESVVLGCDLLPPAGRPPLHVIEWLRFGFLLPIFIQFGLYSPRIDPDYVGRVRLQKGASLQIEGLRVEDQGWYECRVFFLDQHIPEDDFANGSWVHLTVNSPPQFQETPPAVLEVQELEPVTLRCVARGSPLPHVTWKLRGKDLGQGQGQVQVQNGTLRIRRVERGSSGVYTCQASSTEGSATHATQLLVLGPPVIVVPPKNSTVNASQDVSLACHAEAYPANLTYSWFQDNINVFHISRLQPRVRILVDGSLRLLATQPDDAGCYTCVPSNGLLHPPSASAYLTVLYPAQVTAMPPETPLPIGMPGVIRCPVRANPPLLFVSWTKDGKALQLDKFPGWSQGTEGSLIIALGNEDALGEYSCTPYNSLGTAGPSPVTRVLLKAPPAFIERPKEEYFQEVGRELLIPCSAQGDPPPVVSWTKVGRGLQGQAQVDSNSSLILRPLTKEAHGHWECSASNAVARVATSTNVYVLGPSVLTECTMTGCPWQCLWGLLTS

SEQ ID NO: 33659 - protein, 205 aa, Homo sapiens
LGLGAADMCAFPWLLLLLLLQEGSQRRLWRWCGSEEVVAVLQESISLPLEIPPDEEVENIIWSSHKSLATVVPGKEGHPATIMVTNPHYQGQVSFLDPSYSLHISNLSWEDSGLYQAQVNLRTSQISTMQQYNICVYHPNYASEKPSTAFCLLAKGLLIFLLLVILAMGLWVIRVQKRHKMPRMKKLMRNRMKLRKEAKPGSSPA

SEQ ID NO: 33660 - protein, 296 aa, Homo sapiens
LGLGAADMCAFPWLLLLLLLQEGSQRRLWRWCGSEEVVAVLQESISLPLEIPPDEEVENIIWSSHKSLATVVPGKEGHPATIMVTNPHYQGQVSFLDPSYSLHISNLSWEDSGLYQAQVNLRTSQISTMQQYNICVYRWLSEPQITVNFESSGEGACSMSLVCSVEKAGMDMTYSWLSRGDSTYTFHEGPVLSTSWRPGDSALSYTCRANNPISNVSSCPIPDGPFYADPNYASEKPSTAFCLLAKGLLIFLLLVILAMGLWVIRVQKRHKMPRMKKLMRNRMKLRKEAKPGSSPA

SEQ ID NO: 33661 - protein, 118 aa, Homo sapiens
LGLGAADMCAFPWLLLLLLLQEGSQRRLWRWCGSEEVVAVLQESISLPLEIPPDEEVENIIWSSHKSLATVVPGKEGHPATIMVTNPHYQGQILTMLLRSLQQPSASWPRDCSSSCSW

SEQ ID NO: 33662 - protein, 38 aa, Homo sapiens
MEPQVYAVQLPSPPESPCSSPTSVPLSLFTRNKGRISL

SEQ ID NO: 33663 - protein, 525 aa, Homo sapiens
LGLCLWIFLSAPAAVWVSASLPRTPRPLPKTLQSRRLEPGAPLSHWSVRSPPPPPARPPSGPLHSHKVWLRRCGGRGRPGPAQLCPRPARPRPRPPDKPLSDPSSGFKSPGPARRTALLLTPARPVRPSVPLPRGPSKGPLHLGPKMTSVAKVYYSQTTQTESRPLMGPGIRRRRVLTKDGRSNVRMEHIADKRFLYLKDLWTTFIDMQWRYKLLLFSATFAGTWFLFGVVWYLVAVAHGDLLELDPPANHTPCVVQVHTLTGAFLFSLESQTTIGYGFRYISEECPLAIVLLIAQLVLTTILEIFITGTFLAKIARPKKRAETIRFSQHAVVASHNGKPCLMIRVANMRKSLLIGCQVTGKLLQTHQTKEGENIRLNQVNVTFQVDTASDSPFLILPLTFYHVVDETSPLKDLPLRSGEGDFELVLILSGTVESTSATCQVRTSYLPEEILWGYEFTPAISLSASGKYIADFSLFDQVVKVASPSGLRDSTVRYGDPEKLKLEESLREQAEKEGSALSVRISNV

SEQ ID NO: 33664 - protein, 45 aa, Homo sapiens
LGMRPPPFRPPRTRAIPRSLPRAGRAGWAPSGPRCCRLRCRCCCC

SEQ ID NO: 33665 - protein, 974 aa, Homo sapiens
LSQTGWCGLGILLVTSPAKVPQPLCPKMGRGAGREYSPAATTAENGGGKKKQKEKELDELKKEVAMDDHKLSLDELGRKYQVDLSKGLTNQRAQDVLARDGPNALTPPPTTPEWVKFCRQLFGGFSILLWIGAILCFLAYGIQAAMEDEPSNDNLYLGVVLAAVVIVTGCFSYYQEAKSSKIMDSFKNMVPQQALVIREGEKMQINAEEVVVGDLVEVKGGDRVPADLRIISSHGCKVDNSSLTGESEPQTRSPEFTHENPLETRNICFFSTNCVEGTARGIVIATGDRTVMGRIATLASGLEVGRTPIAMEIEHFIQLITGVAVFLGVSFFVLSLILGYSWLEAVIFLIGIIVANVPEGLLATVTVCLTLTAKRMARKNCLVKNLEAVETLGSTSTICSDKTGTLTQNRMTVAHMWFDNQIHEADTTEDQSGATFDKRSPTWTALSRIAGLCNRAVFKAGQENISVSKRDTAGDASESALLKCIELSCGSVRKMRDRNPKVAEIPFNSTNKYQLSIHEREDSPQSHVLVMKGAPERILDRCSTILVQGKEIPLDKEMQDAFQNAYMELGGLGERVLGFCQLNLPSGKFPRGFKFDTDELNFPTEKLCFVGLMSMIDPPRAAVPDAVGKCRSAGIKVIMVTGDHPITAKAIAKGVGIISEGNETVEDIAARLNIPMSQVNPREAKACVVHGSDLKDMTSEQLDEILKNHTEIVFARTSPQQKLIIVEGCQRQGAIVAVTGDGVNDSPALKKADIGIAMGISGSDVSKQAADMILLDDNFASIVTGVEEGRLIFDNLKKSIAYTLTSNIPEITPFLLFIIANIPLPLGTVTILCIDLGTDMVPAISLAYEAAESDIMKRQPRNSQTDKLVNERLISMAYGQIGMIQALGGFFTYFVILAENGFLPSRLLGIRLDWDDRTMNDLEDSYGQEWTYEQRKVVEFTCHTAFFASIVVVQWADLIICKTRRNSVFQQGMK

SEQ ID NO: 33666 - protein, 1047 aa, Homo sapiens
LSQTGWCGLGILLVTSPAKVPQPLCPKMGRGAGREYSPAATTAENGGGKKKQKEKELDELKKEVAMDDHKLSLDELGRKYQVDLSKGLTNQRAQDVLARDGPNALTPPPTTPEWVKFCRQLFGGFSILLWIGAILCFLAYGIQAAMEDEPSNDNLYLGVVLAAVVIVTGCFSYYQEAKSSKIMDSFKNMVPQQALVIREGEKMQINAEEVVVGDLVEVKGGDRVPADLRIISSHGCKVDNSSLTGESEPQTRSPEFTHENPLETRNICFFSTNCVEGTARGIVIATGDRTVMGRIATLASGLEVGRTPIAMEIEHFIQLITGVAVFLGVSFFVLSLILGYSWLEAVIFLIGIIVANVPEGLLATVTVCLTLTAKRMARKNCLVKNLEAVETLGSTSTICSDKTGTLTQNRMTVAHMWFDNQIHEADTTEDQSGATFDKRSPTWTALSRIAGLCNRAVFKAGQENISVSKRDTAGDASESALLKCIELSCGSVRKMRDRNPKVAEIPFNSTNKYQLSIHEREDSPQSHVLVMKGAPERILDRCSTILVQGKEIPLDKEMQDAFQNAYMELGGLGERVLGFCQLNLPSGKFPRGFKFDTDELNFPTEKLCFVGLMSMIDPPRAAVPDAVGKCRSAGIKVIMVTGDHPITAKAIAKGVGIISEGNETVEDIAARLNIPMSQVNPREAKACVVHGSDLKDMTSEQLDEILKNHTEIVFARTSPQQKLIIVEGCQRQGAIVAVTGDGVNDSPALKKADIGIAMGISGSDVSKQAADMILLDDNFASIVTGVEEGRLIFDNLKKSIAYTLTSNIPEITPFLLFIIANIPLPLGTVTILCIDLGTDMVPAISLAYEAAESDIMKRQPRNSQTDKLVNERLISMAYGQIGMIQALGGFFTYFVILAENGFLPSRLLGIRLDWDDRTMNDLEDSYGQEWTYEQRKVVEFTCHTAFFASIVVVQWADLIICKTRRNSVFQQGMKNKILIFGLLEETALAAFLSYCPGMGVALRMYPLKVTWWFCAFPYSLLIFIYDEVRKLILRRYPGGWVEKETYY

SEQ ID NO: 33667 - protein, 1036 aa, Homo sapiens
LSQTGWCGLGILLVTSPAKVPQPLCPKMGRGAGREYSPAATTAENGGGKKKQKEKELDELKKEVAMDDHKLSLDELGRKYQVDLSKGLTNQRAQDVLARDGPNALTPPPTTPEWVKFCRQLFGGFSILLWIGAILCFLAYGIQAAMEDEPSNDNLYLGVVLAAVVIVTGCFSYYQEAKSSKIMDSFKNMVPQQALVIREGEKMQINAEEVVVGDLVEVKGGDRVPADLRIISSHGCKVDNSSLTGESEPQTRSPEFTHENPLETRNICFFSTNCVEGTARGIVIATGDRTVMGRIATLASGLEVGRTPIAMEIEHFIQLITGVAVFLGVSFFVLSLILGYSWLEAVIFLIGIIVANVPEGLLATVTVCLTLTAKRMARKNCLVKNLEAVETLGSTSTICSDKTGTLTQNRMTVAHMWFDNQIHEADTTEDQSGATFDKRSPTWTALSRIAGLCNRAVFKAGQENISVSKRDTAGDASESALLKCIELSCGSVRKMRDRNPKVAEIPFNSTNKYQLSIHEREDSPQSHVLVMKGAPERILDRCSTILVQGKEIPLDKEMQDAFQNAYMELGGLGERVLGFCQLNLPSGKFPRGFKFDTDELNFPTEKLCFVGLMSMIDPPRAAVPDAVGKCRSAGIKVIMVTGDHPITAKAIAKGVGIISEGNETVEDIAARLNIPMSQVNPREAKACVVHGSDLKDMTSEQLDEILKNHTEIVFARTSPQQKLIIVEGCQRQGAIVAVTGDGVNDSPALKKADIGIAMGISGSDVSKQAADMILLDDNFASIVTGVEEGRLIFDNLKKSIAYTLTSNIPEITPFLLFIIANIPLPLGTVTILCIDLGTDMVPAISLAYEAAESDIMKRQPRNSQTDKLVNERLISMAYGQIGMIQALGGFFTYFVILAENGFLPSRLLGIRLDWDDRTMNDLEDSYGQEWTYEQRKVVEFTCHTAFFASIVVVQWADLIICKTRRNSVFQQGMKNKILIFGLLEETALAAFLSYCPGMGVALRMYPLNLLIFIYDEVRKLILRRYPGGWVEKETYY

SEQ ID NO: 33668 - protein, 304 aa, Homo sapiens
LGAVVAVTGDGVNDSPALKKADIGIAMGISGSDVSKQAADMILLDDNFASIVTGVEEGRLIFDNLKKSIMYTLTSNIPEITPFLMFIILGIPLPLGTITILCIDLGTDMVPAISLAYESAESDIMKRLPRNPKTDNLVNHRLIGMAYGQIGMIQALAGFFTYFVILAENGFRPVDLLGIRLHWEDKYLNDLEDSYGQQWTYEQRKVVEFTCQTAFFVTIVVVQWADLIISKTRRNSLFQQGMRNKVLIFGILEETLLAAFLSYTPGMDVALRMYPLKWSFALTAQAGVKWRILGLLQPLPPRFK

SEQ ID NO: 33669 - protein, 148 aa, Homo sapiens
MAAAEEGCSVGAEADRELEELLESALDDFDKAKPSPAPPSTTTAPDASGPQKRSPGDTAKDALFASQEKFFQELFDSELASQATAEFEKAMKELAEEEPHLVEQFQKLSEAAGRVGSDMTSQQEFTSCLKETLSGLAKNATDLQVRRK

SEQ ID NO: 33670 - protein, 129 aa, Homo sapiens
MLTKFETKSARVKGLSFHPKRPWILTSLHNGVIQLWDYRMCTLIDKFDEHDGPVRGIDFHKQQPLFVSGGDDYKIKVWNYKLRRCLFTLLGHLDYIRTTFFHHEYPWILSASDDQTIRVWNWQSRTCVW

SEQ ID NO: 33671 - protein, 236 aa, Homo sapiens
LTASRSQAPVFTAESMLWLFQSLLFVFCFGPGQLRNIQVTNHSQLFQNMTCELHLTCSVEDADDNVSFRWEALGNTLSSQPNLTVSWDPRISSEQDYTCIAENAVSNLSFSVSAQKLCEDVKIQYTDTKMILFMVSGICIVFGFIILLLLVLRKRRDSLSLSTQRTQGPAESARNLEYVSVSPTNNTVYASVTHSNRETEIWTPRENDTITIYSTINHSKESKPTFSRATALDNVV

SEQ ID NO: 33672 - protein, 217 aa, Homo sapiens
LKEMAQHHLWILLLCLQTCRLGKPKITQSLMASVNSTCNVTLTCSVEKEEKNVTYNWSPLGEEGNVLQIFQTPEDQELTYTCTAQNPVSNNSDSISARQLCADIAMGFRTHHTGLLSVLAMFFLLVLILSSVFLFRLFKRRQDAASKKTIYTYIMASRNTQPAESRIYDEILQSKVLPSKEEPVNTVYSEVQFADKMGKASTQDSKPPGTSSYEIVI

SEQ ID NO: 33673 - protein, 331 aa, Homo sapiens
LKEMAQHHLWILLLCLQTWPEAAGKDSEIFTVNGILGESVTFPVNIQEPRQVKIIAWTSKTSVAYVTPGDSETAPVVTVTHRNYYERIHALGPNYNLVISDLRMEDAGDYKADINTQADPYTTTKRYNLQIYRRLGKPKITQSLMASVNSTCNVTLTCSVEKEEKNVTYNWSPLGEEGNVLQIFQTPEDQELTYTCTAQNPVSNNSDSISARQLCADIAMGFRTHHTGLLSVLAMFFLLVLILSSVFLFRLFKRRQDAASKKTIYTYIMASRNTQPAESRIYDEILQSKVLPSKEEPVNTVYSEVQFADKMGKASTQDSKPPGTSSYEIVI

SEQ ID NO: 33674 - protein, 342 aa, Homo sapiens
LKEMAQHHLWILLLCLQTWPEAAGKDSEIFTVNGILGESVTFPVNIQEPRQVKIIAWTSKTSVAYVTPGDSETAPVVTVTHRNYYERIHALGPNYNLVISDLRMEDAGDYKADINTQADPYTTTKRYNLQIYRRLGKPKITQSLMASVNSTCNVTLTCSVEKEEKNVTYNWSPLGEEGNVLQIFQTPEDQELTYTCTAQNPVSNNSDSISARQLCADIAMGFRTHHTGLLSVLAMFFLLVLILSSVFLFRLFKRRQGSCLNTFTKNPYAASKKTIYTYIMASRNTQPAESRIYDEILQSKVLPSKEEPVNTVYSEVQFADKMGKASTQDSKPPGTSSYEIVI

SEQ ID NO: 33675 - protein, 348 aa, Homo sapiens
LKEMAQHHLWILLLCLQTWPEAAGKDSEIFTVNGILGESVTFPVNIQEPRQVKIIAWTSKTSVAYVTPGDSETAPVVTVTHRNYYERIHALGPNYNLVISDLRMEDAGDYKADINTQADPYTTTKRYNLQIYRRLGKPKITQSLMASVNSTCNVTLTCSVEKEEKNVTYNWSPLGEEGNVLQIFQTPEDQELTYTCTAQNPVSNNSDSISARQLCADIAMGFRTHHTGLLSVLAMFFLLVLILSSVFLFRLFKRRQGRIFPEGSCLNTFTKNPYAASKKTIYTYIMASRNTQPAESRIYDEILQSKVLPSKEEPVNTVYSEVQFADKMGKASTQDSKPPGTSSYEIVI

SEQ ID NO: 33676 - protein, 275 aa, Homo sapiens
LKEMAQHHLWILLLCLQTWPEAAGKDSEIFTVNGILGESVTFPVNIQEPRQVKIIAWTSKTSVAYVTPGDSETAPVVTVTHRNYYERIHALGPNYNLVISDLRMEDAGDYKADINTQADPYTTTKRYNLQIYRRLGKPKITQSLMASVNSTCNVTLTCSVEKEEKNVTYNWSPLGEEGNVLQIFQTPEDQELTYTCTAQNPVSNNSDSISARQLCADIAMGFRTHHTGLLSVLAMFFLLVLILSSVFLFRLFKRRQGASLQGRASEHSLFRSAVC

SEQ ID NO: 33677 - protein, 283 aa, Homo sapiens
LKEMAQHHLWILLLCLQTWPEAAGKDSEIFTVNGILGESVTFPVNIQEPRQVKIIAWTSKTSVAYVTPGDSETAPVVTVTHRNYYERIHALGPNYNLVISDLRMEDAGDYKADINTQADPYTTTKRYNLQIYRRLGKPKITQSLMASVNSTCNVTLTCSVEKEEKNVTYNWSPLGEEGNVLQIFQTPEDQELTYTCTAQNPVSNNSDSISARQLCADIAMGFRTHHTGLLSVLAMFFLLVLILSSVFLFRLFKRRQGRIFPEGKMWKLTFSPPGTEAIYPRFS

SEQ ID NO: 33678 - protein, 244 aa, Homo sapiens
LKEMAQHHLWILLLCLQTWPEAAGKDSEIFTVNGILGESVTFPVNIQEPRQVKIIAWTSKTSVAYVTPGDSETAPVVTVTHRNYYERIHALGPNYNLVISDLRMEDAGDYKADINTQADPYTTTKRYNLQIYRRLGKPKITQSLMASVNSTCNVTLTCSVEKEEKNVTYNWSPLGEEGNVLQIFQTPEDQELTYTCTAQNPVSNNSDSISARQLCAGNQLCPSLLVSLRDHSEELQGLNVGHIL

SEQ ID NO: 33679 - protein, 14 aa, Homo sapiens
LGRMFLPKAGFWPR

SEQ ID NO: 33680 - protein, 33 aa, Homo sapiens
MAGSPTCLTLIYILWQLTGQEETRERGKNGSGN

SEQ ID NO: 33681 - protein, 75 aa, Homo sapiens
LLLEYIEEKKRVDICRETPNICPHSGENTEYDTIPHTNVSPFSSFLRTDPVSEALLVRFFHGFGQHGNEEGSEDI

SEQ ID NO: 33682 - protein, 18 aa, Homo sapiens
LQIFSSVLQTSLLFLLME

SEQ ID NO: 33683 - protein, 218 aa, Homo sapiens
LQEPQVTMKSVKVSENFSCNITLMCSVKGAEKSVLYSWTPREPHASESNGGSILTVSRTPCDPDLPYICTAQNPVSQRSSLPVHVGQFCTDPGASRGGTTGETVVGVLGEPVTLPLALPACRDTEKVVWLFNTSIISKEREEAATADPLIKSRDPYKNRVWVSSQDCSLKISQLKIEDAGPYHAYVCSEASSVTSMTHVTLLIYRESLGRAPITRFLL

SEQ ID NO: 33684 - protein, 96 aa, Homo sapiens
MLQAPRGRARAALRRLAVATRTMAGVSELESALQMEPAAFQALYSAEKPKLEDEHLVFFCQMGKRGLQATQLARSLGYTGARNYAGAYREWLEKES

SEQ ID NO: 33685 - protein, 49 aa, Homo sapiens
VMLWLAPGLWHFHWFFLSLELRFRCATCGSGEQAYTRSEGRMFSSGWCP

SEQ ID NO: 33686 - protein, 146 aa, Homo sapiens
VPGLPCGLLAGGAREPSSDTVVFDPARGQAVRLGARGSPPRSHHDAAPVDGRWLCVVGGWDGSRRLATVTALDTERGVWEAWTGTPGDCPPAGLSSHTCTRISDRELQVAGREGGIHTQRRYGSIYTLRLDPSARTYWRNHLLLLI

SEQ ID NO: 33687 - protein, 265 aa, Homo sapiens
LSWFERLPDWVPAWLSCLRHLTSLHGTLQRRYTCLNHWVGNFWKNTPSLPVSLPPRECGLWLSLGGFHERGQDWEQTQKIYNCHVLLNSKGAVVATYRKTHLCDVEIPGQGPMCESNSTMPGPSLESPVSTPAGKIGLAVCYDMRFPELSLALAQAGAEILTYPSAFGSITGPAHWEVLLRARAIETQCYVVAAAQCGRHHEKRASYGHSMVVDPWGTVVARCSEGPGLCLARIDLNYLRQLRRHLPVFQHRRPDLYGNLGHPLS

SEQ ID NO: 33688 - protein, 207 aa, Homo sapiens [sequence omitted]

SEQ ID NO: 33689 - protein, 336 aa, Homo sapiens
MSQPSGGRAPGTRIYSWSCPTVMSPGEKLDPIPDSFILQPPVFHPVVPYVTTIFGGLHAGKMVMLQGVVPLDAHRFQVDFQCGCSLCPRPDIAFHFNPRFHTTKPHVICNTLHGGRWQREARWPHLALRRGSSFLILFLFGNEEVKVSVNGQHFLHFRYRLPLSHVDTLGIFGDILVEAVGFLNINPFVEGSREYPAGHPFLLMSPRLEVPCSHALPQGLSPGQVIIVRGLVLQEPKHFTVSLRDQAAHAPVTLRASFADRTLAWISRWGQKKLISAPFLFYPQRFFEVLLLFQEGGLKLALNGQGLGATSMNQQALEQLRELRISGSVQLYCVHS

SEQ ID NO: 33690 - protein, 13 aa, Homo sapiens
MEPQAASQSGHSV

SEQ ID NO: 33691 - protein, 23 aa, Homo sapiens
LKTLPLTLAGVQAPRLQRGAFQS

SEQ ID NO: 33692 - protein, 40 aa, Homo sapiens
LHSAVRTADLQPKMIPAVVLLLLLLVEQADPSAKGSYNQL

SEQ ID NO: 33693 - protein, 96 aa, Homo sapiens
VCVCVCVCVCVWAGALVRRQAKEPCVESLVSQYFQTVTDYGKDLMEKVKSPELQAEAKSYFEKSKEQLTPLIKKAGTELVNFLSYFVELGTQPATQ

SEQ ID NO: 33694 - protein, 75 aa, Homo sapiens
LCYSSPSAALKYFQTVTDYGKDLMEKVKSPELQAEAKSYFEKSKEQLTPLIKKAGTELVNFLSYFVELGTQPATQ

SEQ ID NO: 33695 - protein, 256 aa, Homo sapiens
MTMETQMSQNVCPRNLWLLQPLTVLLLLASADSQAAPPKAVLKLEPPWINVLQEDSVTLTCQGARSPESDSIQWFHNGNLIPTHTQPSYRFKANNNDSGEYTCQTGQTSLSDPVHLTVLSEWLVLQTPHLEFQEGETIMLRCHSWKDKPLVKVTFFQNGKSQKFSHLDPTFSIPQANHSHSGDYHCTGNIGYTLFSSKPVTITVQGMGSLPRCREGRRGDGQGLRSHGPTWRSEKAHSSKIGHWSKEEWGGSLAKY

SEQ ID NO: 33696 - protein, 92 aa, Homo sapiens
LQILGLLFTLAKSVYDKNMRQLANSTDPVKAAQFEPPGRQMIAIRKRQLEETNNDYETADGGYMTLNPRAPTDDDKNIYLTLPPNDHVNRLY

SEQ ID NO: 33697 - protein, 654 aa, Homo sapiens
VASSIRQEASAMQAPRELAVGIDLGTTYSCVGVFQQGRVEILANDQGNRTTPSYVAFTDTERLVGDAAKSQAALNPHNTVFDAKRLIGRKFADTTVQSDMKHWPFRVVSEGGKPKVRVCYRGEDKTFYPEEISSMVLSKMKETAEAYLGQPVKHAVITVPAYFNDSQRQATKDAGAIAGLNVLRIINEPTAAAIAYGLDRRGAGERNVLIFDLGGGTFDVSVLSIDAGVFEVKATAGDTHLGGEDFDNRLVNHFMEEFRRKHGKDLSGNKRALRRLRTACERAKRTLSSSTQATLEIDSLFEGVDFYTSITRARFEELCSDLFRSTLEPVEKALRDAKLDKAQIHDVVLVGGSTRIPKVQKLLQDFFNGKELNKSINPDEAVAYGAAVQAAVLMGDKCEKVQDLLLLDVAPLSLGLETAGGVMTTLIQRNATIPTKQTQTFTTYSDNQPGVFIQVYEGERAMTKDNNLLGRFELSGIPPAPRGVPQIEVTFDIDANGILSVTATDRSTGKANKITITNDKGRLSKEEVERMVHEAEQYKAEDEAQRDRVAAKNSLEAHVFHVKGSLQEESLRDKIPEEDRRKMQDKCREVLAWLEHNQLAEKEEYEHQKRELEQICRPIFSRLYGGPGVPGGSSCGTQARQGDPSTGPIIEEVD

SEQ ID NO: 33698 - protein, 375 aa, Homo sapiens
LVLGGSKSRRWGKHPGMAEGTLWQILCVSSDAQPQTFEGVKGADPPTLPPGSFLPGPVLWWGSLARLQTEKSDEVSRKGNWWVTEMGGGAGERLFTSSCLVGLVPLGLRISLVTCPLQCGIMWQLLLPTALLLLVSAGMRTEDLPKAVVFLEPQWYRVLEKDSVTLKCQGAYSPEDNSTQWFHNESLISSQASSYFIDAATVDDSGEYRCQTNLSTLSDPVQLEVHIGWLLLQAPRWVFKEEDPIHLRCHSWKNTALHKVTYLQNGKGRKYFHHNSDFYIPKATLKDSGSYFCRGLFGSKNVSSETVNITITQGLAVSTISSFFPPGYQVSFCLVMVLLFAVDTGLYFSVKTNIRSSTRDWKDHKFKWRKDPQDK

SEQ ID NO: 33699 - protein, 123 aa, Homo sapiens
LLLPTALLLLVSAGMRTEDLPKAVVFLEPQWYRVLEKDSVTLKCQGAYSPEDNSTQWFHNESLISSQASSYFIDAATVDDSGEYRCQTNLSTLSDPVQLEVHIGPFPTMTSCSLFVKSDYLVT

SEQ ID NO: 33700 - protein, 92 aa, Homo sapiens
LQILGLLFTLAKSVYDKNMRQLANSTDPVKAAQFEPPGRQMIAIRKRQPEETNNDYETADGGYMTLNPRAPTDDDKNIYLTLPPNDHVNRLY

SEQ ID NO: 33701 - protein, 367 aa, Homo sapiens
MQAPRELAVGIDLGTTYSCVGVFQQGRVEILANDQGNRTTPSYVAFTDTERLVGDAAKSQAALNPHNTVFDAKRLIGRKFADTTVQSDMKHWPFQVVSEGGKPKVRVCYRGEDKTFYPEEISSMVLSKMKETAEAYLGQPVKHAVITVPTYFSNSQRQATKDAGAIAGLKVLPIINEATAAAIAYGLDRRGAGKRNVLIFDLGGGTFDVSVLSIDAGVFEVKATAGDTHLGGEDFDNRLVNHFMEEFRRKHGKDLSGNKRALRRLRTACERAKRTPSSSTQATLEIDSLFEGVDFYKSITRARFEELCSDLFRSTLEPVEKALRDAKLDKAQIHDFVLGGGLHSHPQGAEVAAGLLQRQGAEQEHQP

SEQ ID NO: 33702 - protein, 341 aa, Homo sapiens
VPALRNCAQTSSAAPWSRWRRPCGMPSWTRPRFMTSSWGEGSTRIPKVQKLLQDFFNGKELNKSINPDEAVAYGAAVQAAVLMGDKCEKVQDLLLLDVAPLSLGLETAGGVMTTLIQRNATIPTKQTQTFTTYSDNQPGVFIQVYEVERAMTKDNNLLGRFELIGIPPAPHGVPQIEVTFDIDANGILSVTATDRSTGKANKITNDKGRLSKEEVERMVHEAEQYGAEDEAQRDRVAAKNSLEAHVFHVKGSLQEESLRDKIPEEDRRKVQDKCQEVLAWLEHNQLAEKEEYEHQKRELEQICRPIFSRLYGGPGVPGGSSCSAQAHQGDPSTGPIIEEVD

SEQ ID NO: 33703 - protein, 49 aa, Homo sapiens
VLWLIFLLFPTANPTNPDEADKVGAENTITYSLLMHPDALEEPDDQNRI

SEQ ID NO: 33704 - protein, 444 aa, Homo sapiens
LRGRCSDFSAAAAAVRSIMWPLTALLLLVPSSGQAATLEKPILSLHPPWTTIFKGERVTLKCDGYHPLLLELQPISTLWYLGHLLLPSHKKSIEVQTPGVYRCQTRGAPVSDPIHLSVSNDWLILQVPYAPVFEGEPLVLRCRGWYDKVVYKLHYYHDGQAVRYFHSSANYTVLQARASDSGRYQCSGTMRIPVESAPMFSAKVAVTVQELFRAPVLRVMGPREARGAALGGVVLRCDTRLHPQKRDTPLQFAFYKYSRAVRRFDWGAEYTVPEPEVEELESYWCEAATATRSVRKRSPWLQLPGPGSPLDPASTTAPAPWAAALAPGNRPLSFRKPPVSRSVPLVTSVRNTTSTGLQFPASGAPTAGPPACAPPTPLEQSAGALKPDVDLLLREMQLLKGLLSRVVLELKEPQALRELRGTPETPTSHFAVSPGTPETTPVES

SEQ ID NO: 33705 - protein, 25 aa, Homo sapiens
LNIMAYSLIILLNATAWLSQNKIRD

SEQ ID NO: 33706 - protein, 105 aa, Homo sapiens
VAFLFLALHFYFIPRFPAFSIIILPTPQMQDFGYVILTNVSPSLPGEKVGSGWEGVSTEEQEGGSRAGSSATELGVPVRCRLEQPGSFAFFCLSLALLLFVIACS

SEQ ID NO: 33707 - protein, 562 aa, Homo sapiens
LPLGPRHRSGSGRRAARAPPAQRSQAPPRVAAPSSSLPSPGSRQPLPAAAASEGAGPPRVTMPSKTKYNLVDDGHDLRIPLHNEDAFQHGICFEAKYVGSLDVPRPNSRVEIVAAMRRIRYEFKAKNIKKKKVSIMVSVDGVKVILKKKKKKKEWTWDESKMLVMQDPIYRIFYVSHDSQDLKIFSYIARDGASNIFRCNVFKSKKKSQAMRIVRTVGQAFEVCHKLSLQHTQQNADGQEDGESERNSNSSGDPGRQLTGAERASTATAEETDIDAVEVPLPGNDVLEFSRGVTDLDAVGKEGGSHTGSKVSHPQEPMLTASPRMLLPSSSSKPPGLGTETPLSTHHQMQLLQQLLQQQQQQTQVAVAQVHLLKDQLAAEAAARLEAQARVHQLLLQNKDMLQHISLLVKQVQELELKLSGQNAMGSQDSLLEITFRSGALPVLCDPTTPKPEDLHSPPLGAGLADFAHPAGSPLGRRDCLVKLECFRFLPPEDTPPPAQGEALLGGLELIKFRESGIASEYESNTDESEERDSWSQEELPRLLNVLQRQELGDGLDDEIAV

SEQ ID NO: 33708 - protein, 567 aa, Homo sapiens
LPLGPRHRSGSGRRAARAPPAQRSQAPPRVAAPSSSLPSPGSRQPLPAAAASEGAGPPRVTMPSKTKYNLVDDGHDLRIPLHNEDAFQHGICFEAKYVGSLDVPRPNSRVEIVAAMRRIRYEFKAKNIKKKKVSIMVSVDGVKVILKKKKKLLLLQKKEWTWDESKMLVMQDPIYRIFYVSHDSQDLKIFSYIARDGASNIFRCNVFKSKKKSQAMRIVRTVGQAFEVCHKLSLQHTQQNADGQEDGESERNSNSSGDPGRQLTGAERASTATAEETDIDAVEVPLPGNDVLEFSRGVTDLDAVGKEGGSHTGSKVSHPQEPMLTASPRMLLPSSSSKPPGLGTETPLSTHHQMQLLQQLLQQQQQQTQVAVAQVHLLKDQLAAEAAARLEAQARVHQLLLQNKDMLQHISLLVKQVQELELKLSGQNAMGSQDSLLEITFRSGALPVLCDPTTPKPEDLHSPPLGAGLADFAHPAGSPLGRRDCLVKLECFRFLPPEDTPPPAQGEALLGGLELIKFRESGIASEYESNTDESEERDSWSQEELPRLLNVLQRQELGDGLDDEIAV

SEQ ID NO: 33709 - protein, 887 aa, Homo sapiens [sequence omitted]

SEQ ID NO: 33710 - protein, 166 aa, Homo sapiens
LAIIVIILWRQFWQKMLEKASRRMLDDEMTVSLSLPSDSSMFNNNRSSSPSEQGSNSTYDRIFPLRPDYQEPSRLIRKLPEFAPGEEESGCSGVVKPVQPSGPEGVPHYAEADIVNLQGVTGGNTYSVPAVTMDLLSGKDVAVEEFPRKLLTFKEKLGEGQFGEVS

SEQ ID NO: 33711 - protein, 370 aa, Homo sapiens
MLLVFFVLWTCSLALLASSQSPPPPCASVLSIRGAQEEEPTDPQLMRLDNMLLAEGVAGPEKGGGSAAAAAAAAASGGAGSDNSVEHSDYRAKLSQIRQIYHTELEKYEQACNEFTTHVMNLLREQSRTRPISPKEIERMVSIIHRKFSSIQMQLKQSTCEAVMILRSRFLDARRKRRNFNKQATEILNEYFYSHLSNPYPSEEAKEELAKKCGITVSQVSNWFGNKRIRYKKNIGKFQEEANIYAAKTAVTATNVSAHGSQANSPSTPNSAGSSSSFNMSNSGDLFMSVQSLNGDSYQGAQVGANVQSQVDTLRHVISQTGGYSDGLAASQMYSPQGISANGGWQDATTPSSVTSPTEGPGSVHSDTSN

SEQ ID NO: 33712 - protein, 180 aa, Homo sapiens
LFCSSCSKVIQGQEMPWRGRRFRLCRRKMAVLSKEYGFVLLTGAASFIMVAHLAINVSKARKKYKVEYPIMYSTDPENGHIFNCIQRAHQNTLEVYPPFLFFLAVGGVYHPRIASGLGLAWIVGRVLYAYGYYTGEPSKRSRGALGSIALLGLVGTTVCSAFQHLGWVKSGLGSGPKCCH

SEQ ID NO: 33713 - protein, 182 aa, Homo sapiens
LKSVGARNPEPSPARCSGPCSLSLASPCLAWPIICSVLCRKEETVTVYPADVVLFEGILAFYSQEVRDLFQMKLFVDTDADTRLSRRVLRDISERGRDLEQILSQYITFVKPAFEEFCLPTKKYADVIIPRGADNLVAINLIVQHIQDILNGGPSKRQTNGCLNGYTPSRKRQASESSSRPH

SEQ ID NO: 33714 - protein, 361 aa, Homo sapiens
MGVYGQESGGFSGLGENRSMSGPDNWGRGRGGFDRGGMSRGGRGGGCGGMGSAGEQVGFNKPGGPMDEGPDLDLGPPVDPDEDSDNSAIYVQGLNDNVTLDDLVDFFKQCGVVKMNKRTEQPMIHTYLDKETRKPKGDATVSCEDSPTAKAAVEWFDGKDFQGSKLKVSLARKRPPVNSMQGGMPPHEGRGMPPPLCGGPGGPGSPGGPMGHMGGRGGDRGGLPPRGPQGSRGNTSGGGNVQHQAGDRQCPNPGCGNQNFAWRTESNKCKAPKPEGFLPPPFPPPGGDHGRGGPGGMWGGRGGLMDHGGPGGMFRGGCGRDRSGFCGGWAWTEVALVEEDKVALGGPRTFDVTNGRKKRRT

SEQ ID NO: 33715 - protein, 147 aa, Homo sapiens
LQLDRGTHPPLFQPRLPEESEGRDCLMHTHEQAGLSPQDQRLMQNWHQLENLSNFIKAMVGYDMNPMDLFEANDLFESRNMTQVQLSLLALAGKVKTKLLQNGVDVGVKYSEKQERNFDDATLKASQCLTELQMGTNICACQSGATT

SEQ ID NO: 33716 - protein, 440 aa, Homo sapiens
LGKMDRVLLRWISLFWLTAMVEGLQVTVPDKKKVAMLFQPTVLRCHFSTSSHQPAVVQWKFKSYCQDRMGESLGMSSTRAQSLSKRNLEWDPYLDCLDSRRTVRVVASKQGSTVTLGDFYRGREITIVHDADLQIGKLMWGDSGLYYCIITTPDDLEGKNEDSVELLVLGRTGLLADLLPSFAVEIMPEWVFVGLVLLGVFLFFVLVGICWCQCCPHSCCCYVRCPCCPDSCCCPQALYEAGKAAKAGYPPSVSGVPGPYSIPSVPLGGAPSSGMLMDKPHPPPLAPSDSTGGSHSVRKGYRIQADKERDSMKVLYYVEKELAQFDPARRMRGRYNNTISELSSLHEEDSNFRQSFHQMRSKQFPVSGDLESNPDYWSGVMGGSSGASRGPSAMEYNKEDRESFRHRMTFQPGCPLWSDVVNISLDNEKSDMDYGDKTQI

SEQ ID NO: 33717 - protein, 642 aa, Homo sapiens
LGKMDRVLLRWISLFWLTAMVEGLQVTVPDKKKVAMLFQPTVLRCHFSTSSHQPAVVQWKFKSYCQDRMGESLGMSSTRAQSLSKRNLEWDPYLDCLDSRRTVRVVASKQGSTVTLGDFYRGREITIVHDADLQIGKLMWGDSGLYYCIITTPDDLEGKNEDSVELLVLGRTGLLADLLPSFAVEIMPEWVFVGLVLLGVFLFFVLVGICWCQCCPHSCCCYVRCPCCPDSCCCPQALYEAGKAAKAGYPPSVSGVPGPYSIPSVPLGGAPSSGMLMDKPHPPPLAPSDSTGGSHSVRKGYRIQADKERDSMKVLYYVEKELAQFDPARRMRGRYNNTISELSSLHEEDSNFRQSFHQMRSKQFPVSGDLESNPDYWSGVMGGSSGASRGPSAMEYNKEDRESFRHSQPRSKSEMLSRKNFATGVPAVSMDELAAFADSYGQRPRRADGNSHEARGGSRFERSESRAHSGFYQDDSLEEYYGQRSRSREPLTDADRGWAFSPARRRPAEDAHLPRLVSRTPGTAPKYDHSYLGSARERQARPEGASRGGSLETPSKRSAQLGPRSASYYAWSPPGTYKAGSSQDDQEDASDDALPPYSELELTRGPSYRGRDLPYHSNSEKKRKKEPAKKTNDFPTRMSLVV

SEQ ID NO: 33718 - protein, 583 aa, Homo sapiens
LGKMDRVLLRWISLFWLTAMVEGLQVTVPDKKKVAMLFQPTVLRCHFSTSSHQPAVVQWKFKSYCQDRMGESLGMSSTRAQSLSKRNLEWDPYLDCLDSRRTVRVVASKQGSTVTLGDFYRGREITIVHDADLQIGKLMWGDSGLYYCIITTPDDLEGKNEDSVELLVLGRTGLLADLLPSFAVEIMPEWVFVGLVLLGVFLFFVLVGICWCQCCPHSCCCYVRCPCCPDSCCCPQAFRKGYRIQADKERDSMKVLYYVEKELAQFDPARRMRGRYNNTISELSSLHEEDSNFRQSFHQMRSKQFPVSGDLESNPDYWSGVMGGSSGASRGPSAMEYNKEDRESFRHSQPRSKSEMLSRKNFATGVPAVSMDELAAFADSYGQRPRRADGNSHEARGGSRFERSESRAHSGFYQDDSLEEYYGQRSRSREPLTDADRGWAFSPARRRPAEDAHLPRLVSRTPGTAPKYDHSYLGSARERQARPEGASRGGSLETPSKRSAQLGPRSASYYAWSPPGTYKAGSSQDDQEDASDDALPPYSELELTRGPSYRGRDLPYHSNSEKKRKKEPAKKTNDFPTRMSLVV

SEQ ID NO: 33719 - protein, 515 aa, Homo sapiens
LGKMDRVLLRWISLFWLTAMVEGLQVTVPDKKKVAMLFQPTVLRCHFSTSSHQPAVVQWKFKSYCQDRMGESLGMSSTRAQSLSKRNLEWDPYLDCLDSRRTVRVVASKQGSTVTLGDFYRGREITIVHDADLQIGKLMWGDSGLYYCIITTPDDLEGKNEDSVELLVLVRKGYRIQADKERDSMKVLYYVEKELAQFDPARRMRGRYNNTISELSSLHEEDSNFRQSFHQMRSKQFPVSGDLESNPDYWSGVMGGSSGASRGPSAMEYNKEDRESFRHSQPRSKSEMLSRKNFATGVPAVSMDELAAFADSYGQRPRRADGNSHEARGGSRFERSESRAHSGFYQDDSLEEYYGQRSRSREPLTDADRGWAFSPARRRPAEDAHLPRLVSRTPGTAPKYDHSYLGSARERQARPEGASRGGSLETPSKRSAQLGPRSASYYAWSPPGTYKAGSSQDDQEDASDDALPPYSELELTRGPSYRGRDLPYHSNSEKKRKKEPAKKTNDFPTRMSLVV

SEQ ID NO: 33720 - protein, 623 aa, Homo sapiens
LGKMDRVLLRWISLFWLTAMVEGLQVTVPDKKKVAMLFQPTVLRCHFSTSSHQPAVVQWKFKSYCQDRMGESLGMSSTRAQSLSKRNLEWDPYLDCLDSRRTVRVVASKQGSTVTLGDFYRGREITIVHDADLQIGKLMWGDSGLYYCIITTPDDLEGKNEDSVELLVLEWVFVGLVLLGVFLFFVLVGICWCQCCPHSCCCYVRCPCCPDSCCCPQALYEAGKAAKAGYPPSVSGVPGPYSIPSVPLGGAPSSGMLMDKPHPPPLAPSDSTGGSHSVRKGYRIQADKERDSMKVLYYVEKELAQFDPARRMRGRYNNTISELSSLHEEDSNFRQSFHQMRSKQFPVSGDLESNPDYWSGVMGGSSGASRGPSAMEYNKEDRESFRHSQPRSKSEMLSRKNFATGVPAVSMDELAAFADSYGQRPRRADGNSHEARGGSRFERSESRAHSGFYQDDSLEEYYGQRSRSREPLTDADRGWAFSPARRRPAEDAHLPRLVSRTPGTAPKYDHSYLGSARERQARPEGASRGGSLETPSKRSAQLGPRSASYYAWSPPGTYKAGSSQDDQEDASDDALPPYSELELTRGPSYRGRDLPYHSNSEKKRKKEPAKKTNDFPTRMSLVV

SEQ ID NO: 33721 - protein, 534 aa, Homo sapiens
LGKMDRVLLRWISLFWLTAMVEGLQVTVPDKKKVAMLFQPTVLRCHFSTSSHQPAVVQWKFKSYCQDRMGESLGMSSTRAQSLSKRNLEWDPYLDCLDSRRTVRVVASKQGSTVTLGDFYRGREITIVHDADLQIGKLMWGDSGLYYCIITTPDDLEGKNEDSVELLVLGRTGLLADLLPSFAVEIMPVRKGYRIQADKERDSMKVLYYVEKELAQFDPARRMRGRYNNTISELSSLHEEDSNFRQSFHQMRSKQFPVSGDLESNPDYWSGVMGGSSGASRGPSAMEYNKEDRESFRHSQPRSKSEMLSRKNFATGVPAVSMDELAAFADSYGQRPRRADGNSHEARGGSRFERSESRAHSGFYQDDSLEEYYGQRSRSREPLTDADRGWAFSPARRRPAEDAHLPRLVSRTPGTAPKYDHSYLGSARERQARPEGASRGGSLETPSKRSAQLGPRSASYYAWSPPGTYKAGSSQDDQEDASDDALPPYSELELTRGPSYRGRDLPYHSNSEKKRKKEPAKKTNDFPTRMSLVV

SEQ ID NO: 33722 - protein, 170 aa, Homo sapiens
LGKMDRVLLRWISLFWLTAMVEGLQVTVPDKKKVAMLFQPTVLRCHFSTSSHQPAVVQWKFKSYCQDRMGESLGMSSTRAQSLSKRNLEWDPYLDCLDSRRTVRVVASKQGSTVTLGDFYRGREITIVHDADLQIGKLMWGDSGLYYCIITTPDDLEGKNEDSVELLVLE

SEQ ID NO: 33723 - protein, 55 aa, Homo sapiens
VKQTVVNLATLMKFLKVAHTHLKGLMFLWKASQNISQFSVTCWFVCLLVYLLVYQ

SEQ ID NO: 33724 - protein, 16 aa, Homo sapiens
MSRVASPPERKAVIPE

SEQ ID NO: 33725 - protein, 211 aa, Homo sapiens
VTLFAKIPGSMDLSLLWVLLPLVTMAWGQYGDYGYPYQQYHDYSDDGWVNLNRQGFSYQCPQGQVIVAVRSIFSKKEGSDRQWNYACMPTPQSLGEPTECWWEEINRAGMEWYQTCSNNGLVAGFQSRYFESVLDREWQFYCCRYSKRCPYSCWLTTEYPGHYGEEMDMISYNYDYYIRGATTTFSAVERDRQWKFIMCRMTEYDCEFANV

SEQ ID NO: 33726 - protein, 16 aa, Homo sapiens
VNMRLGLQKLLYGILF

SEQ ID NO: 33727 - protein, 50 aa, Homo sapiens
LDLLNVHVRKLHFFMGMSFILACQFSKMLPLKFLILSQFSRDTLYWELIL

SEQ ID NO: 33728 - protein, 32 aa, Homo sapiens
LLILDDGKCPLNPHSHLGTYGVFTNAAFDPSP

SEQ ID NO: 33729 - protein, 782 aa, Homo sapiens
LYQRFQRVVFGISQLLCFSALISELTNQKEVAAWTYHYSTKAYSWNISRKYCQNRYTDLVAIQNKNEIDYLNKVLPYYSSYYWIGIRKNNKTWTWVGTKKALTNEAENWADNEPNNKRNNEDCVEIYIKSPSAPGKWNDEHCLKKKHALCYTASCQDMSCSKQGECLETIGNYTCSCYPGFYGPECEYVRECGELELPQHVLMNCSHPLGNFSFNSQCSFHCTDGYQVNGPSKLECLASGIWTNKPPQCLAAQCPPLKIPERGNMTCLHSAKAFQHQSSCSFSCEEGFALVGPEVVQCTASGVWTAPAPVCKAVQCQHLEAPSEGTMDCVHPLTAFAYGSSCKFECQPGYRVRGLDMLRCIDSGHWSAPLPTCEAISCEPLESPVHGSMDCSPSLRAFQYDTNCSFRCAEGFMLRGADIVRCDNLGQWTAPAPVCQALQCQDLPVPNEARVNCSHPFGAFRYQSVCSFTCNEGLLLVGASVLQCLATGNWNSVPPECQAIPCTPLLSPQNGTMTCVQPLGSSSYKSTCQFICDEGYSLSGPERLDCTRSGRWTDSPPMCEAIKCPELFAPEQGSLDCSDTRGEFNVGSTCHFSCDNGFKLEGPNNVECTTSGRWSATPPTCKGIASLPTPGVQCPALTTPGQGTMYCRHHPGTFGFNTTCYFGCNAGFTLIGDSTLSCRPSGQWTAVTPACRAVKCSELHVNKPIAMNCSNLWGNFSYGSICSFHCLEGQLLNGSAQTACQENGHWSTTVPTCQDDGKCPLNPHSHLGTYGVFTNAAFDPSP

SEQ ID NO: 33730 - protein, 28 aa, Homo sapiens
VSFFRSAIPGHVGKQASPELLGKRTKDV

SEQ ID NO: 33731 - protein, 16 aa, Homo sapiens
MILVSSLIILLIVSTF

SEQ ID NO: 33732 - protein, 137 aa, Homo sapiens
LPLKIPHPLHAAAAAAMQGEDARYLKRKVKGGNIDVHPSEKALIVHYEVEATILGEMGDPMLGERKECQKIIRLKSLNANTDITSLARKVVEECKLIHPSKLNEVEQLLYYLQNRRDSLSGKDWEGSAGLLKREHDL

SEQ ID NO: 33733 - protein, 13 aa, Homo sapiens
VCEIQWSMRAFVV

SEQ ID NO: 33734 - protein, 563 aa, Homo sapiens
LVAGPSGKMGNREMEELIPLVNRLQDAFSALGQSCLLELPQIAVVGGQSAGKSSVLENFVGRDFLPRGSGIVTRRPLVLQLVTSKAEYAEFLHCKGKKFTDFDEVRLEIEAETDRVTGMNKGISSIPINLRVYSPHVLNLTLIDLPGITKVPVGDQPPDIEYQIREMIMQFITRENCLILAVTPANTDLANSDALKLAKEVDPQGLRTIGVITKLDLMDEGTDARDVLENKLLPLRRGYVGVVNRSQKDIDGKKDIKAAMLAERKFFLSHPAYRHIADRMGTPHLQKVLNQQLTNHIRDTLPNFRNKLQGQLLSIEHEVEAYKNFKPEDPTRKTKALLQMVQQFAVDFEKRIEGSGDQVDTLELSGGAKINRIFHERFPFEIVKMEFNEKELRREISYAIKNIHGIRTGLFTPDMAFEAIVKKQIVKLKGPSLKSVDLVIQELINTVKKCTKKLANFPRLCEETERIVANHIREREGKTKDQVLLLIDIQVSYINTNHEDFIGFANAQQRSSQVHKKTTVGNQVIRKGWLTISNIGIMKGGSKGYWFVLTAESLSWYKDDENI

SEQ ID NO: 33735 - protein, 647 aa, Homo sapiens
LVAGPSGKMGNREMEELIPLVNRLQDAFSALGQSCLLELPQIAVVGGQSAGKSSVLENFVGRDFLPRGSGIVTRRPLVLQLVTSKAEYAEFLHCKGKKFTDFDEVRLEIEAETDRVTGMNKGISSIPINLRVYSPHVLNLTLIDLPGITKVPVGDQPPDIEYQIREMIMQFITRENCLILAVTPANTDLANSDALKLAKEVDPQGLRTIGVITKLDLMDEGTDARDVLENKLLPLRRGYVGVVNRSQKDIDGKKDIKAAMLAERKFFLSHPAYRHIADRMGTPHLQKVLNQQLTNHIRDTLPNFRNKLQGQLLSIEHEVEAYKNFKPEDPTRKTKALLQMVQQFAVDFEKRIEGSGDQVDTLELSGGAKINRIFHERFPFEIVKMEFNEKELRREISYAIKNIHGIRTGLFTPDMAFEAIVKKQIVKLKGPSLKSVDLVIQELINTVKKCTKKLANFPRLCEETERIVANHIREREGKTKDQVLLLIDIQVSYINTNHEDFIGFANAQQRSSQVHKKTTVGNQVIRKGWLTISNIGIMKGGSKGYWFVLTAESLSWYKDDEEKEKKYMLPLDNLKVRDVEKSFMSSKHIFALFNTEQRNVYKDYRFLELACDSQEDVDSWKASLLRAGVYPDKSVVSWIYLLCKNYY

SEQ ID NO: 33736 - protein, 877 aa, Homo sapiens
LVAGPSGKMGNREMEELIPLVNRLQDAFSALGQSCLLELPQIAVVGGQSAGKSSVLENFVGRDFLPRGSGIVTRRPLVLQLVTSKAEYAEFLHCKGKKFTDFDEVRLEIEAETDRVTGMNKGISSIPINLRVYSPHVLNLTLIDLPGITKVPVGDQPPDIEYQIREMIMQFITRENCLILAVTPANTDLANSDALKLAKEVDPQGLRTIGVITKLDLMDEGTDARDVLENKLLPLRRGYVGVVNRSQKDIDGKKDIKAAMLAERKFFLSHPAYRHIADRMGTPHLQKVLNQQLTNHIRDTLPNFRNKLQGQLLSIEHEVEAYKNFKPEDPTRKTKALLQMVQQFAVDFEKRIEGSGDQVDTLELSGGAKINRIFHERFPFEIVKMEFNEKELRREISYAIKNIHGIRTGLFTPDMAFEAIVKKQIVKLKGPSLKSVDLVIQELINTVKKCTKKLANFPRLCEETERIVANHIREREGKTKDQVLLLIDIQVSYINTNHEDFIGFANAQQRSSQVHKKTTVGNQGTNLPPSRQIVIRKGWLTISNIGIMKGGSKGYWFVLTAESLSWYKDDEEKEKKYMLPLDNLKVRDVEKSFMSSKHIFALFNTEQRNVYKDYRFLELACDSQEDVDSWKASLLRAGVYPDKSVAENDENGQAENFSMDPQLERQVETIRNLVDSYMSIINKCIRDLIPKTIMHLMINNVKDFINSELLAQLYSSEDQNTLMEESAEQAQRRDEMLRMYQALKEALGIIGDISTATVSTPAPPPVDDSWIQHSRRSPPPSPTTQRRPTLSAPLARPTSGRGPAPAIPSPGPHSGAPPVPFRPGPLPPFPSSSDSFGAPPQVPSRPTRAPPSVPSRRPPPSPTRPTIIRPLESSLLD

SEQ ID NO: 33737 - protein, 871 aa, Homo sapiens
LVAGPSGKMGNREMEELIPLVNRLQDAFSALGQSCLLELPQIAVVGGQSAGKSSVLENFVGRDFLPRGSGIVTRRPLVLQLVTSKAEYAEFLHCKGKKFTDFDEVRLEIEAETDRVTGMNKGISSIPINLRVYSPHVLNLTLIDLPGITKVPVGDQPPDIEYQIREMIMQFITRENCLILAVTPANTDLANSDALKLAKEVDPQGLRTIGVITKLDLMDEGTDARDVLENKLLPLRRGYVGVVNRSQKDIDGKKDIKAAMLAERKFFLSHPAYRHIADRMGTPHLQKVLNQQLTNHIRDTLPNFRNKLQGQLLSIEHEVEAYKNFKPEDPTRKTKALLQMVQQFAVDFEKRIEGSGDQVDTLELSGGAKINRIFHERFPFEIVKMEFNEKELRREISYAIKNIHGIRTGLFTPDMAFEAIVKKQIVKLKGPSLKSVDLVIQELINTVKKCTKKLANFPRLCEETERIVANHIREREGKTKDQVLLLIDIQVSYINTNHEDFIGFANAQQRSSQVHKKTTVGNQVIRKGWLTISNIGIMKGGSKGYWFVLTAESLSWYKDDEEKEKKYMLPLDNLKVRDVEKSFMSSKHIFALFNTEQRNVYKDYRFLELACDSQEDVDSWKASLLRAGVYPDKSVGNNKAENDENGQAENFSMDPQLERQVETIRNLVDSYMSIINKCIRDLIPKTIMHLMINNVKDFINSELLAQLYSSEDQNTLMEESAEQAQRRDEMLRMYQALKEALGIIGDISTATVSTPAPPPVDDSWIQHSRRSPPPSPTTQRRPTLSAPLARPTSGRGPAPAIPSPGPHSGAPPVPFRPGPLPPFPSSSDSFGAPPQVPSRPTRAPPSVPSRRPPPSPTRPTIIRPLESSLLD

SEQ ID NO: 33738 - protein, 867 aa, Homo sapiens
LVAGPSGKMGNREMEELIPLVNRLQDAFSALGQSCLLELPQIAVVGGQSAGKSSVLENFVGRDFLPRGSGIVTRRPLVLQLVTSKAEYAEFLHCKGKKFTDFDEVRLEIEAETDRVTGMNKGISSIPINLRVYSPHVLNLTLIDLPGITKVPVGDQPPDIEYQIREMIMQFITRENCLILAVTPANTDLANSDALKLAKEVDPQGLRTIGVITKLDLMDEGTDARDVLENKLLPLRRGYVGVVNRSQKDIDGKKDIKAAMLAERKFFLSHPAYRHIADRMGTPHLQKVLNQQLTNHIRDTLPNFRNKLQGQLLSIEHEVEAYKNFKPEDPTRKTKALLQMVQQFAVDFEKRIEGSGDQVDTLELSGGAKINRIFHERFPFEIVKMEFNEKELRREISYAIKNIHGIRTGLFTPDMAFEAIVKKQIVKLKGPSLKSVDLVIQELINTVKKCTKKLANFPRLCEETERIVANHIREREGKTKDQVLLLIDIQVSYINTNHEDFIGFANAQQRSSQVHKKTTVGNQVIRKGWLTISNIGIMKGGSKGYWFVLTAESLSWYKDDEEKEKKYMLPLDNLKVRDVEKSFMSSKHIFALFNTEQRNVYKDYRFLELACDSQEDVDSWKASLLRAGVYPDKSVAENDENGQAENFSMDPQLERQVETIRNLVDSYMSIINKCIRDLIPKTIMHLMINNVKDFINSELLAQLYSSEDQNTLMEESAEQAQRRDEMLRMYQALKEALGIIGDISTATVSTPAPPPVDDSWIQHSRRSPPPSPTTQRRPTLSAPLARPTSGRGPAPAIPSPGPHSGAPPVPFRPGPLPPFPSSSDSFGAPPQVPSRPTRAPPSVPSRRPPPSPTRPTIIRPLESSLLD

SEQ ID NO: 33739 - protein, 31 aa, Homo sapiens
MTQKKRSSKLPLLPMSKMNGKNAYKWNFSFT

SEQ ID NO: 33740 - protein, 43 aa, Homo sapiens
MKKKKRSSKLPLLPMSKMNGKNAYKWNFSFTIAIRFFAVEALK

SEQ ID NO: 33741 - protein, 22 aa, Homo sapiens
VQSKAAFELMAALMTLGETVKR

SEQ ID NO: 33742 - protein, 21 aa, Homo sapiens
LFLFLVIMLKKTSFLALKASC

SEQ ID NO: 33743 - protein, 61 aa, Homo sapiens
LTFHNFRRFTVSLFLGTWLCCPASETNSSIVGLAPAFENKERLVEHQHSMEFPGRSHFKTS

SEQ ID NO: 33744 - protein, 249 aa, Homo sapiens
LGQAASSPEPTGCLLSQRRPLITVAMPGGLLLGDVAPNFEANTTVGRIRFHDFLGDSWGILFSHPRDFTPVCTTELGRAAKLAPEFAKRNVKLIALSIDSVEDHLAWSKDINAYNCEEPTEKLPFPIIDDRNRELAILLGMLDPAEKDEKGMPVTARVVFVFGPDKKLKLSILYPATTGRNFDEILRVVISLQLTAEKRVATPVDWKDGDSVMVLPTIPEEEAKKLFPKGVFTKELPSGKKYLRYTPQP

SEQ ID NO: 33745 - protein, 81 aa, Homo sapiens
LYFALINMLASLSGFLMTTTSKHAAYCLKGSCLTQARVQWPLKLTTASNFWAQVILSLPVVFVDCLMESHGTRRLKQCLQF

SEQ ID NO: 33746 - protein, 57 aa, Homo sapiens
LYLISLGMVLGADAVWLWIAPYGQLCPQGRMRIATEVLKSKPNSSHWHTGIRQKAGS

SEQ ID NO: 33747 - protein, 53 aa, Homo sapiens
MVLGADAVWLWIAPYGQLCPQGRMRIATEVLKSKPNSSHWHTGETPLFCTSHF

SEQ ID NO: 33748 - protein, 15 aa, Homo sapiens
MLDPSKQLVRFYTCI

SEQ ID NO: 33749 - protein, 269 aa, Homo sapiens
VFNFIGYSFFLIVFVPMIENSSWSMTFEERENRRLQEASMRLEQENDDLAHELVTSKIALRNDLDQAEDKADVLNKELLLTKQRLVETEEEKRKQEEETAQLKEVFRKQLEKAEYEIKKTTAIIAEYKQICSQLSTRLEKQQAASKEELEVVKGKMMACKHCSDIFSKEGALKLAATGREDQGIETDDEKDSLKKQLREMELELAQTKLQLVEAKCKIQELEHQRGALMNEIQAAKNSWFSKTLNSIKTATGTQPLQPAPVTQPPKEST

SEQ ID NO: 33750 - protein, 40 aa, Homo sapiens
LKVTRLLLPIFRLLLAEAERLTLHNMAAWCVWCPRADESR

SEQ ID NO: 33751 - protein, 1132 aa, Homo sapiens
LEGLLPVFPRMSLQEMFRFPMGLLLGSVLLVASAPATLEPPGCSNKEQQVTVSHTYKIDVPKSALVQVDADPQPLSDDGASLLALGEAREEQNIIFRHNIRLQTPQKDCELAGSVQDLLARVKKLEEEMVEMKEQCSAQRCCQGVTDLSRHCSGHGTFSLETCSCHCEEGREGPACERLACPGACSGHGRCVDGRCLCHEPYVGADCGYPACPENCSGHGECVRGVCQCHEDFMSEDCSEKRCPGDCSGHGFCDTGECYCEEGFTGLDCAQVVTPQGLQLLKNTEDSLLVSWEPSSQVDHYLLSYYPLGKELSGKQIQVPKEQHSYEILGLLPGTKYIVTLRNVKNEVSSSPQHLLATTDLAVLGTAWVTDETENSLDVEWENPSTEVDYYKLRYGPMTGQEVAEVTVPKSSDPKSRYDITGLHPGTEYKITVVPMRGELEGKPILLNGRTEIDSPTNVVTDRVTEDTATVSWDPVQAVIDKYVVRYTSADGDTKEMAVHKDESSTVLTGLKPGEAYKVYVWAERGNQGSKKADTNALTEIDSPANLVTDRVTENTATISWDPVQATIDRYVVRYTSAKDGETREVPVGKEQSSTVLTGLRPGVEYTVHVWAQKGAQESKKADTKAQTDIDSPQNLVTDWVTENTATVSWDPVQATIDRYVVHYTSANGETREVPVGKEQSSTVLTGLRPGMEYTVHVWAQKGNQESKKADTKAQTEIDGPKNLVTDWVTENMATVSWDPVQATIDKYMVRYTSADGETREVPVGKEHSSTVLTGLRPGMEYMVHVWAQKGAQESKKADTKAQTELDPPRNLRPSAVTQSGGILTWTPPSAQIHGYILTYQFPDGTVKEMQLGREDQRFALQGLEQGATYPVSLVAFKGGRRSRNVSTTLSTVGARFPHPSDCSQVQQNSNAASGLYTIYLHGDASRPLQVYCDMETDGGGWIVFQRRNTGQLDFFKRWRSYVEGFGDPMKEFWLGLDKLHNLTTGTPARYEVRVDLQTANESAYAIYDFFQVASSKERYKLTVGKYRGTAGDALTYHNGWKFTTFDRDNDIALSNCALTHHGGWWYKNCHLANPNGRYGETKHSEGVNWEPWKGHEFSIPYVELKIRPHGYSREPVLGRKKRTLRGRLRTF

SEQ ID NO: 33752 - protein, 491 aa, Homo sapiens
MLWTILTICILISWESHAAQLQILMEFLKVARRNKREQLEQIQKELSVLEEDIKRVEEMSGLYSPVSEDSTVPQFEAPSPSHSSIIDSTEYSQPPGFSGSSQTKKQPWYNSTLASRRKRLTAHFEDLEQCYFSTRMSRISDDSRTASQLDEFQECLSKFTRYNSVRPLATLSYASDLYNGSSIVSSIEFDRDCDYFAIAGVTKKIKVYEYDTVIQDAVDIHYPENEMTCNSKISCISWSSYHKNLLASSDYEGTVILWDGFTGQRSKVYQEHEKRCWSVDFNLMDPKLLASGSDDAKVKLWSTNLDNSVASIEAKANVCCVKFSPSSRYHLAFGCADHCVHYYDLRNTKQPIMVFKGHRKAVSYAKFVSGEEIVSASTDSQLKLWNVGKPYCLRSFKGHINEKNFVGLASNGDYIACGSENNSLYLYYKGLSKTLLTFKFDTVKSVLDKDRKEDDTNEFVSAVCWRALPDGESNVLIAANSQGTIKVLELV

SEQ ID NO: 33753 - protein, 862 aa, Homo sapiens
MALAGLCALLACCWGPAAVLATAAGDVDPSKELECKLKSITVSALPFLRENDLSIMHSPSASEPKLLFSVRNDFPGEMVVVDDLENTELPYFVLEISGNTEDIPLVRWRQQWLENGTLLFHIHHQDGAPSLPGQDPTEEPQHESAEEELRILHISVMGGMIALLLSILCLVMILYTRRRWCKRRRVPQPQKSASAEAANEIHYIPSVLIGGHGRESLRNARVQGHNSSGTLSIRETPILDGYEYDITDLRHHLQRECMNGGEDFASQVTRTLDSLQGCNEKSGMDLTPGSDNAKLSLMNKYKDNIIATSPVDSNHQQATLLSHTSSSQRKRINNKARAGSAFLNPEGDSGTEAENDPQLTFYTDPSRSRRRSRVGSPRSPVNKTTLTLISITSCVIGLVCSSHVNCPLVVKITLHVPEHLIADGSRFILLEGSQLDASDWLNPAQVVLFSQQNSSGPWAMDLCARRLLDPCEHQCDPETGECLCYEGYMKDPVHKHLCIRNEWGTNQGPWPYTIFQRGFDLVLGEQPSDKIFRFTYTLGEGMWLPLSKSFVIPPAELAINPSAKCKTDMTVMEDAVEVREELMTSSSFDSLEVLLDSFGPVRDCSKDNGGCSKNFRCISDRKLDSTGCVCPSGLSPMKDSSGCYDRHIGVDCSDGFNGGCEQLCLQQMAPFPDDPTLYNILMFCGCIEDYKLGVDGRSCQLITETCPEGSDCGESRELPMNQTLFGEMFFGYNNHSKEVAAGQVLKGTFRQNNFARGLDQQLPDGLVVATVPLENQCLEEISEPTPDPDFLTGMVNFSEVSGYPVLQHWKVRSVMYHIKLNQVAISQGEHCCRLSCPPSLELRSPFQGEKPLVPLSKMQPKM

SEQ ID NO: 33754 - protein, 100 aa, Homo sapiens
LKERNVFGVCHIFATFSDTFVHVTDLSGKETICRVTGGMKVKADRDESSPCAAFLAAQDVAQRCKEPGITALHVKLWATGGNRTKTPGPGASRPSEPLPA

SEQ ID NO: 33755 - protein, 399 aa, Homo sapiens
LPRALLLSFCAAALQLVSSKRDLVLVKEALSWYDAQQHCRLHYTDLADLQPSGLWKLYSLMTSTPAWIGLFFDASTSGLRWSSGSTFTALEWGQKLPEFGVGFCATLYTWLKLPSIGAASCTAQKPFLCYCDPDVGHLISTKPSLSLTTSPKPAVVQISGQTFMRFDQVMTWSSALLYCRSHHTDLADLQMVTDETGKEALRSIMSETEAWIGLYLNANSGSLSWSSDLGASIPSWLQVPMMVRGLCTALGIYMTYSPKVYSVNCSSLLPFFCFYDSSTGHRASAELPPLFHTSPTEMTEETTPRPGRAVASVGSGTDRRDTAAATEAQHLSSESKEKTSAQKSGHPFGILKADFTISTLMDPEEMKDQFLRQIQEVLKLTLGHEQFRLKWVSFEVNKK

SEQ ID NO: 33756 - protein, 11 aa, Homo sapiens
VEKGLIETKHI

SEQ ID NO: 33757 - protein, 13 aa, Homo sapiens
MRDGDCSGRRVLL

SEQ ID NO: 33758 - protein, 7 aa, Homo sapiens
MYLWPWT

SEQ ID NO: 33759 - protein, 42 aa, Homo sapiens
LHFSMWQTEQSHNAFSAGLKTAHRPELPLYYLKLHRWLVKFN

SEQ ID NO: 33760 - protein, 43 aa, Homo sapiens
LWKYAVGSQSLTSHSFAKGRELSWKMFLILSALNINGCLRRVR

SEQ ID NO: 33761 - protein, 82 aa, Homo sapiens
MRYNYIDMTPHDLPMTRGVSKLQTPPDWSPSISFLLLFVDSHCGNLLVFCCGFISLCGGARATLARQAPSCALLSRASSPLS

SEQ ID NO: 33762 - protein, 66 aa, Homo sapiens
LCPSFQGLFSTQLTPLACLTLLTETVFRLPLTGWREVDLQTRGKAGVSLFGRPLMGHQSRPKVLAE

SEQ ID NO: 33763 - protein, 11 aa, Homo sapiens
MHWSVMRYIYK

SEQ ID NO: 33764 - protein, 20 aa, Homo sapiens
MSSQDRLHWIHDQEDSARFF

SEQ ID NO: 33765 - protein, 16 aa, Homo sapiens
MIFFFLVPWLWYELCT

SEQ ID NO: 33766 - protein, 24 aa, Homo sapiens
LPLAPLLLRVSCWAVMATGPPLTK

SEQ ID NO: 33767 - protein, 50 aa, Homo sapiens
LCQLWSLTLLSLRLQTGLRACGCPLCLFSSFLLKTGVLRRLVYSSHCSGH

SEQ ID NO: 33768 - protein, 115 aa, Homo sapiens
MVTFAALYSTHKERGHSDTMVFFYLWIVFYIISSCYTLIWDLKMDWGLFDKNAGENTFLREEIVYPQKAYYYCAIIEDVILRFAWTIQISITSTTLLPHSGDIIATVFAPLEVFR

SEQ ID NO: 33769 - protein, 25 aa, Homo sapiens
LNFLKSSLTSLVFLLYNPFLDQRNL

SEQ ID NO: 33770 - protein, 116 aa, Homo sapiens
LLECWAWNQVRWILIAYFPFLWHQLIVEQQDEQLELVSGSIGVLKNMSQRIGGELEEQAVMLEDFSHELESTQSRLDNVMKKLAKVSHMTSDRRQWCAIAILFAVLLVVLILFLVL

SEQ ID NO: 33771 - protein, 148 aa, Homo sapiens
MGELMAFLLPLIIVLMVKHSDSRTHSLRYFRLGVSDPIHGVPEFISVGYVDSHPITTYDSVTRQKEPRAPWMAENLAPDHWERYTQLLRGWQQMFKVELKRLQRHYNHSGVHAAETDASPIPPQPAETPGLASNKRMLNCTCCSFGKA

SEQ ID NO: 33772 - protein, 24 aa, Homo sapiens
LMAFLLPLIIVLMVKHSDSPCVKL

SEQ ID NO: 33773 - protein, 28 aa, Homo sapiens
MIADPSFPVLLPLGAMLSSVPHRVKPSA

SEQ ID NO: 33774 - protein, 507 aa, Homo sapiens
VDNYNSLGGGKRGSSPSRKSTKKATNENYEDNEKSDSSGSRSSCFGFVAYSVNSGERSRVKIKTLTHQPACSDTPRAGRCLSPSPSPSPRKLRCLDQLESEKEERRERHSKKRRVKEGNPNDTLDFLWLGTPSTMTTSASSHLNKGIKQVYMSLPQGEKVQAMYIWIDGTGEGLRCKTRTLDSEPKCVEELPEWNFDGSSTLQSEGSNSDMYLVPAAMFRDPFRKDPNKLVLCEVFKYNRRPAETNLRHTCKRIMDMVSNQHPWFGMEQEYTLMGTDGHPFGWPSNGFPGPQGPYYCGVGADRAYGRDIVEAHYRACLYAGVKIAGTNAEVMPAQWEFQIGPCEGISMGDHLWVARFILHRVCEDFGVIATFDPKPIPGNWNGAGCHTNFSTKAMREENGLKYIEEAIEKLSKRHQYHIRAYDPKGGLDNARRLTGFHETSNINDFSAGVANRSASIRIPRTVGQEKKGYFEDRRPSANCDPFSVTEALIRTCLLNETGDEPFQYKN

SEQ ID NO: 33775 - protein, 49 aa, Homo sapiens
LSLLEAILGCWSSPRGRVVRLREKQLCFQLGKHGRLPVETLPLYFRTLP

SEQ ID NO: 33776 - protein, 212 aa, Homo sapiens
LEQLIDQKLKDYEDLREDMRGKELEVKNLLEKGKTEQQTADQLLARADAAKALAEEAAKKGRDTLQEANDILNNLKDFDRRVNDNKTAAEEALRKIPAINQTITEANEKTREAQQALGSAAADATEAKNKAHEAERIASAVQKNATSTKAEAERTFAEVTDLDNEVNNMLKQLQEAEKELKRKQDDADQDMMMAGMVRGFGIFAHWQKVNSV

SEQ ID NO: 33777 - protein, 13 aa, Homo sapiens
LSSLCLLAALLAS

SEQ ID NO: 33778 - protein, 11 aa, Homo sapiens
MSQLPKGGDIS

SEQ ID NO: 33779 - protein, 142 aa, Homo sapiens
LPLVGIGMSKNTVSSARFRKVDVDEYDENKFVDEEDGGDGQAGPDEGEVDSCLRQGNMTAALQAALKNPPINTKSQAVKDRAGSIVLKVLISFKANDIEKAVQSLDKNGVDLLMKYIYKGFESPSDNSSAMLLQWHEKVPLV

SEQ ID NO: 33780 - protein, 158 aa, Homo sapiens
LPLVGIGMSKNTVSSARFRKVDVDEYDENKFVDEEDGGDGQAGPDEGEVDSCLRQGNMTAALQAALKNPPINTKSQAVKDRAGSIVLKVLISFKANDIEKAVQSLDKNGVDLLMKYIYKGFESPSDNSSAMLLQWHEKALAAGGVGSIVRVLTARKTV

SEQ ID NO: 33781 - protein, 161 aa, Homo sapiens
LPLVGIGMSKNTVSSARFRKVDVDEYDENKFVDEEDGGDGQAGPDEGEVDSCLRHSITGNMTAALQAALKNPPINTKSQAVKDRAGSIVLKVLISFKANDIEKAVQSLDKNGVDLLMKYIYKGFESPSDNSSAMLLQWHEKALAAGGVGSIVRVLTARKTV

SEQ ID NO: 33782 - protein, 73 aa, Homo sapiens [sequence omitted]

SEQ ID NO: 33783 - protein, 12 aa, Homo sapiens
VTSAVLVLLCVD

SEQ ID NO: 33784 - protein, 36 aa, Homo sapiens
LIPTLRLNNMAQSLVQEKVITELSHQQICSQGSQAN

SEQ ID NO: 33785 - protein, 8 aa, Homo sapiens
LLHLLSQK

SEQ ID NO: 33786 - protein, 134 aa, Homo sapiens
LRLLGASGVVQRDRHPPLHPSSSLWTLTEAQSISHPLEKGIFLFPGILGVSCVHLIDLFPLIAFGCLLCGFPALHCSLIALDTRGMSGPQSENTQENNRGKRSSLGLADYAQTRSFPTFGQGEDGKWKRTPSEW

SEQ ID NO: 33787 - protein, 70 aa, Homo sapiens
LLCILEKFLCDTEKSASSNVRLKTNKEVPGLVHQPRANMHISESQQEFFRMLDEKIEKGRDYCSEEEDIT

SEQ ID NO: 33788 - protein, 999 aa, Homo sapiens
LRAEGGGSAGAGDRLGGFGKQFGAGGRPCYSASRPVSARLAAPWPPASSNVSHRPGVAAARARNRGAMSEAGGRGCGSPVPQRARWRLVAATAAFCLVSATSVWTAGAEPMSREEKQKLGNQVLEMFDHAYGNYMEHAYPADELMPLTCRGRVRGQEPSRGDVDDALGKFSLTLIDSLDTLVVLNKTKEFEDAVRKVLRDVNLDNDVVVSVFETNIRVLGGLLGGHSLAIMLKEKGEYMQWYNDELLQMAKQLGYKLLPAFNTTSGLPYPRINLKFGIRKPEARTGTETDTCTACAGTLILEFAALSRFTGATIFEEYARKALDFLWEKRQRSSNLVGVTINIHTGDWVRKDSGVGAGIDSYYEYLLKAYVLLGDDSFLERFNTHYDAIMRYISQPPLLLDVHIHKPMLNARTWMDALLAFFPGLQVLKGDIRPAIETHEMLYQVIKKHNFLPEAFTTDFRVHWAQHPLRPEFAESTYFLYKATGDPYYLEVGKTLIENLNKYARVPCGFAAMKDVRTGSHEDRMDSFFLAEMFKYLYLLFADKEDIIFDIEDYIFTTEAHLLPLWLSTTNQSISKKNTTSEYTELDDSNFDWTCPNTQILFPNDPLYAQSIREPLKNVVDKSCPRGIIRVEESFRSGAKPPLRARDFMATNPEHLEILKKMGVSLIHLKDGRVQLVQHAIQAASSIDAEDGLRFMQEMIELSSQQQKEQQLPPRAVQIVSHPFFGRVVLTAGPAQFGLDLSKHKETRGFVASSKPSNGCSELTNPEAVMGKIALIQRGQCMFAEKARNIQNAGAIGGIVIDDNEGSSSDTAPLFQMAGDGKDTDDIKIPMLFLFSKEGSIILDAIREYEEVEVLLSDKAKDRDPEMENEEQPSSENDSQNQSGEQISSSSQEVDLVDQESSEENSLNSHPESLSLADMDNAASISPSEQTSNPTENHETTNLNGECTDLDNQLQEQSETEEDSNPNVSWGKKVQPIDSILADWNEDIEAFEMMEKDEL

SEQ ID NO: 33789 - protein, 1015 aa, Homo sapiens
LRAEGGGSAGAGDRLGGFGKQFGAGGRPCYSASRPVSARLAAPWPPASSNVSHRPGVAAARARNRGAMSEAGGRGCGSPVPQRARWRLVAATAAFCLVSATSVWTAGAEPMSREEKQKLGNQVLEMFDHAYGNYMEHAYPADELMPLTCRGRVRGQEPSRGDVDDALGKFSLTLIDSLDTLVVLNKTKEFEDAVRKVLRDVNLDNDVVVSVFETNIRVLGGLLGGHSLAIMLKEKGEYMQWYNDELLQMAKQLGYKLLPAFNTTSGLPYPRINLKFGIRKPEARTGTETDTCTACAGTLILEFAALSRFTGATIFEEYARKALDFLWEKRQRSSNLVGVTINIHTGDWVRKDSGVGAGIDSYYEYLLKAYVLLGDDSFLERFNTHYDAIMRYISQPPLLLDVHIHKPMLNARTWMDALLAFFPGLQVLKGDIRPAIETHEMLYQVIKKHNFLPEAFTTDFRVHWAQHPLRPEFAESTYFLYKATGDPYYLEVGKTLIENLNKYARVPCGFAAMKDVRTGSHEDRMDSFFLAEMFKYLYLLFADKEDIIFDIEDYIFTTEAHLLPLWLSTTNQSISKKNTTSEYTELDDSNFDWTCPNTQILFPNDPLYAQSIREPLKNVVDKSCPRGIIRVEESFRSGAKPPLRARDFMATNPEHLEILKKMGVSLIHLKDGRVQLVQHAIQAASSIDAEDGLRFMQEMIELSSQQQKEQQLPPRAVQIVSHPFFGRVVLTAGPAQFGLDLSKHKETRGFVASSKPSNGCSELTNPEAVMGKIALIQRGQCMFAEKARNIQNAGAIGGIVIDDNEGSSSDTAPLFQMAGDGKDTDDIKIPMLFLFSKEGSIILDAIREYEEVEVLLSDKAKDRAAILKGKMIPSYIINSNPEMENEEQPSSENDSQNQSGEQISSSSQEVDLVDQESSEENSLNSHPESLSLADMDNAASISPSEQTSNPTENHETTNLNGECTDLDNQLQEQSETEEDSNPNVSWGKKVQPIDSILADWNEDIEAFEMMEKDEL

SEQ ID NO: 33790 - protein, 37 aa, Homo sapiens
LWVPGSPASAMETSGGDGRVLPGVGHLRVDGGGRAHE

SEQ ID NO: 33791 - protein, 221 aa, Homo sapiens
MIPNGYLMFEDENFIESSVAKLNALRKSGQFCDVRLQVCGHEMLAHRAVLACCSPYLFEIFNSDSDPHGISHVKFDDLNPEAVEVLLNYAYTAQLKADKELVKDVYSAAKKLKMDRVKQVCGDYLLSRMDVTSCISYRNFASCMGDSRLLNKVDAYIQEHLLQISEEEEFLKLPRLKLEVMLEDNVCLPSNGKLYTKVINWVQRSIWENGDSLEELMEEVY

SEQ ID NO: 33792 - protein, 1365 aa, Homo sapiens
LKTTMAWKTLPIYLLLLLSVFVIQQVSSQDLSSCAGRCGEGYSRDATCNCDYNCQHYMECCPDFKRVCTAELSCKGRCFESFERGRECDCDAQCKKYDKCCPDYESFCAEVHNPTSPPSSKKAPPPSGASQTIKSTTKRSPKPPNKKKTKKVIESEEITEVKDNKKNRTKKKPTPKPPVVDEAGSGLDNGDFKVTTPDTSTTQHNKVSTSPKITTAKPINPRPSLPPNSDTSKETSLTVNKETTVETKETTTTNKQTSTDGKEKTTSAKETQSIEKTSAKDLAPTSKVLAKPTPKAETTTKGPALTTPKEPTPTTPKEPASTTPKEPTPTTIKSAPTTPKEPAPTTTKSAPTTPKEPAPTTTKEPAPTTPKEPAPTTTKEPAPTTTKSAPTTPKEPAPTTPKKPAPTTPKEPAPTTPKEPTPTTPKEPAPTTKEPAPTTPKEPAPTAPKKPAPTTPKEPAPTTPKEPAPTTTKEPSPTTPKEPAPTTTKSAPTTTKEPAPTTTKSAPTTPKEPSPTTTKEPAPTTPKEPAPTTPKKPAPTTPKEPAPTTPKEPAPTTTKKPAPTTPKEPAPTTPKETAPTTPKKLTPTTPEKLAPTTPEKPAPTTPEELAPTTPEEPTPTTPEEPAPTTPKAAAPNTPKEPAPTTPKEPAPTTPKEPAPTTPKETAPTTPKGTAPTTLKEPAPTTPKKPAPKELAPTTTKEPTSTTSDKPAPTTPKGTAPTTPKEPAPTTPKEPAPTTPKGTAPTTLKEPAPTTPKKPAPKELAPTTTKGPTSTTSDKPAPTTPKETAPTTPKEPAPTTPKKPAPTTPETPPPTTSEVSTPTTTKEPTTIHKSPDESTPELSAEPTPKALENSPKEPGVPTTKTPAATKPEMTTTAKDKTTERDLRTTPETTTAAPKMTKETATTTEKTTESKITATTTQVTSTTTQDTTPFKITTLKTTTLAPKVTTTKKTITTTEIMNKPEETAKPKDRATNSKATTPKPQKPTKAPKKPTSTKKPKTMPRVRKPKTTPTPRKMTSTMPELNPTSRIAEAMLQTTTRPNQTPNSKLVEVNPKSEDAGGAEGETPHMLLRPHVFMPEVTPDMDYLPRVPNQGIIINPMLSDETNICNGKPVDGLTTLRNGTLVAFRGHYFWMLSPFSPPSPARRITEVWGIPSPIDTVFTRCNCEGKTFFFKDSQYWRFTNDIKDAGYPKPIFKGFGGLTGQIVAALSTAKYKNWPESVYFFKRGGSIQQYIYKQEPVQKCPGRRPALNYPVYGETTQVRRRRFERAIGPSQTHTIRIQYSPARLAYQDKGVLHNEVKVSILWRGLPNVVTSAISLPNIRKPDGYDYYAFSKDQYYNIDVPSRTARAITTRSGQTLSKVWYNCP

SEQ ID NO: 33793 - protein, 1408 aa, Homo sapiens
LKTTMAWKTLPIYLLLLLSVFVIQQVSSQDLSSCAGRCGEGYSRDATCNCDYNCQHYMECCPDFKRVCTAELSCKGRCFESFERGRECDCDAQCKKYDKCCPDYESFCAEVHNPTSPPSSKKAPPPSGASQTIKSTTKRSPKPPNKKKTKKVIESEEITEEHSVSENQESSSSSSSSSSSSTIRKIKSSKNSAANRELQKKLKVKDNKKNRTKKKPTPKPPVVDEAGSGLDNGDFKVTTPDTSTTQHNKVSTSPKITTAKPINPRPSLPPNSDTSKETSLTVNKETTVETKETTTTNKQTSTDGKEKTTSAKETQSIEKTSAKDLAPTSKVLAKPTPKAETTTKGPALTTPKEPTPTTPKEPASTTPKEPTPTTIKSAPTTPKEPAPTTTKSAPTTPKEPAPTTTKEPAPTTPKEPAPTTTKEPAPTTTKSAPTTPKEPAPTTPKKPAPTTPKEPAPTTPKEPTPTTPKEPAPTTKEPAPTTPKEPAPTAPKKPAPTTPKEPAPTTPKEPAPTTTKEPSPTTPKEPAPTTTKSAPTTTKEPAPTTTKSAPTTPKEPSPTTTKEPAPTTPKEPAPTTPKKPAPTTPKEPAPTTPKEPAPTTTKKPAPTTPKEPAPTTPKETAPTTPKKLTPTTPEKLAPTTPEKPAPTTPEELAPTTPEEPTPTTPEEPAPTTPKAAAPNTPKEPAPTTPKEPAPTTPKEPAPTTPKETAPTTPKGTAPTTLKEPAPTTPKKPAPKELAPTTTKEPTSTTSDKPAPTTPKGTAPTTPKEPAPTTPKEPAPTTPKGTAPTTLKEPAPTTPKKPAPKELAPTTTKGPTSTTSDKPAPTTPKETAPTTPKEPAPTTPKKPAPTTPETPPPTTSEVSTPTTTKEPTTIHKSPDESTPELSAEPTPKALENSPKEPGVPTTKTPAATKPEMTTTAKDKTTERDLRTTPETTTAAPKMTKETATTTEKTTESKITATTTQVTSTTTQDTTPFKITTLKTTTLAPKVTTTKKTITTTEIMNKPEETAKPKDRATNSKATTPKPQKPTKAPKKPTSTKKPKTMPRVRKPKTTPTPRKMTSTMPELNPTSRIAEAMLQTTTRPNQTPNSKLVEVNPKSEDAGGAEGETPHMLLRPHVFMPEVTPDMDYLPRVPNQGIIINPMLSDETNICNGKPVDGLTTLRNGTLVAFRGHYFWMLSPFSPPSPARRITEVWGIPSPIDTVFTRCNCEGKTFFFKDSQYWRFTNDIKDAGYPKPIFKGFGGLTGQIVAALSTAKYKNWPESVYFFKRGGSIQQYIYKQEPVQKCPGRRPALNYPVYGETTQVRRRRFERAIGPSQTHTIRIQYSPARLAYQDKGVLHNEVKVSILWRGLPNVVTSAISLPNIRKPDGYDYYAFSKDQYYNIDVPSRTARAITTRSGQTLSKVWYNCP

SEQ ID NO: 33794 - protein, 1367 aa, Homo sapiens
LKTTMAWKTLPIYLLLLLSVFVIQQVSSQELSCKGRCFESFERGRECDCDAQCKKYDKCCPDYESFCAEVHNPTSPPSSKKAPPPSGASQTIKSTTKRSPKPPNKKKTKKVIESEEITEEHSVSENQESSSSSSSSSSSSTIRKIKSSKNSAANRELQKKLKVKDNKKNRTKKKPTPKPPVVDEAGSGLDNGDFKVTTPDTSTTQHNKVSTSPKITTAKPINPRPSLPPNSDTSKETSLTVNKETTVETKETTTTNKQTSTDGKEKTTSAKETQSIEKTSAKDLAPTSKVLAKPTPKAETTTKGPALTTPKEPTPTTPKEPASTTPKEPTPTTIKSAPTTPKEPAPTTTKSAPTTPKEPAPTTTKEPAPTTPKEPAPTTTKEPAPTTTKSAPTTPKEPAPTTPKKPAPTTPKEPAPTTPKEPTPTTPKEPAPTTKEPAPTTPKEPAPTAPKKPAPTTPKEPAPTTPKEPAPTTTKEPSPTTPKEPAPTTTKSAPTTTKEPAPTTTKSAPTTPKEPSPTTTKEPAPTTPKEPAPTTPKKPAPTTPKEPAPTTPKEPAPTTTKKPAPTTPKEPAPTTPKETAPTTPKKLTPTTPEKLAPTTPEKPAPTTPEELAPTTPEEPTPTTPEEPAPTTPKAAAPNTPKEPAPTTPKEPAPTTPKEPAPTTPKETAPTTPKGTAPTTLKEPAPTTPKKPAPKELAPTTTKEPTSTTSDKPAPTTPKGTAPTTPKEPAPTTPKEPAPTTPKGTAPTTLKEPAPTTPKKPAPKELAPTTTKGPTSTTSDKPAPTTPKETAPTTPKEPAPTTPKKPAPTTPETPPPTTSEVSTPTTTKEPTTIHKSPDESTPELSAEPTPKALENSPKEPGVPTTKTPAATKPEMTTTAKDKTTERDLRTTPETTTAAPKMTKETATTTEKTTESKITATTTQVTSTTTQDTTPFKITTLKTTTLAPKVTTTKKTITTTEIMNKPEETAKPKDRATNSKATTPKPQKPTKAPKKPTSTKKPKTMPRVRKPKTTPTPRKMTSTMPELNPTSRIAEAMLQTTTRPNQTPNSKLVEVNPKSEDAGGAEGETPHMLLRPHVFMPEVTPDMDYLPRVPNQGIIINPMLSDETNICNGKPVDGLTTLRNGTLVAFRGHYFWMLSPFSPPSPARRITEVWGIPSPIDTVFTRCNCEGKTFFFKDSQYWRFTNDIKDAGYPKPIFKGFGGLTGQIVAALSTAKYKNWPESVYFFKRGGSIQQYIYKQEPVQKCPGRRPALNYPVYGETTQVRRRRFERAIGPSQTHTIRIQYSPARLAYQDKGVLHNEVKVSILWRGLPNVVTSAISLPNIRKPDGYDYYAFSKDQYYNIDVPSRTARAITTRSGQTLSKVWYNCP

SEQ ID NO: 33795 - protein, 1315 aa, Homo sapiens
LKTTMAWKTLPIYLLLLLSVFVIQQVSSQDLSSCAGRCGEGYSRDATCNCDYNCQHYMECCPDFKRVCTAELSCKGRCFESFERGRECDCDAQCKKYDKCCPDYESFCAEVKDNKKNRTKKKPTPKPPVVDEAGSGLDNGDFKVTTPDTSTTQHNKVSTSPKITTAKPINPRPSLPPNSDTSKETSLTVNKETTVETKETTTTNKQTSTDGKEKTTSAKETQSIEKTSAKDLAPTSKVLAKPTPKAETTTKGPALTTPKEPTPTTPKEPASTTPKEPTPTTIKSAPTTPKEPAPTTTKSAPTTPKEPAPTTTKEPAPTTPKEPAPTTTKEPAPTTTKSAPTTPKEPAPTTPKKPAPTTPKEPAPTTPKEPTPTTPKEPAPTTKEPAPTTPKEPAPTAPKKPAPTTPKEPAPTTPKEPAPTTTKEPSPTTPKEPAPTTTKSAPTTTKEPAPTTTKSAPTTPKEPSPTTTKEPAPTTPKEPAPTTPKKPAPTTPKEPAPTTPKEPAPTTTKKPAPTTPKEPAPTTPKETAPTTPKKLTPTTPEKLAPTTPEKPAPTTPEELAPTTPEEPTPTTPEEPAPTTPKAAAPNTPKEPAPTTPKEPAPTTPKEPAPTTPKETAPTTPKGTAPTTLKEPAPTTPKKPAPKELAPTTTKEPTSTTSDKPAPTTPKGTAPTTPKEPAPTTPKEPAPTTPKGTAPTTLKEPAPTTPKKPAPKELAPTTTKGPTSTTSDKPAPTTPKETAPTTPKEPAPTTPKKPAPTTPETPPPTTSEVSTPTTTKEPTTIHKSPDESTPELSAEPTPKALENSPKEPGVPTTKTPAATKPEMTTTAKDKTTERDLRTTPETTTAAPKMTKETATTTEKTTESKITATTTQVTSTTTQDTTPFKITTLKTTTLAPKVTTTKKTITTTEIMNKPEETAKPKDRATNSKATTPKPQKPTKAPKKPTSTKKPKTMPRVRKPKTTPTPRKMTSTMPELNPTSRIAEAMLQTTTRPNQTPNSKLVEVNPKSEDAGGAEGETPHMLLRPHVFMPEVTPDMDYLPRVPNQGIIINPMLSDETNICNGKPVDGLTTLRNGTLVAFRGHYFWMLSPFSPPSPARRITEVWGIPSPIDTVFTRCNCEGKTFFFKDSQYWRFTNDIKDAGYPKPIFKGFGGLTGQIVAALSTAKYKNWPESVYFFKRGGSIQQYIYKQEPVQKCPGRRPALNYPVYGETTQVRRRRFERAIGPSQTHTIRIQYSPARLAYQDKGVLHNEVKVSILWRGLPNVVTSAISLPNIRKPDGYDYYAFSKDQYYNIDVPSRTARAITTRSGQTLSKVWYNCP

SEQ ID NO: 33796 - protein, 126 aa, Homo sapiens
LEKQNRLLHDQIEKLSDKVVASVKEGVQGPLNVSLSEEGKSQEQILEILRFIRREKEIAETRFEVAQVESLRYRQRVELLERELQELQDSLNAEREKVQVGILSFKKALVKSKEKHSFISLPFNVM

SEQ ID NO: 33797 - protein, 38 aa, Homo sapiens
LIPPSPPRVPPPQAHRFPPDVFSSSQSLPERFREPVLD

SEQ ID NO: 33798 - protein, 55 aa, Homo sapiens [sequence omitted]

SEQ ID NO: 33799 - protein, 36 aa, Homo sapiens
LPQQLGRQMIQILGTFFCVLHRFVCHHAVKQVLRES

SEQ ID NO: 33800 - protein, 59 aa, Homo sapiens
MTDRGRGRETGFAFVTFDEHDSVNKTVIQKYHTVNGHNCEVRKALSKQEMASVSSSQRG

SEQ ID NO: 33801 - protein, 24 aa, Homo sapiens
VMFILISLLVQCQLFKVVMPDNVF

SEQ ID NO: 33802 - protein, 88 aa, Homo sapiens
MRLLAKIICLMLWAICVAEDCNELPPRRNTEILTGSWSDQTYPEGTQAIYKCRPGYRSLGNVIMVCRKGEWVALNPLRKCQSKYLIHL

SEQ ID NO: 33803 - protein, 791 aa, Homo sapiens
LEFNPFYLEISCKSPDVINGSPISQKIIYKENERFQYKCNMGYEYSERGDAVCTESGWRPLPSCEEKSCDNPYIPNGDYSPLRIKHRTGDEITYQCRNGFYPATRGNTAKCTSTGWIPAPRCTLKPCDYPDIKHGGLYHENMRRPYFPVAVGKYYSYYCDEHFETPSGSYWDHIHCTQDGWSPAVPCLRKCYFPYLENGYNQNHGRKFVQGKSIDVACHPGYALPKAQTTVTCMENGWSPTPRCIRVKTCSKSSIDIENGFISESQYTYALKEKAKYQCKLGYVTADGETSGSITCGKDGWSAQPTCIKSCDIPVFMNARTKNDFTWFKLNDTLDYECHDGYESNTGSTTGSIVCGYNGWSDLPICYERECELPKIDVHLVPDRKKDQYKVGEVLKFSCKPGFTIVGPNSVQCYHFGLSPDLPICKEQVQSCGPPPELLNGNVKEKTKEEYGHSEVVEYYCNPRFLMKGPNKIQCVDGEWTTLPVCIVEESTCGDIPELEHGWAQLSSPPYYYGDSVEFNCSESFTMIGHRSITCIHGVWTQLPQCVAIDKLKKCKSSNLIILEEHLKNKKEFDHNSNIRYRCRGKEGWIHTVCINGRWDPEVNCSMAQIQLCPPPPQIPNSHNMTTTLNYRDGEKVSVLCQENYLIQEGEEITCKDGRWQSIPLCVEKIPCSQPPQIEHGTINSSRSSQESYAHGTKLSYTCEGGFRISEENETTCYMGKWSSPPQCEGLPCKSPPEISHGVVAHMSDSYQYGEEVTYKCFEGFGIDGPAIAKCLGEKWSHPPSCISMVH

SEQ ID NO: 33804 - protein, 335 aa, Homo sapiens
LELPSMWLLVSVILISRISSVGGEATFCDFPKINHGILYDEEKYKPFSQVPTGEVFYYSCEYNFVSPSKSFWTRITCTEEGWSPTPKCLRLCFFPFVENGHSESSGQTHLEGDTVQIICNTGYRLQNNENNISCVERGWSTPPKCRSTDTSCVNPPTVQNAHILSRQMSKYPSGERVRYECRSPYEMFGDEEVMCLNGNWTEPPQCKDSTGKCGPPPPIDNGDITSFPLSVYAPASSVEYQCQNLYQLEGNKRITCRNGQWSEPPKCLHPCVISREIMENYNIALRWTAKQKLYLRTGESAEFVCKRGYRLSSRSHTLRTTCWDGKLEYPTCAKR

SEQ ID NO: 33805 - protein, 3509 aa, Homo sapiens
LRGSGQRKSRIPAPEPPRGSGARRSRRGLESAMANRRVGRGCWEVSPTERRPPAGLRGPAAEEEASSPPVLSLSHFCRSPFLCFGDVLLGASRTLSLALDNPNEEVAEVKISHFPAADLGFSVSQRCFVLQPKEKIVISVNWTPLKEGRVREIMTFLVNDVLKHQAILLGNAEEQKKKKRSLWDTIKKKKISASTSHNRRVSNIQNVNKTFSVSQKVDRVRSPLQACENLAMNEGGPPTENNSLILEENKIPISPISPAFNECHGATCLPLSVRRSTTYSSLHASENRELLNVHSANVSKVSFNEKAVTETSFNSVNVNGQRGENSKLSLTPNCSSTLNITQSQIHFLSPDSFVNNSHGANNELELVTCLSSDMFMKDNSQPVHLESTIAHEIYQKILSPDSFIKDNYGLNQDLESESVNPILSPNQFLKDNMAYMCTSQQTCKVPLSNENSQVPQSPEDWRKSEVSPRIPECQGSKSPKAIFEELVEMKSNYYSFIKQNNPKFSAVQDISSHSHNKQPKRRPILSATVTKRKATCTRENQTEINKPKAKRCLNSAVGEHEKVINNQKEKEDFHSYLPIIDPILSKSKSYKNEVTPSSTTASVARKRKSDGSMEDANVRVAITEHTEVREIKRIHFSPSEPKTSAVKKTKNVTTPISKRISNREKLNLKKKTDLSIFRTPISKTNKRTKPIIAVAQSSLTFIKPLKTDIPRHPMPFAAKNMFYDERWKEKQEQGFTWWLNFILTPDDFTVKTNISEVNAATLLLGIENQHKISVPRAPTKEEMSLRAYTARCRLNRLRRAACRLFTSEKMVKAIKKLEIEIEARRLIVRKDRHLWKDVGERQKVLNWLLSYNPLWLRIGLETTYGELISLEDNSDVTGLAMFILNRLLWNPDIAAEYRHPTVPHLYRDGHEEALSKFTLKKLLLLVCFLDYAKISRLIDHDPCLFCKDAEFKASKEILLAFSRDFLSGEGDLSRHLGLLGLPVNHVQTPFDEFDFAVTNLAVDLQCGVRLVRTMELLTQNWDLSKKLRIPAISRLQKMHNVDIVLQVLKSRGIELSDEHGNTILSKDIVDRHREKTLRLLWKIAFAFQVDISLNLDQLKEEIAFLKHTKSIKKTISLLSCHSDDLINKKKGKRDSGSFEQYSENIKLLMDWVNAVCAFYNKKVENFTVSFSDGRVLCYLIHHYHPCYVPFDAICQRTTQTVECTQTGSVVLNSSSESDDSSLDMSLKAFDHENTSELYKELLENEKKNFHLVRSAVRDLGGIPAMINHSDMSNTIPDEKVVITYLSFLCARLLDLRKEIRAARLIQTTWRKYKLKTDLKRHQEREKAARIIQLAVINFLAKQRLRKRVNAALVIQKYWRRVLAQRKLLMLKKEKLEKVQNKAASLIQGYWRRYSTRQRFLKLKYYSIILQSRIRMIIAVTSYKRYLWATVTIQRHWRAYLRRKQDQQRYEMLKSSTLIIQSMFRKWKQRKMQSQVKATVILQRAFREWHLRKQAKEENSAIIIQSWYRMHKELRKYIYIRSCVVIIQKRFRCFQAQKLYKRRKESILTIQKYYKAYLKGKIERTNYLQKRAAAIQLQAAFRRLKAHNLCRQIRAACVIQSYWRMRQDRVRFLNLKKTIIKFQAHVRKHQQRQKYKKMKKAAVIIQTHFRAYIFAMKVLASYQKTRSAVIVLQSAYRGMQARKMYIHILTSVIKIQSYYRAYVSKKEFLSLKNATIKLQSTVKMKQTRKQYLHLRAAALFIQQCYRSKKIAAQKREEYMQMRESCIKLQAFVRGYLVRKQMRLQRKAVISLQSYFRMRKARQYYLKMYKAIIVIQNYYHAYKAQVNQRKNFLQVKKAATCLQAAYRGYKVRQLIKQQSIAALKIQSAFRGYNKRVKYQSVLQSIIKIQRWYRAYKTLHDTRTHFLKTKAAVISLQSAYRGWKVRKQIRREHQAALKIQSAFRMAKAQKQFRLFKTAALVIQQNFRAWTAGRKQCMEYIELRHAVLVLQSMWKGKTLRRQLQRQHKCAIIIQSYYRMHVQQKKWKIMKKAALLIQKYYRAYSIGREQNHLYLKTKAAVVTLQSAYRGMKVRKRIKDCNKAAVTIQSKYRAYKTKKKYATYRASAIIIQRWYRGIKITNHQHKEYLNLKKTAIKIQSVYRGIRVRRHIQHMHRAATFIKAMFKMHQSRISYHTMRKAAIVIQVRCRAYYQGKMQREKYLTILKAVKVLQASFRGVRVRRTLRKMQTAATLIQSNYRRYRQQTYFNKLKKITKTVQQRYWAMKERNIQFQRYNKLRHSVIYIQAIFRGKKARRHLKMMHIAATLIQRRFRTLMMRRRFLSLKKTAILIQRKYRAHLCTKHHLQFLQVQNAVIKIQSSYRRWMIRKRMREMHRAATFIQSTFRMHRLHMRYQALKQASVVIQQQYQANRAAKLQRQHYLRQRHSAVILQAAFRGMKTRRHLKSMHSSATLIQSRFRSLLVRRRFISLKKATIFVQRKYRATICAKHKLYQFLHLRKAAITIQSSYRRLMVKKKLQEMQRAAVLIQATFRMYRTYITFQTWKHASILIQQHYRTYRAAKLQRENYIRQWHSAVVIQAAYKGMKARQLLREKHKASIVIQSTYRMYRQYCFYQKLQWATKIIQEKYRANKKKQKVFQHNELKKETCVQAGFQDMNIKKQIQEQHQAAIIIQKHCKAFKIRKHYLHLRATVVSIQRRYRKLTAVRTQAVICIQSYYRGFKVRKDIQNMHRAATLIQSFYRMHRAKVDYETKKTAIVVIQNYYRLYVRVKTERKNFLAVQKSVRTIQAAFRGMKVRQKLKNVSEEKMAAIVNQSALCCYRSKTQYEAVQSEGVMIQEWYKASGLACSQEAEYHSQSRAAVTIQKAFCRMVTRKLETQKCAALRIQFFLQMAVYRRRFVQQKRAAITLQHYFRTWQTRKQFLLYRKAAVVLQNHYRAFLSAKHQRQVYLQIRSSVIIIQARSKGFIQKRKFQEIKNSTIKIQAMWRRYRAKKYLCKVKAACKIQAWYRCWRAHKEYLAILKAVKIIQGCFYTKLERTRFLNVRASAIIIQRKWRAILPAKIAHEHFLMIKRHRAACLIQAHYRGYKGRQVFLRQKSAALIIQKYIRAREAGKHERIKYIEFKKSTVILQALVRGWLVRKRFLEQRAKIRLLHFTAAAYYHLNAVRIQRAYKLYLAVKNANKQVNSVICIQRWFRARLQEKRFIQKYHSIKKIEHEGQECLSQRNRAASVIQKAVRHFLLRKKQEKFTSGIIKIQALWRGYSWRKKNDCTKIKAIRLSLQVVNREIREENKLYKRTALALHYLLTYKHLSAILEALKHLEVVTRLSPLCCENMAQSGAISKIFVLIRSCNRSIPCMEVIRYAVQVLLNVSKYEKTTSAVYDVENCIDILLELLQIYREKPGNKVADKGGSIFTKTCCLLAILLKTTNRASDVRSRSKVVDRIYSLYKLTAHKHKMNTERILYKQKKNSSISIPFIPETPVRTRIVSRLKPDWVLRRDNMEEITNPLQAIQMVMDTLGIPY

SEQ ID NO: 33806 - protein, 124 aa, Homo sapiens
LLLQTMDEQSQGMQGPPVPQFQPQKALRPDMGYNTLANFRIEKKIGRGQFSEVYRAACLLDGVPVALKKVQVCLLPVWERRVCALNACYFLEIIKGSESLQYMATLTNLFENLPVSHHGSFAKK

SEQ ID NO: 33807 - protein, 29 aa, Homo sapiens
MDIFCEILLFCYALNIHTKRFLLLALKIV

SEQ ID NO: 33808 - protein, 121 aa, Homo sapiens
MTMYLWLKLLAFGFAFLDTEVFVTGQSPTPSPTGVSSVQTPHLPTHADSQTPSAGTDTQTFSGSAANAKLNPTPGSNAISDAYLNASETTTLSPSGSAVISTTTIGDITLSQAATPSPCAW

SEQ ID NO: 33809 - protein, 15 aa, Homo sapiens
VFAQVSLIIGVTWLA

SEQ ID NO: 33810 - protein, 198 aa, Homo sapiens
VSGFAGPASLISMKLLSLVAVVGCLLVPPAEANKVRESSEDIRCKCICPPYRNISGHIYNQNVSQKDCNCLHVVEPMPVPGHDVEAYCLLCECRYEERSTTTIKVIIVIYLSVVGALLLYMAFLMLVDPLIRKPDAYTEQLHNEEENEDARSMAAAAASLGGPRANTVLERVEGAQQRWKLQVQEQRKTVFDRHKMLS

SEQ ID NO: 33811 - protein, 199 aa, Homo sapiens
LQCEVSGFAGPASLISMKLLSLVAVVGCLLVPPAEANKSSEDIRCKCICPPYRNISGHIYNQNVSQKDCNCLHVVEPMPVPGHDVEAYCLLCECRYEERSTTTIKVIIVIYLSVVGALLLYMAFLMLVDPLIRKPDAYTEQLHNEEENEDARSMAAAAASLGGPRANTVLERVEGAQQRWKLQVQEQRKTVFDRHKMLS

SEQ ID NO: 33812 - protein, 113 aa, Homo sapiens
VSGFAGPASLISMKLLSLVAVVGCLLVPPAEANKSSEDIRCKCICPPYRNISGHIYNQNVSQKDCNCLHVVEPMPVPGHDVEAYCLLCECRYEERSTTTIKWASPSRDQMPET

SEQ ID NO: 33813 - protein, 203 aa, Homo sapiens
VPAEAGRWARSALGAPTPPHRQPGAEGRGVGARSSQGAGGQRARPASPGRQNPALRGREGRRARRSLELSANLGAPMTAAATATVLKEGVLEKRSGGLLQLWKRKRCVLTERGLQLFEAKGTGGRPKELSFARIKAVECVESTGRHIYFTLVTEGGGEIDFRCPLEDPGWNAQITLGLVKFKNQQAIQTVRARQSLGTGTLVS

SEQ ID NO: 33814 - protein, 264 aa, Homo sapiens
VTQGDPAPRNRLQVGQNNRRFCAPLTLIVWQRDEGIRATPSLTLLLGRKCPRAGWGKHLGLTLDICVPERRMPNWGGGKKCGVCQKTVYFAEEVQCEGNSFHKSCFLCMVCKKNLDSTTVAVHGEEIYCKSCYGKKYGPKGYGYGQGAGTLSTDKGESLGIKHEEAPGHRPTTNPNASKFAQKIGGSERCPRCSQAVYAAEKVIGAGKSWHKACFRCAKCGKGLESTTLADKDGEIYCKGCYAKNFGPKGFGFGQGAGALVHSE

SEQ ID NO: 33815 - protein, 239 aa, Homo sapiens
VCKAHWLAWPGTRLPRSGTKRRAGRAHPAATSESACRPCAAEPAARMPNWGGGKKCGVCQKTVYFAEEVQCEGNSFHKSCFLCMVCKKNLDSTTVAVHGEEIYCKSCYGKKYGPKGYGYGQGAGTLSTDKGESLGIKHEEAPGHRPTTNPNASKFAQKIGGSERCPRCSQAVYAAEKVIGAGKSWHKACFRCAKCGKGLESTTLADKDGEIYCKGCYAKNFGPKGFGFGQGAGALVHSE

SEQ ID NO: 33816 - protein, 140 aa, Homo sapiens
MPNWGGGKKCGVCQKTVYFAEEVQCEGNSFHKSCFLCMVCKKNLDSTTVAVHGEEIYCKSCYGKKYGPKGYGYGQGAGTLSTDKGESLGIKHEEAPGHRPTTNPNASKFAQKIGGSERCPRCSQAVYAAEKVIGAGKGLF

SEQ ID NO: 33817 - protein, 69 aa, Homo sapiens
VRGGRQAWCEGPRRPGEPRETLCSREADPAPALPLGMRDSARLRRGPGARAGRRSETESCYVARAGLNS

SEQ ID NO: 33818 - protein, 1936 aa, Homo sapiens
LPLSLLPRSLPLLSPSSSVSSVLSLPLLLPRLLLLRSRPLPPPPVPADARIVHALLAGRMLGSSVKSVQPEVELSSGGGDEGADEPRGAGRKAAAADGRGMLPKRAKAPGGGGGMAKASAAELKVFKSGSVDSRVPGGPPASNLRKQKSLTNLSFLTDSEKKLQLYEPEWSDDMAKAPKGLGKVGSKGREAPLMSKTLSKSEHSLFQAKGSPAGGAKTPLAPLAPNLGKPSRIPRGPYAEVKPLSKAPEAAVSEDGKSDDELLSSKAKAQKSSGPVPSAKGQEERAFLKVDPELVVTVLGDLEQLLFSQMLDPESQRKRTVQNVLDLRQNLEETMSSLRGSQVTHSSLEMTCYDSDDANPRSVSSLSNRSSPLSWRYGQSSPRLQAGDAPSVGGSCRSEGTPAWYMHGERAHYSHTMPMRSPSKLSHISRLELVESLDSDEVDLKSGYMSDSDLMGKTMTEDDDITTGWDESSSISSGLSDASDNLSSEEFNASSSLNSLPSTPTASRRNSTIVLRTDSEKRSLAESGLSWFSESEEKAPKKLEYDSGSLKMEPGTSKWRRERPESCDDSSKGGELKKPISLGHPGSLKKGKTPPVAVTSPITHTAQSALKVAGKPEGKATDKGKLAVKNTGLQRSSSDAGRDRLSDAKKPPSGIARPSTSGSFGYKKPPPATGTATVMQTGGSATLSKIQKSSGIPVKPVNGRKTSLDVSNSAEPGFLAPGARSNIQYRSLPRPAKSSSMSVTGGRGGPRPVSSSIDPSLLSTKQGGLTPSRLKEPTKVASGRTTPAPVNQTDREKEKAKAKAVALDSDNISLKSIGSPESTPKNQASHPTATKLAELPPTPLRATAKSFVKPPSLANLDKVNSNSLDLPSSSDTTHASKVPDLHATSSASGGPLPSCFTPSPAPILNINSASFSQGLELMSGFSVPKETRMYPKLSGLHRSMESLQMPMSLPSAFPSSTPVPTPPAPPAAPTEEETEELTWSGSPRAGQLDSNQRDRNTLPKKGLRYQLQSQEETKERRHSHTIGGLPESDDQSELPSPPALPMSLSAKGQLTNIVSPTAATTPRITRSNSIPTHEAAFELYSGSQMGSTLSLAERPKGMIRSGSFRDPTDDVHGSVLSLASSASSTYSSAEERMQSEQIRKLRRELESSQEKVATLTSQLSANANLVAAFEQSLVNMTSRLRHLAETAEEKDTELLDLRETIDFLKKKNSEAQAVIQGALNASETTPKELRIKRQNSSDSISSLNSITSHSSIGSSKDADAKKKKKKSWVYELRSSFNKAFSIKKGPKSASSYSDIEEIATPDSSAPSSPKLQHGSTETASPSIKSSTSSSVGTDVTEGPAHPAPHTRLFHANEEEEPEKKEVSELRSELWEKEMKLTDIRLEALNSAHQLDQLRETMHNMQLEVDLLKAENDRLKVAPGPSSGSTPGQVPGSSALSSPRRSLGLALTHSFGPSLADTDLSPMDGISTCGPKEEVTLRVVVRMPPQHIIKGDLKQQEFFLGCSKVSGKVDWKMLDEAVFQVFKDYISKMDPASTLGLSTESIHGYSISHVKRVLDAEPPEMPPCRRGVNNISVSLKGLKEKCVDSLVFETLIPKPMMQHYISLLLKHRRLVLSGPSGTGKTYLTNRLAEYLVERSGREVTEGIVSTFNMHQQSCKDLQLYLSNLANQIDRETGIGDVPLVILLDDLSEAGSISELVNGALTCKYHKCPYIIGTTNQPVKMTPNHGLHLSFRMLTFSNNVEPANGFLVRYLRRKLVESDSDINANKEELLRVLDWVPKLWYHLHTFLEKHSTSDFLIGPCFFLSCPIGIEDFRTWFIDLWNNSIIPYLQEGAKDGIKVHGQKAAWEDPVEWVRDTLPWPSAQQDQSKLYHLPPPTVGPHSIASPPEDRTVKDSTPSSLDSDPLMAMLLKLQEAANYIESPDRETILDPNLQATL

SEQ ID NO: 33819 - protein, 78 aa, Homo sapiens
VTVPPHSPSVTSSTLICSSAAARTSCTGDRIPVSVSTNASFNPCATGPGSPEAAPAAAAAAIFSPLSPPAPRPGPATE

SEQ ID NO: 33820 - protein, 30 aa, Homo sapiens
VVLNPLARVLSALMLIWGRTGHPASGELES

SEQ ID NO: 33821 - protein, 186 aa, Homo sapiens
VLCWVRGTQLQRLVLAGEDCLWYLDRNGSWHPGFNCEFFTFCCGTCYHRYCCRDLTLLITERQQKHCLAFSPKTIAGIASAVILFVAVVATTICCFLCSCCYLYRRRQQLQSPFEGQEIPMTGIPVQPVYPYPQDPKAGPAPPQPGFIYPPSGPAPQYPLYPAGPPVYNPAAPPPYMPPQPSYPGA

SEQ ID NO: 33822 - protein, 67 aa, Homo sapiens [sequence omitted]

SEQ ID NO: 33823 - protein, 657 aa, Homo sapiens
VSNGSAAMASGEHSPGSGAARRPLHSAQAVDVASASNFRAFELLHLHLDLRAEFGPPGPGAGSRGLSGTAVLDLRCLEPEGAAELRLDSHPCLEVTAAALRRERPGSEEPPAEPVSFYTQPFSHYGQALCVSFPQPCRAAERLQVLLTYRVGEGPGVCWLAPEQTAGKKKPFVYTQGQAVLNRAFFPCFDTPAVKYKYSALIEVPDGFTAVMSASTWEKRGPNKFFFQMCQPIPSYLIALAIGDLVSAEVGPRSRVWAEPCLIDAAKEEYNGVIEEFLATGEKLFGPYVWGRYDLLFMPPSFPFGGMENPCLTFVTPCLLAGDRSLADVIIHEISHSWFGNLVTNANWGEFWLNEGFTMYAQRRISTILFGAAYTCLEAATGRALLRQHMDITGEENPLNKLRVKIEPGVDPDDTYNETPYEKGFCFVSYLAHLVGDQDQFDSFLKAYVHEFKFRSILADDFLDFYLEYFPELKKKRVDIIPGFEFDRWLNTPGWPPYLPDLSPGDSLMKPAEELAQLWAAEELDMKAIEAVAISPWKTYQLVYFLDKILQKSPLPPGNVKKLGDTYPSISNARNAELRLRWGQIVLKNDHQEDFWKVKEFLHNQGKQKYTLPLYHAMMGGSEVAQTLAKETFASTASQLHSNVVNYVQQIVAPKGS

SEQ ID NO: 33824 - protein, 399 aa, Homo sapiens
LASILPLRVAFPPPASQSKVSLIPEVKERRKRGGYDLLFMPPSFPFGGMENPCLTFVTPCLLAGDRSLADVIIHEISHSWFGNLVTNANWGEFWLNEGFTMYAQRRISTILFGAAYTCLEAATGRALLRQHMDITGEENPLNKLRVKIEPGVDPDDTYNETPYEKGFCFVSYLAHLVGDQDQFDSFLKAYVHEFKFRSILADDFLDFYLEYFPELKKKRVDIIPGFEFDRWLNTPGWPPYLPDLSPGDSLMKPAEELAQLWAAEELDMKAIEAVAISPWKTYQLVYFLDKILQKSPLPPGNVKKLGDTYPSISNARNAELRLRWGQIVLKNDHQEDFWKVKEFLHNQGKQKYTLPLYHAMMGGSEVAQTLAKETFASTASQLHSNVVNYVQQIVAPKGS

SEQ ID NO: 33825 - protein, 419 aa, Homo sapiens
VSAELLIFLPLGATLAQGWAKQSSWECKERTLVPSPTSSSLPLPTGSLMAATCEISNIFSNYFSAMYSSEDSTLASVPPAATFGADDLVLTLSNPQMSLEGTEKASWLGEQPQFWSKTQVLDWISYQVEKNKYDASAIDFSRCDMDGATLCNCALEELRLVFGPLGDQLHAQLRDLTSSSSDELSWIIELLEKDGMAFQEALDPGPFDQGSPFAQELLDDGQQASPYHPGSCGAGAPSPGSSDVSTAGTGASRSSHSSDSGGSDVDLDPTDGKLFPSDGFRDCKKGDPKHGKRKRGRPRKLSKEYWDCLEGKKSKHAPRGTHLWEFIRDILIHPELNEGLMKWENRHEGVFKFLRSEAVAQLWGQKKKNSNMTYEKLSRAMRYYYKREILERVDGRRLVYKFGKNSSGWKEEEVLQSRN

SEQ ID NO: 33826 - protein, 36 aa, Homo sapiens
MGSFWLFGKGGCLLFISVVIPPPTTSSILQQCLFSC

SEQ ID NO: 33827 - protein, 32 aa, Homo sapiens
MLNLVSLLFFMMFTLKTTKPLSWTVEQACLSY

SEQ ID NO: 33828 - protein, 58 aa, Homo sapiens
LAPGTGRRAPVAFGLMVWFGFCWKVQDGPCDRSPRAPSVVFFPVGGVRGGDQGQAAFC

SEQ ID NO: 33829 - protein, 25 aa, Homo sapiens
LLVVAKVAAMVTCTSCLHLHLGKLV

SEQ ID NO: 33830 - protein, 1179 aa, Homo sapiens
LRGLVTAGKMTNPSDRVLPANSMAESREGDFGCTVMELRKLMELRSRDALTQINVHYGGVQNLCSRLKTSPVEGLSGNPADLEKRRQVFGHNVIPPKKPKTFLELVWEALQDVTLIILEIAAIISLVLSFYRPAGEENELCGQVATTPEDENEAQAGWIEGAAILFSVIIVVLVTAFNDWSKEKQFRGLQCRIEQEQKFSIIRNGQLIQLPVAEIVVGDIAQVKYGDLLPADGILIQGNDLKIDESSLTGESDHVKKSLDKDPMLLSGTHVMEGSGRMVVTAVGVNSQTGIILTLLGVNEDDEGEKKKKGKKQGVPENRNKAKTQDGVALEIQPLNSQEGIDNEEKDKKAVKVPKKEKSVLQGKLTRLAVQIGKAGLLMSALTVFILILYFVIDNFVINRRPWLPECTPIYIQYFVKFFIIGITVLVVAVPEGLPLAVTISLAYSVKKMMKDNNLVRHLDACETMGNATAICSDKTGTLTMNRMTVVQAYIGGIHYRQIPSPDVFLPKVLDLIVNGISINSAYTSKILPPEKEGGLPRQVGNKTECALLGFVTDLKQDYQAVRNEVPEEKLYKVYTFNSVRKSMSTVIRNPNGGFRMYSKGASEIILRKCNRILDRKGEAVPFKNKDRDDMVRTVIEPMACDGLRTICIAYRDFDDTEPSWDNENEILTELTCIAVVGIEDPVRPEVPDAIAKCKQAGITVRMVTGDNINTARAIATKCGILTPGDDFLCLEGKEFNRLIRNEKGEVEQEKLDKIWPKLRVLARSSPTDKHTLVKGIIDSTVGEHRQVVAVTGDGTNDGPALKKADVGFAMGIAGTDVAKEASDIILTDDNFTSIVKAVMWGRNVYDSISKFLQFQLTVNVVAVIVAFTGACITQDSPLKAVQMLWVNLIMDTFASLALATEPPTESLLKRRPYGRNKPLISRTMMKNILGHAFYQLIVIFILVFAGEKFFDIDSGRKAPLHSPPSQHYTIVFNTFVLMQLFNEINSRKIHGEKNVFSGIYRNIIFCSVVLGTFICQIFIVEFGGKPFSCTSLSLSQWLWCLFIGIGELLWGQFISAIPTRSLKFLKEAGHGTTKEEITKDAEGLDEIDHAEMELRRGQILWFRGLNRIQTQIDVINTFQTGASFKGVLRRQNMGQHLDVKLVPSSSYVAVAPVKSSPTTSVPAVSSPPMGNQSGQSVP

SEQ ID NO: 33831 - protein, 105 aa, Homo sapiens
LSQWLWCLFIGIGELLWGQFISAIPTRSLKFLKEAGHGTTKEEITKDAEGLDEIDHAEMELRRGQILWFRGLNRIQTQHLLQDSDLLPDKEEAIISSSLFPSCNF

SEQ ID NO: 33832 - protein, 123 aa, Homo sapiens
LHQSNLPPPLLFLLFHLLLWAIKVVKAFHSSLHESIQKPYNQKSIHSFMTHPEFAIEEELPRTPLLDEEEEENPDKASKFGTRVLLLDGEVTPYANTNNNAVDCNQVQLPQSDSSLQSLETSV

SEQ ID NO: 33833 - protein, 83 aa, Homo sapiens
LHQSNLPPPLLFLLFHLLLWAIKVVKAFHSSLHESIQKPYNQKSIHSFMTHPEFANTNNNAVDCNQVQLPQSDSSLQSLETSV

SEQ ID NO: 33834 - protein, 85 aa, Homo sapiens [sequence omitted]

SEQ ID NO: 33835 - protein, 10 aa, Homo sapiens
LLPLPLPLGA

SEQ ID NO: 33836 - protein, 719 aa, Homo sapiens
LPCSSTMRLLVAPLLLAWVAGATAAVPVVPWHVPCPPQCACQIRPWYTPRSSYREATTVDCNDLFLTAVPPALPAGTQTLLLQSNSIVRVDQSELGYLANLTELDLSQNSFSDARDCDFHALPQLLSLHLEENQLTRLEDHSFAGLASLQELYLNHNQLYRIAPRAFSGLSNLLRLHLNSNLLRAIDSRWFEMLPNLEILMIGGNKVDAILDMNFRPLANLRSLVLAGMNLREISDYALEGLQSLESLSFYDNQLARVPRRALEQVPGLKFLDLNKNPLQRVGPGDFANMLHLKELGLNNMEELVSIDKFALVNLPELTKLDITNNPRLSFIHPRAFHHLPQMETLMLNNNALSALHQQTVESLPNLQEVGLHGNPIRCDCVIRWANATGTRVRFIEPQSTLCAEPPDLQRLPVREVPFREMTDHCLPLISPRSFPPSLQVASGESMVLHCRALAEPEPEIYWVTPAGLRLTPAHAGRRYRVYPEGTLELRRVTAEEAGLYTCVAQNLVGADTKTVSVVVGRALLQPGRDEGQGLELRVQETHPYHILLSWVTPPNTVSTNLTWSSASSLRGQGATALARLPRGTHSYNITRLLQATEYWACLQVAFADAHTQLACVWARTKEATSCHRALGDRPGLIAILALAVLLLAAGLAAHLGTGQPRKGVGGRRPLPPAWAFWGWSAPSVRVVSAPLVLPWNPGRKLPRSSEGETLLPPLSQNS

SEQ ID NO: 33837 - protein, 1347 aa, Homo sapiens
LVSALMRRLAARGAAGDAGEVAAPAADSSDSAQGRSPSPWRLIDLCAIWDAGVYLPSAAWNRASSGVARKRLNEAEKLSAVQEAQLKRLEVTRPRVLGSREQGQVPRMARQPPPPWVHAAFLLCLLSLGGAIEIPMDPSIQNELTQPPTITKQSAKDHIVDPRDNILIECEAKGNPAPSFHWTRNSRFFNIAKDPRVSMRRRSGTLVIDFRSGGRPEEYEGEYQCFARNKFGTALSNRIRLQVSKSPLWPKENLDPVVVQEGAPLTLQCNPPPGLPSPVIFWMSSSMEPITQDKRVSQGHNGDLYFSNVMLQDMQTDYSCNARFHFTHTIQQKNPFTLKVLTTRGVAERTPSFMYPQGTASSQMVLRGMDLLLECIASGVPTPDIAWYKKGGDLPSDKAKFENFNKALRITNVSEEDSGEYFCLASNKMGSIRHTISVRVKAAPYWLDEPKNLILAPGEDGRLVCRANGNPKPTVQWMVNGEPLQSAPPNPNREVAGDTIIFRDTQISSRAVYQCNTSNEHGYLLANAFVSVLDVPPRMLSPRNQLIRVILYNRTRLDCPFFGSPIPTLRWFKNGQGSNLDGGNYHVYENGSLEIKMIRKEDQGIYTCVATNILGKAENQVRLEVKDPTRIYRMPEDQVARRGTTVQLECRVKHDPSLKLTVSWLKDDEPLYIGNRMKKEDDSLTIFGVAERDQGSYTCVASTELDQDLAKAYLTVLADQATPTNRLAALPKGRPDRPRDLELTDLAERSVRLTWIPGDANNSPITDYVVQFEEDQFQPGVWHDHSKYPGSVNSAVLRLSPYVNYQFRVIAINEVGSSHPSLPSERYRTSGAPPESNPGDVKGEGTRKNNMEITWTPMNATSAFGPNLRYIVKWRRRETREAWNNVTVWGSRYVVGQTPVYVPYEIRVQAENDFGKGPEPESVIGYSGEDLPSAPRRFRVRQPNLETINLEWDHPEHPNGIMIGYTLKYVAFNGTKVGKQIVENFSPNQTKFTVQRTDPVSRYRFTLSARTQVGSGEAVTEESPAPPNEATPTAAPPTLPPTTVGATGAVSSTDATAIAATTEATTVPIIPTVAPTTIATTTTVATTTTTTAAATTTTESPPTTTSGTKIHESAPDEQSIWNVTVLPNSKWANITWKHNFGPGTDFVVEYIDSNHTKKTVPVKAQAQPIQLTDLYPGMTYTLRVYSRDNEGISSTVITFMTSTAYTNNQADIATQGWFIGLMCAIALLVLILLIVCFIKRSRGGKYPVREKKDVPLGPEDPKEEDGSFDYSDEDNKPLQGSQTSLDGTIKQQESDDSLVDYGEGGEGQFNEDGSFIGQYTVKKDKEETEGNESSEATSPVNAIYSLA

SEQ ID NO: 33838 - protein, 1281 aa, Homo sapiens
LVSALMRRLAARGAAGDAGEVAAPAADSSDSAQGRSPSPWRLIDLCAIWDAGVYLPSAAWNRASSGVARKRLNEAEKLSAVQEAQLKRLEVTRPRVLGSREQGQVPRMARQPPPPWVHAAFLLCLLSLGGAIEIPMDLTQPPTITKQSAKDHIVDPRDNILIECEAKGNPAPSFHWTRNSRFFNIAKDPRVSMRRRSGTLVIDFRSGGRPEEYEGEYQCFARNKFGTALSNRIRLQVSKSPLWPKENLDPVVVQEGAPLTLQCNPPPGLPSPVIFWMSSSMEPITQDKRVSQGHNGDLYFSNVMLQDMQTDYSCNARFHFTHTIQQKNPFTLKVLTNHPYNDSSLRNHPDMYSARGVAERTPSFMYPQGTASSQMVLRGMDLLLECIASGVPTPDIAWYKKGGDLPSDKAKFENFNKALRITNVSEEDSGEYFCLASNKMGSIRHTISVRVKAAPYWLDEPKNLILAPGEDGRLVCRANGNPKPTVQWMVNGEPLQSAPPNPNREVAGDTIIFRDTQISSRAVYQCNTSNEHGYLLANAFVSVLDVPPRMLSPRNQLIRVILYNRTRLDCPFFGSPIPTLRWFKNGQGSNLDGGNYHVYENGSLEIKMIRKEDQGIYTCVATNILGKAENQVRLEVKDPTRIYRMPEDQVARRGTTVQLECRVKHDPSLKLTVSWLKDDEPLYIGNRMKKEDDSLTIFGVAERDQGSYTCVASTELDQDLAKAYLTVLGRPDRPRDLELTDLAERSVRLTWIPGDANNSPITDYVVQFEEDQFQPGVWHDHSKYPGSVNSAVLRLSPYVNYQFRVIAINEVGSSHPSLPSERYRTSGAPPESNPGDVKGEGTRKNNMEITWTPMNATSAFGPNLRYIVKWRRRETREAWNNVTVWGSRYVVGQTPVYVPYEIRVQAENDFGKGPEPESVIGYSGEDYPRAAPTEVKVRVMNSTAISLQWNRVYSDTVQGQLREYRAYYWRESSLLKNLWVSQKRQQASFPGDRLRGVVSRLFPYSNYKLEMVVVNGRGDGPRSETKEFTTPEGVPSAPRRFRVRQPNLETINLEWDHPEHPNGIMIGYTLKYVAFNGTKVGKQIVENFSPNQTKFTVQRTDPVSRYRFTLSARTQVGSGEAVTEESPAPPNEATPTAAYTNNQADIATQGWFIGLMCAIALLVLILLIVCFIKRSRGGKYPVREKKDVPLGPEDPKEEDGSFDYSDEDNKPLQGSQTSLDGTIKQQESDDSLVDYGEGGEGQFNEDGSFIGQYTVKKDKEETEGNESSEATSPVNAIYSLA

SEQ ID NO: 33839 - protein, 1276 aa, Homo sapiens
LVSALMRRLAARGAAGDAGEVAAPAADSSDSAQGRSPSPWRLIDLCAIWDAGVYLPSAAWNRASSGVARKRLNEAEKLSAVQEAQLKRLEVTRPRVLGSREQGQVPRMARQPPPPWVHAAFLLCLLSLGGAIEIPMDLTQPPTITKQSAKDHIVDPRDNILIECEAKGNPAPSFHWTRNSRFFNIAKDPRVSMRRRSGTLVIDFRSGGRPEEYEGEYQCFARNKFGTALSNRIRLQVSKSPLWPKENLDPVVVQEGAPLTLQCNPPPGLPSPVIFWMSSSMEPITQDKRVSQGHNGDLYFSNVMLQDMQTDYSCNARFHFTHTIQQKNPFTLKVLTNHPYNDSSLRNHPDMYSARGVAERTPSFMYPQGTASSQMVLRGMDLLLECIASGVPTPDIAWYKKGGDLPSDKAKFENFNKALRITNVSEEDSGEYFCLASNKMGSIRHTISVRVKAAPYWLDEPKNLILAPGEDGRLVCRANGNPKPTVQWMVNGEPLQSAPPNPNREVAGDTIIFRDTQISSRAVYQCNTSNEHGYLLANAFVSVLDVPPRMLSPRNQLIRVILYNRTRLDCPFFGSPIPTLRWFKNGQGSNLDGGNYHVYENGSLEIKMIRKEDQGIYTCVATNILGKAENQVRLEVKDPTRIYRMPEDQVARRGTTVQLECRVKHDPSLKLTVSWLKDDEPLYIGNRMKKEDDSLTIFGVAERDQGSYTCVASTELDQDLAKAYLTVLGRPDRPRDLELTDLAERSVRLTWIPGDANNSPITDYVVQFEEDQFQPGVWHDHSKYPGSVNSAVLRLSPYVNYQFRVIAINEVGSSHPSLPSERYRTSGAPPESNPGDVKGEGTRKNNMEITWTPMNATSAFGPNLRYIVKWRRRETREAWNNVTVWGSRYVVGQTPVYVPYEIRVQAENDFGKGPEPESVIGYSGEDYPRAAPTEVKVRVMNSTAISLQWNRVYSDTVQGQLREYRAYYWRESSLLKNLWVSQKRQQASFPGDRLRGVVSRLFPYSNYKLEMVVVNGRGDGPRSETKEFTTPEGVPSAPRRFRVRQPNLETINLEWDHPEHPNGIMIGYTLKYVAFNGTKVGKQIVENFSPNQTKFTVQRTDPVSRYRFTLSARTQVGSGEAVTEESPAPPNEAYTNNQADIATQGWFIGLMCAIALLVLILLIVCFIKRSRGGKYPVREKKDVPLGPEDPKEEDGSFDYSDEDNKPLQGSQTSLDGTIKQQESDDSLVDYGEGGEGQFNEDGSFIGQYTVKKDKEETEGNESSEATSPVNAIYSLA

SEQ ID NO: 33840 - protein, 1161 aa, Homo sapiens
MDLTQPPTITKQSAKDHIVDPRDNILIECEAKGNPAPSFHWTRNSRFFNIAKDPRVSMRRRSGTLVIDFRSGGRPEEYEGEYQCFARNKFGTALSNRIRLQVSKSPLWPKENLDPVVVQEGAPLTLQCNPPPGLPSPVIFWMSSSMEPITQDKRVSQGHNGDLYFSNVMLQDMQTDYSCNARFHFTHTIQQKNPFTLKVLTNHPYNDSSLRNHPDMYSARGVAERTPSFMYPQGTASSQMVLRGMDLLLECIASGVPTPDIAWYKKGGDLPSDKAKFENFNKALRITNVSEEDSGEYFCLASNKMGSIRHTISVRVKAAPYWLDEPKNLILAPGEDGRLVCRANGNPKPTVQWMVNGEPLQSAPPNPNREVAGDTIIFRDTQISSRAVYQCNTSNEHGYLLANAFVSVLDVPPRMLSPRNQLIRVILYNRTRLDCPFFGSPIPTLRWFKNGQGSNLDGGNYHVYENGSLEIKMIRKEDQGIYTCVATNILGKAENQVRLEVKDPTRIYRMPEDQVARRGTTVQLECRVKHDPSLKLTVSWLKDDEPLYIGNRMKKEDDSLTIFGVAERDQGSYTCVASTELDQDLAKAYLTVLADQATPTNRLAALPKGRPDRPRDLELTDLAERSVRLTWIPGDANNSPITDYVVQFEEDQFQPGVWHDHSKYPGSVNSAVLRLSPYVNYQFRVIAINEVGSSHPSLPSERYRTSGAPPESNPGDVKGEGTRKNNMEITWTPMNATSAFGPNLRYIVKWRRRETREAWNNVTVWGSRYVVGQTPVYVPYEIRVQAENDFGKGPEPESVIGYSGEDYPRAAPTEVKVRVMNSTAISLQWNRVYSDTVQGQLREYRAYYWRESSLLKNLWVSQKRQQASFPGDRLRGVVSRLFPYSNYKLEMVVVNGRGDGPRSETKEFTTPEGVPSAPRRFRVRQPNLETINLEWDHPEHPNGIMIGYTLKYVAFNGTKVGKQIVENFSPNQTKFTVQRTDPVSRYRFTLSARTQVGSGEAVTEESPAPPNEATPTAAYTNNQADIATQGWFIGLMCAIALLVLILLIVCFIKRSRGGKYPVREKKDVPLGPEDPKEEDGSFDYSDEDNKPLQGSQTSLDGTIKQQESDDSLVDYGEGGEGQFNEDGSFIGQYTVKKDKEETEGNESSEATSPVNAIYSLA

SEQ ID NO: 33841 - protein, 256 aa, Homo sapiens
MRSESRLKMTSGRALSQSPSSVTPEKIAYYWRESSLLKNLWVSQKRQQASFPGDRLRGVVSRLFPYSNYKLEMVVVNGRGDGPRSETKEFTTPEGVPSAPRRFRVRQPNLETINLEWDHPEHPNGIMIGYTLKYVAFNGTKVGKQIVENFSPNQTKFTVQRTDPVSRYRFTLSARTQVGSGEAVTEESPAPPNEAYTNNQADIATQGWFIGLMCAIALLVLILLIVCFIKRSRGGKYPGEMCKRRGLAGWGTSTFP

SEQ ID NO: 33842 - protein, 141 aa, Homo sapiens
LLLVAAVALVSSSAWSSALGSQTTFGPVFEDQPLSVLFPEESTEEQVLLACRARASPPATYRWKMNGTEMKLEPGSRHQLVGGNLVIMNPTKAQDAGVYQCLASNPVGTVVSREAILRFGCETRGGPRHFGGGGEGARRNY

SEQ ID NO: 33843 - protein, 164 aa, Homo sapiens
MGHSHHQRKFYWTAQPKRPGSSQAKALRHLVVSSPAAWSSALGSQTTFGPVFEDQPLSVLFPEESTEEQVLLACRARASPPATYRWKMNGTEMKLEPGSRHQLVGGNLVIMNPTKAQDAGVYQCLASNPVGTVVSREAILRFGCETRGGPRHFGGGGEGARRNY

SEQ ID NO: 33844 - protein, 142 aa, Homo sapiens
LSYRWLLNEFPNFIPTDGRHFVSQTTGNLYIARTNASDLGNYSCLATSHMDFSTKSVFSKFAQLNLAAEGQAWPGVAGGRELEGSAGIRKRVFPLEIGRSACRALIPGPGPPDPPASNPEALAPGLKEIPHSCLDRVGSERC

SEQ ID NO: 33845 - protein, 448 aa, Homo sapiens
VLGDLCTSPCDSLCPPGPPGGVVVRDIGDTTIQLSWSRGFDNHSPIAKYTLQARTPPAGKWKQVRTNPANIEGNAETAQVLGLTPWMDYEFRVIASNILGTGEPSGPSSKIRTREAAPSVAPSGLSGGGGAPGELIVNWTPMSREYQNGDGFGYLLSFRRQGSTHWQTARVPGADAQYFVYSNESVRPYTPFEVKIRSYNRRGDGPESLTALVYSAEEEPRVAPTKVWAKGVSSSEMNVTWEPVQQDMNGILLGYEIRYWKAGDKEAAADRVRTAGLDTSARVSGLHPNTKYHVTVRAYNRAGTGPASPSANATTMKPPPRRPPGNISWTFSSSSLSIKWDPVVPFRNESAVTGYKMLYQNDLHLTPTLHLTGKNWIEIPVPEDIGHALVQIRTTGPGGDGIPAEVHIVRNGGTSMMVENMAVRPAPHPGTVISHSVAMLILIGSLEL

SEQ ID NO: 33846 - protein, 16 aa, Homo sapiens
VAIVLKNLILMIFGSS

SEQ ID NO: 33847 - protein, 50 aa, Homo sapiens
LSIFSSSLKRQAIPLAKKCLRCVKAEECGVLASQMKRRQMLPLSFHCIYF

SEQ ID NO: 33848 - protein, 277 aa, Homo sapiens
VAAPGFRCSLSDADHMVCGVLQKENCIKKVILASGSSWCVPPASVVPCRGHSDYRVYAAGGMGLDLRPHNHLQHYDMLKDMWVSLAPMPTPRYAATSFLRGSKIYVLGGRQSKYAVNAFEVFDIETRSWTKFPNIPYKRAFSSFVTLDNHLYSLGGLRQGRLYRQPKFLRTMDVFDMEQGGWLKMERSFFLKKRRADFVAGSLSGRVIVAGGLGNQPTVLETAEAFHPGKNKWEILPAMPTPRCACSSIVVKNCLLAVGGVNQGLSDAVEALCVSDS

SEQ ID NO: 33849 - protein, 117 aa, Homo sapiens
VAAPGFRCSLSDADHMVCGVLQKENCIKKVILASGSSWCVPPASVVPCRGHSDKVSASAAGLLYRGHSTLCPGTHADSCTGVVAADGDGAEQARRPPPRRRLRFSFLLFTSSPHLHV

SEQ ID NO: 33850 - protein, 62 aa, Homo sapiens
MSKAHPPELKKFMDKKLSLKLNGGRHVQGILRGFDPFMNLVIDECVEMATSGQQNNIGMVVI

SEQ ID NO: 33851 - protein, 126 aa, Homo sapiens
LLSPPGFYHQKRGQTSIIMVDVKCLSDCKLQNQLEKLGFSPGPILPSTRKLYEKKLVQLLVSPPCAPPVMNGPRELDGAQDSDDSEGGLQEHQAPESHMGLSPKRETTARKTRLSRAGEKKVSQWA

SEQ ID NO: 33852 - protein, 113 aa, Homo sapiens
LEADLGLLLLASSLTHLGALTSTGVLLPRGFAAPQPGPIAPPCAFQYESKSRMSAEAALSHSYFRSLGERVHQLEDTASIFSLKEIQLQKDPGYRGLAFQQPGRGKNRRQSIF

SEQ ID NO: 33853 - protein, 127 aa, Homo sapiens
LGVREQGHPEPRKGVGECGQKNQNKEARGPSPSRAAPGTLPPLLGFSFQIEGANSGNETLPRGLSWSFWASPYWRPAPRSPLQTMHFSPPAASIFSLKEIQLQKDPGYRGLAFQQPGRGKNRRQSIF

SEQ ID NO: 33854 - protein, 44 aa, Homo sapiens
LTASLEDRLAALLATAVSSLCFPCASPVALTCIPTPPLPTLGLA

SEQ ID NO: 33855 - protein, 21 aa, Homo sapiens
LTECVCVCVCACKSVFIGNIH

SEQ ID NO: 33856 - protein, 170 aa, Homo sapiens
LEPLGGSPVDFALKVLQWSDYEIVRLQLWDIAGQERFTSMTRLYYRDASACVIMFDVTNATTFSNSQRWKQDLDSKLTLPNGEPVPCLLLANKCDLSPWAVSRDQIDRFSKENGFTGWTETSVKENKNINEAMRVLIEKMMRNSTEDIMSLSTQGDYINLQTKSSSWSCC

SEQ ID NO: 33857 - protein, 74 aa, Homo sapiens
LDFWFCFLFICFVLFLVLVEQRDRRISNTPKHRHTFVEVDQLQSSGQETPAPGPCDPSSVLLPSGPKRSHSQKE

SEQ ID NO: 33858 - protein, 61 aa, Homo sapiens
LESGICTPSGCLVRNFLFLPSLRLQCLMGLPVGGSVFAVPGRSGEPWEEVLRRPSLGSPQD

SEQ ID NO: 33859 - protein, 459 aa, Homo sapiens
VGPTEPRDPPSLEPGRVGEAGSSPERTSQPVGGRRGGGPEPEEGAAAGTPACAPASPGTMLSNSQGQSPPVPFPAPAPPPQPPTPALPHPPAQPPPPPPQQFPQFHVKSGLQIKKNAIIDDYKVTSQVLGLGINGKVLQIFNKRTQEKFALKMLQDCPKARREVELHWRASQCPHIVRIVDVYENLYAGRKCLLIVMECLDGGELFSRIQDRGDQAFTEREASEIMKSIGEAIQYLHSINIAHRDVKPENLLYTSKRPNAILKLTDFGFAKETTSHNSLTTPCYTPYYVAPEVLGPEKYDKSCDMWSLGVIMYILLCGYPPFYSNHGLAISPGMKTRIRMGQYEFPNPEWSEVSEEVKMLIRNLLKTEPTQRMTITEFMNHPWIMQSTKVPQTPLHTSRVLKEDKERWEDVKEEMTSALATMRVDYEQIKIKKIEDASNPLLLKRRKKARALEAAALAH

SEQ ID NO: 33860 - protein, 180 aa, Homo sapiens
VRGMKLQCVSLWLLGTILILCSVDNHGLRRCLISTDMHHIEESFQEIKRAIQAKDTFPNVTILSTLETLQIIKPLDVCCVTKNLLAFYVDRVFKDHQEPNPKILRKISSIANSFLYMQKTLRQCQEQRQCHCRQEATNATRVIHDNYDQLEVHAAAIKSLGELDVFLAWINKNHEVMFSA

SEQ ID NO: 33861 - protein, 207 aa, Homo sapiens
MKLQCVSLWLLGTILILCSVDNHGLRRCLISTDMHHIEESFQEIKRAIQAKDTFPNVTILSTLETLQIIKPLDVCCVTKNLLAFYVDRVFKDHQEPNPKILRKISSIANSFLYMQKTLRQCVSHWVRIPASAPCLPKERPGSAGPHRPPDMVLGVKGNSLRTSTGRTVENLSQWPLLPQGSLPADNSSDGLLLDNPPGVTNLCQHIP

SEQ ID NO: 33862 - protein, 32 aa, Homo sapiens
LIQMLALASERLLISSSMLKAIYLDVMINQTY

SEQ ID NO: 33863 - protein, 139 aa, Homo sapiens
LDGPCTLEGTMDFWLWPLYFLPVSGALRILPEVKVEGELGGSVTIKCPLPEMHVRIYLCREMAGSGTCGTVVSTTNFIKAEYKGRVTLKQYPRKNLFLVEVTQLTESDSGVYACGAGMNTDRGKTQKVTLNVHSGRFLR

SEQ ID NO: 33864 - protein, 149 aa, Homo sapiens
MFFWCACCLMVAWRVSASDAEHCPELPPVDNSIFVAKEVEGQILGTYVCIKGYHLVGKKTLFCNASKEWDNTTTECRLGHCPDPVLVNGEFSSSGPVNVSDKITFMCNDHYILKGSNRSQCLEDHTWAPPFPICKSSKYKRNHQGSPKY

SEQ ID NO: 33865 - protein, 503 aa, Homo sapiens
LFVPPLVTQSPSPDPAQSTHLTGIAEPRGFCLLQLAPAAGRSCDSAESRRRVLVLTRRAMTVARPSVPAALPLLGELPRLLLLVLLCLPAVWGDCGLPPDVPNAQPALEGRTSFPEDTVITYKCEESFVKIPGEKDSVICLKGSQWSDIEEFCNRSCEVPTRLNSASLKQPYITQNYFPVGTVVEYECRPGYRREPSLSPKLTCLQNLKWSTAVEFCKKKSCPNPGEIRNGQIDVPGGILFGATISFSCNTGYKLFGSTSSFCLISGSSVQWSDPLPECREIYCPAPPQIDNGIIQGERDHYGYRQSVTYACNKGFTMIGEHSIYCTVNNDEGEWSGPPPECRGKSLTSKVPPTVQKPTTVNVPTTEVSPTSQKTTTKTTTPNAQATRSTPVSRTTKHFHETTPNKGSGTTSGTTRLLSGSRPVTQAGMRWCDRSSLQSRTPGFKRSFHFSLPSSWYYRCVPRHPAKFLKFIFCRDRIFLCCPGWFQTPGRKRFFRPPKTLRL

SEQ ID NO: 33866 - protein, 440 aa, Homo sapiens
LFVPPLVTQSPSPDPAQSTHLTGIAEPRGFCLLQLAPAAGRSCDSAESRRRVLVLTRRAMTVARPSVPAALPLLGELPRLLLLVLLCLPAVWGDCGLPPDVPNAQPALEGRTSFPEDTVITYKCEESFVKIPGEKDSVICLKGSQWSDIEEFCNRSCEVPTRLNSASLKQPYITQNYFPVGTVVEYECRPGYRREPSLSPKLTCLQNLKWSTAVEFCKKKSCPNPGEIRNGQIDVPGGILFGATISFSCNTGYKLFGSTSSFCLISGSSVQWSDPLPECREIYCPAPPQIDNGIIQGERDHYGYRQSVTYACNKGFTMIGEHSIYCTVNNDEGEWSGPPPECRGKSLTSKVPPTVQKPTTVNVPTTEVSPTSQKTTTKTTTPNAQATRSTPVSRTTKHFHETTPNKGSGTTSGTTRLLSGHTCFTLTGLLGTLVTMGLLT

SEQ ID NO: 33867 - protein, 394 aa, Homo sapiens
MTVARPSVPAALPLLGELPRLLLLVLLCLPAVWGDCGLPPDVPNAQPALEGRTSFPEDTVITYKCEESFVKIPGEKDSVICLKGSQWSDIEEFCNRSCEVPTRLNSASLKQPYITQNYFPVGTVVEYECRPGYRREPSLSPKLTCLQNLKWSTAVEFCKKKSCPNPGEIRNGQIDVPGGILFGATISFSCNTGYKLFGSTSSFCLISGSSVQWSDPLPECREIYCPAPPQIDNGIIQGERDHYGYRQSVTYACNKGFTMIGEHSIYCTVNNDEGEWSGPPPECRGKSLTSKVPPTVQKPTTVNVPTTEVSPTSQKTTTKTTTPNAQATRSTPVSRTTKHFHETTPNKGSGTTSGQLTLFRFTEYGSNVLWWKYELDQDCRIKWSLIYCSQGFSY

SEQ ID NO: 33868 - protein, 558 aa, Homo sapiens
LLAVVVLLALPVAWGQCNAPEWLPFARPTNLTDEFEFPIGTYLNYECRPGYSGRPFSIICLKNSVWTGAKDRCRRKSCRNPPDPVNGMVHVIKGIQFGSQIKYSCTKGYRLIGSSSATCIISGDTVIWDNETPICDRIPCGLPPTITNGDFISTNRENFHYGSVVTYRCNPGSGGRKVFELVGEPSIYCTSNDDQVGIWSGPAPQCIIPNKCTPPNVENGILVSDNRSLFSLNEVVEFRCQPGFVMKGPRRVKCQALNKWEPELPSCSRVCQPPPDVLHAERTQRDKDNFSPGQEVFYSCEPGYDLRGAASMRCTPQGDWSPAAPTCEVKSCDDFMGQLLNGRVLFPVNLQLGAKVDFVCDEGFQLKGSSASYCVLAGMESLWNSSVPVCEQIFCPSPPVIPNGRHTGKPLEVFPFGKTVNYTCDPHPDRGTSFDLIGESTIRCTSDPQGNGVWSSPAPRCGILGHCQAPDHFLFAKLKTQTNASDFPIGTSLKYECRPEYYGRPFSITCLDNLVWSSPKDVCKRKSCKTPPDPVNGMVHVITDIQVGSRINYSCTTG

SEQ ID NO: 33869 - protein, 558 aa, Homo sapiens
LLAVVVLLALPVAWGQCNAPEWLPFARPTNLTDEFEFPIGTYLNYECRPGYSGRPFSIICLKNSVWTGAKDRCRRKSCRNPPDPVNGMVHVIKGIQFGSQIKYSCTKGYRLIGSSSATCIISGDTVIWDNETPICDRIPCGLPPTITNGDFISTNRENFHYGSVVTYRCNPGSGGRKVFELVGEPSIYCTSNDDQVGIWSGPAPQCIIPNKCTPPNVENGILVSDNRSLFSLNEVVEFRCQPGFVMKGPRRVKCQALNKWEPELPSCSRVCQPPPDVLHAERTQRDKDNFSPGQEVFYSCEPGYDLRGAASMRCTPQGDWSPAAPTCEVKSCDDFMGQLLNGRVLFPVNLQLGAKVDFVCDEGFQLKGSSASYCVLAGMESLWNSSVPVCEQIFCPSPPVIPNGRHTGKPLEVFPFGKAVNYTCDPHPDRGTSFDLIGESTIRCTSDPQGNGVWSSPAPRCGILGHCQAPDHFLFAKLKTQTNASDFPIGTSLKYECRPEYYGRPFSITCLDNLVWSSPKDVCKRKSCKTPPDPVNGMVHVITDIQVGSRINYSCTTG

SEQ ID NO: 33870 - protein, 558 aa, Homo sapiens
LLAVVVLLALPVAWGQCNAPEWLPFARPTNLTDEFEFPIGTYLNYECRPGYSGRPFSIICLKNSVWTGAKDRCRRKSCRNPPDPVNGMVHVIKGIQFGSQIKYSCTKGYRLIGSSSATCIISGDTVIWDNETPICDRIPCGLPPTIANGDFISTNRENFHYGSVVTYRCNPGSGGRKVFELVGEPSIYCTSNDDQVGIWSGPAPQCIIPNKCTPPNVENGILVSDNRSLFSLNEVVEFRCQPGFVMKGPRRVKCQALNKWEPELPSCSRVCQPPPDVLHAERTQRDKDNFSPGQEVFYSCEPGYDLRGAASMRCTPQGDWSPAAPTCEVKSCDDFMGQLLNGRVLFPVNLQLGAKVDFVCDEGFQLKGSSASYCVLAGMESLWNSSVPVCEQIFCPSPPVIPNGRHTGKPLEVFPFGKAVNYTCDPHPDRGTSFDLIGESTIRCTSDPQGNGVWSSPAPRCGILGHCQAPDHFLFAKLKTQTNASDFPIGTSLKYECRPEYYGRPFSITCLDNLVWSSPKDVCKRKSCKTPPDPVNGMVHVITDIQVGSRINYSCTTG

SEQ ID NO: 33871 - protein, 174 aa, Homo sapiens
MAPPVRLERPFPSRRFPGLLLAALVLLLSSFSDQCNVPEWLPFARPTNLTDDFEFPIGTYLNYECRPGYSGRPFSIICLKNSVWTSAKDKCKRKSCRNPPDPVNGMAHVIKDIQFRSQIKYSCPKGYRLIGSSSATCIISGNTVIWDNKTPVCDSELKYAFLFLLPIHSNFSLE

SEQ ID NO: 33872 - protein, 9 aa, Homo sapiens
MSCGLVLLW

SEQ ID NO: 33873 - protein, 63 aa, Homo sapiens
LGSFILACIIAFSDQLKRSEAEKLTLVTRVQQLQGLLQNQSLQLQEQEKLLTKKGQQIYYHKF

SEQ ID NO: 33874 - protein, 229 aa, Homo sapiens
LFLPLTPLRLLLLSAQVLIVVPFREAALRVVQLFISLLEGDSKKKIIVSNKKRFQGEYGSDPEERPPNLKRPEDYEAVFVGNIDDHFRIGVAILQRSIRLYAPFYSSDILIASPLGLRTIIGGEGEKKRDFDFLSSIELLIIDQADIYLMQNWEHVLHLMNHMNLLPLDSHGVDFSRVRMWSLNNWSKYYRQTLLFGALQDAQINSVFNKYCVNMQGQVGSRLVSSVSS

SEQ ID NO: 33875 - protein, 84 aa, Homo sapiens
LCPEYPVFCPNNCAKIILKTEVDEHLAVCPEAEQDCPFKHYGCAVTDKRRNLQQHEHSALREHMRLVLEKNVQLEEQVNLQRFK

SEQ ID NO: 33876 - protein, 21 aa, Homo sapiens
LRCYATSLLLICTLAPLGTQG

SEQ ID NO: 33877 - protein, 26 aa, Homo sapiens
MNRMSYNEKSDIWSLGCLLYELCALM

SEQ ID NO: 33878 - protein, 22 aa, Homo sapiens
LLCSAMSLISVNMKDKVKSSSG

SEQ ID NO: 33879 - protein, 33 aa, Homo sapiens
MLRSVFILCSCCPLLVDLSECFLTITSLKTLLN

SEQ ID NO: 33880 - protein, 20 aa, Homo sapiens
LKLRKLYSSLLAVVYIRAVL

SEQ ID NO: 33881 - protein, 178 aa, Homo sapiens
LRCALTMVGPAPRRRLRPLAALALVLALAPGLPTARAGQTPRPAERGPPVRLFTEEELARYGGEEEDQPIYLAVKGVVFDVTSGKEFYGRGAPYNALTGKDSTRGVAKMSLDPADLTHDTTGLTAKELEALDEVFTKVYKAKYPIVGYTARRILNEDGSPNLDFKPEDQPHFDIKDEF

SEQ ID NO: 33882 - protein, 156 aa, Homo sapiens
LRAHHGGPRAAAAAAAAGSAGPGPGAGPGAAHSPGRADTAPCRAGAPSAAFHRGGAGPLWRGGEFYGRGAPYNALTGKDSTRGVAKMSLDPADLTHDTTGLTAKELEALDEVFTKVYKAKYPIVGYTARRILNEDGSPNLDFKPEDQPHFDIKDEF

SEQ ID NO: 33883 - protein, 91 aa, Homo sapiens
MCTHALLEDLPSTFYKSKQKLVKQLPLTSICLETDSPALGPEKQVRNEPWNISISAEYIAQVKGISVEEVIEVTTQNALKLFPKLRHLLQK

SEQ ID NO: 33884 - protein, 27 aa, Homo sapiens
LQVLVNAIINSGPREDSIRIGRAEPGP

SEQ ID NO: 33885 - protein, 359 aa, Homo sapiens [sequence omitted]

SEQ ID NO: 33886 - protein, 18 aa, Homo sapiens
MANSQKLIPTFRVVSSIC

SEQ ID NO: 33887 - protein, 86 aa, Homo sapiens
LDSMKNLKASLENSLREVEVRYTLQMEQLNEILLHLASGLAQTQEEAQHQAQECEALLNIKAKLEARVTTYRCLLEDGEDFNLQSW

SEQ ID NO: 33888 - protein, 35 aa, Homo sapiens
LESIPWGIGSAAAKDSLSARDSGAPRGPCKQVVVF

SEQ ID NO: 33889 - protein, 892 aa, Homo sapiens
VEAGPPLCTAGLTREGAEASEPRPAAGKVGEAPCTPRPPAAAAPLALQPSPLPRATAPGSAVPAGEGGRRARPEPPEMAGGHCGSFPAAAAGSGEIVQLNVGGTRFSTSRQTLMWIPDSFFSSLLSGRISTLRDETGAIFIDRDPAAFAPILNFLRTKELDLRGVSINVLRHEAEFYGITPLVRRLLLCEELERSSCGSVLFHGYLPPPGIPSRKINNTVRSADSRNGLNSTEGEARGNGTQPVLSGTGEETVRLGFPVDPRKVLIVAGHHNWIVAAYAHFAVCYRIKESSGWQQVFTSPYLDWTIERVALNAKVVGGPHGDKDKMVAVASESSIILWSVQDGGSGSEIGVFSLGVPVDALFFIGNQLVATSHTGKVGVWNAVTQHWQVQDVVPITSYDTAGSFLLLGCNNGSIYYIDMQKFPLRMKDNDLLVTELYHDPSNDAITALSVYLTPKTSVSGNWIEIAYGTSSGAVRVIVQHPETVGSGPQLFQTFTVHRSPVTKIMLSEKHLVSVCADNNHVRTWTVTRFRGMISTQPGSTPLASFKILSLEETESHGSYSSGNDIGPFGERDDQQVFIQKVVPITNKLFVRLSSTGKRICEIQAVDCTTISSFTVRECEGSSRMGSRPRRYLFTGHTNGSIQMWDLTTAMDMVNKSEDKDVGGPTEEELLKLLDQCDLSTSRCATPNISPATSVVQHSHLRESNSSLQLQHHDTTHEAATYGSMRPYRESPLLARARRTESFHSYRDFQTINLNRNVERAVPENGNLGPIQAEVKGATGECNISERKSPGVEIKSLRELDSGLEVHKIAEGFSESKKRSSEDENENKIEFRKKGGFEGGGFLGRKKVPYLASSPSTSDGGTDSPGTASPSPTKTTPSPRHKKSDSSGQEYSL

SEQ ID NO: 33890 - protein, 5231 aa, Homo sapiens
LLQSIAGKWRGPDYLFRNALSGGECFFVNMNCPVLSLGSGFLFQVIEMLIFAYFASISLTESRGLFPRLENVGAFKKVSIVPTQAVCGLPDRSTFCHSSAAAESIQFCTQRFCIQDCPYRSSHPTYTALFSAGLSSCITPDKNDLHPNAHSNSASFIFGNHKSCFSSPPSPKLMASFTLAVWLKPEQQGVMCVIEKTVDGQIVFKLTISEKETMFYYRTVNGLQPPIKVMTLGRILVKKWIHLSVQVHQTKISFFINGVEKDHTPFNARTLSGSITDFASGTVQIGQSLNGLEQFVGRMQDFRLYQVALTNREILEVFSGDLLRLHAQSHCRCPGSHPRVHPLAQRYCIPNDAGDTADNRVSRLNPEAHPLSFVNDNDVGTSWVSNVFTNITQLNQGVTISVDLENGQYQVFYIIIQFFSPQPTEIRIQRKKENSLDWEDWQYFARNCGAFGMKNNGDLEKPDSVNCLQLSNFTPYSRGNVTFSILTPGPNYRPGYNNFYNTPSLQEFVKATQIRFHFHGQYYTTETAVNLRHRYYAVDEITISGRCQCHGHADNCDTTSQPYRCLCSQESFTEGLHCDRCLPLYNDKPFRQGDQVYAFNCKPCQCNSHSKSCHYNISVDPFPFEHFRGGGGVCDDCEHNTTGRNCELCKDYFFRQVGADPSAIDVCKPCDCDTVGTRNGSILCDQIGGQCNCKRHVSGRQCNQCQNGFYNLQELDPDGCSPCNCNTSGTVDGDITCHQNSGQCKCKANVIGLRCDHCNFGFKFLRSFNDVGCEPCQCNLHGSVNKFCNPHSGQCECKKEAKGLQCDTCRENFYGLDVTNCKACDCDTAGSLPGTVCNAKTGQCICKPNVEGRQCNKCLEGNFYLRQNNSFLCLPCNCDKTGTINGSLLCNKSTGQCPCKLGVTGLRCNQCEPHRYNLTIDNFQHCQMCECDSLGTLPGTICDPISGQCLCVPNRQGRRCNQCQPGFYISPGNATGCLPCSCHTTGAVNHICNSLTGQCVCQDASIAGQRCDQCKDHYFGFDPQTGRCQPCNCHLSGALNETCHLVTGQCFCKQFVTGSKCDACVPSASHLDVNNLLGCSKTPFQQPPPRGQVQSSSAINLSWSPPDSPNAHWLTYSLLRDGFEIYTTEDQYPYSIQYFLDTDLLPYTKYSYYIETTNVHGSTRSVAVTYKTKPGVPEGNLTLSYIIPIGSDSVTLTWTTLSNQSGPIEKYILSCAPLAGGQPCVSYEGHETSATIWNLVPFAKYDFSVQACTSGGCLHSLPITVTTAQAPPQRLSPPKMQKISSTELHVEWSPPAELNGIIIRYELYMRRLRSTKETTSEESRVFQSSGWLSPHSFVESANENALKPPQTMTTITGLEPYTKYEFRVLAVNMAGSVSSAWVSERTGESAPVFMIPPSVFPLSSYSLNISWEKPADNVTRGKVVGYDINMLSEQSPQQSIPMAFSQLLHTAKSQELSYTVEGLKPYRIYEFTITLCNSVGCVTSASGAGQTLAAAPAQLRPPLVKGINSTTIHLRWFPPEELNGPSPIYQLERRESSLPALMTTMMKGIRFIGNGYCKFPSSTHPVNTDFTGIKASFRTKVPEGLIVFAASPGNQEEYFALQLKKGRLYFLFDPQGSPVEVTTTNDHGKQYSDGKWHEIIAIRHQAFGQITLDGIYTGSSAILNGSTVIGDNTGVFLGGLPRSYTILRKDPEIIQKGFVGCLKDVHFMKNYNPSAIWEPLDWQSSEEQINVYNSWEGCPASLNEGAQFLGAGFLELHPYMFHGGMNFEISFKFRTDQLNGLLLFVYNKDGPDFLAMELKSGILTFRLNTSLAFTQVDLLLGLSYCNGKWNKVIIKKEGSFISASVNGLMKHASESGDQPLVVNSPVYVGGIPQELLNSYQHLCLEQGFGGCMKDVKFTRGAVVNLASVSSGAVRVNLDGCLSTDSAVNCRGNDSILVYQGKEQSVYEGGLQPFTEYLYRVIASHEGGSVYSDWSRGRTTGAAPQSVPTPSRVRSLNGYSIEVTWDEPVVRGVIEKYILKAYSEDSTRPPRMPSASAEFVNTSNLTGILTGLLPFKNYAVTLTACTLAGCTESSHALNISTPQEAPQEVQPPVAKSLPSSLLLSWNPPKKANGIITQYCLYMDGRLIYSGSEENYIVTDLAVFTPHQFLLSACTHVGCTNSSWVLLYTAQLPPEHVDSPVLTVLDSRTIHIQWKQPRKISGILERYVLYMSNHTHDFTIWSVIYNSTELFQDHMLQYVLPGNKYLIKLGACTGGGCTVSEASEALTDEDIPEGVPAPKAHSYSPDSFNVSWTEPEYPNGVITSYGLYLDGILIHNSSELSYRAYGFAPWSLHSFRVQACTAKGCALGPLVENRTLEAPPEGTVNVFVKTQGSRKAHVRWEAPFRPNGLLTHSVLFTGIFYVDPVGNNYTLLNVTKVMYSGEETNLWVLIDGLVPFTNYTVQVNISNSQGSLITDPITIAMPPGAPDGVLPPRLSSATPTSLQVVWSTPARNNAPGSPRYQLQMRSGDSTHGFLELFSNPSASLSYEVSDLQPYTEYMFRLVASNGFGSAHSSWIPFMTAEDKPGPVVPPILLDVKSRMMLVTWQHPRKSNGVITHYNIYLHGRLYLRTPGNVTNCTVMHLHPYTAYKFQVEACTSKGCSLSPESQTVWTLPGAPEGIPSPELFSDTPTSVIISWQPPTHPNGLVENFTIERRVKGKEEVTTLVTLPRSHSMRFIDKTSALSPWTKYEYRVLMSTLHGGTNSSAWVEVTTRPSRPAGVQPPVVTVLEPDAVQVTWKPPLIQNGDILSYEIHMPDPHITLTNVTSAVLSQKVTHLIPFTNYSVTIVACSGGNGYLGGCTESLPTYVTTHPTVPQNVGPLSVIPLSESYVVISWQPPSKPNGPNLRYELLRRKIQQPLASNPPEDLNRWHNIYSGTQWLYEDKGLSRFTTYEYMLFVHNSVGFTPSREVTVTTLAGLPERGANLTASVLNHTAIDVRWAKPTVQDLQGEVEYYTLFWSSATSNDSLKILPDVNSHVIGHLKPNTEYWIFISVFNGVHSINSAGLHATTCDGEPQGMLPPEVVIINSTAVRVIWTSPSNPNGVVTEYSIYVNNKLYKTGMNVPGSFILRDLSPFTIYDIQVEVCTIYACVKSNGTQITTVEDTPSDIPTPTIRGITSRSLQIDWVSPRKPNGIILGYDLLWKTWYPCAKTQKLVQDQSDELCKAVRCQKPESICGHICYSSEAKVCCNGVLYNPKPGHRCCEEKYIPFVLNSTGVCCGGRIQEAQPNHQCCSGYYARILPGEVCCPDEQHNRVSVGIGDSCCGRMPYSTSGNQICCAGRLHDGHGQKCCGRQIVSNDLECCGGEEGVVYNRLPGMFCCGQDYVNMSDTICCSASSGESKAHIKKNDPVPVKCCETELIPKSQKCCNGVGYNPLKYVCSDKISTGMMMKETKECRILCPASMEATEHCGRCDFNFTSHICTVIRGSHNSTGKASIEEMCSSAEETIHTGSVNTYSYTDVNLKPYMTYEYRISAWNSYGRGLSKAVRARTKEDVPQGVSPPTWTKIDNLEDTIVLNWRKPIQSNGPIIYYILLRNGIERFRGTSLSFSDKEGIQPFQEYSYQLKACTVAGCATSSKVVAATTQGVPESILPPSITALSAVALHLSWSVPEKSNGVIKEYQIRQVGKGLIHTDTTDRRQHTVTGLQPYTNYSFTLTACTSAGCTSSEPFLGQTLQAAPEGVWVTPRHIIINSTTVELYWSLPEKPNGLVSQYQLSRNGNLLFLGGSEEQNFTDKNLEPNSRYTYKLEVKTGGGSSASDDYIVQTPMSTPEEIYPPYNITVIGPYSIFVAWIPPGILIPEIPVEYNVLLNDGSVTPLAFSVGHHQSTLLENLTPFTQYEIRIQACQNGSCGVSSRMFVKTPEAAPMDLNSPVLKALGSACIEIKWMPPEKPNGIIINYFIYRRPAGIEEESVLFVWSEGALEFMDEGDTLRPFTLYEYRVRACNSKGSVESLWSLTQTLEAPPQDFPAPWAQATSAHSVLLNWTKPESPNGIISHYRVVYQERPDDPTFNSPTVHAFTVKGTSHQAHLYGLEPFTTYRIGVVAANHAGEILSPWTLIQTLESSPSGLRNFIVEQKENGRALLLQWSEPMRTNGVIKTYNIFSDGFLEYSGLNRQFLFRRLDPFTLYTLTLEACTRAGCAHSAPQPLWTDEAPPDSQLAPTVHSVKSTSVELSWSEPVNPNGKIIRYEVIRRCFEGKAWGNQTIQADEKIVFTEYNTERNTFMYNDTGLQPWTQCEYKIYTWNSAGHTCSSWNVVRTLQAPPEGLSPPVISYVSMNPQKLLISWIPPEQSNGIIQSYRLQRNEMLYPFSFDPVTFNYTDEELLPFSTYSYALQACTSGGCSTSKPTSITTLEAAPSEVSPPDLWAVSATQMNVCWSPPTVQNGKITKYLVRYDNKESLAGQGLCLLVSHLQPYSQYNFSLVACTNGGCTASVSKSAWTMEALPENMDSPTLQVTGSESIEITWKPPRNPNGQIRSYELRRDGTIVYTGLETRYRDFTLTPGVEYSYTVTASNSQGGILSPLVKDRTSPSAPSGMEPPKLQARGPQEILVNWDPPVRTNGDIINYTLFIRELFERETKIIHINTTHNSFGMQSYIVNQLKPFHRYEIRIQACTTLGCASSDWTFIQTPEIAPLMQPPPHLEVQMAPGGFQPTVSLLWTGPLQPNGKVLYYELYRRQIATQPRKSNPVLIYNGSSTSFIDSELLPFTEYEYQVWAVNSAGKAPSSWTWCRTGPAPPEGLRAPTFHVISSTQAVVNISAPGKPNGIVSLYRLFSSSAHGAETVLSEGMATQQTLHGLQAFTNYSIGVEACTCFNCCSKGPTAELRTHPAPPSGLSSPQIGTLASRTASFRWSPPMFPNGVIHSYELQFHVACPPDSALPCTPSQIETKYTGLGQKASLGGLQPYTTYKLRVVAHNEVGSTASEWISFTTQKELPQYRAPFSVDSNLSVVCVNWSDTFLLNGQLKEYVLTDGGRRVYSGLDTTLYIPRTADKTFFFQVICTTDEGSVKTPLIQYDTSTGLGLVLTTPGKKKGSRSKSTEFYSELWFIVLMAMLGLILLAIFLSLILQRKIHKEPYIRERPPLVPLQKRMSPLNVYPPGENHMGLADTKIPRSGTPVSIRSNRSACVLRIPSQNQTSLTYSQGSLHRSVSQLMDIQDKKVLMDNSLWEAIMGHNSGLYVDEEDLMNAIKDFSSVTKERTTFTDTHL

SEQ ID NO: 33891 - protein, 124 aa, Homo sapiens
LLDQVLPGGFSMGGCMAIHLAYRNHQDVAGVFALSSFLNKASAVYQALQKSNGVLPELFQCHGTADELVLHSWAEETNSMLKSLGVTTKFHSFPNVYHELSKTELDILKLWILTKLPGEMEKQK

SEQ ID NO: 33892 - protein, 9 aa, Homo sapiens
LTLAVLVFC

SEQ ID NO: 33893 - protein, 1031 aa, Homo sapiens
LPLQAGAGAEDPALRGCRTMRWGLRPRGPGAAALATARSLWGTPRLPCSPGWQGATKRLLVRSVSGASNHQPNSNSGRYRDTVLLPQTSFPMKLLGRQQPDTELEIQQKCGFSELYSWQRERKVKTEFCLHDGPPYANGDPHVGHALNKILKDIANRFHMMNGSKIHFVPGWDCHGLPIEIKVLSELGREAQNLSAMEIRKKARSFAKAAIEKQKSAFIRWGIMADWNNCYYTFDGKYEAKQLRTFYQMYDKGLVYRSYKPVFWSPSSRTALAEAELEYNPEHVSRSIYVKFPLLKPSPKLASLIDGSSPVSILVWTTQPWTIPANEAVCYMPESKYAVVKCSKSGDLYVLAADKVASVASTLETTFETISTLSGVDLENGTCSHPLIPDKASPLLPANHVTMAKGTGLVHTAPAHGMEDYGVASQHNLPMDCLVDEDGVFTDVAGPELQNKAVLEEGTDVVIKMLQTAKNLLKEEKLVHSYPYDWRTKKPVVIRASKQWFINITDIKTAAKELLKKVKFIPGSALNGMVEMMDRRPYWCISRQRVWGVPIPVFHHKTKDEYLINSQTTEHIVKLVEQHGSDIWWTLPPEQLLPKEVLSEVGGPDALEYVPGQDILDIWFDSGTSWSYVLPGPDQRADLYLEGKDQLGGWFQSSLLTSVAARKRAPYKTVIVHGFTLGEKGEKMSKSLGNVIHPDVVVNGGQDQSKEPPYGADVLRWWVADSNVFTEVAIGPSVLNAARDDISKLRNTLRFLLGNVADFNPETDSIPVNDMYVIDQYMLHLLQDLANKITELYKQYDFGKVVRLLRTFYTRELSNFYFSIIKDRLYCEKENDPKRRSCQTALVEILDVIVRSFAPILPHLAEEVFQHIPYIKEPKSVFRTGWISTSSIWKKPGLEEAVESACAMRDSFLGSIPGKNAAEYKVITVIEPGLLFEIIEMLQSEETSSTSQLNELMMASESTLLAQEPREMTADVIELKGKFLINLEGGDIREESSYKVIVMPTTKEKCPRCWKYTAESSDTLCPRCAEVVSGK

SEQ ID NO: 33894 - protein, 290 aa, Homo sapiens [sequence omitted]

SEQ ID NO: 33895 - protein, 555 aa, Homo sapiens
VTGRDPALASSLGGARAPGLSSSVRAEKRKRIVLGCRRLLRDSRAPPRAPTHPVRLDCGSRAAHPGRMFAAGLAPFYASNFSLWSAAYCSSAGPGGCSFPLDPAAVKKPSFCIADILHAGVGDLGAAPEGLAGASAAALTAHLGSVHPHASFQAAARSPLRPTPVVAPSEVPAGFPQRLSPLSAAYHHHHPQQQQQQQQPQQQQPPPPPRAGALQPPASGTRVVPNPHHSGSAPAPSSKDLKFGIDRILSAEFDPKVKEGNTLRDLTSLLTGGRPAGVHLSGLQPSAGQFFASLDPINEASAILSPLNSNPRNSVQHQFQDTFPGPYAVLTKDTMPQTYKRKRSWSRAVFSNLQRKGLEKRFEIQKYVTKPDRKQLAAMLGLTDAQVKVWFQNRRMKWRHSKEAQAQKDKDKEAGEKPSGGAPAADGEQDERSPSRSEGEAESESSDSESLDMAPSDTERTEGSERSLHQTTVIKAPVTGALITASSAGSGGSSGGGGNSFSFSSASSLSSSSTSAGCASSLGGGGASELLPATQPTASSAPKSPEPAQGALGCL

SEQ ID NO: 33896 - protein, 1232 aa, Homo sapiens
MAAAPGLLVWLLVLRLPWRVPGQLDPSTGRRFSEHKLCADDECSMLMYRGEALEDFTGPDCRFVNFKKGDPVYVYYKLARGWPEVWAGSVGRTFGYFPKDLIQVVHEYTKEELQVPTDETDFVCFDGGRDDFHNYNVEELLGFLELYNSAATDSEKAVEKTLQDMEKNPELSKEREPEPEPVEANSEESDSVFSENTEDLQEQFTTQKHHSHANSQANHAQGEQASFESFEEMLQDKLKVPESENNKTSNSSQVSNEQDKIDAYKLLKKEMTLDLKTKFGSTADALVSDDETTRLVTSLEDDFDEELDTEYYAVGKEDEENQEDFDELPLLTFTDGEDMKTPAKSGVEKYPTDKEQNSNEEDKVQLTVPPGIKNDDKNILTTWGDTIFSIVTGGEETRDTMDLESSSSEEEKEDDDDALVPDSKQGKPQSATDYSDPDNVDDGLFIVDIPKTNNDKEVNAEHHIKGKGRGVQESKRGLVQDKTELEDENQEGMTVHSSVHSNNLNSMPAAEKGKDTLKSAYDDTENDLKGAAIHISKGMLHEEKPGEQILEGGSESESAQKAAGNQMNDRKIQQESLGSAPLMGDDHPNASRDSVEGDALVNGAKLHTLSVEHQREELKEELVLKTQNQPRFSSPDEIDLPRELEDEVPILGRNLPWQQERDVAATASKQMSEKIRLSEGEAKEDSLDEEFFHHKAMQGTEVGQTDQTDSTGGPAFLSKVEEDDYPSEELLEDENAINAKRSKEKNPGNQGRQFDVNLQVPDRAVLGTIHPDPEIEESKQETSMILDSEKTSETAAKGVNTGGREPNTMVEKERPLADKKAQRPFERSDFSDSIKIQTPELGEVFQNKDSDYLKNDNPEEHLKTSGLAGEPEGELSKEDHENTEKYMGTESQGSAAAEPEDDSFHWTPHTSVEPGHSDKREDLLIISSFFKEQQSLQRFQKYFNVHELEALLQEMSSKLKSAQQESLPYNMEKVLDKVFRASESQILSIAEKMLDTRVAENRDLGMNENNIFEEAAVLDDIQDLIYFVRYKHSTAEETATLVMAPPLEEGLGGAMEEMQPLHEDNFSREKTAELNVQVPEEPTHLDQRVIGDTHASEVSQKPNTEKDLDPGPVTTEDTPMDAIDANKQPETAAEEPASVTPLENAILLIYSFMFYLTKSLVATLPDDVQPGPDFYGLPWKPVFITAFLGIASFAIFLWRTVLVVSKLMHTLTHKFKYGFIITVLLFLFQFLI

SEQ ID NO: 33897 - protein, 500 aa, Homo sapiens
MAAAPGLLVWLLVLRLPWRVPGQLDPSTGRRFSEHKLCADDECSMLMYRGEALEDFTGPDCRFVNFKKGDPVYVYYKLARGWPEVWAGSVGRTFGYFPKDLIQVVHEYTKEELQVPTDETDFVCFDGGRDDFHNYNVEELLGFLELYNSAATDSEKAVEKTLQDMEKNPELSKEREPEPEPVEANSEESDSVFSENTEDLQEQFTTQKHHSHANSQANHAQGEQASFESFEEMLQDKLKVPESENNKTSNSSQVSNEQDKIDAYKLLKKEMTLDLKTKFGSTADALVSDDETTRLVTSLEDDFDEELDTEYYAVGKEDEENQEDFDELPLLTFTDGEDMKTPAKSGVEKYPTDKEQNSNEEDKVQLTVPPGIKNDDKNILTTWGDTIFSIVTGGEETRDTMDLESSSSEEEKEDDDDALVPDSKQGKPQSATDYSDPDNVDDGLFIVDIPKTNNDKEVNAEHHIKGKGRGVQESKRGLVQDKTELEDENQEGFKTEPIKL

SEQ ID NO: 33898 - protein, 127 aa, Homo sapiens
MPGKPNTQNPPRRGPLSQNGSFGPSPVSGGECSPPLTVEPPVRPLSATLNRRDMPRSEFGSVDGPLPHPRWSAEASGKPSPSDPGSGTATMMNSSSRGSSPTRVLDEGKIDNRRMFAGSEILNSGSL

SEQ ID NO: 33899 - protein, 31 aa, Homo sapiens
LFPDDQIVFLKMSIFLVMSISCSSTSHCYSF

SEQ ID NO: 33900 - protein, 414 aa, Homo sapiens
LEKMTHWFHRNPLKATAPVSFNYYGVVTGPSASKICNDLRSSRARLLELFTDLSCNPEMMKNAADSYFSLLQGFINSLDESTQESKLRYIQNFKWTDTLQGQVPSAQQDAVFELISMGFNVALWYTKYASRLAGKENITEDEAKEVHRSLKIAAGIFKHLKESHLPKLITPAEKGRDLESRLIEAYVIQCQAEAQEVTIARAIELKHAPGLIAALAYETANFYQKADHTLSSLEPAYSAKWRKYLHLKMCFYTAYAYCYHGETLLASDKCGEAIRSLQEAEKLYAKAEALCKEYGETKGPGPTVKPSGHLFFRKLGNLVKNTLEKCQRENGFIYFQKIPTEAPQLELKANYGLVEPIPFEFPPTSVQWTPETLAAFDLTKRPKDDSTKPKPEEEVKPVKEPDIKPQKDTGCYIS

SEQ ID NO: 33901 - protein, 461 aa, Homo sapiens
VILWFQLALCFGPAQLTGGFDDLQVCADPGIPENGFRTPSGGVFFEGSVARFHCQDGFKLKGATKRLCLKHFNGTLGWIPSDNSICVQEDCRIPQIEDAEIHNKTYRHGEKLIITCHEGFKIRYPDLHNMVSLCRDDGTWNNLPICQGCLRPLASSNGYVNISELQTSFPVGTVISYRCFPGFKLDGSAYLECLQNLIWSSSPPRCLALEAQVCPLPPMVSHGDFVCHPRPCERYNHGTVVEFYCDPGYSLTSDYKYITCQYGEWFPSYQVYCIKSEQTWPSTHETLLTTWKIVAFTATSVLLVLLLVILARMFQTKFKAHFPPRGPPRSSSSDPDFVVVDGVPVMLPSYDEAVSGGLSALGPGYMASVGQGCPLPVDDQSPPAYPGSGDTDTGPGESETCDSVSGSSELLQSLYSPPRCQESTHPASDNPDIIASTAEEVASTSPGIDIADEIPLMEEDP

SEQ ID NO: 33902 - protein, 16 aa, Homo sapiens
MRAASLASTLTASWLV

SEQ ID NO: 33903 - protein, 83 aa, Homo sapiens
LQKGSLLGCSIDITSAADSEAITFQKLVKGHAYSVTGAEEVTAGADVQGSCCPDTMATGTVCGDAQGPARPHGGPVYTRAPHS

SEQ ID NO: 33904 - protein, 1231 aa, Homo sapiens
LGPDPGLVGFGAEEGAPTVTSVEETKPRQGARPGRGSPGLVGAPARAEGPSDPRAAAAAAAASQQVRAASLSAPLPRIRDPPGHLSSAGAAVWPPASMRFGSKMMPMFLTVYLSNNEQHFTEVPVTPETICRDVVDLCKEPGESDCHLAEVWCGSERPVADNERMFDVLQRFGSQRNEVRFFLRHERPPGRDIVSGPRSQDPSLKRNGVKVPGEYRRKENGVNSPRMDLTLAELQEMASRQQQQIEAQQQLLATKEQRLKFLKQQDQRQQQQVAEQEKLKRLKEIAENQEAKLKKVRALKGHVEQKRLSNGKLVEEIEQMNNLFQQKQRELVLAVSKVEELTRQLEMLKNGRIDSHHDNQSAVAELDRLYKELQLRNKLNQEQNAKLQQQRECLNKRNSEVAVMDKRVNELRDRLWKKKAALQQKENLPVSSDGNLPQQAASAPSRVAAVGPYIQSSTMPRMPSRPELLVKPALPDGSLVIQASEGPMKIQTLPNMRSGAASQTKGSKIHPVGPDWSPSNADLFPSQGSASVPQSTGNALDQVDDGEVPLREKEKKVRPFSMFDAVDQSNAPPSFGTLRKNQSSEDILRDAQVANKNVAKVPPPVPTKPKQINLPYFGQTNQPPSDIKPDGSSQQLSTVVPSMGTKPKPAGQQPRVLLSPSIPSVGQDQTLSPGSKQESPPAAAVRPFTPQPSKDTLLPPFRKPQTVAASSIYSMYTQQQAPGKNFQQAVQSALTKTHTRGPHFSSVYGKPVIAAAQNQQQHPENIYSNSQGKPGSPEPETEPVSSVQENHENERIPRPLSPTKLLPFLSNPYRNQSDADLEALRKKLSNAPRPLKKRSSITEPEGPNGPNIQKLLYQRTTIAAMETISVPSYPSKSASVTASSESPVEIQNPYLHVEPEKEVVSLVPESLSPEDVGNASTENSDMPAPSPGLDYEPEGVPDNSPNLQNNPEEPNPEAPHVLDVYLEEYPPYPPPPYPSGEPEGPGEDSVSMRPPEITGQVSLPPGKRTNLRKTGSERIAHGMRVKFNPLALLLDSSLEGEFDLVQRIIYEVDDPSLPNDEGITALHNAVCAGHTEIVKFLVQFGVNVNAADSDGWTPLHCAASCNNVQVCKFLVESGAAVFAMTYSDMQTAADKCEEMEEGYTQCSQFLYGVQEKMGIMNKGVIYALWDYEPQNDDELPMKEGDCMTIIHREDEDEIEWWWARLNDKEGYVPRNLLGLYPRIKPRQRSLA

SEQ ID NO: 33905 - protein, 104 aa, Homo sapiens
MMDSGDEVTHTVPFYGGYALPHAILCLDLAGRDLTDYLMKILTERGYSFTTTAEQEIVHDIKEKPCYIALDFEQEMATGASSSSLEKSYKLPDSQVIIKAVLLL

SEQ ID NO: 33906 - protein, 94 aa, Homo sapiens
MCKAGFTGDDDPWAIFPSMVGRPRHQGVMVSMGQKDSYVGDEAQSKRGILTLKYPIEHGIVTNWDDMEKIWHHIFHNELRVAPKQHPVLLTKAP

SEQ ID NO: 33907 - protein, 77 aa, Homo sapiens
LQGSWIINSSSESSSIDYGRRKRNAFRIQVEKVFSIISSEKELKNLTELEDEHLAKRARQGEEDNEIQKILLFWRVI

SEQ ID NO: 33908 - protein, 38 aa, Homo sapiens
MEAVVFVFSLLDCCALIFLSVYFVSLPEAGERLAGGHG

SEQ ID NO: 33909 - protein, 28 aa, Homo sapiens
MEAVVFVFSLLDCCALIFLSVYFASCSG

SEQ ID NO: 33910 - protein, 31 aa, Homo sapiens
MEKNVIGSLKMCVCGEGNRSTKACMYLQTKL

SEQ ID NO: 33911 - protein, 24 aa, Homo sapiens
VGGRGGIIFYLKLISALSFSQLPA

SEQ ID NO: 33912 - protein, 21 aa, Homo sapiens
VRGGAAILGLLGLASVGDSRT

SEQ ID NO: 33913 - protein, 17 aa, Homo sapiens
MLCLISTFKLPVNIRDL

SEQ ID NO: 33914 - protein, 56 aa, Homo sapiens
LVLLLTILVCLAHTCFGCFKHLSPLNYKTEEPASDKGSEAEAHMPPPFTITWQASL

SEQ ID NO: 33915 - protein, 339 aa, Homo sapiens
LLPQGSTMWPLWLCWALWVLPLAGPGAALTEEQLLGSLLRQLQLSEVPVLDRADMEKLVIPAHVRAQYVVLLRRSHGDRSRGKRFSQSFREVAGRFLASEAALHRHGRLSPRSAQARVTVEWLRVRDDGSNRTSLIDSRLVSVHESGWKAFDVTEAVNFWQQLSRPRQPLLLQVSVQREHLGPLASGAHKLVRFASQGAPAGLGEPQLELHTLDLRDYGAQGDCDPEAPMTEGTRCCRQEMYIDLQGMKWAKNWVLEPPGFLAYECVGTCQQPPEALAFNWPFLGPRQCIASETASLPMIVSIKEGGRTRPQVVSLPNMRVQKCSCASDGALVPRRLQP

SEQ ID NO: 33916 - protein, 373 aa, Homo sapiens
LLPQGSTMWPLWLCWALWVLPLAGPGAALTEEQLLGSLLRQLQLSEVPVLDRADMEKLVIPAHVRAQYVVLLRRSHGDRSRGKRFSQSFREVAGRFLASEASTHLLVFGMEQRLPPNSELVQAVLRLFQEPVPKAALHRHGRLSPRSAQARVTVEWLRVRDDGSNRTSLIDSRLVSVHESGWKAFDVTEAVNFWQQLSRPRQPLLLQVSVQREHLGPLASGAHKLVRFASQGAPAGLGEPQLELHTLDLRDYGAQGDCDPEAPMTEGTRCCRQEMYIDLQGMKWAKNWVLEPPGFLAYECVGTCQQPPEALAFNWPFLGPRQCIASETASLPMIVSIKEGGRTRPQVVSLPNMRVQKCSCASDGALVPRRLQP

SEQ ID NO: 33917 - protein, 15 aa, Homo sapiens
MGCLSFLCAVFLSVF

SEQ ID NO: 33918 - protein, 54 aa, Homo sapiens
VFPSVVLLGQRPIPRMMYSIFHLPTLLSGKTEPITGSSVKSKCCSFPTTIGFCL

SEQ ID NO: 33919 - protein, 49 aa, Homo sapiens
MTLSSTRREGHPPRAPGTPGISSSEETARSKLLELKEPETEASPPSEFY

SEQ ID NO: 33920 - protein, 438 aa, Homo sapiens
LSARPLLLAGLAVGLGFGALAEVAKKSLRSEDPSGKKAVLGSSPFLSEANAERIVRTLCKVRGAALKLGQMLSIQDDAFINPHLAKIFERVRQSADFMPLKQMMKTLNNDLGPNWRDKLEYFEERPFAAASIGQVHLARMKGGREVAMKIQYPGVAQSINSDVNNLMAVLNMSNMLPEGLFPEHLIDVLRRELALECDYQREAACARKFRDLLKGHPFFYVPEIVDELCSPHVLTTELVSGFPLDQAEGLSQEIRNEICYNILVLCLRELFEFHFMQTDPNWSNFFYDPQQHKVALLDFGATREYDRSFTDLYIQIIRAAADRDRETVRAKSIEMKFLTGYEVKVMEDAHLDAILILGEAFASDEPFDFGTQSTTEKIHNLIPVMLRHRLVPPPEETYSLHRKMGGSFLICSKLKARFPCKAMFEEAYSNYCKRQAQQ

SEQ ID NO: 33921 - protein, 17 aa, Homo sapiens
MKSFHRNPLKIGLTAKP

SEQ ID NO: 33922 - protein, 42 aa, Homo sapiens
LKKFQAHRGLRHLWGLRVLRPAQQDHWLPWLYYGCVQEGISL

SEQ ID NO: 33923 - protein, 214 aa, Homo sapiens
VWAAETLEPAGAGDWPRGDLRCPWPVSFHLSTSMGNIFANLFKGLFGKKEMRILMVGLDAAGKTTILYKLKLGEIVTTIPTIGFNVETVEYKNISFTVWDVGGQDKIRPLWRHYFQNTQGLIFVVDSNDRERVNEAREELMRMLAEDELRDAVLLVFANKQDLPNAMNAAEITDKLGLHSLRHRNWYIQATCATSGDGLYEGLDWLSNQLRNQK

SEQ ID NO: 33924 - protein, 158 aa, Homo sapiens
VRWGPAGSGLGWAGPRYKASPCIPHPGFNVETVEYKNISFTVWDVGGQDKIRPLWRHYFQNTQGLIFVVDSNDRERVNEAREELMRMLAEDELRDAVLLVFANKQDLPNAMNAAEITDKLGLHSLRHRNWYIQATCATSGDGLYEGLDWLSNQLRNQK

SEQ ID NO: 33925 - protein, 16 aa, Homo sapiens
LVYLVSWNLLLLSIHD

SEQ ID NO: 33926 - protein, 64 aa, Homo sapiens
VRPPAAPGAPLMDIKALFRATYYLEKRAALILQFFIGRRPDHPRLMNERSGHGEGRNGNRDPGD

SEQ ID NO: 33927 - protein, 47 aa, Homo sapiens
MHPSGCRVRPNLSRVCVCVCVCVRARAGTEREKLLVTEIGVETAQVM

SEQ ID NO: 33928 - protein, 27 aa, Homo sapiens
MNVVVIMFLILGTTCKTVRQFKNYLSC

SEQ ID NO: 33929 - protein, 16 aa, Homo sapiens
LKIFNLFVFQFSSIFM

SEQ ID NO: 33930 - protein, 79 aa, Homo sapiens
LVITLLIMFLKLSAKLIYLSIPSWSESQTSARHGRLCRHSSGKKRELPSPSSRCSPAGPPSPGRSAPLPSSFHFCRLRN

SEQ ID NO: 33931 - protein, 84 aa, Homo sapiens
VRAEDRAGGGGTHAPGERGELLKSPFSIPSKSRMVSTKPSRVTWQVYVNSPSLCSSIRKCLPGPDSPPPHVLAILRMKFSMVGH

SEQ ID NO: 33932 - protein, 76 aa, Homo sapiens
LHLGFSSRIQCLHFYKSSPKKSATSLCFIWEPLPWPPGFGGAALLGTAGVCHPSEPHPPVWISGRASLSLRLPFFN

SEQ ID NO: 33933 - protein, 21 aa, Homo sapiens
MLVFVFVFLFYEWTQFSPESC

SEQ ID NO: 33934 - protein, 44 aa, Homo sapiens
LGCIKTTISLLPFLNMLCSFSCCLNLSPQLYLFVSCITNCPVIR

SEQ ID NO: 33935 - protein, 175 aa, Homo sapiens
LLIVLEFKVENKGPQIAGFEHSMFFLNEPVCIFKTCAFKRELYFLNPAVNVETSRPPRACENTPLRSRLLLLGEWLARRLPSHSFSGRVGLRQLDMSLLCQLYSLYESIQEYKGACQAASSPDCTYALENGFFDEEEEYFQEQNSLHDRRDRGPPRDLSLPVSSLSSSDWILESI

SEQ ID NO: 33936 - protein, 16 aa, Homo sapiens
LGTLLVGLLALWMLNR

SEQ ID NO: 33937 - protein, 374 aa, Homo sapiens
LAAGRMPGGGPQGAPAAAGGGGVSHRAGSRDCLPPAACFRRRRLARRPGYMRSSTGPGIGFLSPAVGTLFRFPGGVSGEESHHSESRARQCGLDSRGLLVRSPVSKSAAAPTVTSVRGTSAHFGIQLRGGTRLPDRLSWPCGPGSAGWQQEFAAMDSSETLDASWEAACSDGARRVRAAGSLPSAELSSNSCSPGCGPEVPPTPPGSHSAFTSSFSFIRLSLGSAGERGEAEGCPPSREAESHCQSPQEMGAKAASLDGPHEDPRCLSRPFSLLATRVSADLAQAARNSSRPERDMHSLPDMDPGSSSSLDPSLAGCGGDGSSGSGDAHSWDTLLRKWEPVLRDCLLRNRRQMELEPIALDPPWKPRHPEPNSY

SEQ ID NO: 33938 - protein, 361 aa, Homo sapiens
LAAGRMPGGGPQGAPAAAGGGGVSHRAGSRDCLPPAACFRRRRLARRPGYMRSSTGPGIGFLSPAVGTLFRFPGGVSGEESHHSESRARQCGLDSRGLLVRSPVSKSAAAPTVTSVRGTSAHFGIQLRGGTRLPDRLSWPCGPGSAGWQQEFAAMDSSETLDASWEAACSDGARRVRAAGSLPSAELSSNSCSPGCGPEVPPTPPGSHSAFTSSFSFIRLSLGSAGERGEAEGCPPSREAESHCQSPQEMGAKAASLDGPHEDPRCLSRPFSLLATRVSADLAQAARNSSRPERDMHSLPDMDPGSSSSLDPSLAGCGGDGSSGSGDAHSWDTLLRKWEPVLRDCLLRNRRQMELRRYNKD

SEQ ID NO: 33939 - protein, 387 aa, Homo sapiens
LAAGRMPGGGPQGAPAAAGGGGVSHRAGSRDCLPPAACFRRRRLARRPGYMRSSTGPGIGFLSPAVGTLFRFPGGVSGEESHHSESRARQCGLDSRGLLVRSPVSKSAAAPTVTSVRGTSAHFGIQLRGGTRLPDRLSWPCGPGSAGWQQEFAAMDSSETLDASWEAACSDGARRVRAAGSLPSAELSSNSCSPGCGPEVPPTPPGSHSAFTSSFSFIRLSLGSAGERGEAEGCPPSREAESHCQSPQEMGAKAASLDGPHEDPRCLSRPFSLLATRVSADLAQAARNSSRPERDMHSLPDMDPGSSSSLDPSLAGCGGDGSSGSGDAHSWDTLLRKWEPVLRDCLLRNRRQMEVISLRLKLQKLQEDAVENDDYDKGPAEMTPTPH

SEQ ID NO: 33940 - protein, 447 aa, Homo sapiens
LAAGRMPGGGPQGAPAAAGGGGVSHRAGSRDCLPPAACFRRRRLARRPGYMRSSTGPGIGFLSPAVGTLFRFPGGVSGEESHHSESRARQCGLDSRGLLVRSPVSKSAAAPTVTSVRGTSAHFGIQLRGGTRLPDRLSWPCGPGSAGWQQEFAAMDSSETLDASWEAACSDGARRVRAAGSLPSAELSSNSCSPGCGPEVPPTPPGSHSAFTSSFSFIRLSLGSAGERGEAEGCPPSREAESHCQSPQEMGAKAASLDGPHEDPRCLSRPFSLLATRVSADLAQAARNSSRPERDMHSLPDMDPGSSSSLDPSLAGCGGDGSSGSGDAHSWDTLLRKWEPVLRDCLLRNRRQMEVISLRLKLQKLQEDAVENDDYDKAETLQQRLEDLEQEKISLHFQLPSRQPALSSFLGHLAAQVQAALRRGATQQKKSKLSKQGCLCWKPKINS

SEQ ID NO: 33941 - protein, 614 aa, Homo sapiens
LAAGRMPGGGPQGAPAAAGGGGVSHRAGSRDCLPPAACFRRRRLARRPGYMRSSTGPGIGFLSPAVGTLFRFPGGVSGEESHHSESRARQCGLDSRGLLVRSPVSKSAAAPTVTSVRGTSAHFGIQLRGGTRLPDRLSWPCGPGSAGWQQEFAAMDSSETLDASWEAACSDGARRVRAAGSLPSAELSSNSCSPGCGPEVPPTPPGSHSAFTSSFSFIRLSLGSAGERGEAEGCPPSREAESHCQSPQEMGAKAASLDGPHEDPRCLSRPFSLLATRVSADLAQAARNSSRPERDMHSLPDMDPGSSSSLDPSLAGCGGDGSSGSGDAHSWDTLLRKWEPVLRDCLLRNRRQMEVISLRLKLQKLQEDAVENDDYDKAETLQQRLEDLEQEKISLHFQLPSRQPALSSFLGHLAAQVQAALRRGATQQASGDDTHTPLRMEPRLLEPTAQDSLHVSITRRDWLLQEKQQLQKEIEALQARMFVLEAKDQQLRREIEEQEQQLQWQGCDLTPLVGQLSLGQLQEVSKALQDTLASAGQIPFHAEPPETIRREVRHQTAPCRNHQLEKPVINIWAFHLRRKICLFQADGLQHGSAEVKHLKETSVEPAGSTASRKE

SEQ ID NO: 33942 - protein, 552 aa, Homo sapiens
LAAGRMPGGGPQGAPAAAGGGGVSHRAGSRDCLPPAACFRRRRLARRPGYMRSSTGPGIGFLSPAVGTLFRFPGGVSGEESHHSESRARQCGLDSRGLLVRSPVSKSAAAPTVTSVRGTSAHFGIQLRGGTRLPDRLSWPCGPGSAGWQQEFAAMDSSETLDASWEAACSDGARRVRAAGSLPSAELSSNSCSPGCGPEVPPTPPGSHSAFTSSFSFIRLSLGSAGERGEAEGCPPSREAESHCQSPQEMGAKAASLDGPHEDPRCLSRPFSLLATRVSADLAQAARNSSRPERDMHSLPDMDPGSSSSLDPSLAGCGGDGSSGSGDAHSWDTLLRKWEPVLRDCLLRNRRQMEVISLRLKLQKLQEDAVENDDYDKAETLQQRLEDLEQEKISLHFQLPSRQPALSSFLGHLAAQVQAALRRGATQQASGDDTHTPLRMEPRLLEPTAQDSLHVSITRRDWLLQEKQQLQKEIEALQARMFVLEAKDQQLRREIEEQEQQLQWQGCDLTPLVGQLSLGQLQEVSKALQDTLASAGQIPFHAEPPETIRRCV

SEQ ID NO: 33943 - protein, 627 aa, Homo sapiens
LAAGRMPGGGPQGAPAAAGGGGVSHRAGSRDCLPPAACFRRRRLARRPGYMRSSTGPGIGFLSPAVGTLFRFPGGVSGEESHHSESRARQCGLDSRGLLVRSPVSKSAAAPTVTSVRGTSAHFGIQLRGGTRLPDRLSWPCGPGSAGWQQEFAAMDSSETLDASWEAACSDGARRVRAAGSLPSAELSSNSCSPGCGPEVPPTPPGSHSAFTSSFSFIRLSLGSAGERGEAEGCPPSREAESHCQSPQEMGAKAASLDGPHEDPRCLSRPFSLLATRVSADLAQAARNSSRPERDMHSLPDMDPGSSSSLDPSLAGCGGDGSSGSGDAHSWDTLLRKWEPVLRDCLLRNRRQMEVISLRLKLQKLQEDAVENDDYDKAETLQQRLEDLEQEKISLHFQLPSRQPALSSFLGHLAAQVQAALRRGATQQASGDDTHTPLRMEPRLLEPTAQDSLHVSITRRDWLLQEKQQLQKEIEALQARMFVLEAKDQQLRREIEEQEQQLQWQGCDLTPLVGQLSLGQLQEVSKALQDTLASAGQIPFHAEPPETIRSLQERIKSLNLSLKEITTKVCMSEKFCSTLRKKVNDIETQLPALLEAKMHAISGGHGTLWHILPDVSGGIVGAHPTFY

SEQ ID NO: 33944 - protein, 206 aa, Homo sapiens
LAAGRMPGGGPQGAPAAAGGGGVSHRAAETLQQRLEDLEQEKISLHFQLPSRQPALSSFLGHLAAQVQAALRRGATQQASGDDTHTPLRMEPRLLEPTAQDSLHVSITRRDWLLQEKQQLQKEIEALQARMFVLEAKDQQLRREIEEQEQQLQWQGCDLTPLVGQLSLGQLQEVSKALQDTLASAGQIPFHAEPPETIRRKPFLDG

SEQ ID NO: 33945 - protein, 584 aa, Homo sapiens
LAAGRMPGGGPQGAPAAAGGGGVSHRAGSRDCLPPAACFRRRRLARRPGYMRSSTGPGIGFLSPAVGTLFRFPGGVSGEESHHSESRARQCGLDSRGLLVRSPVSKSAAAPTVTSVRGTSAHFGIQLRGGTRLPDRLSWPCGPGSAGWQQEFAAMDSSETLDASWEAACSDGARRVRAAGSLPSAELSSNSCSPGCGPEVPPTPPGSHSAFTSSFSFIRLSLGSAGERGEAEGCPPSREAESHCQSPQEMGAKAASLDGPHEDPRCLSRPFSLLATRVSADLAQAARNSSRPERDMHSLPDMDPGSSSSLDPSLAGCGGDGSSGSGDAHSWDTLLRKWEPVLRDCLLRNRRQMEVISLRLKLQKLQEDAVENDDYDKAETLQQRLEDLEQEKISLHFQLPSRQPALSSFLGHLAAQVQAALRRGATQQASGDDTHTPLRMEPRLLEPTAQDSLHVSITRRDWLLQEKQQLQKEIEALQARMFVLEAKDQQLRREIEEQEQQLQWQGCDLTPLVGQLSLGQLQEVSKALQDTLASAGQIPFHAEPPETIRSLQERIKSLNLSLKEITTKETISGRLKTSPRRLDH

SEQ ID NO: 33946 - protein, 667 aa, Homo sapiens
LAAGRMPGGGPQGAPAAAGGGGVSHRAGSRDCLPPAACFRRRRLARRPGYMRSSTGPGIGFLSPAVGTLFRFPGGVSGEESHHSESRARQCGLDSRGLLVRSPVSKSAAAPTVTSVRGTSAHFGIQLRGGTRLPDRLSWPCGPGSAGWQQEFAAMDSSETLDASWEAACSDGARRVRAAGSLPSAELSSNSCSPGCGPEVPPTPPGSHSAFTSSFSFIRLSLGSAGERGEAEGCPPSREAESHCQSPQEMGAKAASLDGPHEDPRCLSRPFSLLATRVSADLAQAARNSSRPERDMHSLPDMDPGSSSSLDPSLAGCGGDGSSGSGDAHSWDTLLRKWEPVLRDCLLRNRRQMEVISLRLKLQKLQEDAVENDDYDKAETLQQRLEDLEQEKISLHFQLPSRQPALSSFLGHLAAQVQAALRRGATQQASGDDTHTPLRMEPRLLEPTAQDSLHVSITRRDWLLQEKQQLQKEIEALQARMFVLEAKDQQLRREIEEQEQQLQWQGCDLTPLVGQLSLGQLQEVSKALQDTLASAGQIPFHAEPPETIRSLQERIKSLNLSLKEITTKVCMSEKFCSTLRKKVNDIETQLPALLEAKMHAISGNHFWTAKDLTEEIRSLTSEREGLEGLLSKLLVLSSRNVKKLGSVKEDYNRLRREVEHQETAYGR

SEQ ID NO: 33947 - protein, 760 aa, Homo sapiens
LAAGRMPGGGPQGAPAAAGGGGVSHRAGSRDCLPPAACFRRRRLARRPGYMRSSTGPGIGFLSPAVGTLFRFPGGVSGEESHHSESRARQCGLDSRGLLVRSPVSKSAAAPTVTSVRGTSAHFGIQLRGGTRLPDRLSWPCGPGSAGWQQEFAAMDSSETLDASWEAACSDGARRVRAAGSLPSAELSSNSCSPGCGPEVPPTPPGSHSAFTSSFSFIRLSLGSAGERGEAEGCPPSREAESHCQSPQEMGAKAASLDGPHEDPRCLSRPFSLLATRVSADLAQAARNSSRPERDMHSLPDMDPGSSSSLDPSLAGCGGDGSSGSGDAHSWDTLLRKWEPVLRDCLLRNRRQMEVISLRLKLQKLQEDAVENDDYDKAETLQQRLEDLEQEKISLHFQLPSRQPALSSFLGHLAAQVQAALRRGATQQASGDDTHTPLRMEPRLLEPTAQDSLHVSITRRDWLLQEKQQLQKEIEALQARMFVLEAKDQQLRREIEEQEQQLQWQGCDLTPLVGQLSLGQLQEVSKALQDTLASAGQIPFHAEPPETIRSLQERIKSLNLSLKEITTKVCMSEKFCSTLRKKVNDIETQLPALLEAKMHAISGNHFWTAKDLTEEIRSLTSEREGLEGLLSKLLVLSSRNVKKLGSVKEDYNRLRREVEHQETAYDGVSLCRPVWSAVVRSCSLQPLPPEFKQFSCLSLRSSWDYRCPPPCLANFVFLVEMGFYHVDQTGLKLLTSSDPPSSASQSAGITDMSHCAWPLQ

SEQ ID NO: 33948 - protein, 683 aa, Homo sapiens
LAAGRMPGGGPQGAPAAAGGGGVSHRAGSRDCLPPAACFRRRRLARRPGYMRSSTGPGIGFLSPAVGTLFRFPGGVSGEESHHSESRARQCGLDSRGLLVRSPVSKSAAAPTVTSVRGTSAHFGIQLRGGTRLPDRLSWPCGPGSAGWQQEFAAMDSSETLDASWEAACSDGARRVRAAGSLPSAELSSNSCSPGCGPEVPPTPPGSHSAFTSSFSFIRLSLGSAGERGEAEGCPPSREAESHCQSPQEMGAKAASLDGPHEDPRCLSRPFSLLATRVSADLAQAARNSSRPERDMHSLPDMDPGSSSSLDPSLAGCGGDGSSGSGDAHSWDTLLRKWEPVLRDCLLRNRRQMEVISLRLKLQKLQEDAVENDDYDKAETLQQRLEDLEQEKISLHFQLPSRQPALSSFLGHLAAQVQAALRRGATQQASGDDTHTPLRMEPRLLEPTAQDSLHVSITRRDWLLQEKQQLQKEIEALQARMFVLEAKDQQLRREIEEQEQQLQWQGCDLTPLVGQLSLGQLQEVSKALQDTLASAGQIPFHAEPPETIRSLQERIKSLNLSLKEITTKVCMSEKFCSTLRKKVNDIETQLPALLEAKMHAISGNHFWTAKDLTEEIRSLTSEREGLEGLLSKLLVLSSRNVKKLGSVKEDYNRLRREVEHQETAYGYKYCDAESWTQRSQQLA

SEQ ID NO: 33949 - protein, 564 aa, Homo sapiens
LAAGRMPGGGPQGAPAAAGGGGVSHRAGSRDCLPPAACFRRRRLARRPGYMRSSTGPGIGFLSPAVGTLFRFPGGVSGEESHHSESRARQCGLDSRGLLVRSPVSKSAAAPTVTSVRGTSAHFGIQLRGGTRLPDRLSWPCGPGSAGWQQEFAAMDSSETLDASWEAACSDGARRVRAAGSLPSAELSSNSCSPGCGPEVPPTPPGSHSAFTSSFSFIRLSLGSAGERGEAEGCPPSREAESHCQSPQEMGAKAASLDGPHEDPRCLSRPFSLLATRVSADLAQAARNSSRPERDMHSLPDMDPGSSSSLDPSLAGCGGDGSSGSGDAHSWDTLLRKWEPVLRDCLLRNRRQMEVISLRLKLQKLQEDAVENDDYDKAETLQQRLEDLEQEKISLHFQLPSRQPALSSFLGHLAAQVQAALRRGATQQASGDDTHTPLRMEPRLLEPTAQDSLHVSITRRDWLLQEKQQLQKEIEALQARMFVLEAKDQQLRREIEEQEQQLQWQGCDLTPLVGQLSLGQLQEVSKALQDTLASAGQIPFHAEPPETIRRNKCEGKYYEVHGNT

SEQ ID NO: 33950 - protein, 700 aa, Homo sapiens
LAAGRMPGGGPQGAPAAAGGGGVSHRAGSRDCLPPAACFRRRRLARRPGYMRSSTGPGIGFLSPAVGTLFRFPGGVSGEESHHSESRARQCGLDSRGLLVRSPVSKSAAAPTVTSVRGTSAHFGIQLRGGTRLPDRLSWPCGPGSAGWQQEFAAMDSSETLDASWEAACSDGARRVRAAGSLPSAELSSNSCSPGCGPEVPPTPPGSHSAFTSSFSFIRLSLGSAGERGEAEGCPPSREAESHCQSPQEMGAKAASLDGPHEDPRCLSRPFSLLATRVSADLAQAARNSSRPERDMHSLPDMDPGSSSSLDPSLAGCGGDGSSGSGDAHSWDTLLRKWEPVLRDCLLRNRRQMEVISLRLKLQKLQEDAVENDDYDKAETLQQRLEDLEQEKISLHFQLPSRQPALSSFLGHLAAQVQAALRRGATQQASGDDTHTPLRMEPRLLEPTAQDSLHVSITRRDWLLQEKQQLQKEIEALQARMFVLEAKDQQLRREIEEQEQQLQWQGCDLTPLVGQLSLGQLQEVSKALQDTLASAGQIPFHAEPPETIRSLQERIKSLNLSLKEITTKVCMSEKFCSTLRKKVNDIETQLPALLEAKMHAISGNHFWTAKDLTEEIRSLTSEREGLEGLLSKLLVLSSRNVKKLGSVKEDYNRLRREVEHQETAYAASVHCLGKCGKLTWKLVDCLSRAYSSRKPGEACL

SEQ ID NO: 33951 - protein, 837 aa, Homo sapiens
LAAGRMPGGGPQGAPAAAGGGGVSHRAGSRDCLPPAACFRRRRLARRPGYMRSSTGPGIGFLSPAVGTLFRFPGGVSGEESHHSESRARQCGLDSRGLLVRSPVSKSAAAPTVTSVRGTSAHFGIQLRGGTRLPDRLSWPCGPGSAGWQQEFAAMDSSETLDASWEAACSDGARRVRAAGSLPSAELSSNSCSPGCGPEVPPTPPGSHSAFTSSFSFIRLSLGSAGERGEAEGCPPSREAESHCQSPQEMGAKAASLDGPHEDPRCLSRPFSLLATRVSADLAQAARNSSRPERDMHSLPDMDPGSSSSLDPSLAGCGGDGSSGSGDAHSWDTLLRKWEPVLRDCLLRNRRQMEVISLRLKLQKLQEDAVENDDYDKAETLQQRLEDLEQEKISLHFQLPSRQPALSSFLGHLAAQVQAALRRGATQQASGDDTHTPLRMEPRLLEPTAQDSLHVSITRRDWLLQEKQQLQKEIEALQARMFVLEAKDQQLRREIEEQEQQLQWQGCDLTPLVGQLSLGQLQEVSKALQDTLASAGQIPFHAEPPETIRSLQERIKSLNLSLKEITTKVCMSEKFCSTLRKKVNDIETQLPALLEAKMHAISGNHFWTAKDLTEEIRSLTSEREGLEGLLSKLLVLSSRNVKKLGSVKEDYNRLRREVEHQETAYETSVKENTMKYMETLKNKLCSCKCPLLGKVWEADLEACRLLIQSLQLQEARGSLSVEDERQMDDLEGAAPPIPPRLHSEDKRKTPLKESYILSAELGEKCEDIGKKLLYLEDQLHTAIHSHDEDLIHSLRRELQMVKETLQAMILQLQPAKEAGEREAAASCMTAGVHEAQA

SEQ ID NO: 33952 - protein, 737 aa, Homo sapiens
LAAGRMPGGGPQGAPAAAGGGGVSHRAGSRDCLPPAACFRRRRLARRPGYMRSSTGPGIGFLSPAVGTLFRFPGGVSGEESHHSESRARQCGLDSRGLLVRSPVSKSAAAPTVTSVRGTSAHFGIQLRGGTRLPDRLSWPCGPGSAGWQQEFAAMDSSETLDASWEAACSDGARRVRAAGSLPSAELSSNSCSPGCGPEVPPTPPGSHSAFTSSFSFIRLSLGSAGERGEAEGCPPSREAESHCQSPQEMGAKAASLDGPHEDPRCLSRPFSLLATRVSADLAQAARNSSRPERDMHSLPDMDPGSSSSLDPSLAGCGGDGSSGSGDAHSWDTLLRKWEPVLRDCLLRNRRQMEVISLRLKLQKLQEDAVENDDYDKAETLQQRLEDLEQEKISLHFQLPSRQPALSSFLGHLAAQVQAALRRGATQHLQERIKSLNLSLKEITTKVCMSEKFCSTLRKKVNDIETQLPALLEAKMHAISGNHFWTAKDLTEEIRSLTSEREGLEGLLSKLLVLSSRNVKKLGSVKEDYNRLRREVEHQETAYETSVKENTMKYMETLKNKLCSCKCPLLGKVWEADLEACRLLIQSLQLQEARGSLSVEDERQMDDLEGAAPPIPPRLHSEDKRKTPLKVLEEWKTHLIPSLHCAGGEQKEESYILSAELGEKCEDIGKKLLYLEDQLHTAIHSHDEDLIHSLRRELQMVKETLQAMILQLQPAKEAGEREAAASCMTAGVHEAQA

SEQ ID NO: 33953 - protein, 859 aa, Homo sapiens
LAAGRMPGGGPQGAPAAAGGGGVSHRAGSRDCLPPAACFRRRRLARRPGYMRSSTGPGIGFLSPAVGTLFRFPGGVSGEESHHSESRARQCGLDSRGLLVRSPVSKSAAAPTVTSVRGTSAHFGIQLRGGTRLPDRLSWPCGPGSAGWQQEFAAMDSSETLDASWEAACSDGARRVRAAGSLPSAELSSNSCSPGCGPEVPPTPPGSHSAFTSSFSFIRLSLGSAGERGEAEGCPPSREAESHCQSPQEMGAKAASLDGPHEDPRCLSRPFSLLATRVSADLAQAARNSSRPERDMHSLPDMDPGSSSSLDPSLAGCGGDGSSGSGDAHSWDTLLRKWEPVLRDCLLRNRRQMEVISLRLKLQKLQEDAVENDDYDKAETLQQRLEDLEQEKISLHFQLPSRQPALSSFLGHLAAQVQAALRRGATQQASGDDTHTPLRMEPRLLEPTAQDSLHVSITRRDWLLQEKQQLQKEIEALQARMFVLEAKDQQLRREIEEQEQQLQWQGCDLTPLVGQLSLGQLQEVSKALQDTLASAGQIPFHAEPPETIRSLQERIKSLNLSLKEITTKVCMSEKFCSTLRKKVNDIETQLPALLEAKMHAISGNHFWTAKDLTEEIRSLTSEREGLEGLLSKLLVLSSRNVKKLGSVKEDYNRLRREVEHQETAYETSVKENTMKYMETLKNKLCSCKCPLLGKVWEADLEACRLLIQSLQLQEARGSLSVEDERQMDDLEGAAPPIPPRLHSEDKRKTPLKVLEEWKTHLIPSLHCAGGEQKEESYILSAELGEKCEDIGKKLLYLEDQLHTAIHSHDEDLIHSLRRELQMVKETLQAMILQLQPAKEAGEREAAASCMTAGVHEAQA

SEQ ID NO: 33954 - protein, 490 aa, Homo sapiens
LLWLIWLIMFFLVTSDESNKTWGRNTVFRQEEFEDVKRNFKKKGCTWGPNSIQMKDRTDCKERIRPLSDGNSPWSTILIKNQKTMPLASLFVDQPGSCEEPKLSPDGLEHRKPKQIKLPSQAYIDLPLGKDAQRENPAEAESWEEAASANAATVSIEMTPTNSLSRSPQRKKTESALYGCTVLLASVALGLDLRELHKAQAAEEPLPKEEKKKREGIFQRASKSRRSASPPTSLPSTCGEASSPPSLPLSSALGILSTPSFSTKCLLQMDSEDPLVDSAPVTCDSEMLTPDFCPTAPGSGREPALMPRLDTDCSVSRNLPSSFLQQTCGNVPYCASSKHRPSHHRRTMSDGNPTPTGATIISATGASALPLCPSPAPHSHLPREVSPKKHSTVHIVPQRRPASLRSRSDLPQAYPQTAVSQLAQTACVVGRPGPHPTQFLAAKERTKSHVPSLLDADVEGQSRDYTVPLCRMRSKTSRPSIYELEKEFLS

SEQ ID NO: 33955 - protein, 60 aa, Homo sapiens
MFHLSVLMNIMDDNLKSKKKISAFNEEVLSAERRGSFTPTIRRTHIPLSGKAESFIYCSP

SEQ ID NO: 33956 - protein, 26 aa, Homo sapiens
LYEVHSVMTHSVLFLLVSTAQAWKKP

SEQ ID NO: 33957 - protein, 41 aa, Homo sapiens
LFLLAVCVCFLCIQKTEEMKKQKKRNEESDWKEGFSRTSPV

SEQ ID NO: 33958 - protein, 40 aa, Homo sapiens
LFLLAVCVCFLCIQKTEEMKKQKKRNEESDWKEYEFVLMK

SEQ ID NO: 33959 - protein, 83 aa, Homo sapiens
MALEGMSKRKRKRSVQEGENPDDGVRGSPPEDYRLGQVASSLFRGEHHSRGGTGRLASLFSSLEPQIQPVYVPVPKGKRSSEC

SEQ ID NO: 33960 - protein, 1071 aa, Homo sapiens
MKALDEPPYLTVGTDVSAKYRGAFCEAKIKTAKRLVKVKVTFRHDSSTVEVQDDHIKGPLKVGAIVEVKNLDGAYQEAVINKLTDASWYTVVFDDGDEKTLRRSSLCLKGERHFAESETLDQLPLTNPEHFGTPVIGKKTNRGRRSNHIPEEESSSSSSDEDEDDRKQIDELLGKVVCVDYISLDKKKALWFPALVVCPDCSDEIAVKKDNILVRSFKDGKFTSVPRKDVHEITSDTAPKPDAVLKQAFEQALEFHKSRTIPANWKTELKEDSSSSEAEEEEEEEDDEKEKEDNSSEEEEEIEPFPEERENFLQQLYKFMEDRGTPINKRPVLGYRNLNLFKLFRLVHKLGGFDNIESGAVWKQVYQDLGIPVLNSAAGYNVKCAYKKYLYGFEEYCRSANIEFQMALPEKVVNKQCKECENVKEIKVKEENETEIKEIKMEEERNIIPREEKPIEDEIERKENIKPSLGSKKNLLESIPTHSDQEKEVNIKKPEDNENLDDKDDDTTRVDESLNIKVEAEEEKAKSGYDEWIKADKIVRPADKNVPKIKHRKKIKNKLDKEKDKDEKYSPKNCKLRRLSKPPFQTNPSPEMVSKLDLTDAKNSDTAHIKSIEITSILNGLQASESSAEDSEQEDERGAQDMDNNGKEESKIDHLTNNRNDLISKEEQNSSSLLEENKVHADLVISKPVSKSPERLRKDIEVLSEDTDYEEDEVTKKRKDVKKDTTDKSSKPQIKRGKRRYCNTEECLKTGSPGKKEEKAKNKESLCMENSSNSSSDEDEEETKAKMTPTKKYNGLEEKRKSLRTTGFYSGFSEVAEKRIKLLNNSDERLQNSRAKDRKDVWSSIQGQWPKKTLKELFSDSDTEAAASPPHPAPEEGVAEESLQTVAEEESCSPSVELEKPPPVNVDSKPIEEKTVEVNDRKAEFPSSGSNSVLNTPPTTPESPSSVTVTEGSRQQSSVTVSEPLAPNQEEVRSIKSETDSTIEVDSVAGELQDLQSEGNSSPAGFDASVSSSSSNQPEPEHPEKACTGQKRVKDAQGGGSSSKKQKRSHKATVVNNKKKGKGSKCEISNF

SEQ ID NO: 33961 - protein, 70 aa, Homo sapiens
VAMLQFISSGLPKVAMPSTIHCDHLKEAQLGGEKDLRQAKDINQEVYNFLATAGAKYGVDCWRLGSGIIH

SEQ ID NO: 33962 - protein, 233 aa, Homo sapiens
MRPERPRPRGSAPGPMETPPWDPARNDSLPPTLTPAVPPYVKLGLTVVYTVFYALLFVFIYVQLWLVLRYRHKRLSYQSVFLFLCLFWASLRTVLFSFYFKDFVAANSLSPFVFWLLYCFPVCLQFFTLTLMNLYFTQGSSVCQVTAIGVTVILLYTSRACYNLFILSFSQNKSVHSFDYDWYNVSDQVSGGAEEVSPDQGLLVSSRHWFQDPRKYQNLDAQVPDIKWCSICI

SEQ ID NO: 33963 - protein, 31 aa, Homo sapiens [sequence omitted]

SEQ ID NO: 33964 - protein, 131 aa, Homo sapiens
MEVTPLSLQIPGRKLPQIPPLGGGARPQARREQVRKQPRWGGFAARRHPRANSLTPARDVQERPRLLIIPYAPERLACRGSVPATQPRLCRGEDRRVGVDWTLSHPSNGDLGAVTSECHPPLARPSEQPRL

SEQ ID NO: 33965 - protein, 157 aa, Homo sapiens
LDTSFPWRSLSAGLLVLTVASFQRLPFAARLNTPMGPGRTVVVKGEVNANAKSFNVDLLAGKSKDIALHLNPRLNIKAFVRNSFLQESWGEEERNITSFPFSPGMYFEMIIYCDVREFKVAVNGVHSLEYKHRFKELSSIDTLEINGDIHLLEVRSW

SEQ ID NO: 33966 - protein, 320 aa, Homo sapiens
LVLRPRPSAQACRPERSRAKVTPRPPPAARRLRGSVCQSARASEPLAPRRSPGQPSAMNQIEPGVQYNYVYDEDEYMIQEEEWDRDLLLDPAWEKQQRKTFTAWCNSHLRKAGTQIENIEEDFRNGLKLMLLLEVISGERLPKPDRGKMRFHKIANVNKALDYIASKGVKLVSIGAEEIVDGNVKMTLGMIWTIILRFAIQDISVEETSAKEGLLLWCQRKTAPYRNVNIQNFHTSWKDGLGLCALIHRHRPDLIDYSKLNKDDPIGNINLAMEIAEKHLDIPKMLDAEDLVYTARPDERAIMTYVSCYYHAFAGAQKTS

SEQ ID NO: 33967 - protein, 951 aa, Homo sapiens
LVLRPRPSAQACRPERSRAKVTPRPPPAARRLRGSVCQSARASEPLAPRRSPGQPSAMNQIEPGVQYNYVYDEDEYMIQEEEWDRDLLLDPAWEKQQRKTFTAWCNSHLRKAGTQIENIEEDFRNGLKLMLLLEVISGERLPKPDRGKMRFHKIANVNKALDYIASKGVKLVSIGAEEIVDGNVKMTLGMIWTIILRFAIQDISVEETSAKEGLLLWCQRKTAPYRNVNIQNFHTSWKDGLGLCALIHRHRPDLIDYSKLNKDDPIGNINLAMEIAEKHLDIPKMLDAEDLVYTARPDERAIMTYVSCYYHAFAGAQKAETAANRICKVLAVNQENERLMEEYERLASELLEWIRRTIPWLENRTPEKTMQAMQKKLEDFRDYRRKHKPPKVQEKCQLEINFNTLQTKLRISNRPAFMPSEGKMVSDIAGAWQRLEQAEKGYEEWLLNEIRRLERLEHLAEKFRQKASTHETWAYGKEQILLQKDYESASLTEVRALLRKHEAFESDLAAHQDRVEQIAAIAQELNELDYHDAVNVNDRCQKICDQWDRLGTLTQKRREALERMEKLLETIDQLHLEFAKRAAPFNNWMEGAMEDLQDMFIVHSIEEIQSLITAHEQFKATLPEADGERQSIMAIQNEVEKVIQSYNIRISSSNPYSTVTMDELRTKWDKVKQLVPIRDQSLQEELARQHANERLRRQFAAQANAIGPWIQNKMEEIARSSIQITGALEDQMNQLKQYEHNIINYKNNIDKLEGDHQLIQEALVFDNKHTNYTMEHIRVGWELLLTTIARTINEVETQILTRDAKGITQEQMNEFRASFNHFDRRKNGLMDHEDFRACLISMGYDLGEAEFARIMTLVDPNGQGTVTFQSFIDFMTRETADTDTAEQVIASFRILASDKPYILAEELRRELPPDQAQYCIKRMPAYSGPGSVPGALDYAAFSSALYGESDL

SEQ ID NO: 33968 - protein, 42 aa, Homo sapiens
LEFKLWVRSSLAGTLTLWRIAVSPIFPFHPKKSCFSHPSNSL

SEQ ID NO: 33969 - protein, 14 aa, Homo sapiens
LVTGRTWKGTAFGG

SEQ ID NO: 33970 - protein, 20 aa, Homo sapiens
MGVCCSLAAVELKAAAGDQT

SEQ ID NO: 33971 - protein, 68 aa, Homo sapiens
MNGRPHKVDGRVVEPKRAVSREDSQRPGAHLTVKNIFVGGIKEDTEEHHLRDYFEQFGKIEGIEIMTD

SEQ ID NO: 33972 - protein, 38 aa, Homo sapiens [sequence omitted]

SEQ ID NO: 33973 - protein, 124 aa, Homo sapiens [sequence omitted]

SEQ ID NO: 33974 - protein, 7 aa, Homo sapiens
MCGACVE

SEQ ID NO: 33975 - protein, 19 aa, Homo sapiens
MKLYLSLRSHAVAATVLLL

SEQ ID NO: 33976 - protein, 551 aa, Homo sapiens
VASVRGGGRCRHQGLFLRAVLPRPACAGQSWYPLERAVAESGAGTGWRVAARRGGGGAGLWLLLPLHVAGGRRAVQFAHSSPAASPSGSPRVTGAMAFAETYPAASSLPNGDCGRPRARPGGNRVTVVLGAQWGDEGKGKVVDLLAQDADIVCRCQGGNNAGHTVVVDSVEYDFHLLPSGIINPNVTAFIGNGVVIHLPGLFEEAEKNVQKGKGLEGWEKRLIISDRAHIVFDFHQAADGIQEQQRQEQAGKNLGTTKKGIGPVYSSKAARSGLRMCDLVSDFDGFSERFKVLANQYKSIYPTLEIDIEGELQKLKGYMEKIKPMVRDGVYFLYEALHGPPKKILVEGANAALLDIDFGTYPFVTSSNCTVGGVCTGLGMPPQNVGEVYGVVKAYTTRVGIGAFPTEQDNEIGELLQTRGREFGVTTGRKRRCGWLDLVLLKYAHMINGFTALALTKLDILDMFTEIKVGVAYKLDGEIIPHIPANQEVLNKVEVQYKTLPGWNTDISNARAFKELPVNAQNYVRFIEDELQIPVKWIGVGKSRESMIQLF

SEQ ID NO: 33977 - protein, 28 aa, Homo sapiens
MYWGRRFIFILIHMYFLLAQDFDGVGIS

SEQ ID NO: 33978 - protein, 9 aa, Homo sapiens
LSGLLMFFL

SEQ ID NO: 33979 - protein, 105 aa, Homo sapiens
LVFQVEEEEPTGYIRFEKFLPVMTEILLERKYRPIPEDVLLRAFEVLDSAKRGFLTKDELIKYMTEEGEPFSQEEMEEMLSAAIDPESNSINYKDYITMMVIDEN

SEQ ID NO: 33980 - protein, 402 aa, Homo sapiens
LLSCLAVIKLFLCCNTPTVLRVLAFLGSRKEKLMRCSQCRVAKYCSAKCQKKAWPDHKRECKCLKSCKPRYPPDSVRLLGRVVFKLMDGAPSESEKLYSFYDLESNINKLTEDKKEGLRQLVMTFQHFMREEIQDASQLPPAFDLFEAFAKVICNSFTICNAEMQEVGVGLYPSISLLNHSCDPNCSIVFNGPHLLLRAVRDIEVGEELTICYLDMLMTSEERRKQLRDQYCFECDCFRCQTQDKDADMLTGDEQVWKEVQESLKKIEELKAHWKWEQVLAMCQAIISSNSERLPDINIYQLKVLDCAMDACINLGLLEEALFYGTRTMEPYRIFFPGSHPVRGVQVMKVGKLQLHQGMFPQAMKNLRLAFDIMRVTHGREHSLIEDLILLLEECDANIRAS

SEQ ID NO: 33981 - protein, 407 aa, Homo sapiens
VILGAGLRDKDMWIPVVGLPRRLRLSALAGAGRFCILGSEAATRKHLPARNHCGLSDSSPQLWPEPDFRNPPRKASKASLDFKRYVTDRRLAETLAQIYLGKPSRPPHLLLECNPGPGILTQALLEAGAKVVALESDKTFIPHLESLGKNLDGKLRVIHCDFFKLDPRSGGVIKPPAMSSRGLFKNLGIEAVPWTADIPLKVVGMFPSRGEKRALWKLAYDLYSCTSIYKFGRIEVNMFIGEKEFQKLMADPGNPDLYHVLSVIWQLACEIKVLHMEPWSSFDIYTRKGPLENPKRRELLDQLQQKLYLIQMIPRQNLFTKNLTPMNYNIFFHLLKHCFGRRSATVIDHLRSLTPLDARDILMQIGKQEDEKVVNMHPQDFKTLFETIERSKDCAYKWLYDETLEDR

SEQ ID NO: 33982 - protein, 12 aa, Homo sapiens
MFHVGYPAWGSL

SEQ ID NO: 33983 - protein, 1095 aa, Homo sapiens
LGSKAYSPFLVILRLLDLVVQPVPRPSQCSEFIQQSSMKSPLYLVSRSLPSSSQLKGSPQAISRASELHLLETPLVVKKAKSLAMSVTTSGFSEFTPQSILRSTLRSTPLASPSPSPGRSPQRLKETRISFVEEDVHPKWIPGAADDSKLEVFTTPKKCAVPVETEWLKSKDRTTSFFLNSPEKEHQEMDEGSQSLEKLDVSKGNSSVSITSDETTLEYQDAPSPEDLEETVFTASKPKSSSTALTTNVTEQTEKDGDKDVFASEVTPSDLQKQMGNLEDAETKDLLVAAEAFSELNHLSPVQGTEASLCAPSVYEGKIFTQKSKVPVLDEGLTSVETYTPAIRANDNKSMADVLGDGGNSSLTISEGPIVSERRLNQEVALNLKEDHEVEVGVLKESVDLPEEKLPISDSPPDTQEIHVIEQEKLEAQDSGEEARNLSFNELYPSGTLKLQYNFDTIDQQFCDLADNKDTAECDIAEVDGELFVAQSNFTLILEGEEGEVEPGDFASSDVLPKAANTATEEKLVCSGENDNHGQIANLPSAVTSDQKSQKVDTLPYVPEPIKVAIAENLLDVIKDTRSKEITSDTMEQSIHETIPLVSQNIMCPTKLVKSAFKTAQETSTMTMNVSQVDDVVSSKTRTRGQRIQNVNVKSAQQEASADVATPKMPGQSVRKKTRKAKEISEASENIYSDVRGLSQNQQIPQNSVTPRRGRRKKEVNQDILENTSSVEQELQITTGRESKRLKSSQLLEPAVEETTKKEVKVSSVTKRTPRRIKRSVENQESVEIINDLKVSTVTSPSRMIRKLRSTNLDASENTGNKQDDKSSDKQLRIKHVRRVRGREVSPSDVREDSNLESSQLTVQAEFDMSAIPRKRGRPRKINPSEDVGSKAVKEERSPKKKEAPSIRRRSTRNTPAKSENVDVGKPALGKSILVPNEELSMVMSSKKKLTKKTESQSQKRSLHSVSEERTDEMTHKETNEQEERLLATASFTKSSRSSRTRSSKAILLPDLSEPNNEPLFSPASEVPRKAKAKKIEVPAQLKELVSDLSSQFVISPPALRSRQKNTSNKNKLEDELKHRKRKCLVTSSHRNSADFPLG

SEQ ID NO: 33984 - protein, 46 aa, Homo sapiens
LAVALSLLRRSRLFLLVSAASSWLWEAQVALQQPLPPCDLRVLGHP

SEQ ID NO: 33985 - protein, 44 aa, Homo sapiens
LVTMRTSGFEVAMGRQPKGREGVGVRVCMCWCVRGKGSFLVLFK

SEQ ID NO: 33986 - protein, 18 aa, Homo sapiens
MVFPLGWVLNIAKVLVGP

SEQ ID NO: 33987 - protein, 37 aa, Homo sapiens
MMYFRFWSAWSFLVGSACCGEGGGEIVCSIEAPRTGR

SEQ ID NO: 33988 - protein, 28 aa, Homo sapiens
LKAGRGSVRPPEEARLERERGRESVVHR

SEQ ID NO: 33989 - protein, 40 aa, Homo sapiens
LLLSACLPPDDTHMVALSFNTLYHRRTGFGSTPATAIEIV

SEQ ID NO: 33990 - protein, 16 aa, Homo sapiens
LLMGGPVLFAVLFAQR

SEQ ID NO: 33991 - protein, 44 aa, Homo sapiens
MPPPFSLCHWGGAVWTLWLLWQEMVPSSHPRAWKPPKESRRAGC

SEQ ID NO: 33992 - protein, 122 aa, Homo sapiens
VREPRGWAGGLWLGALEMTGAPQVGQGQRPEEGRPQGAGVTSFAGRARAGRDRTPGASPGGARETVSGRERRGGWKPRSCGERRWRGGVEWGRGDPTWTRRLAAGPAARAVVGAEPGRAHSF

SEQ ID NO: 33993 - protein, 954 aa, Homo sapiens
LRRVKRGFLASQVLVMRNVALRRAAGPVCAEAAERRVTSVPELFLTAVKLTHDDTGARYLHLAREDTNNLFSVQFRTTPMDSTGVPHILEHTVLCGSQKYPCRDPFFKMLNRSLSTFMNAFTASDYTLYPFSTQNPKDFQNLLSVYLDATFFPCLRELDFWQEGWRLEHENPSDPQTPLVFKGVVFNEMKGAFTDNERIFSQHLQNRLLPDHTYSVVSGGDPLCIPELTWEQLKQFHATHYHPSNARFFTYGNFPLEQHLKQIHEEALSKFQKIEPSTVVPAQTPWDKPREFQITCGPDSFATDPSKQTTISVSFLLPDITDTFEAFTLSLLSSLLTSGPNSPFYKALIESGLGTDFSPDVGYNGYTREAYFSVGLQGIAEKDIETVRSLIDRTIDEVVEKGFEDDRIEALLHKIEIQMKHQSTSFGLMLTSYIASCWNHDGDPVELLKLGNQLAKFRQCLQENPKFLQEKVKQYFKNNQHKLTLSMRPDDKYHEKQAQVEATKLKQKVEALSPGDRQQIYEKGLELRSQQSKPQDASCLPALKVSDIEPTIPVTELDVVLTAGDIPVQYCAQPTNGMVYFRAFSSLNTLPEELRPYVPLFCSVLTNPCFEEEEHFKVLVKMTAQELANGIPDSGHLYASIRAGRTLTPAGDLQETFSGMDQVRLMKRIAEMTDIKPILRKLPRIKKHLLNGDNMRCSVNATPQQMPQTEKAVEDFLRSIGRSKKERRPVRPHTVEKPVPSSSGGDAHVPHGSQVIRKLVMEPTFKPWQMKTHFLMPFPVNYVGECIRTVPYTDPDHASLKILARLMTAKFLHTEIREKGGAYGGGAKLSHNGIFTLYSYRDPNTIETLQSFGKAVDWAKSGKFTQQDIDEAKLSVFSTVDAPVAPSDKGMDHFLYGLSDEMKQAHREQLFAVSHDKLLAVSDRYLGTGKSTHGLAILGPENPKIAKDPSWIIQ

SEQ ID NO: 33994 - protein, 13 aa, Homo sapiens
MSSVFQEVNAVPG

SEQ ID NO: 33995 - protein, 62 aa, Homo sapiens
LTQPEQLPVLKAAFMTQSPQLQSKDGFSWNLERANPVRQPVILEVKEQKKKKKGKISHKISI

SEQ ID NO: 33996 - protein, 91 aa, Homo sapiens
VRGGGAAGRPAAAMGDIPAVGLSSWKLWCTCHKKSLVETACRKSLKALKLNYLDLYLIHWPMGFKSRSLIGHGGPGDHRAGEEHRGVKLQP

SEQ ID NO: 33997 - protein, 208 aa, Homo sapiens
LIAMGVVSLFLCIVEQIFTSSKKIQFRGIFMAKVPKSKALEATKLAIEAGFRHIDSAHLYNNEEQVGLAIRSKIADGSVKREDIFYTSKLWCNSHRPELVRPALERSLKNLQLDYVDLYLIHFPVSVKPGEEVIPKDENGKILFDTVDLCATWEAVEKCKDAGLAKSIGVSNFNRRQLEMILNKPGLKYKPVCNQPRDNSIFSLSPDW

SEQ ID NO: 33998 - protein, 190 aa, Homo sapiens
MDSKHQCVKLNDGHFMPVLGFGTYAPPEVPRSKALEVTKLAIEAGFRHIDSAHLYNNEEQVGLAIRSKIADGSVKREDIFYTSKAMEKCKDAGLAKSIGVSNFNRRQLEMILNKPGLKYKPVCNQVSSLGLLSFRFFMPPLPVLLPNICLFCPSYLCEVEDYLESKASVKKGVKISCLYPAWKSIREKLE

SEQ ID NO: 33999 - protein, 81 aa, Homo sapiens
LPDHYSTEPSQSKVRFVSISDLLVPKDLGTESQIFISRTYDATTHFETTCDDIKNIYKRMTGSEFDFEEMKRKKNDIYGED

SEQ ID NO: 34000 - protein, 541 aa, Homo sapiens
VPGAPDWRPSRRLQAPPRLRRLSHSPPLLAPSPPLPAQFFSSRLRWRSVSPCRQLHFPLFLFPFPSRPRAPPSLVGWSRSPCAFSLLGSCVRACPAMNEEYDVIVLGTGLTECILSGIMSVNGKKVLHMDRNPYYGGESASITPLEDLYKRFKIPGSPPESMGRGRDWNVDLIPKFLMANGQLVKMLLYTEVTRYLDFKVTEGSFVYKGGKIYKVPSTEAEALASSLMGLFEKRRFRKFLVYVANFDEKDPRTFEGIDPKKTTMRDVYKKFDLGQDVIDFTGHALALYRTDDYLDQPCYETINRIKLYSESLARYGKSPYLYPLYGLGELPQGFARLSAIYGGTYMLNKPIEEIIVQNGKVIGVKSEGEIARCKQLICDPSYVKDRVEKVGQVIRVICILSHPIKNTNDANSCQIIIPQNQVNRKSDIYVCMISFAHNVAAQGKYIAIVSTTVETKEPEKEIRPALELLEPIEQKFVSISDLLVPKDLGTESQIFISRTYDATTHFETTCDDIKNIYKRMTGSEFDFEEMKRKKNDIYGED

SEQ ID NO: 34001 - protein, 241 aa, Homo sapiens
VSCGAAAMAPRRARGCRTLGLPALLLLLLLRPPATRGITCPPPMSVEHADIWVKSYSLYSRERYICNSGFKRKAGTSSLTECVLNKATNVAHWTTPSLKCIKPAASSPSSNNTAATTAAIVPGSQLMPSKSPSTGTTEISSHESSHGTPSQTTAKNWELTASASHQPPGVYPQGHSDTTVAISTSTVLLCGLSAVSLLACYLKSRQTPPLASVEMEAMEALPVTWGTSSRDEDLENCSHHL

SEQ ID NO: 34002 - protein, 176 aa, Homo sapiens
VSCGAAAMAPRRARGCRTLGLPALLLLLLLRPPATREPAASSPSSNNTAATTAAIVPGSQLMPSKSPSTGTTEISSHESSHGTPSQTTAKNWELTASASHQPPGVYPQGHSDTTVAISTSTVLLCGLSAVSLLACYLKSRQTPPLASVEMEAMEALPVTWGTSSRDEDLENCSHHL

SEQ ID NO: 34003 - protein, 25 aa, Homo sapiens
LVFYFHLIFTVCSVLREFRKETNIC

SEQ ID NO: 34004 - protein, 570 aa, Homo sapiens
VRGASQPSRRGGEQQGLVARARLSLRPSIPELSERTSRPCRASPASLPSQHTSSPAQARVRNLAQSTFPLAAQETPGRAPAHAPLSSFVPGVGGRSPASVGISAPGGGPSGAAAKMPLELTQSRVQKIWVPVDHRPSLPRSCGPKLTNSPTVIVMVGLPARGKTYISKKLTRYLNWIGVPTKVFNVGEYRREAVKQYSSYNFFRPDNEEAMKVRKQCALAALRDVKSYLAKEGGQIAVFDATNTTRERRHMILHFAKENDFKAFFIESVCDDPTVVASNIMEVKISSPDYKDCNSAEAMDDFMKRISCYEASYQPLDPDKCDRDLSLIKVIDVGRRFLVNRVQDHIQSRIVYYLMNIHVQPRTIYLCRHGENEHNLQGRIGGDSGLSSRGKKFASALSKFVEEQNLKDLRVWTSQLKSTIQTAEALRLPYEQWKALNEIDAGVCEELTYEEIRDTYPEEYALREQDKYYYRYPTGESYQDLVQRLEPVIMELERQENVLVICHQAVLRCLLAYFLDKSAEEMPYLKCPLHTVLKLTPVAYGCRVESIYLNVESVCTHRERSEAAKSTTLC

SEQ ID NO: 34005 - protein, 628 aa, Homo sapiens
VRGASQPSRRGGEQQGLVARARLSLRPSIPELSERTSRPCRASPASLPSQHTSSPAQARVRNLAQSTFPLAAQETPGRAPAHAPLSSFVPGVGGRSPASVGISAPGGGPSGAAAKMPLELTQSRVQKIWVPVDHRPSLPRSCGPKLTNSPTVIVMVGLPARGKTYISKKLTRYLNWIGVPTKVFNVGEYRREAVKQYSSYNFFRPDNEEAMKVRKQCALAALRDVKSYLAKEGGQIAVFDATNTTRERRHMILHFAKENDFKAFFIESVCDDPTVVASNIMEVKISSPDYKDCNSAEAMDDFMKRISCYEASYQPLDPDKCDRDLSLIKVIDVGRRFLVNRVQDHIQSRIVYYLMNIHVQPRTIYLCRHGENEHNLQGRIGGDSGLSSRGKKFASALSKFVEEQNLKDLRVWTSQLKSTIQTAEALRLPYEQWKALNEIDAGVCEELTYEEIRDTYPEEYALREQDKYYYRYPTGESYQDLVQRLEPVIMELERQENVLVICHQAVLRCLLAYFLDKSAEEMPYLKCPLHTVLKLTPVAYGCRVESIYLNVESVCTHRERSEDAKKGPNPLMRRNSVTPLASPEPTKKPRINSFEEHVASTSAALPSCLPPEVPTQLPGQPLLGQACL

SEQ ID NO: 34006 - protein, 641 aa, Homo sapiens
VRGASQPSRRGGEQQGLVARARLSLRPSIPELSERTSRPCRASPASLPSQHTSSPAQARVRNLAQSTFPLAAQETPGRAPAHAPLSSFVPGVGGRSPASVGISAPGGGPSGAAAKMPLELTQSRVQKIWVPVDHRPSLPRSCGPKLTNSPTVIVMVGLPARGKTYISKKLTRYLNWIGVPTKVFNVGEYRREAVKQYSSYNFFRPDNEEAMKVRKQCALAALRDVKSYLAKEGGQIAVFDATNTTRERRHMILHFAKENDFKAFFIESVCDDPTVVASNIMEVKISSPDYKDCNSAEAMDDFMKRISCYEASYQPLDPDKCDRDLSLIKVIDVGRRFLVNRVQDHIQSRIVYYLMNIHVQPRTIYLCRHGENEHNLQGRIGGDSGLSSRGKKFASALSKFVEEQNLKDLRVWTSQLKSTIQTAEALRLPYEQWKALNEIDAGVCEELTYEEIRDTYPEEYALREQDKYYYRYPTGESYQDLVQRLEPVIMELERQENVLVICHQAVLRCLLAYFLDKSAEEMPYLKCPLHTVLKLTPVAYGCRVESIYLNVESVCTHRERSEDAKKGPNPLMRRNSVTPLASPEPTKKPRINSFEEHVASTSAALPSCLPPEVPTQLPGQPLLGQACLRTVCHIFSKFSPY

SEQ ID NO: 34007 - protein, 629 aa, Homo sapiens
VRGASQPSRRGGEQQGLVARARLSLRPSIPELSERTSRPCRASPASLPSQHTSSPAQARVRNLAQSTFPLAAQETPGRAPAHAPLSSFVPGVGGRSPASVGISAPGGGPSGAAAKMPLELTQSRVQKIWVPVDHRPSLPRSCGPKLTNSPTVIVMVGLPARGKTYISKKLTRYLNWIGVPTKVFNVGEYRREAVKQYSSYNFFRPDNEEAMKVRKQCALAALRDVKSYLAKEGGQIAVFDATNTTRERRHMILHFAKENDFKAFFIESVCDDPTVVASNIMEVKISSPDYKDCNSAEAMDDFMKRISCYEASYQPLDPDKCDRDLSLIKVIDVGRRFLVNRVQDHIQSRIVYYLMNIHVQPRTIYLCRHGENEHNLQGRIGGDSGLSSRGKKFASALSKFVEEQNLKDLRVWTSQLKSTIQTAEALRLPYEQWKALNEIDAGVCEELTYEEIRDTYPEEYALREQDKYYYRYPTGESYQDLVQRLEPVIMELERQENVLVICHQAVLRCLLAYFLDKSAEEMPYLKCPLHTVLKLTPVAYGCRVESIYLNVESVCTHRERSEDAKKGPNPLMRRNSVTPLASPEPTKKPRINSFEEHVASTSAALPSCLPPEVPTQLPGQPLLGQACLT

SEQ ID NO: 34008 - protein, 619 aa, Homo sapiens
LVARARLSLRPSIPELSERTSRPCRASPASLPSQHTSSPAQARVRNLAQSTFPLAAQETPGRAPAHAPLSSFVPGVGGRSPASVGISAPGGGPSGAAAKMPLELTQSRVQKIWVPVDHRPSLPRSCGPKLTNSPTVIVMVGLPARGKTYISKKLTRYLNWIGVPTKVFNVGEYRREAVKQYSSYNFFRPDNEEAMKVRKQCALAALRDVKSYLAKEGGQIAVFDATNTTRERRHMILHFAKENDFKAFFIESVCDDPTVVASNIMEVKISSPDYKDCNSAEAMDDFMKRISCYEASYQPLDPDKCDRDLSLIKVIDVGRRFLVNRVQDHIQSRIVYYLMNIHVQPRTIYLCRHGENEHNLQGRIGGDSGLSSRGKKFASALSKFVEEQNLKDLRVWTSQLKSTIQTAEALRLPYEQWKALNEIDAGVCEELTYEEIRDTYPEEYALREQDKYYYRYPTGESYQDLVQRLEPVIMELERQENVLVICHQAVLRCLLAYFLDKSAEEMPYLKCPLHTVLKLTPVAYGCRVESIYLNVESVCTHRERSEDAKKGPNPLMRRNSVTPLASPEPTKKPRINSFEEHVASTSAALPSCLPPEVPTQLPGQNMKGSRSSADSSRKH

SEQ ID NO: 34009 - protein, 667 aa, Homo sapiens
LVARARLSLRPSIPELSERTSRPCRASPASLPSQHTSSPAQARVRNLAQSTFPLAAQETPGRAPAHAPLSSFVPGVGGRSPASVGISAPGGGPSGAAAKMPLELTQSRVQKIWVPVDHRPSLPRSCGPKLTNSPTVIVMVGLPARGKTYISKKLTRYLNWIGVPTKVFNVGEYRREAVKQYSSYNFFRPDNEEAMKVRKQCALAALRDVKSYLAKEGGQIAVFDATNTTRERRHMILHFAKENDFKAFFIESVCDDPTVVASNIMEVKISSPDYKDCNSAEAMDDFMKRISCYEASYQPLDPDKCDRDLSLIKVIDVGRRFLVNRVQDHIQSRIVYYLMNIHVQPRTIYLCRHGENEHNLQGRIGGDSGLSSRGKKFASALSKFVEEQNLKDLRVWTSQLKSTIQTAEALRLPYEQWKALNEIDAGVCEELTYEEIRDTYPEEYALREQDKYYYRYPTGESYQDLVQRLEPVIMELERQENVLVICHQAVLRCLLAYFLDKSAEEMPYLKCPLHTVLKLTPVAYGCRVESIYLNVESVCTHRERSEDAKKGPNPLMRRNSVTPLASPEPTKKPRINSFEEHVASTSAALPSCLPPEVPTQLPGQELKSGIPGRDPEPPVQPPEGQSILWIPREVTVASRSGPGAAPSIPEPRLVSLPHLSGSAASGS

SEQ ID NO: 34010 - protein, 931 aa, Homo sapiens
MLLLLGLCLGLSLCVGSQEEAQSWGHSSEQDGLRVPRQVRLLQRLKTKPLMTEFSVKSTIISRYAFTTVSCRMLNRASEDQDIEFQMQIPAAAFITNFTMLIGDKVYQGEITEREKKSGDRVKEKRNKTTEENGEKGTEIFRASAVIPSKDKAAFFLSYEELLQRRLGKYEHSISVRPQQLSGRLSVDVNILESAGIASLEVLPLHNSRQRGSGRGEDDSGPPPSTVINQNETFANIIFKPTVVQQARIAQNGILGDFIIRYDVNREQSIGDIQVLNGYFVHYFAPKDLPPLPKNVVFVLDSSASMVGTKLRQTKDALFTILHDLRPQDRFSIIGFSNRIKVWKDHLISVTPDSIRDGKVYIHHMSPTGGTDINGALQRAIRLLNKYVAHSGIGDRSVSLIVFLTDGKPTVGETHTLKILNNTREAARGQVCIFTIGIGNDVDFRLLEKLSLENCGLTRRVHEEEDAGSQLIGFYDEIRTPLLSDIRIDYPPSSVVQATKTLFPNYFNGSEIIIAGKLVDRKLDHLHVEVTASNSKKFIILKTDVPVRPQKAGKDVTGSPRPGGDGEGDTNHIERLWSYLTTKELLSSWLQSDDEPEKERLRQRAQALAVSYRFLTPFTSMKLRGPVPRMDGLEEAHGMSAAMGPEPVVQSVRGAGTQPGPLLKKPYQPRIKISKTSVDGDPHFVVDFPLSRLTVCFNIDGQPGDILRLVSDHRDSGVTVNGELIGAPAPPNGHKKQRTYLRTITILINKPERSYLEITPSRVILDGGDRLVLPCNQSVVVGSWGLEVSVSANANVTVTIQGSIAFVILIHLYKKPAPFQRHHLGFYIANSEGLSSNCHGLLGQFLNQDARLTEDPAGPSQNLTHPLLLQVGEGPEAVLTVKGHQVPVVWKQRKIYNGEEQIDCWFARNNAAKLIDGEYKDYLASIHLTQG

SEQ ID NO: 34011 - protein, 479 aa, Homo sapiens
LFADDSGPPPSTVINQNETFANIIFKPTVVQQARIAQNGILGDFIIRYDVNREQSIGDIQVLNGYFVHYFAPKDLPPLPKNVVFVLDSSASMVGTKLRQTKDALFTILHDLRPQDRFSIIGFSNRIKVWKDHLISVTPDSIRDGKVYIHHMSPTGGTDINGALQRAIRLLNKYVAHSGIGDRSVSLIVFLTDGKPTVGETHTLKILNNTREAARGQVCIFTIGIGNDVDFRLLEKLSLENCGLTRRVHEEEDAGSQLIGFYDEIRTPLLSDIRIDYPPSSVVQATKTLFPNYFNGSEIIIAGKLVDRKLDHLHVEVTASNSKKFIILKTDVPVRPQKAGKDVTGSPRPGGDGEGDTNHIERLWSYLTTKELLSSWLQSDDEPEKERLRQRAQALAVSYRFLTPFTSMKLRGPVPRMDGLEEAHGMSAAMGPEPVVQSVRGAGTQPGPLLKKPYQPRIKISKTSGKAKDAVVCGLRVRDV

SEQ ID NO: 34012 - protein, 14 aa, Homo sapiens
MAALRLARSVLLGL

SEQ ID NO: 34013 - protein, 16 aa, Homo sapiens
LPDLGNRQSGAPGSKS

SEQ ID NO: 34014 - protein, 20 aa, Homo sapiens
MVSLVSDLDPLKNWKVLRLL

SEQ ID NO: 34015 - protein, 550 aa, Homo sapiens
LSLPVSRRPRPLGRAQSRPPPLPPRAPANMTSAFKLDFLPDMMVEGRLLVPDRINGTANKMNGALDHSDQPDPDAIKMFVGQIPRSWSEKELKELFEPYGAVYQINVLRDRSQNPPQSKGCCFVTFYTRKAALEAQNALHNIKTLPGMHHPIQMKPADSEKSNAVEDRKLFIGMVSKKCNENDIRVMFSPFGQIEECRILRGPDGLSRGCAFVTFSTRAMAQNAIKAMHQSQTMEGCSSPIVVKFADTQKDKEQRRLQQQLAQQMQQLNTATWGNLTGLGGLTPQYLALLQQATSSSNLGAFSGIQQMAGMNALQLQNLATLAAAAAAAQTSATSTNANPLSTTSSALGALTSPVAASTPNSTAGAAMNSLTSLGTLQGLAGATVGLNNINALAVAQMLSGMAALNGGLGATGLTNGTAGTMDALTQAYSGIQQYAAAALPTLYSQSLLQQQSAAGSQKEGPEGANLFIYHLPQEFGDQDILQMFMPFGNVISAKVFIDKQTNLSKCFGFVSYDNPVSAQAAIQAMNGFQIGMKRLKVQLKRSKNDSKPY

SEQ ID NO: 34016 - protein, 562 aa, Homo sapiens
LSLPVSRRPRPLGRAQSRPPPLPPRAPANMTSAFKLDFLPDMMVEGRLLVPDRINGTANKMNGALDHSDQPDPDAIKMFVGQIPRSWSEKELKELFEPYGAVYQINVLRDRSQNPPQSKGCCFVTFYTRKAALEAQNALHNIKTLPGMHHPIQMKPADSEKSNAVEDRKLFIGMVSKKCNENDIRVMFSPFGQIEECRILRGPDGLSRGCAFVTFSTRAMAQNAIKAMHQSQTMEGCSSPIVVKFADTQKDKEQRRLQQQLAQQMQQLNTATWGNLTGLGGLTPQYLALLQQATSSSNLGAFSGIQQMAGMNALQLQNLATLAAAAAAAQTSATSTNANPLSTTSSALGALTSPVAASTPNSTAGAAMNSLTSLGTLQGLAGATVGLNNINALAGTINTPRSKRLLLPKDNNGMAALNGGLGATGLTNGTAGTMDALTQAYSGIQQYAAAALPTLYSQSLLQQQSAAGSQKEGPEGANLFIYHLPQEFGDQDILQMFMPFGNVISAKVFIDKQTNLSKCFGFVSYDNPVSAQAAIQAMNGFQIGMKRLKVQLKRSKNDSKPY

SEQ ID NO: 34017 - protein, 545 aa, Homo sapiens
LHLTCSCLPSLQDVHALGDRRQGAAPCSPGSARQQHAVRASPPPRSNSCNGTANKMNGALDHSDQPDPDAIKMFVGQIPRSWSEKELKELFEPYGAVYQINVLRDRSQNPPQSKGCCFVTFYTRKAALEAQNALHNIKTLPGMHHPIQMKPADSEKSNAVEDRKLFIGMVSKKCNENDIRVMFSPFGQIEECRILRGPDGLSRGCAFVTFSTRAMAQNAIKAMHQSQTMEGCSSPIVVKFADTQKDKEQRRLQQQLAQQMQQLNTATWGNLTGLGGLTPQYLALLQQATSSSNLGAFSGIQQMAGMNALQLQNLATLAAAAAAAQTSATSTNANPLSTTSSALGALTSPVAASTPNSTAGAAMNSLTSLGTLQGLAGATVGLNNINALAVAQMLSGMAALNGGLGATGLTNGTAGTMDALTQAYSGIQQYAAAALPTLYSQSLLQQQSAAGSQKEGPEGANLFIYHLPQEFGDQDILQMFMPFGNVISAKVFIDKQTNLSKCFGFVSYDNPVSAQAAIQAMNGFQIGMKRLKVQLKRSKNDSKPY

SEQ ID NO: 34018 - protein, 543 aa, Homo sapiens
LHLTCSCLPSLQDVHALGDRRQGAAPCSPGSARQQHAVRASPPPRSNSCNGTANKMNGALDHSDQPDPDAIKMFVGQIPRSWSEKELKELFEPYGAVYQINVLRDRSQNPPQSKGCCFVTFYTRKAALEAQNALHNIKTLPGMHHPIQMKPADSEKSNAVEDRKLFIGMVSKKCNENDIRVMFSPFGQIEECRILRGPDGLSRGCAFVTFSTRAMAQNAIKAMHQSQTMEGCSSPIVVKFADTQKDKEQRRLQQQLAQQMQQLNTATWGNLTGLGGLTPQYLALLQQATSSSNLGAFSGIQQMAGMNALQLQNLATLAAAAAAAQTSATSTNANPLSTTSSALGALTSPVAASTPNSTAGAAMNSLTSLGTLQGLAGATVGLNNINALAGTINSMAALNGGLGATGLTNGTAGTMDALTQAYSGIQQYAAAALPTLYSQSLLQQQSAAGSQKEGPEGANLFIYHLPQEFGDQDILQMFMPFGNVISAKVFIDKQTNLSKCFGFVSYDNPVSAQAAIQAMNGFQIGMKRLKVQLKRSKNDSKPY

SEQ ID NO: 34019 - protein, 29 aa, Homo sapiens
LAAAGEAGGAGGAEAGSRASRPGRRGPFP

SEQ ID NO: 34020 - protein, 206 aa, Homo sapiens
LGWDLQCFSQHCLLQSLGLTLGGSRESYAKRTWESVKRTTRKEQTADGVAVIPVLQRTLHYECIVLVKQFRPPMGGYCIEFPAGLIDDGETPEAAALRELEEETGYKGDIAECSPAVCMDPGLSNCTIHIVTVTINGDDAENARPKPKPGDGEFVEVISLPKNDLLQRLDALVAEEHLTVDARVYSYALALKHANAKPFEVPFLKF

SEQ ID NO: 34021 - protein, 107 aa, Homo sapiens
MFVFVFSLSVLQGKVWLIDFNPFGEVTDSLLFTWEELISENNLNGDFSEVDAQEQDSPAFRCTNSEVTVQPSPYLSYRLPKDFVDLSTGEDAHKLIDFLKLVKSMCI

SEQ ID NO: 34022 - protein, 63 aa, Homo sapiens
LRDPGSFCWSETLGRAESRRKPEGLPSGSLGAAVLLPACANRKGLVMLAAGLPPGLRHCHQIL

SEQ ID NO: 34023 - protein, 68 aa, Homo sapiens
LSVVLRCLGLLFRILSGFAAAGPVRLGSRSWSGKLELKFWRRDGHSEIRDPSEAAAGGGQEPAGEELD

SEQ ID NO: 34024 - protein, 66 aa, Homo sapiens
LSVVLRCLGLLFRILSGFAAAGPVRLGSRSWSGKLELKFWRRDGHSEIRDPSEAAAGGGQEPAGGK

SEQ ID NO: 34025 - protein, 186 aa, Homo sapiens
LFSVQIFQWRQLENLYFREKKFSVEVHDPRRASVTRRTFGHSGIAVHTWYACPALIKSIWAMAISQHQFYLDRKQSKSKIHAARSLSEIAIDLTETGTLKTSKLANMGSKGKIISGSSGSLLSSGRQRPAGGTPPEHGWDPRGDPGRWGELQLGRLQGKLLQSWLCFPDQGWDPNANLRKLLPGIK

SEQ ID NO: 34026 - protein, 453 aa, Homo sapiens
LYTMVVQAAVAPNRSQRLLLKIPYGSLRRRSVERMTEGRRCQVHLLDDRKLELLVQPKLLAKELLDLVASHFNLKEKEYFGIAFTDETGHLNWLQLDRRVLEHDFPKKSGPVVLYFCVRFYIESISYLKDNATIELFFLNAKSCIYKELIDVDSEVVFELASYILQEAKGDFSSNEVVRSDLKKLPALPTQALKEHPSLAYCEDRVIEHYKKLNGQTRGQAIVNYMSIVESLPTYGVHYYAVKDKQGIPWWLGLSYKGIFQYDYHDKVKPRKIFQWRQLENLYFREKKFSVEVHDPRRASVTRRTFGHSGIAVHTWYACPALIKSIWAMAISQHQFYLDRKQSKSKIHAARSLSEIAIDLTETGTLKTSKLANMGSKGKIISGSSGSLLSSGRQRPAGGTPPEHGWDPRGDPGRWGELQLGRLQGKLLQSWLCFPDQGWDPNANLRKLLPGIK

SEQ ID NO: 34027 - protein, 62 aa, Homo sapiens
LFYFCLLQSLACFAAINEGIVAKRAICRKHLLIHRWTLTTAITGTTRDTVQVLCQIHNLACP

SEQ ID NO: 34028 - protein, 22 aa, Homo sapiens
MFLLSMLALPGAELASLLGEEK

SEQ ID NO: 34029 - protein, 30 aa, Homo sapiens
LVLCVIIAGYIVTFQFQEGTSCPFINCFDY

SEQ ID NO: 34030 - protein, 188 aa, Homo sapiens
LNLNCGSFDIQKESSLWGWLILVLGAFLHRSKELPQSEDSPPEDIDHKDSYLITRSIMAEPDYIEDDNPELIRPQKLINPVKTSRNHQDLHRELLMNQKRGLAPQNKPELQKVMEKRKRDQVIKQKEEEAQKKKSDLEIELLKRQQKLEQLELEKQKLQEEQENAPEFVKVKGNLRRTGQEVAQAQES

SEQ ID NO: 34031 - protein, 50 aa, Homo sapiens
VVAFCAGLLVSHPVLTQGQEAGGRPGADCEGKEACVIAEEGHNSLYVKNS

SEQ ID NO: 34032 - protein, 59 aa, Homo sapiens
LDLMENKTFLEKLKFGIGDGNLQYYLYNWRCPGTDSEKGSGNFVNANGKLLPDVCRRPP

SEQ ID NO: 34033 - protein, 174 aa, Homo sapiens
LDQYSMWGNKFGVLLFLYSVLLTKGIENIKNEIEDASEPLIDPVYGHGSQSLINLLLTGHAVSNVWDGDRECSGMKLLGIHEQAAVGFLTLMEALRYCKVGSYLKSPKFPIWIVGSETHLTVFFAKDMALVAPEAPSEQARRVFQTYDPEDNGFIPDSLLEDVMKALDLVSDPE

SEQ ID NO: 34034 - protein, 187 aa, Homo sapiens
LQVALSPFFFPASPSNSFAAAVPQLLFPELPLPHVPGQESAKRRSARRFLIMSELTKELMELVWGTKSSPGLSDTIFCRWTQGFVFSESEGSALEQFEGGPCAVIAPVQAFLLKKLLFSSEKSSWRDCSEEEQKELLCHTLCDILESACCDHSGSYCLVSWLRGKTTEETASISGSPAESSCQVEHS

SEQ ID NO: 34035 - protein, 43 aa, Homo sapiens [sequence omitted]

SEQ ID NO: 34036 - protein, 15 aa, Homo sapiens
MLRVRPFLFFFSLSF

SEQ ID NO: 34037 - protein, 374 aa, Homo sapiens
VRSAEACGCTPIVLGATFRGECVRCCTWGCFSLRGRSGAEPFPLHPLPAPGPAPGTPSDAHPLQPWGSLRVAAKASCLSASALAVIAHVLCCCSVQTMSKSLKKLVEESREKNQPEVDMSDRGISNMLDVNGLFTLSHITQLVLSHNKLTMVPPNIAELKNLEVLNFFNNQIEELPTQISSLQKLKHLNLGMNRLNTLPRGFGSLPALEVLDLTYNNLSENSLPGNFFYLTTLRALYLSDNDFEILPPDIGKLTKLQILSLRDNDLISLPKEIGELTQLKELHIQGNRLTVLPPELGNLDLTGQKQVFKAENNPWVTPIADQFQLGVSHVFEYIRSETYKYLYGRHMQANPEPPKKNNDKSKKISRKPLAAKNR

SEQ ID NO: 34038 - protein, 206 aa, Homo sapiens
VPVLQGVRAAGVRSAEACGCTPIVLGATFRVVPPNIAELKNLEVLNFFNNQIEELPTQISSLQKLKHLNLGMNRLNTLPRGFGSLPALEVLDLTYNNLSENSLPGNFFYLTTLRALYLSDNDFEILPPDIGKLTKLQILSLRDNDLISLPKEIGELTQLKELHIQGNRLTVLPPELGKMGGHILFPCGRHLGKNHQLAACVVRNAH

SEQ ID NO: 34039 - protein, 15 aa, Homo sapiens
LECVLPKLVVARPSS

SEQ ID NO: 34040 - protein, 3624 aa, Homo sapiens
LMMNMSLPFLWSLLTLLIFAEVNGEAGELELQRQKRSINLQQPRMATERGNLVFLTGSAQNIEFRTGSLGKIKLNDEDLSECLHQIQKNKEDIIELKGSAIGLPQNISSQIYQLNSKLVDLERKFQGLQQTVDKKVCSSNPCQNGGTCLNLHDSFFCICPPQWKGPLCSADVNECEIYSGTPLSCQNGGTCVNTMGSYSCHCPPETYGPQCASKYDDCEGGSVARCVHGICEDLMREQAGEPKYSCVCDAGWMFSPNSPACTLDRDECSFQPGPCSTLVQCFNTQGSFYCGACPTGWQGNGYICEDINECEINNGGCSVAPPVECVNTPGSSHCQACPPGYQGDGRVCTLTDICSVSNGGCHPDASCSSTLGSLPLCTCLPGYTGNGYGPNGCVQLSNICLSHPCLNGQCIDTVSGYFCKCDSGWTGVNCTENINECLSNPCLNGGTCVDGVDSFSCECTRLWTGALCQVPQQVCGESLSGINGSFSYRSPDVGYVHDVNCFWVIKTEMGKVLRITFTFFRLESMDNCPHEFLQVYDGDSSSAFQLGRFCGSSLPHELLSSDNALYFHLYSEHLRNGRGFTVRWETQQPECGGILTGPYGSIKSPGYPGNYPPGRDCVWIVVTSPDLLVTFTFGTLSLEHHDDCNKDYLEIRDGPLYQDPLLGKFCTTFSVPPLQTTGPFARIHFHSDSQISDQGFHITYLTSPSDLRCGGNYTDPEGELFLPELSGPFTHTRQCVYMMKQPQGEQIQINFTHVELQCQSDSSQNYIEVRDGETLLGKVCGNGTISHIKSITNSVWIRFKIDASVEKASFRAVYQVACGDELTGEGVIRSPFFPNVYPGERTCRWTIHQPQSQVILLNFTVFEIGSSAHCETDYVEIGSSSILGSPENKKYCGTDIPSFITSVYNFLYVTFVKSSSTENHGFMAKFSAEDLACGEILTESTGTIQSPGHPNVYPHGINCTWHILVQPNHLIHLMFETFHLEFHYNCTNDYLEVYDTDSETSLGRYCGKSIPPSLTSSGNSLMLVFVTDSDLAYEGFLINYEAISAATACLQDYTDDLGTFTSPNFPNNYPNNWECIYRITVRTGQLIAVHFTNFSLEEAIGNYYTDFLEIRDGGYEKSPLLGIFYGSNLPPTIISHSNKLWLKFKSDQIDTRSGFSAYWDGSSTGCGGNLTTSSGTFISPNYPMPYYHSSECYWWLKSSHGSAFELEFKDFHLEHHPNCTLDYLAVYDGPSSNSHLLTQLCGDEKPPLIRSSGDSMFIKLRTDEGQQGRGFKAEYRQTCENVVIVNQTYGILESIGYPNPYSENQHCNWTIRATTGNTVNYTFLAFDLEHHINCSTDYLELYDGPRQMGRYCGVDLPPPGSTTSSKLQVLLLTDGVGRREKGFQMQWFVYGCGGELSGATGSFSSPGFPNRYPPNKECIWYIRTDPGSSIQLTIHDFDVEYHSRCNFDVLEIYGGPDFHSPRIAQLCTQRSPENPMQVSSTGNELAIRFKTDLSINGRGFNASWQAVTGGCGGIFQAPSGEIHSPNYPSPYRSNTDCSWVIRVDRNHRVLLNFTDFDLEPQDSCIMAYDGLSSTMSRLARTCGREQLANPIVSSGNSLFLRFQSGPSRQNRGFRAQFRQACGGHILTSSFDTVSSPRFPANYPNNQNCSWIIQAQPPLNHITLSFTHFELERSTTCARDFVEILDGGHEDAPLRGRYCGTDMPHPITSFSSALTLRFVSDSSISAGGFHTTVTASVSACGGTFYMAEGIFNSPGYPDIYPPNVECVWNIVSSPGNRLQLSFISFQLEDSQDCSRDFVEIREGNATGHLVGRYCGNSFPLNYSSIVGHTLWVRFISDGSGSGTGFQATFMKIFGNDNIVGTHGKVASPFWPENYPHNSNYQWTVNVNASHVVHGRILEMDIEEIQNCYYDKLRIYDGPSIHARLIGAYCGTQTESFSSTGNSLTFHFYSDSSISGKGFLLEWFAVDAPDGVLPTIAPGACGGFLRTGDAPVFLFSPGWPDSYSNRVDCTWLIQAPDSTVELNILSLDIESHRTCAYDSLVIRDGDNNLAQQLAVLCGREIPGPIRSTGEYMFIRFTSDSSVTRAGFNASFHKSCGGYLHADRGIITSPKYPETYPSNLNCSWHVLVQSGLTIAVHFEQPFQIPNGDSSCNQGDYLVLRNGPDICSPPLGPPGGNGHFCGSHASSTLFTSDNQMFVQFISDHSNEGQGFKIKYEAKSLACGGNVYIHDADSAGYVTSPNHPHNYPPHADCIWILAAPPETRIQLQFEDRFDIEVTPNCTSNYLELRDGVDSDAPILSKFCGTSLPSSQWSSGEVMYLRFRSDNSPTHVGFKAKYSIAQCGGRVPGQSGVVESIGHPTLPYRDNLFCEWHLQGLSGHYLTISFEDFNLQNSSGCEKDFVEIWDNHTSGNILGRYCGNTIPDSIDTSSNTAVVRFVTDGSVTASGFRLRFESSMEECGGDLQGSIGTFTSPNYPNPNPHGRICEWRITAPEGRRITLMFNNLRLATHPSCNNEHVIVFNGIRSNSPQLEKLCSSVNVSNEIKSSGNTMKVIFFTDGSRPYGGFTASYTSSEDAVCGGSLPNTPEGNFTSPGYDGVRNYSRNLNCEWTLSNPNQGNSSISIHFEDFYLESHQDCQFDVLEFRVGDADGPLMWRLCGPSKPTLPLVIPYSQVWIHFVTNERVEHIGFHAKYSFTDCGGIQIGDSGVITSPNYPNAYDSLTHCSSLLEAPQGHTITLTFSDFDIEPHTTCAWDSVTVRNGGSPESPIIGQYCGNSNPRTIQSGSNQLVVTFNSDHSLQGGGFYATWNTQTLGCGGIFHSDNGTIRSPHWPQNFPENSRCSWTAITHKSKHLEISFDNNFLIPSGDGQCQNSFVKVWAGTEEVDKALLATGCGNVAPGPVITPSNTFTAVFQSQEAPAQGFSASFVSRCGSNFTGPSGYIISPNYPKQYDNNMNCTYVIEANPLSVVLLTFVSFHLEARSAVTGSCVNDGVHIIRGYSVMSTPFATVCGDEMPAPLTIAGPVLLNFYSNEQITDFGFKFSYRIISCGGVFNFSSGIITSPAYSYADYPNDMHCLYTITVSDDKVIELKFSDFDVVPSTSCSHDYLAIYDGANTSDPLLGKFCGSKRPPNVKSSNNSMLLVFKTDSFQTAKGWKMSFRQTLGPQQGCGGYLTGSNNTFASPDSDSNGMYDKNLNCVWIIIAPVNKVIHLTFNTFALEAASTRQRCLYDYVKLYDGDSENANLAGTFCGSTVPAPFISSGNFLTVQFISDLTLEREGFNATYTIMDMPCGGTYNATWTPQNISSPNSSDPDVPFSICTWVIDSPPHQQVKITVWALQLTSQDCTQNYLQLQDSPQGHGNSRFQFCGRNASAVPVFYSSMSTAMVIFKSGVVNRNSRMSFTYQIADCNRDYHKAFGNLRSPGWPDNYDNDKDCTVTLTAPQNHTISLFFHSLGIENSVECRNDFLEVRNGSNSNSPLLGKYCGTLLPNPVFSQNNELYLRFKSDSVTSDRGYEIIWTSSPSGCGGTLYGDRGSFTSPGYPGTYPNNTYCEWVLVAPAGRLVTINFYFISIDDPGDCVQNYLTLYDGPNASSPSSGPYCGGDTSIAPFVASSNQVFIKFHADYARRPSAFRLTWDS

SEQ ID NO: 34041 - protein, 262 aa, Homo sapiens
LRGGGAAALEAQSEYVVFGCGRPAPGGFLVPLWLMRNCFRLQEEMLQREEAENTLQSFRQDVDNASLARLDLERKVESLQEEIAFLKKLHEEEIQELQAQIQEQHVQIDVDVSKPDLTAALRDVRQQYESVAAKNLQEAEEWYKSKFADLSEAANRNNDALRQAKQESTEYRRQVQSLTCEVDALKGTNESLERQMREMEENFAVEAANYQDTIGRLQDEIQNMKEEMARHLREYQDLLNVKMALDIEIATYRKLLEGEESR

SEQ ID NO: 34042 - protein, 125 aa, Homo sapiens
MLQREEAENTLQSFRQDVDNASLARLDLERKVESLQEEIAFLKKLHEEEIQELQAQIQEQHVQIDVDVSKPDLTAALRDVRQQYESVAAKNLQEAEEWYKSKVGNKSVRLQPKKSIVFSKPHTCV

SEQ ID NO: 34043 - protein, 61 aa, Homo sapiens
LVFPRKNSFLLIFGLFVYLETNLDSLPLVDTHSKRTLLIKTVETRDGQVINETSQHHDDLE

SEQ ID NO: 34044 - protein, 169 aa, Homo sapiens
MASSDEDGTNGGASEAGEDREAPGERRRLGVLATAWLTFYDIAMTAGWLVLAIAMVRFYMEKGTHRGLYKSIQKTLKFFQTFALLEIVHCLIGIVPTSVIVTGVQVSSRIFMVWLITHSIKPIQNEESVVLFLVAWTVTEITRYSFYTFSLLDHLPYFIKWARWRYLAV

SEQ ID NO: 34045 - protein, 35 aa, Homo sapiens
LCAFFPLALSVIITLYSLWKEMEIPLDHLLGKQFN

SEQ ID NO: 34046 - protein, 717 aa, Homo sapiens
LVTSLPHKRQHTHLHPRQTQGGGSVEMCFRTKLSVSWVPLFLLLSRVFSTETDKPSAQDSRSRGSSGQPADLLQVLSAGDHPPHNHSRSLIKTLLEKTGCPRRRNGMQGDCNLCFEPDALLLIAGGNFEDQLREEVVQRVSLLLLYYIIHQEEICSSKLNMSNKEYKFYLHSLLSLRQDEDSSFLSQNETEDILAFTRQYFDTSQSQCMETKTLQKKSGIVSSEGANESTLPQLAAMIITLSLQGVCLGQGNLPSPDYFTEYIFSSLNRTNTLRLSELDQLLNTLWTRSTCIKNEKIHQFQRKQNNIITHDQDYSNFSSSMEKESEDGPVSWDQTCFSARQLVEIFLQKGLSLISKEDFKQMSPGIIQQLLSCSCHLPKDQQAKLPPTTLEKYGYSTVAVTLLTLGSMLGTALVLFHSCEENYRLILQLFVGLAVGTLSGDALLHLIPQVLGLHKQEAPEFGHFHESKGHIWKLMGLIGGIHGFFLIEKCFILLVSPNDKQGLSLVNGHVGHSHHLALNSELSDQAGRGKSASTIQLKSPEDSQAAEMPIGSMTASNRKCKAISLLAIMILVGDSLHNFADGLAIGAAFSSSSESGVTTTIAILCHEIPHEMGDFAVLLSSGLSMKTAILMNFISSLTAFMGLYIGLSVSADPCVQDWIFTVTAGMFLYLSLVEMLPEMTHVQTQRPWMMFLLQNFGLILGWLSLLLLAIYEQNIKI

SEQ ID NO: 34047 - protein, 680 aa, Homo sapiens
LVTSLPHKRQHTHLHPRQTQGGGSVEMCFRTKLSVSWVPLFLLLSRVFSTETDKPSAQDSRSRGSSGQPADLLQVLSAGDHPPHNHSRSLIKTLLEKTGCPRRRNGMQGDCNLCFEPDALLLIAGGNFEDQLREEVVQRVSLLLLYYIIHQEEICSSKLNMSNKEYKFYLHSLLSLRQDEDSSFLSQNETEDILAFTRQYFDTSQSQCMETKTLQKKSGIVSSEGANESTLPQLAAMIITLSLQGVCLGQGNLPSPDYFTEYIFSSLNRTNTLRLSELDQLLNTLWTRSTCIKNEKIHQFQRKQNNIITHDQDYSNFSSSMEKESEDGPVSWDQTCFSARQLVEIFLQKGLSLISKEDFKQMSPGIIQQLLSCSCHLPKDQQAKLPPTTLEKYGYSTVAVTLLTLGSMLGTALVLFHSCEENYRLILQLFVGLAVGTLSGDALLHLIPQVLGLHKQEAPEFGHFHESKGHIWKLMGLIGGIHGFFLIEKCFILLVSPNDKKSPEDSQAAEMPIGSMTASNRKCKAISLLAIMILVGDSLHNFADGLAIGAAFSSSSESGVTTTIAILCHEIPHEMGDFAVLLSSGLSMKTAILMNFISSLTAFMGLYIGLSVSADPCVQDWIFTVTAGMFLYLSLVEMLPEMTHVQTQRPWMMFLLQNFGLILGWLSLLLLAIYEQNIKI

SEQ ID NO: 34048 - protein, 716 aa, Homo sapiens
LVTSLPHKRQHTHLHPRQTQGGGSVEMCFRTKLSVSWVPLFLLLSRVFSTETDKPSAQDSRSRGSSGQPADLLQVLSAGDHPPHNHSRSLIKTLLEKTGCPRRRNGMQGDCNLCFEPDALLLIAGGNFEDQLREEVVQRVSLLLLYYIIHQEEICSSKLNMSNKEYKFYLHSLLSLRQDEDSSFLSQNETEDILAFTRQYFDTSQSQCMETKTLQKKSGIVSSEGANESTLPQLAAMIITLSLQGVCLGQGNLPSPDYFTEYIFSSLNRTNTLRLSELDQLLNTLWTRSTCIKNEKIHQFQRKQNNIITHDQDYSNFSSSMEKESEDGPVSWDQTCFSARQLVEIFLQKGLSLISKEDFKQMSPGIIQQLLSCSCHLPKDQQAKLPPTTLEKYGYSTVAVTLLTLGSMLGTALVLFHSCEENYRLILQLFVGLAVGTLSGDALLHLIPQVLGLHKQEAPEFGHFHESKGHIWKLMGLIGGIHGFFLIEKCFILLVSPNDKGLSLVNGHVGHSHHLALNSELSDQAGRGKSASTIQLKSPEDSQAAEMPIGSMTASNRKCKAISLLAIMILVGDSLHNFADGLAIGAAFSSSSESGVTTTIAILCHEIPHEMGDFAVLLSSGLSMKTAILMNFISSLTAFMGLYIGLSVSADPCVQDWIFTVTAGMFLYLSLVEMLPEMTHVQTQRPWMMFLLQNFGLILGWLSLLLLAIYEQNIKI

SEQ ID NO: 34049 - protein, 696 aa, Homo sapiens
LLLSWRRGPCPFAPFPGSASASIFLCFRKASGEGRGRPASPPRLLPGCSSWPSSPLPGRGTWRDMNQGSGLDLLKISYGKGARRKNRFKGSDGSTSSDTTSNSFVRQGSADSYTSRPSDSDVSLEEDREAVRREAERQAQAQLEKAKTKPVAFAVRTNVSYSAAHEDDVPVPGMAISFEAKDFLHVKEKFNNDWWIGRLVKEGCEIGFIPSPVKLENMRLQHEQRAKQGKFYSSKSGGNSSSSLGDIVPSSRKSTPPSSAIDIDATGLDAEENDIPANHRSPKPSANSVTSPHSKEKRMPFFKKTEHTPPYDVVPSMRPVVLVGPSLKGYEVTDMMQKALFDFLKHRFEGRISITRVTADISLAKRSVLNNPSKHAIIERSNTRSSLAEVQSEIERIFELARTLQLVVLDADTINHPAQLSKTSLAPIIVYVKISSPKVLQRLIKSRGKSQAKHLNVQMVAADKLAQCPPELFDVILDENQLEDACEHLADYLEAYWKATHPPSSSLPNPLLSRTLATSSLPLSPTLASNSQGSQGDQRTDRSAPIRSASQAEEEPSVEPVKKSQHRSSSSAPHHNHRSGTSRGLSRQETFDSETQESRDSAYVEPKEDYSHDHVDHYASHRDHNHRDETHGSSDHRHRESRHRSRDVDREQDHNECNKQRSRHKSKDRYCEKDGEVISKKRNEAGEWNRDVYIRQ

SEQ ID NO: 34050 - protein, 48 aa, Homo sapiens
LFQMKILLAAQIIRIGTSCIWKLLQWAFGVTKHTSGVPCGENPVQPAP

SEQ ID NO: 34051 - protein, 82 aa, Homo sapiens
LNPFTQKSNDECLKIAKKNSPCKSENKHKIRDFLHFQNRCVAKGCCFSGLDPSVPTSSSLYRTNLFIRTGGSNHVCLFLCNE

SEQ ID NO: 34052 - protein, 54 aa, Homo sapiens
LGGPGFSFGAHTPQTRGQCSAGGRGQWRTRRVTLSRAPPEPPAAHSRPNALFIW

SEQ ID NO: 34053 - protein, 146 aa, Homo sapiens
LNALVTVLKKMQSREPSGWRTAERRRGWRCRGVPTPSGDRGPGAARPAARGGAGETTGQQRPLQVPGASAAAARTRLLRWHHRVPSPRATRSPGSIRRTSPCSGGPDRPERPECADACCYLLDPFTLPLIQDFFRGCAASDFDRRD

SEQ ID NO: 34054 - protein, 109 aa, Homo sapiens
LVPFPPPPPRTPLLWLLLLLLAAVAPARGWESGDLELFDLVEEVQLNFYQFLGVQQDASSADIRKAYRKLSLTLHPDKNKDENAETQFRQLVAIYEVLKDDERRQRMNY

SEQ ID NO: 34055 - protein, 509 aa, Homo sapiens
VRWAPPTLSPAVFEQYQKARTQFVQMVAELATRPQNIETLQNAGVMSLLRTLLLDVVPTIQQTAALALGRLANYNDDLAEAVVKCDILPQLVYSLAEQNRFYKKAAAFVLRAVGKHSPQLAQAIVDCGALDTLVICLEDFDPGVKEAAAWALRYIARHNAELSQAVVDAGAVPLLVLCIQEPEIALKRIAASALSDIAKHSPELAQTVVDAGAVAHLAQMILNPDAKLKHQILSALSQVSKHSVDLAEMVVEAEIFPVVLTCLKDKDEYVKKNASTLIREIAKHTPELSQLVVNAGGVAAVIDCIGSCKGNTRLPGIMMLGYVAAHSENLAMAVIISKGVPQLSVCLSEEPEDHIKAAAAWALGQIGRHTPEHARAVAVTNTLPVLLSLYMSTESSEDLQVKSKKAIKNILQKCTYLPALEPFLYDAPPNILKHVVGQFSKVLPHDSKARRLFVTSGGLKKVQEIKAEPGSLLQEYINSINSCYPEEIVSKFFPELQVCALFRKFMRTP

SEQ ID NO: 34056 - protein, 637 aa, Homo sapiens
LSLPSSLQKELNDLHIEALAVIANCLEDMDTMVQIQQTGGLKKLLSFAENSTIPDIQKNAAKAITKAAYDPENRKLFHEQEVEKCLVALLGSENDGTKIAASQAISAMCENSGSKDFFNNQGIPQLIQLLKSDNEEVREAAALALANLTTCNPANANAAAEADGIDPLINLLSSKRDGAIANAATVLTNMAMQEPLRLNIQNHDIMHAIISPLRSANTVVQSKAALAVTATACDVEARTELRNSGGLEPLVELLRSKNDEVRKHASWAVMVCAGDELTANELCRLGALDILEEVNVSGTRKNKFSEAAYNKLLNNNLSLKYSQTGYLSSSNIINDGFYDYGRINPGTKLLPLKELCLQEPSDLRAVLLINSKSYVSPPSSMEDKSDVGYGRSISSSSSLRRSSKEKNKKNSYHFSAGFGSPIEDKSEPASGRNTVLSKSATKEKGWRKSKGKKEEEKVKEEEEVMVVPKFVGEGSSDKEWCPPSDPDFSMYVYEVTKSILPITNIKEQIEDLAKYVAEKMGGKIPKEKLPDFSWELHISELKFQLKSNVIPIGHVKKGIFYHRALLFKALADRIGIGCSLVRGEYGRAWNEVMLQNDSRKGVIGGLPAPEMYVIDLMFHPGGLMKLRSREADLYRFI

SEQ ID NO: 34057 - protein, 58 aa, Homo sapiens
LLLLIYLPGINLILCVRLFLCCYKEVPDQDLGEFEKKRKTRKINKIKKKKKYLRLSNL

SEQ ID NO: 34058 - protein, 245 aa, Homo sapiens [sequence omitted]

SEQ ID NO: 34059 - protein, 31 aa, Homo sapiens
LYFFYFVTFCDFFVQNCICTIEQFPADGMNE

SEQ ID NO: 34060 - protein, 259 aa, Homo sapiens
LVAMDPTCSSECIYNLIPSDLKEPPQPPRYISIFKATVKDDMQKAKTAMKTMGPAKVEVPSPKDFLKKHSKEKTLPPKKNFDRNVPKKPAVPLKTDHPVMGIQSGKNFINTNAADIIMGVAKKPKPIYVDKRTGDKHDLEPSGLVPKYINKKDYGVTPEYICKRNEEIKKAQEDYDRYIQENLKKAAMKRLSDEEREAVLQGLKKNWEEVHKEFQSLSVFIDSIPKKIRKQRLEEEMKQLEHDIGIIEKHKIIYIANNA

SEQ ID NO: 34061 - protein, 258 aa, Homo sapiens
LVAMDPTCSSECIYNLIPSDLKEPPQPPRYISIFKATVKDDMQKAKTAMKTMGPAKVEVPSPKDFLKKHSKEKTLPPKKNFDRNVPKKPAVPLKTDHPVMGIQSGKNFINTNAADIIMGVAKKPKPIYVDKRTGDKHDLEPSGLVPKYINKKDYGVTPEYICKRNEEIKKAQEDYDRYIQENLKKAAMKRLSDEEREAVLQGLKKNWEEVHKEFQSLSVFIDSIPKKIRKQRLEEEMKQLEHDIGIIEKHKIIYIANK

SEQ ID NO: 34062 - protein, 533 aa, Homo sapiens
LGHVDPRLRSMFQFHAGSWESWCCCCLIPADRPWDRGQHWQLEMADTRSVHETRFEAAVKVIQSLPKNGSFQPTNEMMLKFYSFYKQATEGPCKLSRPGFWDPIGRYKWDAWSSLGDMTKEEAMIAYVEEMKKIIETMPMTEKVEELLRVIGPFYEIVEDKKSGRSSDITSDLGNVLTSTPNAKTVNGKAESSDSGAESEEEEAQEEVKGAEQSDNDKKMMKKSADHKNLEVIVTNGYDKDGFVQDIQNDIHASSSLNGRSTEEVKPIDENLGQTGKSAVCIHQDINDDHVEDVTGIQHLTSDSDSEVYCDSMEQFGQEESLDSFTSNNGPFQYYLGGHSSQPMENSGFREDIQVPPGNGNIGNMQVVAVEGKGEVKHGGEDGRNNSGAPHREKRGGETDEFSNVRRGRGHRMQHLSEGTKGRQVGSGGDGERWGSDRGSRGSLNEQIALVLMRLQEDMQNVLQRLQKLETLTALQAKSSTSTLQTAPQPTSQRPSWWPFEMSPGVLTFAIIWPFIAQWLVYLYYQRRRRKLN

SEQ ID NO: 34063 - protein, 544 aa, Homo sapiens
LGHVDPRLRSMFQFHAGSWESWCCCCLIPADRPWDRGQHWQLEMADTRSVHETRFEAAVKVIQSLPKNGSFQPTNEMMLKFYSFYKQATEGPCKLSRPGFWDPIGRYKWDAWSSLGDMTKEEAMIAYVEEMKKIIETMPMTEKVEELLRVIGPFYEIVEDKKSGRSSDITSVRLEKISKCLEDLGNVLTSTPNAKTVNGKAESSDSGAESEEEEAQEEVKGAEQSDNDKKMMKKSADHKNLEVIVTNGYDKDGFVQDIQNDIHASSSLNGRSTEEVKPIDENLGQTGKSAVCIHQDINDDHVEDVTGIQHLTSDSDSEVYCDSMEQFGQEESLDSFTSNNGPFQYYLGGHSSQPMENSGFREDIQVPPGNGNIGNMQVVAVEGKGEVKHGGEDGRNNSGAPHREKRGGETDEFSNVRRGRGHRMQHLSEGTKGRQVGSGGDGERWGSDRGSRGSLNEQIALVLMRLQEDMQNVLQRLQKLETLTALQAKSSTSTLQTAPQPTSQRPSWWPFEMSPGVLTFAIIWPFIAQWLVYLYYQRRRRKLN

SEQ ID NO: 34064 - protein, 77 aa, Homo sapiens
LGHVDPRLRSMFQFHAGSWESWCCCCLIPADRPWDRGQHWQLEMADTRSVHETRFEAAVKVIQSLPKNGMLGVHWVI

SEQ ID NO: 34065 - protein, 215 aa, Homo sapiens
LGSERNGVRMDEDVLTTLKILIIGESGVGKSSLLLRFTDDTFDPELAATIGVDFKVKTISVDGNKAKLAIWDTAGQERFRTLTPSYYRGAQGVILVYDVTRRDTFVKLDNWLNELETYCTRNDIVNMLVGNKIDKENREVDRNEGLKFARKHSMLFIEASAKTCDGVQCAFEELVEKIIQTPGLWESENQNKGVKLSHREEGQGGGACGGYCSVL

SEQ ID NO: 34066 - protein, 559 aa, Homo sapiens
VADSRVRKRRKGQTGREEKIQASEEEKGRSQPSCHDRRGDSQPYQALKYSSKSHPSSGDHRHEKMRDAGDPSPPNKMLRRSDSPENKYSDSTGHSKAKNVHTHRVRERDGGTSYSPQENSHNHSALHSSNSHSSNPSNNPSKTSDAPYDSADDWSEHISSSGKKYYYNCRTEVSQWEKPKEWLEREQRQKEANKMAVNSFPKDRDYRREVMQATATSGFASGKSTSGDKPVSHSCTTPSTSSASGLNPTSAPPTSASAVPVSPVPQSPIPPLLQDPNLLRQLLPALQATLQLNNSNVDISKINEAVTQASLQSIIHKFLTAGPSAFNITSLISQAAQLSTQAQPSNQSPMSLTSDASSPRSYVSPRISTPQTNTVPIKPLISTPPVSSQPKVSTPVVKQGPVSQSATQQPVTADKQQGHEPVSPRSLQRSSSQRSPSPGPNHTSNSSNASNATVVPQNSSARSTCSLTPALAAHFSENLIKHVQGWPADHAEKQASRLREEAHNMGTIHMSEICTELKNLRSLVRVCEIQATLREQRILFLRQQIKELEKLKNQNSFMV

SEQ ID NO: 34067 - protein, 579 aa, Homo sapiens
VPGLPAARRRRRLRARPPFAAALPPPRHTLTGRALMVMYARKQQRLSDGCHDRRGDSQPYQALKYSSKSHPSSGDHRHEKMRDAGDPSPPNKMLRRSDSPENKYSDSTGHSKAKNVHTHRVRERDGGTSYSPQENSHNHSALHSSNSHSSNPSNNPSKTSDAPYDSADDWSEHISSSGKKYYYNCRTEVSQWEKPKEWLEREQRQKEANKMAVNSFPKDRDYRREVMQATATSGFASGKSTSGDKPVSHSCTTPSTSSASGLNPTSAPPTSASAVPVSPVPQSPIPPLLQDPNLLRQLLPALQATLQLNNSNVDISKINEVLTAAVTQASLQSIIHKFLTAGPSAFNITSLISQAAQLSTQAQPSNQSPMSLTSDASSPRSYVSPRISTPQTNTVPIKPLISTPPVSSQPKVSTPVVKQGPVSQSATQQPVTADKQQGHEPVSPRSLQRSSSQRSPSPGPNHTSNSSNASNATVVPQNSSARSTCSLTPALAAHFSENLIKHVQGWPADHAEKQASRLREEAHNMGTIHMSEICTELKNLRSLVRVCEIQATLREQRILFLRQQIKELEKLKNQNSFMV

SEQ ID NO: 34068 - protein, 682 aa, Homo sapiens
VPGLPAARRRRRLRARPPFAAALPPPRHTLTGRALMVMYARKQQRLSDGCHDRRGDSQPYQALKYSSKSHPSSGDHRHEKMRDAGDPSPPNKMLRRSDSPENKYSDSTGHSKAKNVHTHRVRERDGGTSYSPQENSHNHSALHSSNSHSSNPSNNPSKTSDAPYDSADDWSEHISSSGKKYYYNCRTEVSQWEKPKEWLEREQRQKEANKMAVNSFPKDRDYRREVMQATATSGFASGMEDKHSSDASSLLPQNILSQTSRHNDRDYRLPRAETHSSSTPVQHPIKPVVHPTATPSTVPSSPFTLQSDHQPKKSFDANGASTLSKLPTPTSSVPAQKTERKESTSGDKPVSHSCTTPSTSSASGLNPTSAPPTSASAVPVSPVPQSPIPPLLQDPNLLRQLLPALQATLQLNNSNVDISKINEVLTAAVTQASLQSIIHKFLTAGPSAFNITSLISQAAQLSTQAQPSNQSPMSLTSDASSPRSYVSPRISTPQTNTVPIKPLISTPPVSSQPKVSTPVVKQGPVSQSATQQPVTADKQQGHEPVSPRSLQRSSSQRSPSPGPNHTSNSSNASNATVVPQNSSARSTCSLTPALAAHFSENLIKHVQGWPADHAEKQASRLREEAHNMGTIHMSEICTELKNLRSLVRVCEIQATLREQRILFLRQQIKELEKLKNQNSFMV

SEQ ID NO: 34069 - protein, 209 aa, Homo sapiens
MSLTSDASSPRSYVSPRISTPQTNTVPIKPLISTPPVSSQPKVSTPVVKQGPVSQSATQQPVTADKQQGHEPVSPRSLQRSSQRSPSPGPNHTSNSSNASNATVVPQNSSARSTCSLTPALAAHFSENLIKHVQGWPADHAEKQASRLREEAHNMGTIHMSEICTELKNLRSLVRVCEIQATLREQRILFLRQQIKELEKLKNQNSFMV

SEQ ID NO: 34070 - protein, 133 aa, Homo sapiens
MDRHSSYIFIWLQLELCAMAVLLTKGEIRCYCDAAHCVATGYMCKSELSACFSRLLDPQNSNSPLTHGCLDSLASTTDICQAKQARNHSGTTIPTLECCHEDMCNYRGLHDVLSPPRGEASGRWKPFLTRMPA

SEQ ID NO: 34071 - protein, 47 aa, Homo sapiens
LGSECSGVRMDEDVLHPEEPHHRLLLRFTDDTFDPELAATIDNAGIT

SEQ ID NO: 34072 - protein, 48 aa, Homo sapiens
VSHCLLCTSSSECSVFRQYSSCMALACRSKWPIPRLSPKMCPLKKLVR

SEQ ID NO: 34073 - protein, 712 aa, Homo sapiens
MAWAKKVGGRAGQGRSLSRCDPIILDPEWLYGPPEGEGGPEGVGGETRASIHPPLRTGRHHQKVNHNIRGPEGSAKDAAPGGGGHHQAGPGQRGDEDGALQHLCGGGGGVGVSVGRGTGTSVAAEHPSLQVKLLELQELVLRLAGDHNEGHGKFLAAAQNPADDPAPGAPAPQELGAADKQGGFEDKIPKRRFSEMQNERREQAQRTVLIHCPEKISENKFLKYLSQFGPINNHFFYESFGLYAVVEFCQKESIGSLQNGTHTPSTAMETAIPFRSRFFNLKLKNQTSERSRVRSSNQLPRSNKQLFELLCYAESIDDQLNTLLKEFQLTEENTKLRYLTCSLIEDMAAAYFPDCIVRPFGSSVNTFGKLGCDLDMFLDLDETRNLSAHKISGNFLMEFQVKNVPSERIATQKILSVLGECLDHFGPGCVGVQKILNARCPLVRFSHQASGFQCDLTTNNRIALTSSELLYIYGALDSRVRALVFSVRCWARAHSLTSSIPGAWITNFSLTMMVIFFLQRRSPPILPTLDSLKTLADAEDKCVIEGNNCTFVRDLSRIKPSQNTETLELLLKEFFEYFGNFAFDKNSINIRQGREQNKPDSSPLYIQNPFETSLNISKNVSQSQLQKFVDLARESAWILQQEDTDRPSISSNRPWGLVSLLLPSAPNRKSFTKKKSNKFAIETVKNLLESLKGNRTENFTKTSGKRTISTQT

SEQ ID NO: 34074 - protein, 82 aa, Homo sapiens
LRATLWGPAPWFLLLPLPPPDPSGPACSAPTGLQPASHRTFGGPRLERSAGVGAPRPQMQSSYREEARGIGSHILFADKKGS

SEQ ID NO: 34075 - protein, 371 aa, Homo sapiens
LRNKIGIVEEKRGGRLEKQTQQEAGGQQGTSQQPAGQSLVRKRVTESRESQMMIEERKQLITVREEAWKTRGRGAANDSTQFTVAGRMVKKGLASPTAITPVASAICGKTRGTTPVSKPLEDIEARPDTQLEWDLKLDRLETFLRRLNNKIGGMHETVLTVTGKSVKELMKPDDDETFAQFYRNVDCNMLRSPVELDEDFDVIFDPYAPKLTSSVAEHKWAVRPKRQVQASKNPLKMLAAREDLLQEYTEQRLNVAFMESKRIKVEKISSNSSFSEVTLAGLASKENFSNVSLRSVNLTEQNSNNSAVPFKRLMLLQIKGRRHVQTRLVEPRASALNSGDCFLLLSPHCCFLWVGEFANAIEKAKASELAA

SEQ ID NO: 34076 - protein, 53 aa, Homo sapiens
MMISGLKLLVLFLKFAPENYCLSTETLQMPNRHLRLSKATCYLMKCLLPSYFE

SEQ ID NO: 34077 - protein, 8 aa, Homo sapiens
MAAMMDRK

SEQ ID NO: 34078 - protein, 835 aa, Homo sapiens
VRVAGLGAVTSGLPELRGTGPERPLTPAVSRRAGQAQMNLQPIFWIGLISSVCCVFAQTDENRCLKANAKSCGECIQAGPNCGWCTNSTFLQEGMPTSARCDDLEALKKKGCPPDDIENPRGSKDIKKNKNVTNRSKGTAEKLKPEDITQIQPQQLVLRLRSGEPQTFTLKFKRAEDYPIDLYYLMDLSYSMKDDLENVKSLGTDLMNEMRRITSDFRIGFGSFVEKTVMPYISTTPAKLRNPCTSEQNCTSPFSYKNVLSLTNKGEVFNELVGKQRISGNLDSPEGGFDAIMQVAVCGSLIGWRNVTRLLVFSTDAGFHFAGDGKLGGIVLPNDGQCHLENNMYTMSHYYDYPSIAHLVQKLSENNIQTIFAVTEEFQPVYKELKNLIPKSAVGTLSANSSNVIQLIIDAYNSLSSEVILENGKLSEGVTISYKSYCKNGVNGTGENGRKCSNISIGDEVQFEISITSNKCPKKDSDSFKIRPLGFTEEVEVILQYICECECQSEGIPESPKCHEGNGTFECGACRCNEGRVGRHCECSTDEVNSEDMDAYCRKENSSEICSNNGECVCGQCVCRKRDNTNEIYSGKFCECDNFNCDRSNGLICGGNGVCKCRVCECNPNYTGSACDCSLDTSTCEASNGQICNGRGICECGVCKCTDPKFQGQTCEMCQTCLGVCAEHKECVQCRAFNKGEKKDTCTQECSYFNITKVESRDKLPQPVQPDPVSHCKEKDVDDCWFYFTYSVNGNNEVMVHVVENPECPTGPDIIPIVAGVVAGIVLIGLALLLIWKLLMIIHDRREFAKFEKEKMNAKWDTGENPIYKSAVTTVVNPKYEGK

SEQ ID NO: 34079 - protein, 128 aa, Homo sapiens
MNLQPIFWIGLISSVCCVFAQTDENRCLKANAKSCGECIQAGPNCGWCTNSTFLQEGMPTSARCDDLEALKKKGCPPDDIENPRGSKDIKKNKNVTNRSKGTAEKLKPEDITQIQPQQLDLAHLWKRL

SEQ ID NO: 34080 - protein, 144 aa, Homo sapiens
VGPLPAPGCWAAAPLLSGGRARRLHLLASVISDEVRYVNPFAAAATGDMPTYQIRAPTAALPQGVVMAASPGSLHSPQQLAEEATRKRELRLMKNREAAKECRRRKKEYVKCLESRVAVLEVQNKKLIEELETLKDICSPKTDY

SEQ ID NO: 34081 - protein, 206 aa, Homo sapiens
LFQDSNHLPMVSVAGSGTRRGSPAVTLVQLPSGQTIHVQGVIQTPQPWVIQSSEIHTVQVAAIAETDESAESEGVIDSHKRREILSRRPSYRKILNELSSDVPGVPKIEEERSEEEGTPPSIATMAVPTSIYQTSTGQYIAIAQGGTIQISNPGSDGVQGLQALTMTNSGAPPPGATIVQYAAQSADGTQQFFVPGSQVVVQGIFY

SEQ ID NO: 34082 - protein, 33 aa, Homo sapiens
LSLTWTLFTLIKAGDAAVLLIAMWTCGKDTCDP

SEQ ID NO: 34083 - protein, 30 aa, Homo sapiens
LEEEIKGKGSRGEAGKMVKQPGPLESPWGR

SEQ ID NO: 34084 - protein, 440 aa, Homo sapiens
VKYEETVFYGLQYILNKYLKGKVVTKEKIQEAKDVYKEHFQDDVVNEKGWNYILEKYDGHLPIEIKAVPEGFVIPRGNVLFTVENTDPECYWLTNWIETILVQSWYPITVATNSREQKKILAKYLLETSGNLDGLEYKLHDFGYRGVSSQETAGIGASAHLVNFKGTDTVAGLALNKKYYGTKDPVPGYSVPAAEHSTITAWGKDHEKDAFEHIVTQFSSVPVSVVSNSYDIYNACEKIWGEDLRHLIVSRSTQAPLIIRPDSGNPLDTVLKVLEILGKKFPVTENSKGYKLLPPYLRVIQGDGVDINTLQEIVEGMKQKMWSIENIAFGSGGGLLQKLTRDLLNCSFKCSYVVTNGLGINVFKDPVADPNKRSKKGRLSLHRTPAGNFVTLEEGKGDLEEYGQDLLHTVFKNGKVTKSYSFDEIRKNAQLNIELEAAHH

SEQ ID NO: 34085 - protein, 43 aa, Homo sapiens
VHFSAPVAGAASGLLGMSAIWLQVCFSPRHSDGEGSRHLLASG

SEQ ID NO: 34086 - protein, 205 aa, Homo sapiens
LLRGLSAFHPAPGSVVCMAPPWAGGERRGPGTTCLHSPWMLEAAPPWAGGEGRELGAACLHSLRMLEAGGSEAATARGRGDFGAASCSDLAFRCASSQNPRSLEPVASSPERRRRQPSRAFACTLPGCWRLEAVTQQQREATLERPHIATSPSAARPPRAQEARNLWHPSLKGEDGNPAEALLGWGLHDRAGLIKWRPTRGSNPG

SEQ ID NO: 34087 - protein, 81 aa, Homo sapiens
MLEAAPPWAGGEGRELGAACLHSLRMLEAGGSEAATARGRGDFGAASCSDLAFRCASSQNPRSLEPVASSPERRRRQPSRA

SEQ ID NO: 34088 - protein, 417 aa, Homo sapiens
VSMMLGPEGGEGFVVKLRGLPWSCSVEDVQNFLSDCTIHDGAAGVHFIYTREGRQSGEAFVELGSEDDVKMALKKDRESMGHRYIEVFKSHRTEMDWVLKHSGPNSADSANDGFVRLRGLPFGCTKEEIVQFFSGLEIVPNGITLPVDPEGKITGEAFVQFASQELAEKALGKHKERIGHRYIEVFKSSQEEVRSYSDPPLKFMSVQRPGPYDRPGTARRYIGIVKQAGLERMRPGAYSTGYGGYEEYSGLSDGYGFTTDLFGRDLSYCLSGMYDHRYGDSEFTVQSTTGHCVHMRGLPYKATENDIYNFFSPLNPVRVHIEIGPDGRVTGEADVEFATHEEAVAAMSKDRANMQHRYIELFLNSTTGASNGAYSSQVMQGMGVSAAQATYSGLESQSVSGCYGAGYSGQNSMGGYD

SEQ ID NO: 34089 - protein, 67 aa, Homo sapiens
LLECREQAAGTSPSPCLGASALLPAKTRLPRARASHLAEGTPPPLGFLLQVENKNMHLEFPRSPLRG

SEQ ID NO: 34090 - protein, 180 aa, Homo sapiens
VVQYAVAPSHSLHLNPKPATKKEPAVLELEGKKWRVENQENVSNLVIDDTELKQAAYIYKCVNTMLQIKGKINSITVDNCKKLGLVFDDMVGIVEIINSRDVKVQVMSKVPTISINKTDGCHAYLSKNSLDCEIASAKSSEMNVLIPTEGGDFNEFPVPEQFKTLWNGQKFVATVTEIAG

SEQ ID NO: 34091 - protein, 20 aa, Homo sapiens
LQAYIKEFHTTGLPGAKRGL

SEQ ID NO: 34092 - protein, 269 aa, Homo sapiens [sequence omitted]

SEQ ID NO: 34093 - protein, 60 aa, Homo sapiens
MNAKVVVVLVLVLTALCLSDGKPVSLSYRCPCRFFESHVARANVKHLKILNTPNCALQIV

SEQ ID NO: 34094 - protein, 525 aa, Homo sapiens
MTIISVTLEIPHHITQRDADRSLSIPDEQLHSFAVSTVHITKNRNGGGSLNNYSSSIPSTPSTSQEDPQFSVPPTANTPTPVCKRSMRWSNLFTSEKGSDPDKERKAPENHADTIGSGRAIPIKQGMLLKRSGKWLKTWKKKYVTLCSNGVLTYYSSLGDYMKNIHKKEIDLQTSTIKVPGKWPSLATSACAPISSSKSNDLSKDMDTGLGDSICFSPSISSTTGPKLNPPPSPHANKKKHLKKKSTNNFMIVSATGQTWHFEATTYEERDAWVQAIQSQILASLQSCESSKSKSQLTSQSEAMALQSIQNMRGNAHCVDCETQNPKWASLNLGVLMCIECSGIHRSLGTRLSRVRSLELDDWPVELRKVMSSIGNDLANSIWEGSSQGQTKPSEKSTREEKERWILSKYEEKLFLAPLPCTDLSLGQQLLRATADEDLQTAILLLAHGSREEVNETCGEGDGCTALHLACRKGNVVLAQLLIWYGVDVMARDAHGNTALTYARQASSQECINVLLQYGCPDECV

SEQ ID NO: 34095 - protein, 31 aa, Homo sapiens
LLFMLVIVWQSVFNKRKSRVRHYLVKCPQNR

SEQ ID NO: 34096 - protein, 31 aa, Homo sapiens
MSVIIFLLIQLFCGYYYNVHGCCIEDMTGGG

SEQ ID NO: 34097 - protein, 39 aa, Homo sapiens
MLSVWLGICISVLLWGLGEDEACMWRAGLQKGTGSRTPD

SEQ ID NO: 34098 - protein, 1028 aa, Homo sapiens
LTCSLRTSLQRGPGPPARMSQLRLLPSRLGVQAARLLAAHDVPVFGWRSRSSGPPATFPSSKGGGGSSYMEEMYFAWLENPQSVHKSWDSFFREASEEAFSGSAQPRPPSVVHESRSAVSSRTKTSKLVEDHLAVQSLIRAYQIRGHHVAQLDPLGILDADLDSFVPSDLITTIDKLAFYDLQEADLDKEFQLPTTTFIGGSENTLSLREIIRRLENTYCQHIGLEFMFINDVEQCQWIRQKFETPGVMQFSSEEKRTLLARLVRSMRFEDFLARKWSSEKRFGLEGCEVMIPALKTIIDKSSEMGIENVILGMPHRGRLNVLANVIRKDLEQIFCQFDPKLEAADEGSGDVKYHLGMYHERINRVTNRNITLSLVANPSHLEAVDPVVQGKTKAEQFYRGDAQGKKVMSILVHGDAAFAGQGVVYETFHLSDLPSYTTNGTVHVVVNNQIGFTTDPRMARSSPYPTDVARVVNAPIFHVNADDPEAVIYVCSVAAEWRNTFNKDVVVDLVCYRRRGHNEMDEPMFTQPLMYKQIHRQVPVLKKYADKLIAEGTVTLQEFEEEIAKYDRICEEAYGRSKDKKILHIKHWLDSPWPGFFNVDGEPKSMTCPATGIPEDMLTHIGSVASSVPLEDFKIHTGLSRILRGRADMTKNRTVDWALAEYMAFGSLLKEGIHVRLSGQDVERGTFSHRHHVLHDQEVDRRTCVPMNHLWPDQAPYTVCNSSLSEYGVLGFELGYAMASPNALVLWEAQFGDFHNTAQCIIDQFISTGQAKWVRHNGIVLLLPHGMEGMGPEHSSARPERFLQMSNDDSDAYPAFTKDFEVSQLYDCNWIVVNCSTPANYFHVLRRQILLPFRKPLIIFTPKSLLRHPEAKSSFDQMVSGTSFQRVIPEDGAAARAPEQVQRLIFCTGKVYYDLVKERSSQDLEEKVAITRLEQISPFPFDLIKQEAEKYPGAELAWCQEEHKNMGYYDYISPRFMTILRRARPIWYVGRDPAAAPATGNRNTHLVSLKKFLDTAFNLQAFEGKTF

SEQ ID NO: 34099 - protein, 971 aa, Homo sapiens
LTCSLRTSLQRGPGPPARMSQLRLLPSRLGVQAARLLAAHDVPVFGWRSRSSGPPATFPSSKGGGGSSYMEEMYFAWLENPQSVHKIRGHHVAQLDPLGILDADLDSFVPSDLITTIDKLAFYDLQEADLDKEFQLPTTTFIGGSENTLSLREIIRRLENTYCQHIGLEFMFINDVEQCQWIRQKFETPGVMQFSSEEKRTLLARLVRSMRFEDFLARKWSSEKRFGLEGCEVMIPALKTIIDKSSEMGIENVILGMPHRGRLNVLANVIRKDLEQIFCQFDPKLEAADEGSGDVKYHLGMYHERINRVTNRNITLSLVANPSHLEAVDPVVQGKTKAEQFYRGDAQGKKVMSILVHGDAAFAGQGVVYETFHLSDLPSYTTNGTVHVVVNNQIGFTTDPRMARSSPYPTDVARVVNAPIFHVNADDPEAVIYVCSVAAEWRNTFNKDVVVDLVCYRRRGHNEMDEPMFTQPLMYKQIHRQVPVLKKYADKLIAEGTVTLQEFEEEIAKYDRICEEAYGRSKDKKILHIKHWLDSPWPGFFNVDGEPKSMTCPATGIPEDMLTHIGSVASSVPLEDFKIHTGLSRILRGRADMTKNRTVDWALAEYMAFGSLLKEGIHVRLSGQDVERGTFSHRHHVLHDQEVDRRTCVPMNHLWPDQAPYTVCNSSLSEYGVLGFELGYAMASPNALVLWEAQFGDFHNTAQCIIDQFISTGQAKWVRHNGIVLLLPHGMEGMGPEHSSARPERFLQMSNDDSDAYPAFTKDFEVSQLYDCNWIVVNCSTPANYFHVLRRQILLPFRKPLIIFTPKSLLRHPEAKSSFDQMVSGTSFQRVIPEDGAAARAPEQVQRLIFCTGKVYYDLVKERSSQDLEEKVAITRLEQISPFPFDLIKQEAEKYPGAELAWCQEEHKNMGYYDYISPRFMTILRRARPIWYVGRDPAAAPATGNRNTHLVSLKKFLDTAFNLQAFEGKTF

SEQ ID NO: 34100 - protein, 181 aa, Homo sapiens [sequence omitted]

SEQ ID NO: 34101 - protein, 331 aa, Homo sapiens
LDWSSQYPELLVASYNNNEDAPHEPDGVALVWNMKYKKTTPEYVFHCQSAVMSATFAKFHPNLVVGGTYSGQTVLWDNRSNKRTPVQRTPLSAAAHTHPVYCVNVVGTQNAHNLISISTDGKICSWSLDMLSHPQDSMELVHKQSKAVAVTSMSFPVGDVNNFVVGSEEGSVYTACHHGSKAGISEMFEGHQGPITGIHCHAAVGAVDFSHLYVTSSFDWTVKLWTTKNNKPLYSFEDNADYVYDVMWSPTHPALFACVDGMGRLDLWNLNNDTEVPTASISVEGNPALNHVRWTHSGREIAVGDSEGQIAIYDVGEQIAVPRNDEWAWFG

SEQ ID NO: 34102 - protein, 402 aa, Homo sapiens
LERKPCRGIWEILMEKQNMFLHGSYILREDVRTANVIAAEAVTCLVIDRDSFKHLIGGLDDVSNKAYEDAEAKAKYEAEAAFFANLKLSDFNIIDTLGVGGFGRVELVQLKSEESKTFAMKILKKRHIVDTRQQEHIRSEKQIMQGAHSDFIVRLYRTFKDSKYLYMLMEACLGGELWTILRDRGSFEDSTTRFYTACVVEAFAYLHSKGIIYRDLKPENLILDHRGYAKLVDFGFAKKIGFGKKTWTFCGTPEYVAPEIILNKGHDISADYWSLGILMYELLTGSPPFSGPDPMKTYNIILRGIDMIEFPKKIAKNAANLIKKLCRDNPSERLGNLKNGVKDIQKHKWFEGFNWEGLRKGTLTPPIIPSVASPTDTSNFDSFPEDNDEPPPDDNSGWDIDF

SEQ ID NO: 34103 - protein, 31 aa, Homo sapiens
LTLQPNRHGFVGTQACKVTVIFSFFLPLESF

SEQ ID NO: 34104 - protein, 271 aa, Homo sapiens
LSPSEMMALGAAGATRVFVAMVAAALGGHPLLGVSATLNSVLNSNAIKNLPPPLGGAAGHPGSAVSAAPGILYPGGNKYQTIDNYQPYPCAEDEECGTDEYCASPTRGGDAGVQICLACRKRRKRCMRHAMCCPGNYCKNGICVSSDQNHFRGEIEETITESFGNDHSTLDGYSRRTTLSSKMYHTKGQEGSVCLRSSDCASGLCCARHFWSKICKPVLKEGQVCTKHRRKGSHGLEIFQRCYCGEGLSCRIQKDHHQASNSSRLHTCQRH

SEQ ID NO: 34105 - protein, 16 aa, Homo sapiens
MLNCFAFLKIFLVTFS

SEQ ID NO: 34106 - protein, 284 aa, Homo sapiens
LNSAPGKMEAAETEAEAAALEVLAEVAGILEPVGLQEEAELPAKILVEFVVDSQKKDKLLCSQLQVADFLQNILAQEDTAKGLDPLASEDTSRQKAIAAKEQWKELKATYREHVEAIKIGLTKALTQMEEAQRKRTQLREAFEQLQAKKQMAMEKRRAVQNQWQLQQEKHLQHLAEVSAEVRERKTGTQQELDRVFQKLGNLKQQAEQERDKLQRYQTFLQLLYTLQGKLLFPEAEAEAENLPDDKPQQPTRPQEQSTGDTMGRDPGVSFKAVGLQPAGDVNLP

SEQ ID NO: 34107 - protein, 237 aa, Homo sapiens
LNSAPGKMEAAETEAEAAALEVLAEVAGILEPVGLQEEAELPAKILVEFVVDSQKKDKLLCSQLQVADFLQNILAQEDTAKGLDPLASEDTSRQKAIAAKEQWKELKATYREHVEAIKIGLTKALTQMEEAQRKRTQLREAFEQLQAKKQMAMEKRRAVQNQWQLQQEKHLQHLAEVSAEGKLLFPEAEAEAENLPDDKPQQPTRPQEQSTGDTMGRDPGVSFKAVGLQPAGDVNLP

SEQ ID NO: 34108 - protein, 55 aa, Homo sapiens
LNSAPGKMEAAETEAEAAALEVLAEVAGILEPVGLQEEAELPAKILVEFVVVCTR

SEQ ID NO: 34109 - protein, 40 aa, Homo sapiens
MMTMERVLLFPYIMEAGVSFSKLLQIVEATVFCDISVCFS

SEQ ID NO: 34110 - protein, 107 aa, Homo sapiens
MNVPETMNEVLDMSDDEVRKANAPEMLSDGEYISDVEEGNRCTWYKIPKVQEFTVKSEDAMTGDTDKYLGPQDLKELGDDSLPAEGYMGFSLGARSARYFVVAVFHS

SEQ ID NO: 34111 - protein, 67 aa, Homo sapiens
VGAGEGEGCGWKGASPSRPGLGRAATAPGEAAGRGSAMLPLCKVGRRAARRAQGPRTPATARSRGCC

SEQ ID NO: 34112 - protein, 981 aa, Homo sapiens
LTSTPSRDFQGCGRGAVTCCSFHEHRHQSGRCLSTGMAPNLKGRPRKKKPCPQRRDSFSGVKDSNNNSDGKAVAKVKCEARSALTKPKNNHNCKKVSNEEKPKVAIGEECRADEQAFLVALYKYMKERKTPIERIPYLGFKQINLWTMFQAAQKLGGYETITARRQWKHIYDELGGNPGSTSAATCTRRHYERLILPYERFIKGEEDKPLPPIKPRKQENSSQENENKTKVSGTKRIKHEIPKSKKEKENAPKPQDAAEVSSEQEKEQETLISQKSIPEPLPAADMKKKIEGYQEFSAKPLASRVDPEKDNETDQGSNSEKVAEEAGEKGPTPPLPSAPLAPEKDSALVPGASKQPLTSPSALVDSKQESKLCCFTESPESEPQEASFPSFPTTQPPLANQNETEDDKLPAMADYIANCTVKVDQLGSDDIHNALKQTPKVLVVQSFDMFKDKDLTGPMNENHGLNYTPLLYSRGNPGIMSPLAKKKLLSQVSGASLSSSYPYGSPPPLISKKKLIARDDLCSSLSQTHHGQSTDHMAVSRPSVIQHVQSFRSKPSEERKTINDIFKHEKLSRSDPHRCSFSKHHLNPLADSYVLKQEIQEGKDKLLEKRALPHSHMPSFLADFYSSPHLHSLYRHTEHHLHNEQTSKYPSRDMYRESENSSFPSHRHQEKLHVNYLTSLHLQDKKSAAAEAPTDDQPTDLSLPKNPHKPTGKVLGLAHSTTGPQESKGISQFQVLGSQSRDCHPKACRVSPMTMSGPKKYPESLSRSGKPHHVRLENFRKMEGMVHPILHRKMSPQNIGAARPIKRSLEDLDLVIAGKKARAVSPLDPSKEVSGKEKASEQESEGSKAAHGGHSGGGSEGHKLPLSSPIFPGLYSGSLCNSGLNSRLPAGYSHSLQYLKNQTVLSPLMQPLAFHSLVMQRGIFTSPTNSQQLYRHLAAATPVGSSYGDLLHNSIYPLAAINPQAAFPSSQLSSVHPSTKL

SEQ ID NO: 34113 - protein, 324 aa, Homo sapiens
VAAEVGGGAARPTGRWLRGLPPRPGLGAAVAAAGDRKGRRKGGGRSRHAEEQPTMPRDNMASLIQRIARQACLTFRGSGGGRGASDRDAASGPEAPMQPGFPENLSKLKSLLTQLRAEDLNIAPRKATLQPLPPNLPPVTYMHIYETDGFSLGVFLLKSGTSIPLHDHPGMHGMLKVLYGTVRISCMDKLDAGGGQRPRALPPEQQFEPPLQPREREAVRPGVLRSRAEYTEASGPCILTPHRDNLHQIDAVEGPAAFLDILAPPYDPDDGRDCHYYRVLEPVRPKEASSSACDLPREVWLLETPQADDFWCEGEPYPGPKVFP

SEQ ID NO: 34114 - protein, 94 aa, Homo sapiens
VVRLLLLQRLSLALGAQRGAAVSAAASSSLAVPSMFPGATTPLPKAAAYPGVYGSNGRTPQPGSSTEQTSRPFISCRQIRRGYFLSQKGCSISF

SEQ ID NO: 34115 - protein, 311 aa, Homo sapiens
VVRLLLLQRLSLALGAQRGAAVSAAASSSLAVPSMFPGATTPLPKAAAYPGVYGSNGRTPQPAYLSEAMKLTQSEQAHLSLELQRDSHMKQLLLIQERWKRAQREERLKAQQNTDKDAAAHLQTSHKPSAEDAEGQSPLSQKYSPSTEKCLPEIQGIFDRDPDTLLYLLQQKSEPAEPCIGSKAPKDDKTIIEEQATKIADLKRHVEFLVAENERLRKENKQLKAEKARLLKGPIEKELDVDADFVETSELWSLPPHAETATASSTWQKFAANTGKAKDIPIPNLPPLDFPSPELPLMELSEDILKGFMNN

SEQ ID NO: 34116 - protein, 18 aa, Homo sapiens
MTPLQVSSEMLGLRAICL

SEQ ID NO: 34117 - protein, 138 aa, Homo sapiens
MPKGKKAKGKKVVPAPAVMKKQEAKKVVNPLFEKRPKNFGIGQDIQPKRHFTRFVKWPCYIRLQRQRAILYKGLKVPPAINQFTQALDRQTATQLLKLAHKYRPETKQEKKAVGPGREESCWQRGRPHQETTCPSSRS

SEQ ID NO: 34118 - protein, 264 aa, Homo sapiens
MLCKSWLLIFYIFITDSEEYFCVKRIFSGGDQSFSHYSSPQNCGPPDDFRCPNPTKQIWTVNEALIQKWLSYPSGRFPVEIANEIDGTFSSSGCLNGSFLAVSNDDHYRTGTRFSGVDMNAARLLFHKLIQPDHPQISQQVAASLEKNLIPKLTSSLPDVEALRFYLTLPECPLMSDSNNFTTIAIPFGTALVNLEKAPLKVLENWWSVLEPPLFLKIVELFKEVVVHLLKLYKIGIPPSERRIFNSFLHTALKVLEILHRCNK

SEQ ID NO: 34119 - protein, 49 aa, Homo sapiens
MWGLPWGFYLGICSAKRPSASLRLNSLASRTCVSGAALAAEVGGGSRQQ

SEQ ID NO: 34120 - protein, 27 aa, Homo sapiens
LLMWRHRVPPTFRGFRREFFIETGRPK

SEQ ID NO: 34121 - protein, 334 aa, Homo sapiens
LAFLPQLQPLSSWESASEVTRSPVSPEDVKQATSNFENLQKQLARKMKLPIFIADAFTARAFRGNPAAVCLLENELDEDMHQKIAREMNLSETAFIRKLHPTDNFAQSSCFGLRWFTPASEVPLCGHATLASAAVLFHKIKNMNSTLTFVTLSGELRARRAEDGIVLDLPLYPAHPQDFHEVEDLIKTAIGNTLVQDICYSPDTQKLLVRLSDVYNRSFLENLKVNTENLLQVENTGKVKGLILTLKGEPGGQTQAFDFYSRYFAPWVGVAEDPVTGSAHAVLSSYWSQHLGKKEMHAFQCSHRGGELGISLRPDGRVDIRGGAAVVLEGTLTA

SEQ ID NO: 34122 - protein, 335 aa, Homo sapiens
LAFLPQLQPLSSWESASEVTRSPVSPEEDVKQATSNFENLQKQLARKMKLPIFIADAFTARAFRGNPAAVCLLENELDEDMHQKIAREMNLSETAFIRKLHPTDNFAQSSCFGLRWFTPASEVPLCGHATLASAAVLFHKIKNMNSTLTFVTLSGELRARRAEDGIVLDLPLYPAHPQDFHEVEDLIKTAIGNTLVQDICYSPDTQKLLVRLSDVYNRSFLENLKVNTENLLQVENTGKVKGLILTLKGEPGGQTQAFDFYSRYFAPWVGVAEDPVTGSAHAVLSSYWSQHLGKKEMHAFQCSHRGGELGISLRPDGRVDIRGGAAVVLEGTLTA

SEQ ID NO: 34123 - protein, 327 aa, Homo sapiens
LAFLPQLQPLSSWESASEVTRSPVSPEEDVKQATSNFENLQKQLARKMKLPIFIADAFTARAFRGNPAAVCLLENELDEDMHQKIAREMNLSETAFIRKLHPTDNFAQSSCFGLRWFTPASEVPLCGHATLASAAVLFHKIKNMNSTLTFVTLSGELRARRAEDGIVLDLPLYPAHPQDFHEVEDLIKTAIGNTLVQDICYSPDTQKLLVRLSDVYNRSFLENLKVNTENLLQVENTGKVKGLILTLKGEPGGQTQAFDFYSRYFAPWVGVAEDPVTGSAHAVLSSYWSQHLGKKEMHGRTALYQFLFYLPNSKLVFLLICTIPLKM

SEQ ID NO: 34124 - protein, 146 aa, Homo sapiens
LQKQLARKMKLPIFIADAFTARAFRGNPAAVCLLENELDEDMHQKIAREMNLSETAFIRKLHPTDNFAQKNMNSTLTFVTLSGELRARRAEDGIVLDLPLYPAHPQDFHEVEDLIKTAIGNTLVQDICYSPDTQKLLVRLSDVYNR

SEQ ID NO: 34125 - protein, 68 aa, Homo sapiens
LTALCACLFFIAFKSNGIEMDWVMKHNGPNDASDGTVRLRGLPFGCSKEEIVQFFQGTSSISQSLVVL

SEQ ID NO: 34126 - protein, 26 aa, Homo sapiens
LNSTPGGGSGMGGSGMGGYGRDGMGM

SEQ ID NO: 34127 - protein, 59 aa, Homo sapiens
LPPLPFTLSLPVGGCGHCARREAAVASNAWETPLGGHYGAGSTLGGVREPEEGEAKGLL

SEQ ID NO: 34128 - protein, 57 aa, Homo sapiens
LPPLPFTLSLPVGGCGHCARREAAVASNAWETPLGGHYGAGSTLGGVREPEEGEAKE

SEQ ID NO: 34129 - protein, 90 aa, Homo sapiens
LPPLPFTLSLPVGGCGHCARREAAVASNAWETPLGGHYGAGTPLEESESQKKERQKSDRRKSRHHYDSDEKSETRENGVTDDLDAPKAKI

SEQ ID NO: 34130 - protein, 512 aa, Homo sapiens
VAHNMAVGFLKKEQAIDRARWLTPVIPALWEAENNLGILWSEREEIETAQAYLESSEALYNQYMKEVGSPPLDPTERFLPEEEKLTEQERSKRFEKVYTHNLYYLAQVYQHLEMFEKAAHYCHSTLKRQLEHNAYHPIEWAINAATLSQFYINKLCFMEARHCLSAANVIFGQTGKISATEDTPEAEGEVPELYHQRKGEIARCWIKYCLTLMQNAQLSMQDNIGELDLDKQSELRALRKKELDEEESIRKKAVQFGTGELCDAISAVEEKVSYLRPLDFEEARELFLLGQHYVFEAKEFFQIDGYVTDHIEVVQDHSALFKVLAFFETDMERRCKMHKRRIAMLEPLTVDLNPQYYLLVNRQIQFEIAHAYYDMMDLKVAIADRLRDPDSHIVKKINNLNKSALKYYQLFLDSLRDPNKVFPEHIGEDVLRPAMLAKFRVARLYGKIITADPKKELENLATSLEHYKFIVDYCEKHPEAAQEIEVELELSKEMVSLLPTKMERFRTKMALT

SEQ ID NO: 34131 - protein, 29 aa, Homo sapiens [sequence omitted]

SEQ ID NO: 34132 - protein, 35 aa, Homo sapiens
LVMMQKLLKCSRLVLALALILVLESSVQERRESRT

SEQ ID NO: 34133 - protein, 160 aa, Homo sapiens
LVMMQKLLKCSRLVLALALILVLESSVQGYPTRRARYQWVRCNPDSNSANCLEEKGPMFELLPGESNKIPRLRTDLFPKTRIQDLNRIFPLSEDYSGSGFGSGSGSGSGSGSGFLTEMEQDYQLVDESDAFHDNLRSLDRNLPSDSQDLGQHGLEEDFML

SEQ ID NO: 34134 - protein, 935 aa, Homo sapiens
LRRTDRPHACRPATPTASMIAAQLLAYYFTELKDDQVKKIDKYLYAMRLSDETLIDIMTRFRKEMKNGLSRDFNPTATVKMLPTFVRSIPDGSEKGDFIALDLGGSSFRILRVQVNHEKNQNVHMESEVYDTPENIVHGSGSQLFDHVAECLGDFMEKRKIKDKKLPVGFTFSFPCQQSKIDEAILITWTKRFKASGVEGADVVKLLNKAIKKRGDYDANIVAVVNDTVGTMMTCGYDDQHCEVGLIIGTGTNACYMEELRHIDLVEGDEGRMCINTEWGAFGDDGSLEDIRTEFDREIDRGSLNPGKQLFEKMVSGMYLGELVRLILVKMAKEGLLFEGRITPELLTRGKFNTSDVSAIEKNKEGLHNAKEILTRLGVEPSDDDCVSVQHVCTIVSFRSANLVAATLGAILNRLRDNKGTPRLRTTVGVDGSLYKTHPQYSRRFHKTLRRLVPDSDVRFLLSESGSGKGAAMVTAVAYRLAEQHRQIEETLAHFHLTKDMLLEVKKRMRAEMELGLRKQTHNNAVVKMLPSFVRRTPDGTENGDFLALDLGGTNFRVLLVKIRSGKKRTVEMHNKIYAIPIEIMQGTGEELFDHIVSCISDFLDYMGIKGPRMPLGFTFSFPCQQTSLDAGILITWTKGFKATDCVGHDVVTLLRDAIKRREEFDLDVVAVVNDTVGTMMTCAYEEPTCEVGLIVGTGSNACYMEEMKNVEMVEGDQGQMCINMEWGAFGDNGCLDDIRTHYDRLVDEYSLNAGKQRYEKMISGMYLGEIVRNILIDFTKKGFLFRGQISETLKTRGIFETKFLSQIESDRLALLQVRAILQQLGLNSTCDDSILVKTVCGVVSRRAAQLCGAGMAAVVDKIRENRGLDRLNVTVGVDGTLYKLHPHFSRIMHQTVKELSPKCNVSFLLSEDGSGKGAALITAVGVRLRTEASS

SEQ ID NO: 34135 - protein, 589 aa, Homo sapiens
LGSGGQRPWRLDAGSQIDKYLYAMRLSDETLIDIMTRFRKEMKNGLSRDFNPTATVKMLPTFVRSIPDGSEKGDFIALDLGGSSFRILRVQVNHEKNQNVHMESEVYDTPENIVHGSGSQLFDHVAECLGDFMEKRKIKDKKLPVGFTFSFPCQQSKIDEAILITWTKRFKASGVEGADVVKLLNKAIKKRGDYDANIVAVVNDTVGTMMTCGYDDQHCEVGLIIGTGTNACYMEELRHIDLVEGDEGRMCINTEWGAFGDDGSLEDIRTEFDREIDRGSLNPGKQLFEKMVSGMYLGELVRLILVKMAKEGLLFEGRITPELLTRGKFNTSDVSAIEKNKEGLHNAKEILTRLGVEPSDDDCVSVQHVCTIVSFRSANLVAATLGAILNRLRDNKGTPRLRTTVGVDGSLYKTHPQYSRRFHKTLRRLVPDSDVRFLLSESGSGKGAAMVTAVAYRLAEQHRQIEETLAHFHLTKDMLLEVKKRMRAEMELGLRKQTHNNAVVKMLPSFVRRTPDGTENGDFLALDLGGTNFRVLLVKIRSGKKRTVEMHNKIYAIPIEIMQGTGEEVRLQNHSACALHTRPVAPAVT

SEQ ID NO: 34136 - protein, 156 aa, Homo sapiens
MYILGICLIMELIGGVVALTFRNQTIDFLNDNIRRGIENYYDDLDFKNIMDFVQKKFKCCGGEDYRDWSKNQYHDCSAPGPLACGVPYTCCIRNTTEVVNTMCGYKTIDKERFSVQDVIYVRGCTNAVIIWFMDNYTIMAGILLGILLPQITGVSD

SEQ ID NO: 34137 - protein, 172 aa, Homo sapiens
LEPPGVDAAEARSRACRHSIYSAWVTSVNITDCKPPSISGAAHQGPTAPGRMVRILANGEIVQDDDPRVRTTTQPPRGSIPRQSFFNRGHGAPPGGPGPRQQQAGARLGAAQSPFNDLNRQLVNMGFPQWHLGNHAVEPVTSILLLFLLMMLGVRGLLLVGLVYLVSHLSQR

SEQ ID NO: 34138 - protein, 205 aa, Homo sapiens
LVLALDRLLLWSFSFLICNLEVTLIHSQVALADKELLPSVRQEVKEILLRKGVQLLLSERVSNLEELPLNEYREYIKVQTDKGTEVATNLVILCTGIKINSSAYRKAFESRLASSGALRVNEHLQVEGHSNVYAIGDCADVRTPKMAYLAGLHANIAVANIVNSVKQRPLQAYKPGKRGPMCFAVLIEFGVKHGEAFLGYPIPGH

SEQ ID NO: 34139 - protein, 98 aa, Homo sapiens
LSLMIYCSSLLTLAPNALMTDETISNVPILILGNKIDRTDAISEEKLREIFGLYGQTTGKGNVTLKELNARPMEVFMCSVLKRQGYGEGFRWLSQYID

SEQ ID NO: 34140 - protein, 322 aa, Homo sapiens
VLAVRRRGALSLSVGAACGLVALWQRRRQDSGTMSGFSTEERAAPFSLEYRVFLKNEKGQYISPFHDIPIYADKDVFHMVVEVPRWSNAKMEIATKDPLNPIKQDVKKGKLRYVANLFPYKGYIWNYGAIPQTWEDPGHNDKHTGCCGDNDPIDVCEIGSKVCARGEIIGVKVLGILAMIDEGETDWKVIAINVDDPDAANYNDINDVKRLKPGYLEATVDWFRRYKVPDGKPENEFAFNAEFKDKDFAIDIIKSTHDHWKALVTKKTNGKGISCMNTTLSESPFKCDPDAARAIVDALPPPCESACTVPTDVDKWFHHQKN

SEQ ID NO: 34141 - protein, 211 aa, Homo sapiens
VLAVRRRGALSLSVGAACGLVALWQRRRQDSGTMSGFSTEERAAPFSLEYRVFLKNEKGQYISPFHDIPIYADKDVFHMVVEVPRWSNAKMEIATKDPLNPIKQDVKKGKLRYVANLFPYKGYIWNYGAIPQTWEDPGHNDKHTGCCGDNDPIDVCEIGSKVCARGEIIGVKVLGILAMIDEGETDWKVIAINVDDPDAANYNVCNSVVIL

SEQ ID NO: 34142 - protein, 23 aa, Homo sapiens
LNGEGSFVFSWLALTFSCVGTTG

SEQ ID NO: 34143 - protein, 244 aa, Homo sapiens
LCSRFSIRDSSSMAARLLLLGILLLLLPLPVPAPCHTAARSECKRSHKFVPGAWLAGEGVDVTSLRRSGSFPVDTQRFLRPDGTCTLCENALQEGTLQRLPLALTNWRAQGSGCQRHVTRAKVSSTEAVARDAARSIRNDWKVGLDVTPKPTSNVHVSVAGSHSQAANFAAQKTHQDQYSFSTDTVECRFYSSSAIVSASGFYMWPNTILLPTWPREAKRLDTHQTDGKGRFRLFFREVAGFTR

SEQ ID NO: 34144 - protein, 143 aa, Homo sapiens
LGTLIITGGRPERGPAPGRQPARPAAACPLRWPPAAARAMAGKAHRLSAEERDQLLPNLRAVGWNELEGRDAIFKQFHFKDFNRAFGFMTRVALQAEKLDHHPEWFNVYNKVHITLSTHECAGLSERDINLASFIEQVAVSMT

SEQ ID NO: 34145 - protein, 1005 aa, Homo sapiens
VPGGPPRSVASAAPTEGTGWRCRAPGRTARRRRRRRRRRRRDWGQGDSPGGEAPEPGRGSMGARSGARGALLLALLLCWDPRLSQAGTDSGSEVLPDSFPSAPAEPLPYFLQEPQDAYIVKNKPVELRCRAFPATQIYFKCNGEWVSQNDHVTQEGLDEATGLRVREVQIEVSRQQVEELFGLEDYWCQCVAWSSAGTTKSRRAYVRIAYLRKNFDQEPLGKEVPLDHEVLLQCRPPEGVPVAEVEWLKNEDVIDPTQDTNFLLTIDHNLIIRQARLSDTANYTCVAKNIVAKRRSTTATVIVYVNGGWSSWAEWSPCSNRCGRGWQKRTRTCTNPAPLNGGAFCEGQAFQKTACTTICPVDGAWTEWSKWSACSTECAHWRSRECMAPPPQNGGRDCSGTLLDSKNCTDGLCMQNKKTLSDPNSHLLEASGDAALYAGLVVAIFVVVAILMAVGVVVYRRNCRDFDTDITDSSAALTGGFHPVNFKTARPSNPQLLHPSVPPDLTASAGIYRGPVYALQDSTDKIPMTNSPLLDPLPSLKVKVYSSSTTGSGPGLADGADLLGVLPPGTYPSDFARDTHFLHLRSASLGSQQLLGLPRDPGSSVSGTFGCLGGRLSIPGTGVSLLVPNGAIPQGKFYEMYLLINKAESTLPLSEGTQTVLSPSVTCGPTGLLLCRPVILTMPHCAEVSARDWIFQLKTQAHQGHWEEVVTLDEETLNTPCYCQLEPRACHILLDQLGTYVFTGESYSRSAVKRLQLAVFAPALCTSLEYSLRVYCLEDTPVALKEVLELERTLGGYLVEEPKPLMFKDSYHNLRLSLHDLPHAHWRSKLLAKYQEIPFYHIWSGSQKALHCTFTLERHSLASTELTCKICVRQVEGEGQIFQLHTTLAETPAGSLDTLCSAPGSTVTTQLGPYAFKIPLSIRQKICNSLDAPNSRGNDWRMLAQKLSMDRYLNYFATKASPTGVILDLWEALQQDDGDLNSLASALEEMGKSEMLVAVATDGDC

SEQ ID NO: 34146 - protein, 1460 aa, Homo sapiens
LGRAQSEPPARLKLRAASGERRAARGDPGAAGTPRMSLRAGGKTRRWPGPEQAARGGRSGGEQSPRRGEARRRCTHAHGAMGRHVATSCHVAWLLVLISGCWGQVNRLPFFTNHFFDTYLLISEDTPVGSSVTQLLAQDMDNDPLVFGVSGEEASRFFAVEPDTGVVWLRQPLDRETKSEFTVEFSVSDHQGVITRKVNIQVGDVNDNAPTFHNQPYSVRIPENTPVGTPIFIVNATDPDLGAGGSVLYSFQPPSQFFAIDSARGIVTVIRELDYETTQAYQLTVNATDQDKTRPLSTLANLAIIITDVQDMDPIFINLPYSTNIYEHSPPGTTVRIITAIDQDKGRPRGIGYTIVSGNTNSIFALDYISGVLTLNGLLDRENPLYSHGFILTVKGTELNDDRTPSDATVTTTFNILVIDINDNAPEFNSSEYSVAITELAQVGFALPLFIQVVDKDENLGLNSMFEVYLVGNNSHHFIISPTSVQGKADIRIRVAIPLDYETVDRYDFDLFANESVPDHVGYAKVKITLINENDNRPIFSQPLYNISLYENVTVGTSVLTVLATDNDAGTFGEVSYFFSDDPDRFSLDKDTGLIMLIARLDYELIQRFTLTIIARDGGGEETTGRVRINVLDVNDNVPTFQKDAYVGALRENEPSVTQLVRLRATDEDSPPNNQITYSIVSASAFGSYFDISLYEGYGVISVSRPLDYEQISNGLIYLTVMAMDAGNPPLNSTVPVTIEVFDENDNPPTFSKPAYFVSVVENIMAGATVLFLNATDLDRSREYGQESIIYSLEGSTQFRINARSGEITTTSLLDRETKSEYILIVRAVDGGVGHNQKTGIATVNITLLDINDNHPTWKDAPYYINLVEMTPPDSDVTTVVAVDPDLGENGTLVYSIQPPNKFYSLNSTTGKIRTTHAMLDRENPDPHEAELMRKIVVSVTDCGRPPLKATSSATVFVNLLDLNDNDPTFQNLPFVAEVLEGIPAGVSIYQVVAIDLDEGLNGLVSYRMPVGMPRMDFLINSSSGVVVTTTELDRERIAEYQLRVVASDAGTPTKSSTSTLTIHVLDVNDETPTFFPAVYNVSVSEDVPREFRVVWLNCTDNDVGLNAELSYFITGGNVDGKFSVGYRDAVVRTVVGLDRETTAAYMLILEAIDNGPVGKRHTGTATVFVTVLDVNDNRPIFLQSSYEASVPEDIPEGHSILQAATDADEGEFGRVWYRILHGNHGNNFRIHVSNGLLMRGPRPLDRERNSSHVLIVEAYNHDLGPMRSSVRVIVYVEDINDEAPVFTQQQYSRLGLRETAGIGTSVIVVQATDRDSGDGGLVNYRILSGAEGKFEIDESTGLIITVNYLDYETKTSYMMNVSATDQAPPFNQGFCSVYITLLNELDEAVQFSNASYEAAILENLALGTEIVRVQAYSIDNLNQITYRFNAYTSTQAKALFKIDAITVRGWGQGAPFLPI

SEQ ID NO: 34147 - protein, 1461 aa, Homo sapiens
LGRAQSEPPARLKLRAASGERRAARGDPGAAGTPRMSLRAGGKTRRWPGPEQAARGGRSGGEQSPRRGEARRRCTHAHGAMGRHVATSCHVAWLLVLISGCWGQVNRLPFFTNHFFDTYLLISEDTPVGSSVTQLLAQDMDNDPLVFGVSGEEASRFFAVEPDTGVVWLRQPLDRETKSEFTVEFSVSDHQGVITRKVNIQVGDVNDNAPTFHNQPYSVRIPENTPVGTPIFIVNATDPDLGAGGSVLYSFQPPSQFFAIDSARGIVTVIRELDYETTQAYQLTVNATDQDKTRPLSTLANLAIIITDVQDMDPIFINLPYSTNIYEHSPPGTTVRIITAIDQDKGRPRGIGYTIVSGNTNSIFALDYISGVLTLNGLLDRENPLYSHGFILTVKGTELNDDRTPSDATVTTTFNILVIDINDNAPEFNSSEYSVAITELAQVGFALPLFIQVVDKDENLGLNSMFEVYLVGNNSHHFIISPTSVQGKADIRIRVAIPLDYETVDRYDFDLFANESVPDHVGYAKVKITLINENDNRPIFSQPLYNISLYENVTVGTSVLTVLATDNDAGTFGEVSYFFSDDPDRFSLDKDTGLIMLIARLDYELIQRFTLTIIARDGGGEETTGRVRINVLDVNDNVPTFQKDAYVGALRENEPSVTQLVRLRATDEDSPPNNQITYSIVSASAFGSYFDISLYEGYGVISVSRPLDYEQISNGLIYLTVMAMDAGNPPLNSTVPVTIEVFDENDNPPTFSKPAYFVSVVENIMAGATVLFLNATDLDRSREYGQESIIYSLEGSTQFRINARSGEITTTSLLDRETKSEYILIVRAVDGGVGHNQKTGIATVNITLLDINDNHPTWKDAPYYINLVEMTPPDSDVTTVVAVDPDLGENGTLVYSIQPPNKFYSLNSTTGKIRTTHAMLDRENPDPHEAELMRKIVVSVTDCGRPPLKATSSATVFVNLLDLNDNDPTFQNLPFVAEVLEGIPAGVSIYQVVAIDLDEGLNGLVSYRMPVGMPRMDFLINSSSGVVVTTTELDRERIAEYQLRVVASDAGTPTKSSTSTLTIHVLDVNDETPTFFPAVYNVSVSEDVPREFRVVWLNCTDNDVGLNAELSYFITGGNVDGKFSVGYRDAVVRTVVGLDRETTAAYMLILEAIDNGPVGKRHTGTATVFVTVLDVNDNRPIFLQSSYEASVPEDIPEGHSILQLKATDADEGEFGRVWYRILHGNHGNNFRIHVSNGLLMRGPRPLDRERNSSHVLIVEAYNHDLGPMRSSVRVIVYVEDINDEAPVFTQQQYSRLGLRETAGIGTSVIVVQATDRDSGDGGLVNYRILSGAEGKFEIDESTGLIITVNYLDYETKTSYMMNVSATDQAPPFNQGFCSVYITLLNELDEAVQFSNASYEAAILENLALGTEIVRVQAYSIDNLNQITYRFNAYTSTQAKALFKIDAITVRGWGQGAPFLPI

SEQ ID NO: 34148 - protein, 3434 aa, Homo sapiens
LGRAQSEPPARLKLRAASGERRAARGDPGAAGTPRMSLRAGGKTRRWPGPEQAARGGRSGGEQSPRRGEARRRCTHAHGAMGRHVATSCHVAWLLVLISGCWGQVNRLPFFTNHFFDTYLLISEDTPVGSSVTQLLAQDMDNDPLVFGVSGEEASRFFAVEPDTGVVWLRQPLDRETKSEFTVEFSVSDHQGVITRKVNIQVGDVNDNAPTFHNQPYSVRIPENTPVGTPIFIVNATDPDLGAGGSVLYSFQPPSQFFAIDSARGIVTVIRELDYETTQAYQLTVNATDQDKTRPLSTLANLAIIITDVQDMDPIFINLPYSTNIYEHSPPGTTVRIITAIDQDKGRPRGIGYTIVSGNTNSIFALDYISGVLTLNGLLDRENPLYSHGFILTVKGTELNDDRTPSDATVTTTFNILVIDINDNAPEFNSSEYSVAITELAQVGFALPLFIQVVDKDETQGLNSMFEVYLVGNNSHHFIISPTSVQGKADIRIRVAIPLDYETVDRYDFDLFANESVPDHVGYAKVKITLINENDNRPIFSQPLYNISLYENVTVGTSVLTVLATDNDAGTFGEVSYFFSDDPDRFSLDKDTGLIMLIARLDYELIQRFTLTIIARDGGGEETTGRVRINVLDVNDNVPTFQKDAYVGALRENEPSVTQLVRLRATDEDSPPNNQITYSIVSASAFGSYFDISLYEGYGVISVSRPLDYEQISNGLIYLTVMAMDAGNPPLNSTVPVTIEVFDENDNPPTFSKPAYFVSVVENIMAGATVLFLNATDLDRSREYGQESIIYSLEGSTQFRINARSGEITTTSLLDRETKSEYILIVRAVDGGVGHNQKTGIATVNITLLDINDNHPTWKDAPYYINLVEMTPPDSDVTTVVAVDPDLGENGTLVYSIQPPNKFYSLNSTTGKIRTTHAMLDRENPDPHEAELMRKIVVSVTDCGRPPLKATSSATVFVNLLDLNDNDPTFQNLPFVAEVLEGIPAGVSIYQVVAIDLDEGLNGLVSYRMPVGMPRMDFLINSSSGVVVTTTELDRERIAEYQLRVVASDAGTPTKSSTSTLTIHVLDVNDETPTFFPAVYNVSVSEDVPREFRVVWLNCTDNDVGLNAELSYFITGGNVDGKFSVGYRDAVVRTVVGLDRETTAAYMLILEAIDNGPVGKRHTGTATVFVTVLDVNDNRPIFLQSSYEASVPEDIPEGHSILQLKATDADEGEFGRVWYRILHGNHGNNFRIHVSNGLLMRGPRPLDRERNSSHVLIVEAYNHDLGPMRSSVRVIVYVEDINDEAPVFTQQQYSRLGLRETAGIGTSVIVVQATDRDSGDGGLVNYRILSGAEGKFEIDESTGLIITVNYLDYETKTSYMMNVSATDQAPPFNQGFCSVYITLLNELDEAVQFSNASYEAAILENLALGTEIVRVQAYSIDNLNQITYRFNAYTSTQAKALFKIDAITGVITVQGLVDREKGDFYTLTVVADDGGPKVDSTVQVYITVLDENDNSPRFDFTSDSAVSIPEDCPVGQRVATVKAWDPDAGSNGQVVFSLASGNIAGAFEIVTTNDSIGEVFVARPLDREELDHYILQVVASDRGTPPRKKDHILQVTILDINDNPPVIESPFGYNVSVNENVGGGTAVVQVRATDRDIGINSVLSYYITEGNKDMAFRMDRISGEIATRPAPPDRERQSFYHLVATVEDEGTPTLSATTHVYVTIVDENDNAPMFQQPHYEVLLDEGPDTLNTSLITIQALDLDEGPNGTVTYAIVAGNIVNTFRIDRHMGVITAAKELDYEISHGRYTLIVTATDQCPILSHRLTSTTTVLVNVNDINDNVPTFPRDYEGPFEVTEGQPGPRVWTFLAHDRDSGPNGQVEYSIMDGDPLGEFVISPVEGVLRVRKDVELDRETIAFYNLTICARDRGMPPLSSTMLVGIRVLDINDNDPVLLNLPMNITISENSPVSSFVAHVLASDADSGCNARLTFNITAGNRERAFFINATTGIVTVNRPLDRERIPEYKLTISVKDNPENPRIARRDYDLLLIFLSDENDNHPLFTKSTYQAEVMENSPAGTPLTVLNGPILALDADQDIYAVVTYQLLGAQSGLFDINSSTGVVTVRSGVIIDREAFSPPILELLLLAEDIGLLNSTAHLLITILDDNDNRPTFSPATLTVHLLENCPPGFSVLQVTATDEDSGLNGELVYRIEAGAQDRFLIHLVTGVIRVGNATIDREEQESYRLTVVATDRGTVPLSGTAIVTILIDDINDSRPEFLNPIQTVSVLESAEPGTVIANITAIDHDLNPKLEYHIVGIVAKDDTDRLVPNQEDAFAVNINTGSVMVKSPMNRELVATYEVTLSVIDNASDLPERSVSVPNAKLTVNVLDVNDNTPQFKPFGITYYMERILEGATPGTTLIAVAAVDPDKGLNGLVTYTLLDLVPPGYVQLEDSSAGKVIANRTVDYEEVHWLNFTVRASDNGSPPRAAEIPVYLEIVDINDNNPIFDQPSYQEAVFEDVPVGTIILTVTATDADSGNFALIEYSLGDGESKFAINPTTGDIYVLSSLDREKKDHYILTALAKDNPGDVASNRRENSVQVVIQVLDVNDCRPQFSKPQFSTSVYENEPAGTSVITMMATDQDEGPNGELTYSLEGPGVEAFHVDMDSGLVTTQRPLQSYEKFSLTVVATDGGEPPLWGTTMLLVEVIDVNDNRPVFVRPPNGTILHIREEIPLRSNVYEVYATDKDEGLNGAVRYSFLKTAGNRDWEFFIIDPISGLIQTAQRLDRESQAVYSLILVASDLGQPVPYETMQPLQVALEDIDDNEPLFVRPPKGSPQYQLLTVPEHSPRGTLVGNVTGAVDADEGPNAIVYYFIAAGNEEKNFHLQPDGCLLVLRDLDREREAIFSFIVKASSNRSWTPPRGPSPTLDLVADLTLQEVRVVLEDINDQPPRFTKAEYTAGVATDAKVGSELIQVLALDADIGNNSLVFYSILAIHYFRALANDSEDVGQVFTMGSMDGILRTFDLFMAYSPGYFVVDIVARDLAGHNDTAIIGIYILRDDQRVKIVINEIPDRVRGFEEEFIHLLSNITGAIVNTDNVQFHVDKKGRVNFAQTELLIHVVNRDTNRILDVDRVIQMIDENKEQLRNLFRNYNVLDVQPAISVRLPDDMSALQMAIIVLAILLFLAAMLFVLMNWYYRTVHKRKLKAIVAGSAGNRGFIDIMDMPNTNKYSFDGANPVWLDPFCRNLELAAQAEHEDDLPENLSEIADLWNSPTRTHGTFGREPAAVKPDDDRYLRAAIQEYDNIAKLGQIIREGPIKGSLLKVVLEDYLRLKKLFAQRMVQKASSCHSSISELIQTELDEEPGDHSPGQGSLRFRHKPPVELKGPDGIHVVHGSTGTLLATDLNSLPEEDQKGLGRSLETLTAAEATAFERNARTESAKSTPLHKLRDVIMETPLEITEL

SEQ ID NO: 34149 - protein, 3439 aa, Homo sapiens
LGRAQSEPPARLKLRAASGERRAARGDPGAAGTPRMSLRAGGKTRRWPGPEQAARGGRSGGEQSPRRGEARRRCTHAHGAMGRHVATSCHVAWLLVLISGCWGQVNRLPFFTNHFFDTYLLISEDTPVGSSVTQLLAQDMDNDPLVFGVSGEEASRFFAVEPDTGVVWLRQPLDRETKSEFTVEFSVSDHQGVITRKVNIQVGDVNDNAPTFHNQPYSVRIPEVGATGNTPVGTPIFIVNATDPDLGAGGSVLYSFQPPSQFFAIDSARGIVTVIRELDYETTQAYQLTVNATDQDKTRPLSTLANLAIIITDVQDMDPIFINLPYSTNIYEHSPPGTTVRIITAIDQDKGRPRGIGYTIVSGNTNSIFALDYISGVLTLNGLLDRENPLYSHGFILTVKGTELNDDRTPSDATVTTTFNILVIDINDNAPEFNSSEYSVAITELAQVGFALPLFIQVVDKDENLGLNSMFEVYLVGNNSHHFIISPTSVQGKADIRIRVAIPLDYETVDRYDFDLFANESVPDHVGYAKVKITLINENDNRPIFSQPLYNISLYENVTVGTSVLTVLATDNDAGTFGEVSYFFSDDPDRFSLDKDTGLIMLIARLDYELIQRFTLTIIARDGGGEETTGRVRINVLDVNDNVPTFQKDAYVGALRENEPSVTQLVRLRATDEDSPPNNQITYSIVSASAFGSYFDISLYEGYGVISVSRPLDYEQISNGLIYLTVMAMDAGNPPLNSTVPVTIEVFDENDNPPTFSKPAYFVSVVENIMAGATVLFLNATDLDRSREYGQESIIYSLEGSTQFRINARSGEITTTSLLDRETKSEYILIVRAVDGGVGHNQKTGIATVNITLLDINDNHPTWKDAPYYINLVEMTPPDSDVTTVVAVDPDLGENGTLVYSIQPPNKFYSLNSTTGKIRTTHAMLDRENPDPHEAELMRKIVVSVTDCGRPPLKATSSATVFVNLLDLNDNDPTFQNLPFVAEVLEGIPAGVSIYQVVAIDLDEGLNGLVSYRMPVGMPRMDFLINSSSGVVVTTTELDRERIAEYQLRVVASDAGTPTKSSTSTLTIHVLDVNDETPTFFPAVYNVSVSEDVPREFRVVWLNCTDNDVGLNAELSYFITGGNVDGKFSVGYRDAVVRTVVGLDRETTAAYMLILEAIDNGPVGKRHTGTATVFVTVLDVNDNRPIFLQSSYEASVPEDIPEGHSILQLKATDADEGEFGRVWYRILHGNHGNNFRIHVSNGLLMRGPRPLDRERNSSHVLIVEAYNHDLGPMRSSVRVIVYVEDINDEAPVFTQQQYSRLGLRETAGIGTSVIVVQATDRDSGDGGLVNYRILSGAEGKFEIDESTGLIITVNYLDYETKTSYMMNVSATDQAPPFNQGFCSVYITLLNELDEAVQFSNASYEAAILENLALGTEIVRVQAYSIDNLNQITYRFNAYTSTQAKALFKIDAITGVITVQGLVDREKGDFYTLTVVADDGGPKVDSTVKVYITVLDENDNSPRFDFTSDSAVSIPEDCPVGQRVATVKAWDPDAGSNGQVVFSLASGNIAGAFEIVTTNDSIGEVFVARPLDREELDHYILQVVASDRGTPPRKKDHILQVTILDINDNPPVIESPFGYNVSVNENVGGGTAVVQVRATDRDIGINSVLSYYITEGNKDMAFRMDRISGEIATRPAPPDRERQSFYHLVATVEDEGTPTLSATTHVYVTIVDENDNAPMFQQPHYEVLLDEGPDTLNTSLITIQALDLDEGPNGTVTYAIVAGNIVNTFRIDRHMGVITAAKELDYEISHGRYTLIVTATDQCPILSHRLTSTTTVLVNVNDINDNVPTFPRDYEGPFEVTEGQPGPRVWTFLAHDRDSGPNGQVEYSIMDGDPLGEFVISPVEGVLRVRKDVELDRETIAFYNLTICARDRGMPPLSSTMLVGIRVLDINDNDPVLLNLPMNITISENSPVSSFVAHVLASDADSGCNARLTFNITAGNRERAFFINATTGIVTVNRPLDRERIPEYKLTISVKDNPENPRIARRDYDLLLIFLSDENDNHPLFTKSTYQAEVMENSPAGTPLTVLNGPILALDADQDIYAVVTYQLLGAQSGLFDINSSTGVVTVRSGVIIDREAFSPPILELLLLAEDIGLLNSTAHLLITILDDNDNRPTFSPATLTVHLLENCPPGFSVLQVTATDEDSGLNGELVYRIEAGAQDRFLIHLVTGVIRVGNATIDREEQESYRLTVVATDRGTVPLSGTAIVTILIDDINDSRPEFLNPIQTVSVLESAEPGTVIANITAIDHDLNPKLEYHIVGIVAKDDTDRLVPNQEDAFAVNINTGSVMVKSPMNRELVATYEVTLSVIDNASDLPERSVSVPNAKLTVNVLDVNDNTPQFKPFGITYYMERILEGATPGTTLIAVAAVDPDKGLNGLVTYTLLDLVPPGYVQLEDSSAGKVIANRTVDYEEVHWLNFTVRASDNGSPPRAAEIPVYLEIVDINDNNPIFDQPSYQEAVFEDVPVGTIILTVTATDADSGNFALIEYSLGDGESKFAINPTTGDIYVLSSLDREKKDHYILTALAKDNPGDVASNRRENSVQVVIQVLDVNDCRPQFSKPQFSTSVYENEPAGTSVITMMATDQDEGPNGELTYSLEGPGVEAFHVDMDSGLVTTQRPLQSYEKFSLTVVATDGGEPPLWGTTMLLVEVIDVNDNRPVFVRPPNGTILHIREEIPLRSNVYEVYATDKDEGLNGAVRYSFLKTAGNRDWEFFIIDPISGLIQTAQRLDRESQAVYSLILVASDLGQPVPYETMQPLQVALEDIDDNEPLFVRPPKGSPQYQLLTVPEHSPRGTLVGNVTGAVDADEGPNAIVYYFIAAGNEEKNFHLQPDGCLLVLRDLDREREAIFSFIVKASSNRSWTPPRGPSPTLDLVADLTLQEVRVVLEDINDQPPRFTKAEYTAGVATDAKVGSELIQVLALDADIGNNSLVFYSILAIHYFRALANDSEDVGQVFTMGSMDGILRTFDLFMAYSPGYFVVDIVARDLAGHNDTAIIGIYILRDDQRVKIVINEIPDRVRGFEEEFIHLLSNITGAIVNTDNVQFHVDKKGRVNFAQTELLIHVVNRDTNRILDVDRVIQMIDENKEQLRNLFRNYNVLDVQPAISVRLPDDMSALQMAIIVLAILLFLAAMLFVLMNWYYRTVHKRKLKAIVAGSAGNRGFIDIMDMPNTNKYSFDGANPVWLDPFCRNLELAAQAEHEDDLPENLSEIADLWNSPTRTHGTFGREPAAVKPDDDRYLRAAIQEYDNIAKLGQIIREGPIKGSLLKVVLEDYLRLKKLFAQRMVQKASSCHSSISELIQTELDEEPGDHSPGQGSLRFRHKPPVELKGPDGIHVVHGSTGTLLATDLNSLPEEDQKGLGRSLETLTAAEATAFERNARTESAKSTPLHKLRDVIMETPLEITEL

SEQ ID NO: 34150 - protein, 533 aa, Homo sapiens [sequence omitted]

SEQ ID NO: 34151 - protein, 249 aa, Homo sapiens
LQTAESDGAMYALFLLASLLGAALAGPVLGLKECTRGSAVWCQNVKTASDCGAVKHCLQTVWNKPTVKSLPCDICKDVVTAAGDMLKDNATEEEILVYLEVSPELVCSMLHLCSGTRLPALTVHVTQPKDGGFCEVCKKLVGYLDRNLEKNSTKQEILAALEKGCSFLPDPYQKQCDQFVAEYEPVLIEILVEVMDPSFVCLKIGACPSAHKPLLGTEKCIWGPSYWCQNTETAAQCNAVEHCKRHVWN

SEQ ID NO: 34152 - protein, 536 aa, Homo sapiens
LQTAESDGAMYALFLLASLLGAALAGPVLGLKECTRGSAVWCQNVKTASDCGAVKHCLQTVWNKPTVKSLPCDICKDVVTAAGDMLKDNATEEEILVYLEKTCDWLPKPNMSASCKEIVDSYLPVILDIIKGEMSRPGEVCSALNLCESLQKHLAELNHQKQLESNKIPELDMTEVVAPFMANIPLLLYPQDGPRSKPQPKDNGDVCQDCIQMVTDIQTAVRTNSTFVQALVEHVKEECDRLGPGMADICKNYISQYSEIAIQMMMHMSLQQPKEICALVGFCDEVKEMPMQTLVPAKVASKNVIPALELVEPIKKHEVPAKSDVYCEVCEFLVKEVTKLIDNNKTEKEILDAFDKMCSKLPKSLSEECQEVVDTYGSSILSILLEEVSPELVCSMLHLCSGTRLPALTVHVTQPKDGGFCEVCKKLVGYLDRNLEKNSTKQEILAALEKGCSFLPDPYQKQCDQFVAEYEPVLIEILVEVMDPSFVCLKIGACPSAHKPLLGTEKCIWGPSYWCQNTETAAQCNAVEHCKRHVWN

SEQ ID NO: 34153 - protein, 39 aa, Homo sapiens
LTRSYLKLLLLLGLESTYLFHLSQLEFWNFPPRGGGGGC

SEQ ID NO: 34154 - protein, 26 aa, Homo sapiens
LFSFLLLLVLKYIHTQIQIDRSKSMK

SEQ ID NO: 34155 - protein, 370 aa, Homo sapiens
LQGIIGISFGESVMEVLRPQLIRIDGRNYRKNPVQEQTYQHEEDEEDFYQGSMECADEPCDAYEVEQTPQGFRSTLRAPSLLYKHIVGKRGDTRKKIEMETKTSISIPKPGQDGEIVITGQHRNGVISARTRIDVLLDTFRRKQPFTHFLAFFLNEVEVQEGFLRFQEEVLAKCSMDHGVDSSIFQNPKKLHLTIGMLVLLSEEEIQQTCEMLQQCKEEFINDISGGKPLEVEMAGIEYMNDDPGMVDVLYAKVHMKDGSNRLQELVDRVLERFQASGLIVKEWNSVKLHATVMNTLFRKDPNAEGRYNLYTAEGKYIFKERESFDGRNILKLFENFYFGSLKLNSIHISQRFTVDSFGNYASCGQIDFS

SEQ ID NO: 34156 - protein, 275 aa, Homo sapiens
METKTSISIPKPGQDGEIVITGQHRNGVISARTRIDVLLDTFRRKQPFTHFLAFFLNEVEVQEGFLRFQEEVLAKCSMDHGVDSSIFQNPKKLHLTIGMLVLLSEEEIQQTCEMLQQCKEEFINDISGGKPLEVEMAGIEYMNDDPGMVDVLYAKVHMKDGSNRLQELVDRVLERFQASGLIVKEWNSVKLHATVMNTLFRKDPNAEGRYNLYTAEGKYIFKERESFDGRNILKSFALLPRLEYNDAISAHCNLCLPGSSDSPASASQVAGITVV

SEQ ID NO: 34157 - protein, 47 aa, Homo sapiens
VCLLFVLYLVFLIGASLLTCCRQLSYRRMNVRVGRGGCQGSLGIFDT

SEQ ID NO: 34158 - protein, 479 aa, Homo sapiens
LDAMFRLNSLSALAELAVGSRWYHGGSQPIQIRRRLMMVAFLGASAVTASTGLLWKRAHAESPPCVDNLKSDIGDKGKNKDEGDVCNHEKKTADLAPHPEEKKKKRSGFRDRKVMEYENRIRAYSTPDKIFRYFATLKVISEPGEAEVFMTPEDFVRSITPNEKQPEHLGLDQYIIKRFDGKKISQEREKFADEGSIFYTLGECGLISFSDYIFLTTVLSTPQRNFEIAFKMFDLNGDGEVDMEEFEQVQSIIRSQTSMGMRHRDRPTTGNTLKSGLCSALTTYFFGADLKGKLTIKNFLEFQRKLQHDVLKLEFERHDPVDGRITERQFGGMLLAYSGVQSKKLTAMQRQLKKHFKEGKGLTFQEVENFFTFLKNINDVDTALSFYHMAGASLDKVTMQQVARTVAKVELSDHVCDVVFALFDCDGNGELSNKEFVSIMKQRLMRGLEKPKDMGFTRLMQAMWKCAQETAWDFALPKQ

SEQ ID NO: 34159 - protein, 298 aa, Homo sapiens
VLVTQAPWAFWARKRSSPGLYPAQLGAAASSGVVSPPGMGLLDLCEEVFGTADLYRVLGVRREASDGEVRRGYHKVSLQVHPDRVGEGDKEDATRRFQILGKVYSVLSDREQRAVYDEQGTVDEDSPVLTQDRDWEAYWRLLFKKISLEDIQAFEKTYKGSEEELADIKQAYLDFKGDMDQIMESVLCVQYTEEPRIRNIIQQAIDAGEVPSYNAFVKESKQKMNARKRRAQEEAKEAEMSRKELGLDEGVDSLKAAIQSRQKDRQKEMDNFLAQMEAKYCKSSKGGGKKSALKKEKK

SEQ ID NO: 34160 - protein, 186 aa, Homo sapiens
LYRLAVRPGVGLQVLSVFVLCPAKAVELVRAGSGALRGAARRRHHGPPHCFSTATLLCKAYRGGHLTIRLALGGCTNRPFYRIVAAHNKCPRDGRFVEQLGSYDPLPNSHGEKLVALNLDRIRHWIGCGAHLSKPMEKLLGLAGFFPLHPMMITNAERLRRKRAREVLLASQKTDAEATDTEATET

SEQ ID NO: 34161 - protein, 98 aa, Homo sapiens
LYRLAVRPGVGLQVLSVFVLCPAKAVELVRAGSGALRGAARRRHHGPPHYSPLQGLPWGPLNHPPCPGWLHQSAVLPHCGCSQQVSQGWPFRRAAGLL

SEQ ID NO: 34162 - protein, 40 aa, Homo sapiens
LYRLAVRPGVGLQVLSVFVLCPAKAVELLLSSARPTVGAT

SEQ ID NO: 34163 - protein, 66 aa, Homo sapiens
VLQKPSILQALVPRRNAENANTKGRCSFLVELTVRWGDREMTAEKLARSVVLSARTASREGKPSAC

SEQ ID NO: 34164 - protein, 67 aa, Homo sapiens
LLLATVVSSLLAFPPHSSSYSHIPPHSCITCPTDTLVIRGLLLEVDCAVCSLTQLAILVPEERGETC

SEQ ID NO: 34165 - protein, 62 aa, Homo sapiens [sequence omitted]

SEQ ID NO: 34166 - protein, 25 aa, Homo sapiens
LGALTLGTKSNLDLEPGEIKLGMLS

SEQ ID NO: 34167 - protein, 40 aa, Homo sapiens
LTLGTKSNLDLEPGDNLNAGWGRKLLRSCGSVRIIKLITV

SEQ ID NO: 34168 - protein, 364 aa, Homo sapiens
VEPRAIPPLPGRLGAHRVCARRVRGVPEPPSAEGLADARAALLRHRLPRVGRPAAAPGAPELGAPPRGVAPQQLLAEPRPGHPPLQSYLHLQSPLGLPAVAAVAARDRLSAPPGASAHGTRGVAPPRLRAAALSAVTLRRASGPGPLRARAHAPHPDSYGKCLQNRELPTARLQDTATATTEDPELLAFLSRYKFHLALENAICNDYMTEKLWRPMHLGAVPVYRGSPSVRDWMPNNHSVILIDDFESPQKLAEFIDFLDKNDEEYMKYLAYKQPGGITNQFLLDSLKHREWGVNDPLLPNYLNGFECFVCDYELARLDAEKAHAASPGDSPVFEPHIAQPSHMDCPVPTPGFGNVEEIPENDR

SEQ ID NO: 34169 - protein, 120 aa, Homo sapiens
LMGEAAPQPPRGPSRRALRPGPKSRRLAKITACTALLGEARSRLFPRPEILARHGRPERPGHPQPRLAPQAPGLPSTPGRRPRPRIRGGGPGPGGCGPHGADVCRVGGRRALLIRGFGPF

SEQ ID NO: 34170 - protein, 196 aa, Homo sapiens
LDRHPRGTPGTGRLDSVQPPGSPGSPGSPGRGRQTLGSWGRRASGPGISGPRHSPVAAAGGREPALRGQVDPGPGSGAAVSALCCDPRRLLYIRARPGAAPPSPARLPPLSCSAQRPGPRVLPQRSQRFGGSAISSGGDPTASGLRNREACKFSVLPPMHLAGGLPQCKESPNCREERRRTGDSLPRPALKPPGVL

SEQ ID NO: 34171 - protein, 816 aa, Homo sapiens
VMIPLEKWGKKDTEAMKRALASIDSKLNQAKGWLRDPSASPGDAGEQAIRQILDEAGKVGELCAGKERREILGTCKMLGQMTDQVADLRARGQGSSPVAMQKAQQVSQGLDVLTAKVENAARKLEAMTNSKQSIAKKIDAAQNWLADPNGGPEGEEQIRGALAEARKIAELCDDPKERDDILRSLGEISALTSKLADLRRQGKGDSPEARALAKQVATALQNLQTKTNRAVANSRPAKAAVHLEGKIEQAQRWIDNPTVDDRGVGQAAIRGLVAEGHRLANVMMGPYRQDLLAKCDRVDQLTAQLADLAARGEGESPQARALASQLQDSLKDLKARMQEAMTQEVSDVFSDTTTPIKLLAVAATAPPDAPNREEVFDERAANFENHSGKLGATAEKAAAVGTANKSTVEGIQASVKTARELTPQVVSAARILLRNPGNQAAYEHFETMKNQWIDNVEKMTGLVDEAIDTKSLLDASEEAIKKDLDKCKVAMANIQPQMLVAGATSIARRANRILLVAKREVENSEDPKFREAVKAASDELSKTISPMVMDAKAVAGNISDPGLQKSFLDSGYRILGAVAKVREAFQPQEPDFPPPPPDLEQLRLTDELAPPKPPLPEGEVPPPRPPPPEEKDEEFPEQKAGEVINQPMMMAARQLHDEARKWSSKGNDIIAAAKRMALLMAEMSRLVRGGSGTKRALIQCAKDIAKASDEVTRLAKEVAKQCTDKRIRTNLLQVCERIPTISTQLKILSTVKATMLGRTNISDEESEQATEMLVHNAQNLMQSVKETVREAEAASIKIRTDAGFTLRWVRKTPWYQ

SEQ ID NO: 34172 - protein, 452 aa, Homo sapiens
LGTPAAGPRGLLGFSSFGRRGSGAESLTGTGVGKMIHSLFLINCSGDIFLEKHWKSVVSQSVCDYFFEAQEKAADVENVPPVISTPHHYLISIYRDKLFFVSVIQTEVPPLFVIEFLHRVADTFQDYFGECSEAAIKDNVVIVYELLEEMLDNGFPLATESNILKELIKPPTILRSVVNSITGSSNVGDTLPTGQLSNIPWRRAGVKYTNNEAYFDVVEEIDAIIDKSGSTVFAEIQGVIDACIKLSGMPDLSLSFMNPRLLDDVSFHPCIRFKRWESERVLSFIPPDGNFRLISYRVSSQNLVAIPVYVKHSISFKENSSCGRFDITIGPKQNMGKTIEGITVTVHMPKVVLNMNLTPTQGSYTFDPVTKVLTWDVGKITPQKLPSLKGLVNLQSGAPKPEENPSLNIQFKIQQLAISGLKVNRLDMYGEKYKPFKGVKYVTKAGKFQVRT

SEQ ID NO: 34173 - protein, 7 aa, Homo sapiens
LAQVLGK

SEQ ID NO: 34174 - protein, 293 aa, Homo sapiens [sequence omitted]

SEQ ID NO: 34175 - protein, 1784 aa, Homo sapiens
LSTMVKLANPLYTEWILEAIQKIKKQKQRPSEERICHAVSTSHGLDKKTVSEQLELSVQDGSVLKVTNKGLASYKDPDNPGRFSSVKPGTFPKSAKGSRGSCNDLRNVDWNKLLRRAIEGLEEPNGSSLKNIEKYLRSQSDLTSTTNNPAFQQRLRLGAKRAVNNGRLLKDGPQYRVNYGSLDGKGAPQYPSAFPSSLPPVSLLPHEKDQPRADPIPICSFCLGTKESNREKKPEELLSCADCGSSGHPSCLKFCPELTTNVKALRWQCIECKTCSACRVQGRNADNMLFCDSCDRGFHMECCDPPLSRMPKGMWICQVCRPKKKGRKLLHEKAAQIKRRYAKPIGRPKNKLKQRLLSVTSDEGSMNAFTGRGSPDTEIKINIKQESADVNVIGNKDVVTEEDLDVFKQAQELSWEKIECESGVEDCGRYPSVIEFGKYEIQTWYSSPYPQEYARLPKLYLCEFCLKYMKSKNILLRHSKKCGWFHPPANEIYRRKDLSVFEVDGNMSKIYCQNLCLLAKLFLDHKTLYYDVEPFLFYVLTKNDEKGCHLVGYFSKEKLCQQKYNVSCIMIMPQHQRQGFGRFLIDFSYLLSRREGQAGSPEKPLSDLGRLSYLAYWKSVILEYLYHHHERHISIKAISRATGMCPHDIATTLQHLHMIDKRDGRFVIIRREKLILSHMEKLKTCSRANELDPDSLRWTPILISNAAVSEEEREAEKEAERLMEQASCWEKEEQEILSTRANSRQSPAKVQSKNKYLHSPESRPVTGERGQLLELSKESSEEEEEEEDEEEEEEEEEEEEDEEEEEEEEEEEEEENIQSSPPRLTKPQSVAIKRKRPFVLKKKRGRKRRRINSSVTTETISETTEVLNEPFDNSDEERPMPQLEPTCEIEVEEDGRKPVLRKAFQHQPGKKRQTEEEEGKDNHCFKNADPCRNNMNDDSSNLKEGSKDNPEPLKCKQVWPKGTKRGLSKWRQNKERKTGFKLNLYTPPETPMEPDEQVTVEEQKETSEGKTSPSPIRIEEEVKETGEALLPQEENRREETCAPVSPNTSPGEKPEDDLIKPEEEEEEEEEEEEEEEEEEGEEEEGGGNVEKDPDGAKSQEKEEPEISTEKEDSARLDDHEEEEEEDEEPSHNEDHDADDEDDSHMESAEVEKEELPRESFKEVLENQETFLDLNVQPGHSNPEVLMDCGVDLTASCNSEPKELAGDPEAVPESDEEPPPGEQAQKQDQKNSKEVDTEFKEGNPATMEIDSETVQAVQSLTQESSEQDDTFQDCAETQEACRSLQNYTRADQSPQIATTLDDCQQSDHSSPVSSVHSHPGQSVRSVNSPSVPALENSYAQISPDQSAISVPSLQNMETSPMMDVPSVSDHSQQVVDSGFSDLGSIESTTENYENPSSYDSTMGGSICGNGSSQNSCSYSNLTSSSLTQSSCAVTQQMSNISGSCSMLQQTSISSPPTCSVKSPQGCVVERPPSSSQQLAQCSMAANFTPPMQLAEIPETSNANIGLYERMGQSDFGAGHYPQPSATFSLAKLQQLTNTLIDHSLPYSHSAAVTSYANSASLSTPLSNTGLVQLSQSPHSVPGGPQAQATMTPPPNLTPPPMNLPPPLLQRNMAASNIGISHSQRLQTQIASKGHISMRTKSASLSPAAATHQSQIYGRSQTVAMQGPARTLTMQRGMNMSVNLMPAPAYNVNSVNMNMNTLNAMNGYSMSQPMMNSGYHSNHGYMNQTPQYPMQMQMGMMGTQPYAQQPMQTPPHGNMMYTAPGHHGYMNTGMSKQSLNGSYMRR

SEQ ID NO: 34176 - protein, 2076 aa, Homo sapiens
LSTMVKLANPLYTEWILEAIQKIKKQKQRPSEERICHAVSTSHGLDKKTVSEQLELSVQDGSVLKVTNKGLASYKDPDNPGRFSSVKPGTFPKSAKGSRGSCNDLRNVDWNKLLRRAIEGLEEPNGSSLKNIEKYLRSQSDLTSTTNNPAFQQRLRLGAKRAVNNGRLLKDGPQYRVNYGSLDGKGAPQYPSAFPSSLPPVSLLPHEKDQPRADPIPICSFCLGTKESNREKKPEELLSCADCGSSGHPSCLKFCPELTTNVKALRWQCIECKTCSACRVQGRNADNMLFCDSCDRGFHMECCDPPLSRMPKGMWICQVCRPKKKGRKLLHEKAAQIKRRYAKPIGRPKNKLKQRLLSVTSDEGSMNAFTGRGSPGRGQKTKVCTTPSSGHAASGKDSSSRLAVTDPTRPGATTKITTTSTYISASTLKVNKKTKGLIDGLTKFFTPSPDGRRSRGEIIDFSKHYRPRKKVSQKQSCTSHVLATGTTQKLKPPPSSLPPPTPISGQSPSSQKSSTATSSPSPQSSSSQCSVPSLSSLTTNSQLKALFDGLSHIYTTQGQSRKKGHPSYAPPKRMRRKTELSSTAKSKAHFFGKRDIRSRFISHSSSSSWGMARGSIFKAIAHFKRTTFLKKHRMLGRLKYKVTPQMGTPSPGKGSLTDGRIKPDQDDDTEIKINIKQESADVNVIGNKDVVTEEDLDVFKQAQELSWEKIECESGVEDCGRYPSVIEFGKYEIQTWYSSPYPQEYARLPKLYLCEFCLKYMKSKNILLRHSKKCGWFHPPANEIYRRKDLSVFEVDGNMSKIYCQNLCLLAKLFLDHKTLYYDVEPFLFYVLTKNDEKGCHLVGYFSKEKLCQQKYNVSCIMIMPQHQRQGFGRFLIDFSYLLSRREGQAGSPEKPLSDLGRLSYLAYWKSVILEYLYHHHERHISIKAISRATGMCPHDIATTLQHLHMIDKRDGRFVIIRREKLILSHMEKLKTCSRANELDPDSLRWTPILISNAAVSEEEREAEKEAERLMEQASCWEKEEQEILSTRANSRQSPAKVQSKNKYLHSPESRPVTGERGQLLELSKESSEEEEEEEDEEEEEEEEEEEEDEEEEEEEEEEEEEENIQSSPPRLTKPQSVAIKRKRPFVLKKKRGRKRRRINSSVTTETISETTEVLNEPFDNSDEERPMPQLEPTCEIEVEEDGRKPVLRKAFQHQPGKKRQTEEEEGKDNHCFKNADPCRNNMNDDSSNLKEGSKDNPEPLKCKQVWPKGTKRGLSKWRQNKERKTGFKLNLYTPPETPMEPDEQVTVEEQKETSEGKTSPSPIRIEEEVKETGEALLPQEENRREETCAPVSPNTSPGEKPEDDLIKPEEEEEEEEEEEEEEEEEEGEEEEGGGNVEKDPDGAKSQEKEEPEISTEKEDSARLDDHEEEEEEDEEPSHNEDHDADDEDDSHMESAEVEKEELPRESFKEVLENQETFLDLNVQPGHSNPEVLMDCGVDLTASCNSEPKELAGDPEAVPESDEEPPPGEQAQKQDQKNSKEVDTEFKEGNPATMEIDSETVQAVQSLTQESSEQDDTFQDCAETQEACRSLQNYTRADQSPQIATTLDDCQQSDHSSPVSSVHSHPGQSVRSVNSPSVPALENSYAQISPDQSAISVPSLQNMETSPMMDVPSVSDHSQQVVDSGFSDLGSIESTTENYENPSSYDSTMGGSICGNGSSQNSCSYSNLTSSSLTQSSCAVTQQMSNISGSCSMLQQTSISSPPTCSVKSPQGCVVERPPSSSQQLAQCSMAANFTPPMQLAEIPETSNANIGLYERMGQSDFGAGHYPQPSATFSLAKLQQLTNTLIDHSLPYSHSAAVTSYANSASLSTPLSNTGLVQLSQSPHSVPGGPQAQATMTPPPNLTPPPMNLPPPLLQRNMAASNIGISHSQRLQTQIASKGHISMRTKSASLSPAAATHQSQIYGRSQTVAMQGPARTLTMQRGMNMSVNLMPAPAYNVNSVNMNMNTLNAMNGYSMSQPMMNSGYHSNHGYMNQTPQYPMQMQMGMMGTQPYAQQPMQTPPHGNMMYTAPGHHGYMNTGMSKQSLNGSYMRR

SEQ ID NO: 34177 - protein, 1893 aa, Homo sapiens
LSTMVKLANPLYTEWILEAIQKIKKQKQRPSEERICHAVSTSHGLDKKTVSEQLELSVQDGSVLKVTNKGLASYKDPDNPGRFSSVKPGTFPKSAKGSRGSCNDLRNVDWNKLLRRAIEGLEEPNGSSLKNIEKYLRSQSDLTSTTNNPAFQQRLRLGAKRAVNNGRLLKDGPQYRVNYGSLDGKGAPQYPSAFPSSLPPVSLLPHEKDQPRADPIPICSFCLGTKESNREKKPEELLSCADCGSSGHPSCLKFCPELTTNVKALRWQCIECKTCSACRVQGRNADNMLFCDSCDRGFHMECCDPPLSRMPKGMWICQVCRPKKKGRKLLHEKAAQIKRRYAKPIGRPKNKLKQRLLSVTSDEGSMNAFTGRGSPGRGQKTKVCTTPSSGHAASGKDSSSRLAVTDPTRPGATTKITTTSTYISASTLKVNKKTKGLIDGLTKFFTPSPDGRRSRGEIIDFSKHYRPRKKVSQKQSCTSHVLATDTEIKINIKQESADVNVIGNKDVVTEEDLDVFKQAQELSWEKIECESGVEDCGRYPSVIEFGKYEIQTWYSSPYPQEYARLPKLYLCEFCLKYMKSKNILLRHSKKCGWFHPPANEIYRRKDLSVFEVDGNMSKIYCQNLCLLAKLFLDHKTLYYDVEPFLFYVLTKNDEKGCHLVGYFSKEKLCQQKYNVSCIMIMPQHQRQGFGRFLIDFSYLLSRREGQAGSPEKPLSDLGRLSYLAYWKSVILEYLYHHHERHISIKAISRATGMCPHDIATTLQHLHMIDKRDGRFVIIRREKLILSHMEKLKTCSRANELDPDSLRWTPILISNAAVSEEEREAEKEAERLMEQASCWEKEEQEILSTRANSRQSPAKVQSKNKYLHSPESRPVTGERGQLLELSKESSEEEEEEEDEEEEEEEEEEEEDEEEEEEEEEEEEEENIQSSPPRLTKPQSVAIKRKRPFVLKKKRGRKRRRINSSVTTETISETTEVLNEPFDNSDEERPMPQLEPTCEIEVEEDGRKPVLRKAFQHQPGKKRQTEEEEGKDNHCFKNADPCRNNMNDDSSNLKEGSKDNPEPLKCKQVWPKGTKRGLSKWRQNKERKTGFKLNLYTPPETPMEPDEQVTVEEQKETSEGKTSPSPIRIEEEVKETGEALLPQEENRREETCAPVSPNTSPGEKPEDDLIKPEEEEEEEEEEEEEEEEEEGEEEEGGGNVEKDPDGAKSQEKEEPEISTEKEDSARLDDHEEEEEEDEEPSHNEDHDADDEDDSHMESAEVEKEELPRESFKEVLENQETFLDLNVQPGHSNPEVLMDCGVDLTASCNSEPKELAGDPEAVPESDEEPPPGEQAQKQDQKNSKEVDTEFKEGNPATMEIDSETVQAVQSLTQESSEQDDTFQDCAETQEACRSLQNYTRADQSPQIATTLDDCQQSDHSSPVSSVHSHPGQSVRSVNSPSVPALENSYAQISPDQSAISVPSLQNMETSPMMDVPSVSDHSQQVVDSGFSDLGSIESTTENYENPSSYDSTMGGSICGNGSSQNSCSYSNLTSSSLTQSSCAVTQQMSNISGSCSMLQQTSISSPPTCSVKSPQGCVVERPPSSSQQLAQCSMAANFTPPMQLAEIPETSNANIGLYERMGQSDFGAGHYPQPSATFSLAKLQQLTNTLIDHSLPYSHSAAVTSYANSASLSTPLSNTGLVQLSQSPHSVPGGPQAQATMTPPPNLTPPPMNLPPPLLQRNMAASNIGISHSQRLQTQIASKGHISMRTKSASLSPAAATHQSQIYGRSQTVAMQGPARTLTMQRGMNMSVNLMPAPAYNVNSVNMNMNTLNAMNGYSMSQPMMNSGYHSNHGYMNQTPQYPMQMQMGMMGTQPYAQQPMQTPPHGNMMYTAPGHHGYMNTGMSKQSLNGSYMRR

SEQ ID NO: 34178 - protein, 140 aa, Homo sapiens
LANLARLIQAKKALDLGTFTGYSALALALALPADGRVVTCEVDAQPPELGRPLWRQAEAEHKIDLRLKPALETLDELLAAGEAGTFDVAVVDADKENCSAYYERCLQLLRPGGILAVLRVRDPLRGRRKHPVGPGPHLFP

SEQ ID NO: 34179 - protein, 92 aa, Homo sapiens
MVGRVSPKFGHLQIKTSAESVRLSLSKELLREFPSKIASTAVNRLFPAPAFEKSWSPECKGVRMLAGGRMCRRMRKRKNREIWMQRHRENAM

SEQ ID NO: 34180 - protein, 45 aa, Homo sapiens
MDICDIPPQHPTKLGCKTGYGGPMTSFLDEETKAQGLQATISNSQ

SEQ ID NO: 34181 - protein, 49 aa, Homo sapiens
LCSDFVLLLGLPPPPPDALSRLESWSFCRGLSRRKRRRPVGVGPMLQGV

SEQ ID NO: 34182 - protein, 365 aa, Homo sapiens
LLSSWCEELGRLLLLRHQKSRQSDPPGKLPMQPPLSSMSSMKPTLSHSDGSFPYDSVPWQQNTNQPPGSLSVVTTVWGVTNTSQSQVLGNPMANANNPMNPGGNPMASGMTTSNPGLNSPQFAGQQQQFSAKAGPAQPYIQQSMYGRPNYPGSGGFGASYPGGPNAPAGMGIPPHTRPPADFTQPAAAAAAAAVAAAAATATATATATVAALQETQNKDINQYGPVCSSFQMGPTQAYNSQFMNQPGPRGPASMGGSMNPASMAAGMTPSGMSGPPMGMNQPRPPGISPFGTHGQRMPQQTYPGPRPQSLPIQNIKRPYPGEVSAAVGAWEVGTGTPGLEDMGRGYGFGRGVAWTPAHLDKEAGA

SEQ ID NO: 34183 - protein, 273 aa, Homo sapiens
LCLRGGLPFLLGDWWGRGPGHLLSQDVPEAPPPSSDRAQAWGTERAGVHPTKVIVPLVGGRGHITCQKQTGAATSNFAPSHSLFKQQQFKAMKSPGEKERCSWTASKPFLSVCSVFLLVPLLPPLQDFRGTPTSLCPSSLCPIRWQGQCVERPGRCRNQSPGQWCLSSPSLCPCAPSCPRLQPRPWTCAPVCTCRHGGEGGVFLGLPQTLPLAASLPCLHSSTITISPKLLLTQAKAASGLPSTALLHLAYHSPGPPGEPVLCSLCFRLVCAP

SEQ ID NO: 34184 - protein, 11 aa, Homo sapiens
LFNIVFLIGII

SEQ ID NO: 34185 - protein, 16 aa, Homo sapiens
VFGSWGRVFHGLVLFS

SEQ ID NO: 34186 - protein, 15 aa, Homo sapiens
VNCKTIFLLLSVMMH

SEQ ID NO: 34187 - protein, 32 aa, Homo sapiens
LITFDLMTAFVFLITDRITLKVISDLLPYPYG

SEQ ID NO: 34188 - protein, 387 aa, Homo sapiens
LELLGPNKKKPAMLLFLLSALVLLTQPLGYLEAEMKTYSHRTMPSACTLVMCSSVESGLPGRDGRDGREGPRGEKGDPGLPGAAGQAGMPGQAGPVGPKGDNGSVGEPGPKGDTGPSGPPGPPGVPGPAGREGPLGKQGNIGPQGKPGPKGEAGPKGEVGAPGMQGSAGARGLAGPKGERGVPGERGVPGNTGAAGSAGAMGPQGSPGARGPPGLKGDKGIPGDKGAKGESGLPDVASLRQQVEALQGQVQHLQAAFSQYKKVELFPNGQSVGEKIFKTAGFVKPFTEAQLLCTQAGGQLASPRSAAENAALQQLVVAKNEAAFLSMTDSKTEGKFTYPTGESLVYSNWAPGEPNDDGGSEDCVEIFTNGKWNDRACGEKRLVVCEF

SEQ ID NO: 34189 - protein, 127 aa, Homo sapiens
MVKSEASNAATAYFRPARPLPSLVTVLGLGYFAWVVFWPQSIPYQNLGPLGPFTQYLVDHHHTLLCNGYWLAWLIHVGESLYAIVLCKHKGITSGRAQLLWFLQTFFFGIASLTILIAYKRKRQKQT

SEQ ID NO: 34190 - protein, 579 aa, Homo sapiens
LGQPRPRSFPPGADGCCARGSPVPRVPRGPREREWDPAPRQNPGAAPGTPAERATPAHVPFRPSRPESPWPDLTMSYPGYPPPPGGYPPAAPGGGPWGGAAYPPPPSMPPIGLDNVATYAGQFNQDYLSGMAANMSGTFGGANMPNLYPGAPGAGYPPVPPGGFGQPPSAQQPVPPYGMYPPPGGNPPSRMPSYPPYPGAPVPGQPMPPPGQQPPGAYPGQPPVTYPGQPPVPLPGQQQPVPSYPGYPGSGTVTPAVPPTQFGSRGTITDAPGFDPLRDAEVLRKAMKGFGTDEQAIIDCLGSRSNKQRQQILLSFKTAYGKDLIKDLKSELSGNFEKTILALMKTPVLFDIYEIKEAIKGVGTDEACLIEILASRSNEHIRELNRAYKAEFKKTLEEAIRSDTSGHFQRLLISLSQGNRDESTNVDMSLAQRDAQELYAAGENRLGTDESKFNAVLCSRSRAHLVAVFNEYQRMTGRDIEKSICREMSGDLEEGMLAVVKCLKNTPAFFAERLNKAMRGAGTKDRTLIRIMVSRSETDLLDIRSEYKRMYGKSLYHDISGDTSGDYRKILLKICGGND

SEQ ID NO: 34191 - protein, 12 aa, Homo sapiens
LPRLILWPPPGN

SEQ ID NO: 34192 - protein, 152 aa, Homo sapiens
LALLLILISLPLQGDAGVTGRKIIVDTYGGWGAHGGGAFSGKDYTKVDRSAAYAARWVAKSLVKAGLCRRVLVQVSYAIGVAEPLSISIFTYGTSQKTERELLDVVHKNFDLRPGVIVRDLDLKKPIYQKTACYGHFGRSEFPWEVPRKLVF

SEQ ID NO: 34193 - protein, 105 aa, Homo sapiens
LPASWIPRSHPALPCSLPELTRGSGGDIVCAKGSDPCGVFLQLKSKWDESIFTKGCIQALESWLPRNIYIVAGVFIAISLLQIFGIFLARTLISDIEAVKAGHHF

SEQ ID NO: 34194 - protein, 17 aa, Homo sapiens
VSERFCLRLTLLHFLVP

SEQ ID NO: 34195 - protein, 161 aa, Homo sapiens
LLSGLKSTQPLNTRCLSVISLATKCAMPSFRMHLRAHGMVAMVFKTLDDSQHHQNLSLCTAALMYILSRDRLNMDLDRASLDLMIRLLELEQDASSAKLLNEKDMNKIKEKIRRLCETVHNKHLDLENITVGSFFLPSKMRITFRKSLVSCSSCVTVGKLF

SEQ ID NO: 34196 - protein, 15 aa, Homo sapiens
VVFPGRGLFIALQMC

SEQ ID NO: 34197 - protein, 106 aa, Homo sapiens
VSEAWLAVLSMVSWVVLASWSMAGEGRERGQVRQGPGTTVPVGLAWPGSPGGPAWGIVDRGLCRGEDVPGPQPGWGGEWEVCWGCPPPSSPTRPFCPASVAWSTTC

SEQ ID NO: 34198 - protein, 14 aa, Homo sapiens
MVSYTILLCLAYLT

SEQ ID NO: 34199 - protein, 29 aa, Homo sapiens
LYNLVVLIIFTMLCNRYHHLLPKPFHHPK

SEQ ID NO: 34200 - protein, 663 aa, Homo sapiens
VSAEPFYTSFPGVRQPLLLLLLLLPPPPPPSLRPSVSAPGTRAPPQPASMSGIKKQKTENQQKSTNVVYQAHHVSRNKRGQVVGTRGGFRGCTVWLTGLSGAGKTTISFALEEYLVSHAIPCYSLDGDNVRHGLNRNLGFSPGDREENIRRIAEVAKLFADAGLVCITSFISPFAKDRENARKIHESAGLPFFEIFVDAPLNICESRDVKGLYKRARAGEIKGFTGIDSDYEKPETPERVLKTNLSTVSDCVHQVVELLQEQNIVPYTIIKDIHELFVPENKLDHVRAEAETLPSLSITKLDLQWVQVLSEGWATPLKGFMREKEYLQVMHFDTLLDDGVINMSIPIVLPVSAEDKTRLEGCSKFVLAHGGRRVAILRDAEFYEHRKEERCSRVWGTTCTKHPHIKMVMESGDWLVGGDLQVLEKIRWNDGLDQYRLTPLELKQKCKEMNADAVFAFQLRNPVHNGHALLMQDTRRRLLERGYKHPVLLLHPLGGWTKDDDVPLDWRMKQHAAVLEEGVLDPKSTIVAIFPSPMLYAGPTEVQWHCRSRMIAGANFYIVGRDPAGMPHPETKKDLYEPTHGGKVLSMAPGLTSVEIIPFRVAAYNKAKKAMDFYDPARHNEFDFISGTRMRKLAREGENPPDGFMAPKAWKVLTDYYRSLEKN

SEQ ID NO: 34201 - protein, 668 aa, Homo sapiens
VSAEPFYTSFPGVRQPLLLLLLLLPPPPPPSLRPSVSAPGTRAPPQPASMSGIKKQKTENQQKSTNVVYQAHHVSRNKRGQVVGTRGGFRGCTVWLTGLSGAGKTTISFALEEYLVSHAIPCYSLDGDNVRHGLNRNLGFSPGDREENIRRIAEVAKLFADAGLVCITSFISPFAKDRENARKIHESAGLPFFEIFVDAPLNICESRDVKGLYKRARAGEIKGFTGIDSDYEKPETPERVLKTNLSTVSDCVHQVVELLQEQNIVPYTIIKDIHELFVPENKLDHVRAEAETLPSLSITKLDLQWVQVLSEGWATPLKGFMREKEYLQVMHFDTLLDGMALPDGVINMSIPIVLPVSAEDKTRLEGCSKFVLAHGGRRVAILRDAEFYEHRKEERCSRVWGTTCTKHPHIKMVMESGDWLVGGDLQVLEKIRWNDGLDQYRLTPLELKQKCKEMNADAVFAFQLRNPVHNGHALLMQDTRRRLLERGYKHPVLLLHPLGGWTKDDDVPLDWRMKQHAAVLEEGVLDPKSTIVAIFPSPMLYAGPTEVQWHCRSRMIAGANFYIVGRDPAGMPHPETKKDLYEPTHGGKVLSMAPGLTSVEIIPFRVAAYNKAKKAMDFYDPARHNEFDFISGTRMRKLAREGENPPDGFMAPKAWKVLTDYYRSLEKN

SEQ ID NO: 34202 - protein, 74 aa, Homo sapiens
LMKGRQTMWRCRGKLSFPLFAVVIVSCRKDGPDAAAAPAVIKNNSHYQTSKALELEKTTENKESNPFILQVNKL

SEQ ID NO: 34203 - protein, 111 aa, Homo sapiens
MGSHVAVFDDVIKVFSDMKVCKSSTLEKVKKRKKLLLFCLSEYKKYIILAEAKKILVSNVDQTIDDPYATFVKMLTVRTAATPLMTPPRTARRRTWCLSSGPLSLHPLRAK

SEQ ID NO: 34204 - protein, 320 aa, Homo sapiens
LLPLAMAQVLIVGAGMTGSLCAALLRRQTSGPLYLAVWDKAEDSGGRMTTACSPHNPQCTADLGAQYITCTPHYAKKHQRFYDELLAYGVLRPLSSPIEGMVMKEGDCNFVAPQGISSIIKHYLKESGAEVYFRHRVTQINLRDDKWEVSKQTGSPEQFDLIVLTMPVPEILQLQGDITTLISECQRQQLEAVSYSSRYALGLFYEAGTKIDVPWAGQYITSNPCIRFVSIDNKKRNIESSEIGPSLVIHTTVPFGVTYLEHSIEDVQELVFQQLENILPGLPQPIATKCQKWRHSQVPSAGVILGCAKSPWMMAIGFPI

SEQ ID NO: 34205 - protein, 347 aa, Homo sapiens
LLPLAMAQVLIVGAGMTGSLCAALLRRQTSGPLYLAVWDKAEDSGGRMTTACSPHNPQCTADLGAQYITCTPHYAKKHQRFYDELLAYGVLRPLSSPIEGMVMKEGDCNFVAPQGISSIIKHYLKESGAEVYFRHRVTQINLRDDKWEVSKQTGSPEQFDLIVLTMPVPEILQLQGDITTLISECQRQQLEAVSYSSRYALGLFYEAGTKIDVPWAGQYITSNPCIRFVSIDNKKRNIESSEIGPSLVIHTTVPFGVTYLEHSIEDVQELVFQQLENILPGLPQPIATKCQKWRHSQVTNAAANCPGQMTLHHKPFLACGGDGFTQSNFDGCITSALCVLEALKNYI

SEQ ID NO: 34206 - protein, 9 aa, Homo sapiens
VDSLIWKMK

SEQ ID NO: 34207 - protein, 395 aa, Homo sapiens
VWSSPAKHCQESCEAAPAMCEEEDSTALVCDNGSGLCKAGFAGDDAPRAVFPSIVGRPRHQGVMVGMGQKDSYVGDEAQSKRGILTLKYPIEHGIITNWDDMEKIWHHSFYNELRVAPEEHPTLLTEAPLNPKANREKMTQIMFETFNVPAMYVAIQAVLSLYASGRTTGIVLDSGDGVTHNVPIYEGYALPHAIMRLDLAGRDLTDYLMKILTERGYSFVTTAEREIVRDIKEKLCYVALDFENEMATAASSSSLEKSYELPDGQVITIGNERFRCPETLFQPSFIGMESAGIHETTYNSIMKCDIDIRKDLYANNVLSGGTTMYPGIADRMQKEITALAPSTMKIKIIAPPERKYSVWIGGSILASLSTFQQMWISKQEYDEAGPSIVHRKCF

SEQ ID NO: 34208 - protein, 117 aa, Homo sapiens
VWSSPAKHCQESCEAAPAMCEEEDSTALVCDNGSGLCKAGFAGDDAPRAVFPSIVGRPRHQGVMVGMGQKDSYVGDEAQSKRGILTLKYPIEHGIITNWDDMEKVWEVCCSLGPQDA

SEQ ID NO: 34209 - protein, 24 aa, Homo sapiens
LGWLCLLLLPIPLIVWGNSGNKFI

SEQ ID NO: 34210 - protein, 363 aa, Homo sapiens
VVGIRPPDKADQAPCRSPIRTPAPESWHCDSRQRPGRTAPGPKPVVFLQHGLLADSSNWVTNLANSSLGFILADAGFDVWMGNSRGNTWSRKHKTLSVSQDEFWAFSYDEMAKYDLPASINFILNKTGQEQVYYVGHSQGTTIGFIAFSQIPELAKRIKMFFALGPVASVAFCTSPMAKLGRLPDHLIKDLFGDKEFLPQSAFLKWLGTHVCTHVILKELCGNLCFLLCGFNERNLNMSRVDVYTTHSPAGTSVQNMLHWSQAVKFQKFQAFDWGSSAKNYFHYNQSYPPTYNVKDMLVPTAVWSGGHDWLADVYDVNILLTQITNLVFHESIPEWEHLDFIWGLDAPWRLYNKIINLMRKYQ

SEQ ID NO: 34211 - protein, 515 aa, Homo sapiens
LLGISKLKTKSTGTPAFQNCRETAIMSEVTKNSLEKILPQLKCHFTWNLFKEDSVSRDLEDRVCNQIEFLNTEFKATMYNLLAYIKHLDGNNEAALECLRQAEELIQQEHADQAEIRSLVTWGNYAWVYYHLGRLSDAQIYVDKVKQTCKKFSNPYSIEYSELDCEEGWTQLKCGRNERAKVCFEKALEEKPNNPEFSSGLAIAMYHLDNHPEKQFSTDVLKQAIELSPDNQYVKVLLGLKLQKMNKEAEGEQFVEEALEKSPCQTDVLRSAAKFYRRKGDLDKAIELFQRVLESTPNNGYLYHQIGCCYKAKVRQMQNTGESEASGNKEMIEALKQYAMDYSNKALEKGLNPLNAYSDLAEFLETECYQTPFNKEVPDAEKQQSHQRYCNLQKYNGKSEDTAVQHGLEGLSISKKSTDKEEIKDQPQNVSENLLPQNAPNYWYLQGLIHKQNGDLLQAAKCYEKELGRLLRDAPSGIGSIFLSASELEDGSEEMGQGAVSSSPRELLSNSEQLN

SEQ ID NO: 34212 - protein, 10 aa, Homo sapiens
LFLLGLGSLL

SEQ ID NO: 34213 - protein, 328 aa, Homo sapiens
LKLIQLVTSLWVSLMKLINGKKQTFPWFGMDIGGTLVKLVYFEPKDITAEEEQEEVENLKSIRKYLTSNTAYGKTGIRDVHLELKNLTMCGRKGNLHFIRFPSCAMHRFIQMGSEKNFSSLHTTLCATGGGAFKFEEDFRMIADLQLHKLDELDCLIQGLLYVDSVGFNGKPECYYFENPTNPELCQKKPYCLDNPYPMLLVNMGSGVSILAVYSKDNYKRVTGTSFGNMMSKEKRDSISKEDLARATLVTITNNIGSIARMCALNENIDRVVFVGNFLRINMVSMKLLAYAMDFWSKGQLKALFLEHEGYFGAVGALLELFKMTDDK

SEQ ID NO: 34214 - protein, 387 aa, Homo sapiens
LKLIQLVTSLWVSLMKLINGKKQTFPWFGMDIGGTLVKLVYFEPKDITAEEEQEEVENLKSIRKYLTSNTAYGKTGIRDVHLELKNLTMCGRKGNLHFIRFPSCAMHRFIQMGSEKNFSSLHTTLCATGGGAFKFEEDFRMIADLQLHKLDELDCLIQGLLYVDSVGFNGKPECYYFENPTNPELCQKKPYCLDNPYPMLLVNMGSGVSILAVYSKDNYKRVTGTSLGGGTFLGLCCLLTGCETFEEALEMAAKGDSTNVDKLVKDIYGGDYERFGLQGSAVASSFGNMMSKEKRDSISKEDLARATLVTITNNIGSIARMCALNENIDRVVFVGNFLRINMVSMKLLAYAMDFWSKGQLKALFLEHEGYFGAVGALLELFKMTDDK

SEQ ID NO: 34215 - protein, 32 aa, Homo sapiens
VIRAFMVPTLWMVSGGDLLSLINELHSCCFPS

SEQ ID NO: 34216 - protein, 34 aa, Homo sapiens
MKIHLPLSWLLMGVGVLLRFPGWKIISPGPSYIS

SEQ ID NO: 34217 - protein, 323 aa, Homo sapiens
MSGDEMIFDPTVSKKKKKKKKPFMLDEEADTQTEITQPSETKEVGPEPTEDKDLEADEEDTRKKDAAGDLDDLNFFNQKKKKKKTKKIFDIDEAEEGVKDLKIESDVQEPTEPENDLDIMLGNKKKKKKVKFPDEDEILEKDEVLEEEDSKKDDGISFSNQTGPAWAGSERDYTYEELLNRVFNIMREKNPGMVAGDIRKFVMKPPQVVRVGTKKTSFVNFTHICKLLHHQPKHLRAFLLAELGTSGSIDGNNQLVIKGRFQQKQIENVLRRYIKEYVTCHTCRLLDTILQKDMRIYFLQCETCHSRCSVASIKTSYQAVMGK

SEQ ID NO: 34218 - protein, 709 aa, Homo sapiens
LAPQLPAKMAENSESLGTVPEHERILQEIESTDTACVGPTLRSVYDDQPNAHKKFMEKLDACIRNHDKEIEKMCNFHHQGFVDAITELLKVRTDAEKLKVQVTDTNRRFQDAGKEVIVHTEDIIRCRIQQRNITTVVEKLQLCLPVLEMYSKLKEQMSAKRYYSALKTMEQLENVYFPWVSQYRFCQLMIENLPKLREDIKEISMSDLKDFLESIRKHSDKIGETAMKQAQHQKTFSVSLQKQNKMKFGKNMYINRDRIPEERNETVLKHSLEEEDENEEEGDEETFENYYRKQRKKQARLVLQPQSNMGYGFPVNRLFDLLFEIRDQYNETLLKKWAGVFRDIFEEDNYSPIPVVNEEEYKIVISKFPFQDPDLEKQSFPKKFPMSQSVPHIYIQVKEFIYASLKFSESLHRSSTEIDDMLRKSTNLLLTRTLSSCLLNLIRKPHIGLTELVQIIINTTHLEQACKYLEDFITNITNISQETVHTTRLYGLSTFKDARHAAEGEIYTKLNQKIDEFVQLADYDWTMSEPDGRASGYLMDLINFLRSIFQVFTHLPGKVAQTACMSACQHLSTSLMQMLLDSELKQISMGAVQQFNLDVIQCELFASSEPVPGFQGDTLQLAFIDLRQLLDLFMVWDWSTYLADYGQPASKYLRVNPNTALTLLEKMKDTSKKNNIFAQFRKNDRDKQKLIETVVKQLRSLVNGMSQHM

SEQ ID NO: 34219 - protein, 239 aa, Homo sapiens
LAEATPRGRSTVPEAVLEVRPAHRDPARARAPGGFLGKMKWVWALLLLAALGSGRAERDCRVSSFRVKENFDKARFSGTWYAMAKKDPEGLFLQDNIVAEFSVDETGQMSATAKGRVRLLNNWDVCADMVGTFTDTEDPAKFKMKYWGVASFLQKGNDDHWIVDTDYDTYAVQYSCRLLNLDGTCADSYSFVFSRDPNGLPPEAQKIVRQRQEELCLARQYRLIVHNGYCDGRSERNLL

SEQ ID NO: 34220 - protein, 128 aa, Homo sapiens
LRAAAAAAAAVVVVARLCGRAHGTCAAAALSGRGSSLQLPGKKETTTPGANLAHREEGKGCMVMEAMILILVMMNAVENPAKGKKGQLKMTYCSKNHFRKKNMERWPINKLQQNCWIGKKQEIEGFIS

SEQ ID NO: 34221 - protein, 862 aa, Homo sapiens
MASEVPYASGMPIKKIGHRSVDSSGGTTSSALKGAIQLGITHTVGSLSTKPESDVLMQDFHMVESIFFPSEGSNLTPAHHYNAFRFKTYAPVAFRYFWELFGIRPDDYLYSLCSEPLIELCSSGASGSLFYVSSDDEFIVKTVRHKEAEFLQKLLPGYYINLNQNPRTLLPKFYGLYCVQTGGKNIRIVVMNNLLPRSVKMHIKYDLKGSTYRRRASQKEREKPLPTFKDLDFLQDIPDGLFLDADVHNALCKTLQRDCLVLQSFKIMDYSLLMSIHNIDHAQREPLSSETQYSVDTRRPAPQKALYSTAMESIQGEARRGGTMETDDHMGGIPARNSKGERLLLYIGIIDILQSYRFVKKLEHSWKALIHDGDTVSVHRPGFYAEWFQRFMCNTVFKKIPLKPSPSKKLRSGSSFSQRAGSSGNSCITYQPLVSGEHKAQVTTKAEVEPGVHLGCPDVLPQTPPLEEISEGSPTPDPSFSPLVEETLQMLTTSVDNSEYMGNGDFLPTRLQAQQDAVNTVCHSKTRSNPENNVGLITLDNDCEVLTTLTPDTGRILSKLHTVQPKGKITFCMGIHVAHLALKHRQGNNHKIRIIAFVGNPVEDNEKNLVKLAKCLKKEKVNVDIINFGEEEVNTEKLTAFVNTLNGKDGTGSHLVTVPPGPSLADALISFPILAGEGGAMMGLGASDFEFGVDPSADPELALVLRVFMEEQRQRQEEEARQAAAASAAEAGIATTGTEDSDDALLKMTISQQEFGHTGLPDLSSMTEEEKIVCAMQMSLQGAEFGLAESADIDASSAMDTSEPAKEEDDYDVMQDPEFLQSVLENLPGVDPNNEAIRNAVGSLASQATKDSKKDKKEEDKK

SEQ ID NO: 34222 - protein, 20 aa, Homo sapiens
VALILVPAMKDMPASRLFDR

SEQ ID NO: 34223 - protein, 87 aa, Homo sapiens
MKARRNKKQIPSFRKLIKTSKVKLENKLKNKQFKQQSTLKKYRKEQRKLRQAVKDAVSKKPIPLENPKEKRPDLPRVGKDSSPIGLL

SEQ ID NO: 34224 - protein, 113 aa, Homo sapiens
LMLVMIFTLYSKSLPLDLACRVWDVFCRDGEEFLFRTGLGILRLYEDILLQMDFIHIAQFLTKLPEDITSEKLFSCIAAIQMQNSTKKWTQVFASVMKDIKEGDKNSSPALKS

SEQ ID NO: 34225 - protein, 13 aa, Homo sapiens
LKVLCLLWFSLCL

SEQ ID NO: 34226 - protein, 496 aa, Homo sapiens
MSYIDGEKVVKRSATLPLPARSSSLKSSSERNDWEPPDKKVDTRKYRAEPKSIYEYQPGKSSVLTNEKMSRDISPEEIDLKNEPWYKFFSELEFGKPSSAISPTPEISSETPGYIYSSNFHAVKRESDGAPGDLTSLENERQIYKSVLEGGDIPLQGLSGLKRPSSSASTKDSESPRHFIPADYLESTEEFIRRRHDDKEKLLADQRRLKREQEEADIAARRHTGVIPTHHQFITNERFGDLLNIDDTAKRKSGSEMRPARAKFDFKAQTLKELPLQKGDIVYIYKQIDQNWYEGEHHGRVGIFPRTYIELLPPAEKAQPKKLTPVQVLEYGEAIAKFNFNGDTQVEMSFRKGERITLLRQVDENWYEGRIPGTSRQGIFPITYVDVIKRPLVKNPVDYMDLPFSSSPSRSATASPQQPQAQQRRVTPDRSQTSQDLFSYQALYSYIPQNDDELELRDGDIVDVMEKCDDGWFVGTSRRTKQFGTFPGNYVKPLYL

SEQ ID NO: 34227 - protein, 582 aa, Homo sapiens
MPGRTWELCLLLLLGLGLGSQEALPPPCESEIYCHGELLNQVQMAKLYQDDKQFVDMPLSIAPEQVLQTFTELSRDHNHSIPREQLQAFVHEHFQAKGQELQPWTPADWKDSPQFLQKISDAKLRAWAGQLHQLWKKLGKKMKPEVLSHPERFSLIYSEHPFIVPGGRFVEFYYWDSYWVMEGLLLSEMAETVKGMLQNFLDLVKTYGHVPNGGRVYYLQRSQPPLLTLMMDCYLTHTNDTAFLQENIETLALELDFWTKNRTVSVSLEGKNYLLNRYYVPYGGPRPESYSKDVELADTLPEGDREALWAELKAGAESGWDFSSRWLIGGPNPNSLSGIRTSKLVPVDLNAFLCQAEELMSNFYSRLGNDSQATKYRILRSQRLAALNTVLWDEQTGAWFDYDLEKKKKNREFYPSNLTPLWAGCFSDPGVADKALKYLEDNRILTYQYGIPTSLQKTGQQWDFPNAWAPLQDLVIRGLAKAPLRRAQEVAFQLAQNWIRTNFDVYSQKSAMYEKYDVSNGGQPGGGGEYEVQEGFGWTNGVVLMLLDRYGDRLTSGPSWLSWSPTAWGHPSAQPPASLLPW

SEQ ID NO: 34228 - protein, 168 aa, Homo sapiens
MRTPQLALLQVFFLVFPDGVRPQPSSSPSGAVPTSLELQRGTDGGTLQSPSEATATRPAVPGLPTVVPTLVTPSAPGNRTVDLFPVLPICVCDLTPGACDINCCCDRDCYLLHPRTVFSFCLPGSVRSSSWVCVDNSVIFRSNSPFPSRVFMDSNGIRQFCVHVNNCE

SEQ ID NO: 34229 - protein, 551 aa, Homo sapiens
MPGRTWELCLLLLLGLGLGSQEALPPPCESEIYCHGELLNQVQMAKLYQDDKQFVDMPLSIAPEQVLQTFTELSRDHNHSIPREQLQAFVHEHFQAKGQELQPWTPADWKDSPQFLQKISDAKLRAWAGQLHQLWKKLGKKMKPEVLSHPERFSLIYSEHPFIVPGGRFVEFYYCYGHVPNGGRVYYLQRSQPPLLTLMMDCYLTHTNDTAFLQENIETLALELDFWTKNRTVSVSLEGKNYLLNRYYVPYGGPRPESYSKDVELADTLPEGDREALWAELKAGAESGWDFSSRWLIGGPNPNSLSGIRTSKLVPVDLNAFLCQAEELMSNFYSRLGNDSQATKYRILRSQRLAALNTVLWDEQTGAWFDYDLEKKKKNREFYPSNLTPLWAGCFSDPGVADKALKYLEDNRILTYQYGIPTSLQKTGQQWDFPNAWAPLQDLVIRGLAKAPLRRAQEVAFQLAQNWIRTNFDVYSQKSAMYEKYDVSNGGQPGGGGEYEVQEGFGWTNGVVLMLLDRYGDRLTSGPSWLSWSPTAWGHPSAQPPASLLPW

SEQ ID NO: 34230 - protein, 38 aa, Homo sapiens
VGRLVIILACGRWCALPSLPRRKKSALSVQKVEIKGPS

SEQ ID NO: 34231 - protein, 16 aa, Homo sapiens
LTSRLVLFLLQTITSW

SEQ ID NO: 34232 - protein, 43 aa, Homo sapiens
VGAPATDSGPGQGVAGNEGASGGRRRGPEYTIACPRCLLFHTQ

SEQ ID NO: 34233 - protein, 45 aa, Homo sapiens
LELVLPEKKEEGSPAACGFLKDFPGQALWLTPVIPALWEAEAGRS

SEQ ID NO: 34234 - protein, 26 aa, Homo sapiens
LALVSTFAELRLPFLKAVEEVGVGAS

SEQ ID NO: 34235 - protein, 39 aa, Homo sapiens
LAGGAAFSRGRPEETLRGPVALPLLLPDPAASLTEPAAG

SEQ ID NO: 34236 - protein, 776 aa, Homo sapiens
LLPPQSRLLNQRGEALPPHARLSGLSGPRLAAPAPPTPGPRLQLPRHWLRASASLYIRPGALEWSCIKRARGVGAGGSRPARDRGWEQAGGGAGGRGGSERPLPTPLGGGAESGRMAPSADPGMSRMLPFLLLLWFLPITEGSQRAEPMFTAVTNSVLPPDYDSNPTQLNYGVAVTDVDHDGDFEIVVAGYNGPNLVLKYDRAQKRLVNIAVDERSSPYYALRDRQGNAIGVTACDIDGDGREEIYFLNTNNAFSGVATYTDKLFKFRNNRWEDILSDEVNVARGVASLFAGRSVACVDRKGSGRYSIYIANYAYGNVGPDALIEMDPEASDLSRGILALRDVAAEAGVSKYTGGRGVSVGPILSSSASDIFCDNENGPNFLFHNRGDGTFVDAAASAGVDDPHQHGRGVALADFNRDGKVDIVYGNWNGPHRLYLQMSTHGKVRFRDIASPKFSMPSPVRTVITADFDNDQELEIFFNNIAYRSSSANRLFRVIRREHGDPLIEELNPGDALEPEGRGTGGVVTDFDGDGMLDLILSHGESMAQPLSVFRGNQGFNNNWLRVVPRTRFGAFARGAKVVLYTKKSGAHLRIIDGGSGYLCEMEPVAHFGLGKDEASSVEVTWPDGKMVSRNVASGEMNSVLEILYPRDEDTLQDPAPLECGQGFSQQENGHCMDTNECIQFPFVCPRDKPVCVNTYGSYRCRTNKKCSRGYEPNEDGTACVGTLGQSPGPRPTTPTAAAATAAAAAAAGAATAAPVLVDGDLNLGSVVKESCEPSC

SEQ ID NO: 34237 - protein, 760 aa, Homo sapiens
LLPPQSRLLNQRGEALPPHARLSGLSGPRLAAPAPPTPGPRLQLPRHWLRASASLYIRPGALEWSCIKRARGVGAGGSRPARDRGWEQAGGGAGGRGGSERPLPTPLGGGAESGRMAPSADPGMSRMLPFLLLLWFLPITEGSQRAEPMFTAVTNSVLPPDYDSNPTQLNYGVAVTDVDHDGDFEIVVAGYNGPNLVLKYDRAQKRLVNIAVDERSSPYYALRDRQGNAIGVTACDIDGDGREEIYFLNTNNAFSGVATYTDKLFKFRNNRWEDILSDEVNVARGVASLFAGRSVACVDRKGSGRYSIYIANYAYGNVGPDALIEMDPEASDLSRGILALRDVAAEAGVSKYTGGRGVSVGPILSSSASDIFCDNENGPNFLFHNRGDGTFVDAAASAGVDDPHQHGRGVALADFNRDGKVDIVYGNWNGPHRLYLQMSTHGKVRFRDIASPKFSMPSPVRTVITADFDNDQELEIFFNNIAYRSSSANRLFRVIRREHGDPLIEELNPGDALEPEGRGTGGVVTDFDGDGMLDLILSHGESMAQPLSVFRGNQGFNNNWLRVVPRTRFGAFARGAKVVLYTKKSGAHLRIIDGGSGYLCEMEPVAHFGLGKDEASSVEVTWPDGKMVSRNVASGEMNSVLEILYPRDEDTLQDPAPLECGQGFSQQENGHCMDTNECIQFPFVCPRDKPVCVNTYGSYRCRTNKKCSRGYEPNEDGTACVAQVAFLGGYSSAASRISEPLSRASYLSLGLGLCLQLYAL

SEQ ID NO: 34238 - protein, 80 aa, Homo sapiens
MAASGRGLCKAVAASPFPAWRRDNTEARGGLKPEYDAVVIGAEGPKCMIANWVYTEIMTGPKADGTQHAALRACLHFHMY

SEQ ID NO: 34239 - protein, 488 aa, Homo sapiens
VDLGFWRVKRLGCLRRWGAFQWLSLKKPSKMSDLLSVFLHLLLLFKLVAPVTFRHHRYDDLVRTLYKVQNECPGITRVYSIGRSVEGRHLYVLEFSDHPGIHEPLEPEVKYVGNMHGNEALGRELMLQLSEFLCEEFRNRNQRIVQLIQDTRIHILPSMNPDGYEVAAAQGPNKPGYLVGRNNANGVDLNRNFPDLNTYIYYNEKYGGPNHHLPLPDNWKSQVEPETRAVIRWMHSFNFVLSANLHGGAVVANYPYDKSFEHRVRGVRRTASTPTPDDKLFQKLAKVYSYAHGWMFQGWNCGDYFPDGITNGASWYSLSKGMQDFNYLHTNCFEITLELSCDKFPPEEELQREWLGNREALIQFLEQVHQGIKGMVLDENYNNLANAVISVSGINHDVTSGDHGDYFRLLLPGIYTVSATAPGYDPETVTVTVGPAEPTLVNFHLKRSIPQVSPVRRAPSRRHGVRAKVQPQARKKEMEMRQLQRGPA

SEQ ID NO: 34240 - protein, 375 aa, Homo sapiens
LLAAVGSARESAARAGGGDASLIGGTRMNMTQARVLVAAVVGLVAVLLYASIHKIEEGHLAVYYRGGALLTSPSGPGYHIMLPFITTFRSVQTTLQTDEVKNVPCGTSGGVMIYIDRIEVVNMLAPYAVFDIVRNYTADYDKTLIFNKIHHELNQFCSAHTLQEVYIELFDQIDENLKQALQKDLNLMAPGLTIQAVRVTKPKIPEAIRRNFELMEAEKTKLLIAAQKQKVVEKEAETERKKAVIEAEKIAQVAKIRFQQKVMEKETEKRISEIEDAAFLAREKAKADAEYYAAHKYATSNKHKLTPEYLELKKYQAIASNSKIYFGSNIPNMFVDSSCALKYSDIRTGRESSLPSKEALEPSGENVIQNKESTG

SEQ ID NO: 34241 - protein, 46 aa, Homo sapiens
LSPNLWKLLLYMLEMCFSPMKPFFRHQSMEEMAMNRNYISTMIRRT

SEQ ID NO: 34242 - protein, 50 aa, Homo sapiens
MVVFLLMMLMCCKQDSKFKKENKTNLFFAAYHLVNVGNLLFHNIANNIKS

SEQ ID NO: 34243 - protein, 123 aa, Homo sapiens
MEKPERQESAKHTKDWAVTGENTQPACTQVKYTALLLTQSLFGGFFTRMHVTFGAEDPGQEDSFGRPVPCCRPHSVRRSTYDLRSSDQPAQGTSCQFQIGLSESAEKLPPISSLRVQAWLPAF

SEQ ID NO: 34244 - protein, 379 aa, Homo sapiens
LGVWFFCFFFFGVRNRRSFRFRWGPSLAAEMAATAAEAVASGSGEPREEAGALGPAWDESQLRSYSFPTRPIPRLSQSDPRAEELIENEEPVVLTDTNLVYPALKWDLEYLQENIGNGDFSVYSASTHKFLYYDEKKMANFQNFKPRSNREEMKFHEFVEKLQDIQQRGGEERLYLQQTLNDTVGRKIVMDFLGFNWNWINKQQGKRGWGQLTSNLLLIGMEGNVTPAHYDEQQNFFAQIKGYKRCILFPPDQFECLYPYPVHHPCDRQSQVDFDNPDYERFPNFQNVVGYETVVGPGDVLYIPMYWWHHIESLLNGGITITVNFWYKGAPTPKRIEYPLKAHQKVAIMRNIEKMLGEALGNPQEVGPLLNTMIKGRYN

SEQ ID NO: 34245 - protein, 590 aa, Homo sapiens
VTSHIWLGMWVLLRSGYPLRILLPLRGEWMGRRGLPRNLAPGPPRRRYRKETLQALDMPVLPVTATEIRQYLRGHGIPFQDGHSCLRALSPFAESSQLKGQTGVTTSFSLFIDKTTGHFLCMTSLAEGSWEDFQASVEGRGDGAREGFLLSKAPEFEDSEEVRRIWNRAIPLWELPDQEEVQLADTMFGLTKVTDDTLKRFSVRYLRPARSLVFPWFSPGGSGLRGLKLLEAKCQGDGVSYEETTIPRPSAYHNLFGLPLISRRDAEVVLTSRELDSLALNQSTGLPTLTLPRGTTCLPPALLPYLEQFRRIVFWLGDDLRSWEAAKLFARKLNPKRCFLVRPGDQQPRPLEALNGGFNLSRILRTALPAWHKSIVSFRQLREEVLGELSNVEQAAGLRWSRFPDLNRILKGHRKGELTVFTGPTGSGKTTFISEYALDLCSQGVNTLWGSFEISNVRLARVMLTQFAEGRLEDQLDKYDHWADRFEDLPLYFMTFHGQQSIRTVIDTMQHAVYVYDICHVIIDNLQFMMGHEQLSTDRIAAQDYIIGVFRKFATDNNCHVTLVIHPRKEDDDKELQTASIFGSAKVSGL

SEQ ID NO: 34246 - protein, 692 aa, Homo sapiens
VTSHIWLGMWVLLRSGYPLRILLPLRGEWMGRRGLPRNLAPGPPRRRYRKETLQALDMPVLPVTATEIRQYLRGHGIPFQDGHSCLRALSPFAESSQLKGQTGVTTSFSLFIDKTTGHFLCMTSLAEGSWEDFQASVEGRGDGAREGFLLSKAPEFEDSEEVRRIWNRAIPLWELPDQEEVQLADTMFGLTKVTDDTLKRFSVRYLRPARSLVFPWFSPGGSGLRGLKLLEAKCQGDGVSYEETTIPRPSAYHNLFGLPLISRRDAEVVLTSRELDSLALNQSTGLPTLTLPRGTTCLPPALLPYLEQFRRIVFWLGDDLRSWEAAKLFARKLNPKRCFLVRPGDQQPRPLEALNGGFNLSRILRTALPAWHKSIVSFRQLREEVLGELSNVEQAAGLRWSRFPDLNRILKGHRKGELTVFTGPTGSGKTTFISEYALDLCSQGVNTLWGSFEISNVRLARVMLTQFAEGRLEDQLDKYDHWADRFEDLPLYFMTFHGQQSIRTVIDTMQHAVYVYDICHVIIDNLQFMMGHEQLSTDRIAAQDYIIGVFRKFATDNNCHVTLVIHPRKEDDDKELQTASIFGSAKASQEADNVLILQDRKLVTGPGKRYLQVSKNRFDGDVGVFPLEFNKNSLTFSIPPKNKARLKKIKDDTGPVAKKPSSGKKGATTQNSEICSGQAPTPDQPDTSKRSK

SEQ ID NO: 34247 - protein, 46 aa, Homo sapiens
VESSRGDGVPQSPPLSGRGAGLWRMGQGLLASRRRMGTRDRRLDPA

SEQ ID NO: 34248 - protein, 135 aa, Homo sapiens
LHPNLGRLKSHRPHPKLRAALLAHPPPAGLAAMTAPARRSRSLRPGMWSPKEWWEPQPGRDAAAARARSPYPGHLWKPAHLLHQPFPNTVVPPLPSLLKNRIVWGSGIFWTPGTPIRLPLVPLLQSNEVCFGFVY

SEQ ID NO: 34249 - protein, 152 aa, Homo sapiens
LHPNLGRLKSHRPHPKLRAALLAHPPPAGLAAMTAPARRSRSLRPGMWSPKEWWEPQPGRDAAAARARSPYPGHLWKPAHLLHQPFPNTVVPPLPSLLKNRIVWGSGIFWTPGTPIRLPLVPLLQSNEPMGCQALETFPPILTMSPFCQRRN

SEQ ID NO: 34250 - protein, 567 aa, Homo sapiens
LALLPSCASALRCLCPESDIGADSACPGPAEWLSSLRAHVVRTGIGRARAELFEKQIVQHGGQLCPAQGPGVTHIVVDEGMDYERALRLLRLPQLPPGAQLVKSAWLSLCLQERRLVDVAGFSIFIPSRYLDHPQPSKAEQDASIPPGTHEALLQTALSPPPPPTRPVSPPQKAKEAPNTQAQPISDDEASDGEETQVSAADLEALISGHYPTSLEGDCEPSPAPAVLDKWVCAQPSSQKATNHNLHITEKLEVLAKAYSVQGDKWRALGYAKAINALKSFHKPVTSYQEACSIPGIGKRMAEKIIEILESGHLRKLDHISESVPVLELFSNIWGAGTKTAQMWYQQGFRSLEDIRSQASLTTQQAIGLKHYSDFLERMPREEATEIEQTVQKAAQAFNSGLLCVACGSYRRGKATCGDVDVLITHPDGRSHRGIFSRLLDSLRQEGFLTDDLVSQEENGQQQKYLGVCRLPGPGRRHRRLDIIVVPYSEFACALLYFTGSAHFNRSMRALAKTKGMSLSEHALSTAVVRNTHGCKVGPGRVLPTPTEKDVFRLLGLPYREPAERDW

SEQ ID NO: 34251 - protein, 962 aa, Homo sapiens
LAVFFQGTRGHSLALRLGFWRPSLKPRLRLTKGSRRCRRPSHPGIRVPAEREGEGQRGRGRSRRGAHLELKPSPGLRAGAPTDRGRGGPAEVAAAGGRRMVQKESQATLEERESELSSNPAASAGASLEPPAAPAPGEDNPAGAGGAAVAGAAGGARRFLCGVVEGFYGRPWVMEQRKELFRRLQKWELNTYLYAPKDDYKHRMFWREMYSVEEAEQLMTLISAAREYEIEFIYAISPGLDITFSNPKEVSTLKRKLDQVSQFGCRSFALLFDDIDHNMCAADKEVFSSFAHAQVSITNEIYQYLGEPETFLFCPTEYCGTFCYPNVSQSPYLRTVGEKLLPGIEVLWTGPKVVSKEIPVESIEEVSKIIKRAPVIWDNIHANDYDQKRLFLGPYKGRSTELIPRLKGVLTNPNCEFEANYVAIHTLATWYKSNMNGVRKDVVMSRQVAHSGAKASVVDGTPLVAAPSLNATTVVTTVYQEPIMSQGAALSGEPTTLTKEEEKKQPDEEPMDMVVEKQEETDHKNDNQILSEIVEAKMAEELKPMDTDKESIAESKSPEMSMQEDCISDIAPMQTDEQTNKEQFVPGPNEKPLYTAEPVTLEDLQLLADLFYLPYEHGPKGAQMLREFQWLRANSSVVSVNCKGKDSEKIEEWRSRAAKFEEMCGLVMGMFTRLSNCANRTILYDMYSYVWDIKSIMSMVKSFVQWLGCRSHSSAQFLIGDQEPWAFRGGLAGEFQRLLPIDGANDLFFQPPPLTPTSKVYTIRPYFPKDEASVYKICREMYDDGVGLPFQSQPDLIGDKLVGGLLSLSLDYCFVLEDEDGICGYALGTVDVTPFIKKCKISWIPFMQEKYTKPNGDKELSEAEKIMLSFHEEQEVLPETFLANFPSLIKMDIHKKVTDPSVAKSMMACLLSSLKANGSRGAFCEVRPDDKRILEFYSKLGCFEIAKMEGFPKDVVILGRSL

SEQ ID NO: 34252 - protein, 948 aa, Homo sapiens
LAVFFQGTRGHSLALRLGFWRPSLKPRLRLTKGSRRCRRPSHPGIRVPAEREGEGQRGRGRSRRGAHLELKPSPGLRAGAPTDRGRGGPAEVAAAGGRRMVQKESQATLEERESELSSNPAASAGASLEPPAAPAPGEDNPAGAGGAAVAGAAGGARRFLCGVVEGFYGRPWVMEQRKELFRRLQKWELNTYLYAPKDDYKHRMFWREMYSVEEAEQLMTLISAAREYEIEFIYAISPGLDITFSNPKEVSTLKRKLDQVSQFGCRSFALLFDDIDHNMCAADKEVFSSFAHAQVSITNEIYQYLGEPETFLFCPTEYCGTFCYPNVSQSPYLRTVGEKLLPGIEVLWTGPKVVSKEIPVESIEEVSKIIKRAPVIWDNIHANDYDQKRLFLGPYKGRSTELIPRLKGVLTNPNCEFEANYVAIHTLATWYKSNMNGVRKDVVMSRQVAHSGAKASVVDGTPLVAAPSLNATTVVTTVYQEPIMSQGAALSGEPTTLTKEEEKKQPDEEPMDMVVEKQEETDHKNDNQILSEIVEAKMAEELKPMDTDKESIAESKSPEMSMQEDCISDIAPMQTDEQTNKEQFVPGPNEKPLYTAEPVTLEDLQLLADLFYLPYEHGPKGAQMLREFQWLRANSSVVSVNCKGKDSEKIEEWRSRAAKFEEMCGLVMGMFTRLSNCANRTILYDMYSYVWDIKSIMSMVKSFVQWLGCRSHSSAQFLIGDQEPWAFRGGLAGEFQPPPLTPTSKVYTIRPYFPKDEASVYKICREMYDDGVGLPFQSQPDLIGDKLVGGLLSLSLDYCFVLEDEDGICGYALGTVDVTPFIKKCKISWIPFMQEKYTKPNGDKELSEAEKIMLSFHEEQEVLPETFLANFPSLIKMDIHKKVTDPSVAKSMMACLLSSLKANGSRGAFCEVRPDDKRILEFYSKLGCFEIAKMEGFPKDVVILGRSL

SEQ ID NO: 34253 - protein, 776 aa, Homo sapiens
LAVFFQGTRGHSLALRLGFWRPSLKPRLRLTKGSRRCRRPSHPGIRVPAEREGEGQRGRGRSRRGAHLELKPSPGLRAGAPTDRGRGGPAEVAAAGGRRMVQKESQATLEERESELSSNPAASAGASLEPPAAPAPGEDNPAGAGGAAVAGAAGGARRFLCGVVEGFYGRPWVMEQRKELFRRLQKWELNTYLYAPKDDYKHRMFWREMYSVEEAEQLMTLISAAREYEIEFIYAISPGLDITFSNPKEVSTLKRKLDQVSQFGCRSFALLFDDIDHNMCAADKEVFSSFAHAQVSITNEIYQYLGEPETFLFCPTEYCGTFCYPNVSQSPYLRTVGEKLLPGIEVLWTGPKVVSKEIPVESIEEVSKIIKRAPVIWDNIHANDYDQKRLFLGPYKGRSTELIPRLKGVLTNPNCEFEANYVAIHTLATWYKSNMNGVRKDVVMTDSEDSTVSIQIKLENEGSDEDIETDVLYSPQMALKLALTEWLQEFGVPHQYSSRQVAHSGAKASVVDGTPLVAAPSLNATTVVTTVYQEPIMSQGAALSGEPTTLTKEEEKKQPDEEPMDMVVEKQEETDHKNDNQILSEIVEAKMAEELKPMDTDKESIAESKSPEMSMQEDCISDIAPMQTDEQTNKEQFVPGPNEKPLYTAEPVTLEDLQLLADLFYLPYEHGPKGAQMLREFQWLRANSSVVSVNCKGKDSEKIEEWRSRAAKFEEMCGLVMGMFTRLSNCANRTILYDMYSYVWDIKSIMSMVKSFVQWLGRCTRNNLFSSNILSL

SEQ ID NO: 34254 - protein, 78 aa, Homo sapiens
LPLPMRIMGWRGSEGRGGCPRGWRETQIPSSLGEDRTSMELGQQGQEGQARDNLIWGGMGGHSGERPPGMWGLPEWAP

SEQ ID NO: 34255 - protein, 479 aa, Homo sapiens
VAIVTFPRDSGRRGAGRGSACESLCGRRTGAPSRACPSHSGHELLKLSPRQPSPLPGLLWACSRSPVPLLAPSVLPGCSSKSFKLYSPKEPPNGNAFPPFHPGTMLDRDVGPTPMYPPTYLEPGIGRHTPYGNQTDYRIFELNKRLQNWTEECDNLWWDAFTTEFFEDDAMLTITFCLEDGPKRYTIGRTLIPRYFRSIFEGGATELYYVLKHPKEAFHSNFVSLDCDQGSMVTQHGKPMFTQVCVEGRLYLEFMFDDMMRIKTWHFSIRQHRELIPRSILAMHAQDPQMLDQLSKNITRCGLSNSTLNYLRLCVILEPMQELMSRHKTYSLSPRDCLKTCLFQKWQRMVAPPAEPTRQQPSKRRKRKMSGGSTMSSGGGNTNNSNSKKKSPASTFALSSQVPDVMVVGEPTLMGGEFGDEDERLITRLENTQFDAANGIDDEDSFNNSPALGANSPWNSKPPSSQESKSENPTSQASQ

SEQ ID NO: 34256 - protein, 35 aa, Homo sapiens
VLPTRLSLTPLLAVLRATSSSGQVRAAVAATWMGT

SEQ ID NO: 34257 - protein, 403 aa, Homo sapiens
MESCYNPGLDGIIEYDDFKLNSSIVEPKEPAPETADGPYLVIVEQPKQRGFRFRYGCEGPSHGGLPGASSEKGRKTYPTVKICNYEGPAKIEVDLVTHSDPPRAHAHSLVGKQCSELGICAVSVGPKDMTAQFNNLGVLHVTKKNMMGTMIQKLQRQRLRSRPQGLTEAEQRELEQEAKELKKVMDLSIVRLRFSAFLRASDGSFSLPLKPVISQPIHDSKSPGASNLKISRMDKTAGSVRGGDEVYLLCDKVQKDDIEVRFYEDDENGWQAFGDFSPTDVHKQYAIVFRTPPYHKMKIERPVTVFLQLKRKRGGDVSDSKQFTYYPLVEDKEEVQRKRRKALPTFSQPFGGGSHMGGGSGGAAGGYGGAGGGEGVLMEGGVKVREAVEEKNLGEAGRGGSRL

SEQ ID NO: 34258 - protein, 85 aa, Homo sapiens [sequence omitted]

SEQ ID NO: 34259 - protein, 125 aa, Homo sapiens
LSFGPGDSPSSVRNRSLTEMMATGTPESQARFGQSVKGLLTEKVTTCGTDVIALTKQVLKGSRSSELLGQAARNMVLQEDAILHSEDSLRKMAIITTHLQYQQEAIQKNVEQSSDLQDQLNHLLK

SEQ ID NO: 34260 - protein, 104 aa, Homo sapiens
VMFQLLLFLLHQPGSSHRPWQSYFDLILVDARKPLFFGEGTVLRQVDTKTGKLKIGTYTGPLQHGIVYSGGKSQTSLYLMSLLRPHSESFGNLSAKCHIYCLVV

SEQ ID NO: 34261 - protein, 78 aa, Homo sapiens
VVTFVEGHQLRNLRLWQIEIMAGPESDAQYQFTGIKKYFNSYTLTGRMNCVLATYGSIALIVLYFKLRSKKTPAVKAT

SEQ ID NO: 34262 - protein, 8 aa, Homo sapiens
MQEAASVT

SEQ ID NO: 34263 - protein, 394 aa, Homo sapiens
LLPPWPLRPLEAEREPLADPRLVPSTADTRKVARASLSRTDGRPPTQAGAMDKFRMLFQHFQSSSESVMNGICLLLAAVTVKLYSSFDFNCPCLVHYNALYGLGLLLTPPLALFLCGLLANRQSVVMVEEWRRPAGHRRKDPGIIRYMCSSVLQRALAAPLVWILLALLDGKCFVCAFSSSVDPEKFLDFANMTPSQVQLFLAKVPCKEDELVRDSPARKAVSRYLRCLSQAIGWSVTLLLIIAAFLARCLRPCFDQTVFLQRRYWSNYVDLEQKLFDETCCEHARDFAHRCVLHFFASMRSELQARGLRRGNAGRRLELPAVPEPPEGLDSGSGKAHLRAISSREQVDRLLSTWYSSKPPLDLAASPGLCGGGLSHRAPTLALGTRLSQHTDV

SEQ ID NO: 34264 - protein, 10 aa, Homo sapiens
MGFLLYLVGG

SEQ ID NO: 34265 - protein, 27 aa, Homo sapiens
MSGLWFASYFRGCLGAWVVGLTWEGDG

SEQ ID NO: 34266 - protein, 54 aa, Homo sapiens
LQKASAHLGGKNDLPNSGSEVPIPSKQSQAEGNSIFLSLTPAFPKDRMQASCSQ

SEQ ID NO: 34267 - protein, 20 aa, Homo sapiens
MLDSVMQNLSELAGSHSPAS

SEQ ID NO: 34268 - protein, 250 aa, Homo sapiens
LLSLGMAEGEKNQDFTFKMESPSDSAVVLPSTPQASANPSSPYTNSSRKQPMSATLRERLRKTRFSFNSSYNVVKRLKVESEENDQTFSEKPASSTEENCLEFQESFKHIDSEFEENTNLKNTLKNLNVCESQSLDSGSCSALQNEFVSEKLPKQRLNAEKAKLVKQVQEKEDLLRRLKLVKMYRSKNDLSQLQLLIKKWRSCSQLLLYELQSAVSEENKKLSLTQLIDHYGLDDKLLHYNRSEEEFIDV

SEQ ID NO: 34269 - protein, 994 aa, Homo sapiens
LLYLSSHGLWLITIAKCGILCIRDVYTLETFAWCRSHSHQGHGIQSMRISMDGQNILVNGRDDGTLVYLKWKRFGGHLASEILDYYQKLLISLSSAMDKENHYLSTTPKVSVDLGSDSEHTKQKASTDLSQDELVLTDVKKEIPWIQQKSQEAIKKEVNLFSKKRKEIKQGIKSLSKTILNMMEENDKLENIAKLDQQEFGLDLEELERLHDESQEEVAKMIKDVEMHNLAKSYLAELIKEECWNSMAVKGRALKCFHIPCVVENFPMKARTVEELKELERVLQQKKIEAECLKLRKEIVEAQSGVKLIKQRHEEDDEEEEEEDKTVKYSNLPNYLLGSLSTDFGVDTSLLSSQLELHSREEKINQIILLKDIIYKVKTVFNNEFDAAYKQKEFEIARVKERNVRIREIILDLELEEAVWQPEFEDCEKPERTLVVQDEEITAHKHIKPWHKAKELIVNHEKEHWLLIQDASTRLRALMDMMGGVLEVKKEDILRMVIPQPAFMAKPDAVWTEEERKQFKDYEKKVKELNEERDKYRKSLEAELKKLQNSIQESTQAFDEHLKRLFERRVKAEMVTNQEELKISNLAFSLLLDEELSSREKFLNNYLTRKQHEKVMDRSFKKEFSEIPGHQVDILYKLFKRRPRISKQKTHSETTSVVPFGELPGSGKLNKDAFAQLMKAMDELDNISNMPEGLDPLVWNHFCMTRRAKVENEQKVKQKAADLLEMATFLQKRVEEEEKVQQEIERVFHELILLQEEKVRFQLNLTIQILLKQGQVELENFQLVLEYSDAILINKNIIEDLNSVIRTQGQKKVASMMESKDVHKRILQIEWEHKKMEMEREDLNQKAWDIQMLFFSRDRQKYLNEPNYEALISIQIGIMEQTIAVLDKMHKKNVENCKKLLKKLGKFSNQKDIANYALSCNLREELVAVSERKDICNAMGSKLTCEKIVKERYENMMQQQKLTNISKQQAEQISILQTEVERLRMKTFPALVQM

SEQ ID NO: 34270 - protein, 237 aa, Homo sapiens
LERTLWTGSAPPGPVPEGSIRIYSMRFCPFAERTRLVLKAKGIRHEVININLKNKPEWFFKKNPFGLVPVLENSQGQLIYESAITCEYLDEAYPGKKLLPDDPYEKACQKMILELFSKVPSLVGSFIRSQNKEDYAGLKEEFRKEFTKLEEVLTNKKTTFFGGNSISMIDYLIWPWFERLEAMKLNECVDHTPKLKLWMAAMKEDPTVSALLTSEKDWQGFLELYLQNSPEACDYGL

SEQ ID NO: 34271 - protein, 45 aa, Homo sapiens
LRRAIWGLLCLMVAEENQEASLRKLAVRRKFWRLGRATQRYSVAW

SEQ ID NO: 34272 - protein, 73 aa, Homo sapiens
MSSDASQGVITTPPPPSMPHKERYFDRINENDPEYIRERNMSPDLRQDFNMMEQRKRVTQILQSPGQWYSISK

SEQ ID NO: 34273 - protein, 33 aa, Homo sapiens
MFAFFLFFVFSIYGSGTMFWMCDVYMGEQKADV

SEQ ID NO: 34274 - protein, 253 aa, Homo sapiens
LPRPLPAAPPPAPHKMSEDLAKQLASYKAQLQQVEAALSGNGENEDLLKLKKDLQEVIELTKDLLSTQPSETLASSDSFASTQPTHSWKVGDKCMAVWSEDGQCYEAEIEEIDEENGTAAITFAGYGNAEVTPLLNLKPVEEGRKAKEDSGNKPMSKKEMIAQQREYKKKKALKKAQRIKELEQEREDQKVKWQQFNNRAYSKNKKGQVKRSIFASPESVTGKVGVGTCGIADKPMTQYQDTSKYNVRHLMPQ

SEQ ID NO: 34275 - protein, 53 aa, Homo sapiens
VIFLLLLLLLLPPPLPLGSFAPTPSRRPAPSPTQDVRGFSKAAGKLQSSAPAS

SEQ ID NO: 34276 - protein, 477 aa, Homo sapiens
MGSRVTDGTHSHKTLRGRRNPRLLGRRAAGLAIERAGRERGVAPPLGRRAPSRPQPRGSPSRASPADTLAVDTLAVGTRGARGAGPLAGGGGGMKVTSLDGRQLRKMLRKEAAARCVVLDCRPYLAFAASNVRGSLNVNLNSVVLRRARGGAVSARYVLPDEAARARLLQEGGGGVAAVVVLDQGSRHWQKLREESAARVVLTSLLACLPAGPRVYFLKGGYETFYSEYPECCVDVKPISQEKIESERALISQCGKPVVNVSYRPAYDQGGPVEILPFLYLGSAYHASKCEFLANLHITALLNVSRRTSEACATHLHYKWIPVEDSHTADISSHFQEAIDFIDCVREKGGKVLVHCEAGISRSPTICMAYLMKTKQFRLKEAFDYIKQRRSMVSPNFGFMGQLLQYESEILPSTPNPQPPSCQGEAAGSSLIGHLQTLSPDMQGAYCTFPASVLAPVPTHSTVSELSRSPVATATSC

SEQ ID NO: 34277 - protein, 21 aa, Homo sapiens
MFFLFFLFFEGARRDRKVTSS

SEQ ID NO: 34278 - protein, 25 aa, Homo sapiens
LPLLSFKDSVFCSKITGLYKALFRG

SEQ ID NO: 34279 - protein, 15 aa, Homo sapiens
MITEHFREQPALSTI

SEQ ID NO: 34280 - protein, 16 aa, Homo sapiens
VKRYSQKSRISLILLL

SEQ ID NO: 34281 - protein, 15 aa, Homo sapiens
LKFYVMKQKNFHPST

SEQ ID NO: 34282 - protein, 45 aa, Homo sapiens
VPDSENGVICVNSSQLEGMTIKEHTWTCGTWKCAHRKRKSIILLK

SEQ ID NO: 34283 - protein, 28 aa, Homo sapiens
VGRSIEMNFTLLCMLQCIKVLLPKRTEE

SEQ ID NO: 34284 - protein, 40 aa, Homo sapiens
LEDGPKFLKSGDAAIVGMVPGKPMCVESFSDYPSLGPFVI

SEQ ID NO: 34285 - protein, 507 aa, Homo sapiens
LGGQNFLGVIFFGFSSSFIFLPKLLLVGEKKMPQLNGGGGDDLGANDELISFKDEGEQEEKSSENSSAERDLADVKSSLVNESETNQNSSSDSEAERRPPPRSESFRDKSRESLEEAAKRQDGGLFKGPPYPGYPFIMIPDLTSPYLPNGSLSPTARTYLQMKWPLLDVQAGSLQSRQALKDARSPSPAHIVSNKVPVVQHPHHVHPLTPLITYSNEHFTPGNPPPHLPADVDPKTGIPRPPHPPDISPYYPLSPGTVGQIPHPLGWLVPQQGQPVYPITTGGFRHPYPTALTVNASMSSFLSSRFPPHMVPPHHTLHTTGIPHPAIVTPTVKQESSQSDVGSLHSSKHQDSKKEEEKKKPHIKKPLNAFMLYMKEMRAKVVAECTLKESAAINQILGRRWHALSREEQAKYYELARKERQLHMQLYPGWSARDNYGKKKKRKRDKQPGETNEHSECFLNPCLSLPPITDLSAPKKCRARFGLDQQNNWCGPCRCKYSKEVSGTVRA

SEQ ID NO: 34286 - protein, 490 aa, Homo sapiens
LGGQNFLGVIFFGFSSSFIFLPKLLLVGEKKMPQLNGGGGDDLGANDELISFKDEGEQEEKSSENSSAERDLADVKSSLVNESETNQNSSSDSEAERRPPPRSESFRDKSRESLEEAAKRQDGGLFKGPPYPGYPFIMIPDLTSPYLPNGSLSPTARTYLQMKWPLLDVQAGSLQSRQALKDARSPSPAHIVSNKVPVVQHPHHVHPLTPLITYSNEHFTPGNPPPHLPADVDPKTGIPRPPHPPDISPYYPLSPGTVGQIPHPLGWLVPQQGQPVYPITTGGFRHPYPTALTVNASMSRFPPHMVPPHHTLHTTGIPHPAIVTPTVKQESSQSDVGSLHSSKHQDSKKEEEKKKPHIKKPLNAFMLYMKEMRAKVVAECTLKESAAINQILGRRWHALSREEQAKYYELARKERQLHMQLYPGWSARDNYGKKKKRKRDKQPGETNEHSECFLNPCLSLPPITDLSAPKKCRARFGLDQQNNWCGPCSL

SEQ ID NO: 34287 - protein, 486 aa, Homo sapiens
LGGQNFLGVIFFGFSSSFIFLPKLLLVGEKKMPQLNGGGGDDLGANDELISFKDEGEQEEKSSENSSAERDLADVKSSLVNESETNQNSSSDSEAERRPPPRSESFRDKSRESLEEAAKRQDGGLFKGPPYPGYPFIMIPDLTSPYLPNGSLSPTARTYLQMKWPLLDVQAGSLQSRQALKDARSPSPAHIVSNKVPVVQHPHHVHPLTPLITYSNEHFTPGNPPPHLPADVDPKTGIPRPPHPPDISPYYPLSPGTVGQIPHPLGWQGQPVYPITTGGFRHPYPTALTVNASMSRFPPHMVPPHHTLHTTGIPHPAIVTPTVKQESSQSDVGSLHSSKHQDSKKEEEKKKPHIKKPLNAFMLYMKEMRAKVVAECTLKESAAINQILGRRWHALSREEQAKYYELARKERQLHMQLYPGWSARDNYGKKKKRKRDKQPGETNEHSECFLNPCLSLPPITDLSAPKKCRARFGLDQQNNWCGPCSL

SEQ ID NO: 34288 - protein, 29 aa, Homo sapiens
VCVCVCVCVCVLDLLTCLANGSDRVAMSR

SEQ ID NO: 34289 - protein, 784 aa, Homo sapiens
LEIHAKMPAFLGLKCLGKLCSSEKSKVTSSERTSARGSNRKRLIVEDRRVSGTSFTAHRRATITHLLYLCPKDYCPRGRVCNSVDPFVAHPQDPHHPSEKPVIHCHKCGEPCKGEVLRVQTKHFHIKCFTCKVCGCDLAQGGFFIKNGEYLCTLDYQRMYGTRCHGCGEFVEGEVVTALGKTYHPNCFACTICKRPFPPGDRVTFNGRDCLCQLCAQPMSSSPKETTFSSNCAGCGRDIKNGQALLALDKQWHLGCFKCKSCGKVLTGEYISKDGAPYCEKDYQGLFGVKCEACHQFITGKVLEAGDKHYHPSCARCSRCNQMFTEGEEMYLQGSTVWHPDCKQSTKTEEKLRPTRTSSESIYSRPGSSIPGSPGHTIYAKVDNEILDYKDLAAIPKVKAIYDIERPDLITYEPFYTSGYDDKQERQSLGESPRTLSPTPSAEGYQDVRDRMIHRSTSQGSINSPVYSRHSYTPTTSRSPQHFHRPGNEPSSGRNSPLPYRPDSRPLTPTYAQAPKHFHVPDQGINIYRKPPIYKQHAALAAQSKSSEDIIKFSKFPAAQAPDPSETPKIETDHWPGPPSFAVVGPDMKRRSSGREEDDEELLRRRQLQEEQLMKLNSGLGQLILKEEMEKESRERSSLLASRYDSPINSASHIPSSKTASLPGYGRNGLHRPVSTDFAQYNSYGDVSGGVRDYQTLPDGHMPAMRMDRGVSMPNMLEPKIFPYEMLMVTNRGRNKILREVDRTRLERHLAPEVFREIFGMSIQEFDRLPLWRRNDMKKKAKLF

SEQ ID NO: 34290 - protein, 12 aa, Homo sapiens
MHVALAELRREA

SEQ ID NO: 34291 - protein, 68 aa, Homo sapiens
LSMANAGPNTNGSQFFICTAKSEWLDGKHVVFGKMKEGINIVEATGRFGSRNGKTSKKITIADCGQLE

SEQ ID NO: 34292 - protein, 198 aa, Homo sapiens
LPPCPNRCRRRSFSGPRVLAERPPRRPPRPGALRSRRAARAHLKRPGQALPRSSARPPRPAPAFTLERPRQPQQGRRRRIEELSRSSRERLLQSRDRMFSKFTSILQHAVEALAPSLPLQEDFVYHWKAITHYYIETSDDKAPVTDTNIPSHLEQMLDILVQEENERESGETGPCMEYLLHHKILETLYTLGKADVSS

SEQ ID NO: 34293 - protein, 862 aa, Homo sapiens
LPPCPNRCRRRSFSGPRVLAERPPRRPPRPGALRSRRAARAHLKRPGQALPRSSARPPRPAPAFTLERPRQPQQGRRRRIEELSRSSRERLLQSRDRMFSKFTSILQHAVEALAPSLPLQEDFVYHWKAITHYYIETSDDKAPVTDTNIPSHLEQMLDILVQEENERESGETGPCMEYLLHHKILETLYTLGKADCPPGMKQQVLVFYTKLLGRIRQPLLPHINVHRPVQKLIRLCGEVLATPTENEEIQFLCIVCAKLKQDPYLVNFFLENKMKSLASKGVPNVISEDTLKGQDSLSTDTGQSRQPEELSGATGMEQTELEDEPPHQMDHLSTSLDNLSVTSLPEASVVCPNQDYNLVNSLLNLTRSPDGRIAVKACEGLMLLVSLPEPAAAKCLTQSTCLCELLTDRLASLYKALPQSVDPLDIETVEAINWGLDSYSHKEDASAFPGKRALISFLSWFDYCDQLIKEAQKTAAVALAKAVHERFFIGVMEPQLMQTSEMGILTSTALLHRIVRQVTSDVLLQEMVFFILGEQREPETLAEISRHPLRHRLIEHCDHISDEISIMTLRMFEHLLQKPNEHILYNLVLRNLEERNYTEYKPLCPEDKDVVENGLIAGAVDLEEDPLFTDISPENTLPNQEWLSSSPPATPDHPKNDGKTEVHKIVNSFLCLVPDDAKSSYHVEGTGYDTYLRDAHRQFRDYCAICLRWEWPGSPKALEKCNLEAAFFEGHFLKVLFDRMGRILDQPYDVNLQVTSVLSRLSLFPHPHIHEYLLDPYVNLAPGCRSLFSVIVRVVGDLMLRIQRIQDFTPKLLLVRKRLLGLEPEGPIIDHITLLEGVIVLEEFCKELAAIAFVKYHASSTP

SEQ ID NO: 34294 - protein, 835 aa, Homo sapiens
LPPCPNRCRRRSFSGPRVLAERPPRRPPRPGALRSRRAARAHLKRPGQALPRSSARPPRPAPAFTLERPRQPQQGRRRRIEELSRSSRERLLQSRDRMFSKFTSILQHAVEALAPSLPLQEDFVYHWKAITHYYIETSDDKAPVTDTNIPSHLEQMLDILVQEENERESGETGPCMEYLLHHKILETLYTLGKADCPPGMKQQVLVFYTKLLGRIRQPLLPHINVHRPVQKLIRLCGEVLATPTENEEIQFLCIVCAKLKQDPYLVNFFLENKMKSLASKGVPNVISEDTLKGQDSLSTDTGQSRQPEELSGATGMEQTELEDEPPHQMDHLSTSLDNLSVTSLPEASVVCPNQDYNLVNSLLNLTRSPDGRIAVKACEGLMLLVSLPEPAAAKCLTQSTCLCELLTDRLASLYKALPQSVDPLDIETVEAINWGLDSYSHKEDASAFPGKRALISFLSWFDYCDQLIKEAQKTAAVALAKAVHERFFIGVMEPQLMQTSEMGILTSTALLHRIVRQVTSDVLLQEMVFFILGEQREPETLAEISRHPLRHRLIEHCDHISDEISIMTLRMFEHLLQKPNEHILYNLVLRNLEERNYTEYKPLCPEDKDVVENGLIAGAVDLEEDPLFTDISPENTLPNQEWLSSSPPATPDHPKNDGKTEVHKIVNSFLCLVPDDAKSSYHVEGTGYDTYLRDAHRQFRDYCAICLRWEWPGSPKALEKCNLEAAFFEGHFLKVLFDRMGRILDQPYDVNLQVTSVLSRLSLFPHPHIHEYLLDPYVNLAPGCRSLFSVIVRVVGDLMLRIQRIQDFTPKLLLVRKRLLGLEPEGPMQTLPSWW

SEQ ID NO: 34295 - protein, 687 aa, Homo sapiens
LEAPLAVRGCATMADKEAGGSDGPRETAPTSAYSSPARSLGDTGITPLSPSHIVNDTDSNVSEQQSFLVVVAVDFGTTSSGYAYSFTKEPECIHVMRRWEGGDPGVSNQKTPTTILLTPERKFHSFGYAARDFYHDLDPNEAKQWLYLEKFKMKLHTTGDLTMDTDLTAANGKKVKALEIFAYALQYFKEQALKELSDQAGSEFENSDVRWVITVPAIWKQPAKQFMRQAAYQAGLASPENSEQLIIALEPEAASIYCRKLRLHQMIELSSKAAVNGYSGSDTVGAGFTQAKEHIRRNRQSRTFLVENVIGEIWSELEEGDKYVVVDSGGGTVDLTVHQIRLPEGHLKELYKATGGPYGSLGVDYEFEKLLYKIFGEDFIEQFKIKRPAAWVDLMIAFESRKRAAAPDRTNPLNITLPFSFIDYYKKFRGHSVEHALRKSNVDFVKWSSQGMLRMSPDAMNALFKPTIDSIIEHLRDLFQKPEVSTVKFLFLVGGFAEAPLLQQAVQAAFGDQCRIIIPQDVGLTILKGAVLFGLDPAVIKVRRSPLTYGVGVLNRYVEGKHPPEKLLVKDGTRWCTDVFDKFISADQSVALGELVKRSYTPAKPSQLVIVINIYSSEHDNVSFITDPGVKKCGTLRLDLTGTSGTAVPARREIQTLMQFGDTEIKATAIDIATSKSVKVGIDFLNY

SEQ ID NO: 34296 - protein, 704 aa, Homo sapiens
VVPQLRPPPSSSMMESVGVYGFCGCKAKNKMKCDSRWEIAASETAPTSAYSSPARSLGDTGITPLSPSHIVNDTDSNVSEQQSFLVVVAVDFGTTSSGYAYSFTKEPECIHVMRRWEGGDPGVSNQKTPTTILLTPERKFHSFGYAARDFYHDLDPNEAKQWLYLEKFKMKLHTTGDLTMDTDLTAANGKKVKALEIFAYALQYFKEQALKELSDQAGSEFENSDVRWVITVPAIWKQPAKQFMRQAAYQAGLASPENSEQLIIALEPEAASIYCRKLRLHQMIELSSKAAVNGYSGSDTVGAGFTQAKEHIRRNRQSRTFLVENVIGEIWSELEEGDKYVVVDSGGGTVDLTVHQIRLPEGHLKELYKATGGPYGSLGVDYEFEKLLYKIFGEDFIEQFKIKRPAAWVDLMIAFESRKRAAAPDRTNPLNITLPFSFIDYYKKFRGHSVEHALRKSNVDFVKWSSQGMLRMSPDAMNALFKPTIDSIIEHLRDLFQKPEVSTVKFLFLVGGFAEAPLLQQAVQAAFGDQCRIIIPQDVGLTILKGAVLFGLDPAVIKVRRSPLTYGVGVLNRYVEGKHPPEKLLVKDGTRWCTDVFDKFISADQSVALGELVKRSYTPAKPSQLVIVINIYSSEHDNVSFITDPGVKKCGTLRLDLTGTSGTAVPARREIQTLMQFGDTEIKATAIDIATSKSVKVGIDFLNY

SEQ ID NO: 34297 - protein, 60 aa, Homo sapiens
LGGTARKQQRGDKTHSRQTCLNNNSLELKHAFQENKLSVRSANSREVSLIMAKKGRVADQ

SEQ ID NO: 34298 - protein, 52 aa, Homo sapiens
LNKQPTHRSARWSSMFMVASAVSLRVTLLLIQIDPVVETSSVQKTLHLISCP

SEQ ID NO: 34299 - protein, 14 aa, Homo sapiens
MLVFISITLNVLFL

SEQ ID NO: 34300 - protein, 267 aa, Homo sapiens
LPAPWRPSALKMAAAVGRLLRASVARHVSAIPWGISATAALRPAACGRTSLTNLLCSGSSQAKLFSTSSSCHAPAVTQHAPYFKGTAVVNGEFKDLSLDDFKGKYLVLFFYPLDFTFVCPTEIVAFSDKANEFHDVNCEVVAVSVDSHFSHLAWINTPRKNGGLGHMNIALLSDLTKQISRDYGVLLEGSGLALRGLFIIDPNGVIKHLSVNDLPVGRSVEETLRLVKAFQYVETHGEVCPANWTPDSPTIKPSPAASKEYFQKVNQ

SEQ ID NO: 34301 - protein, 58 aa, Homo sapiens
MIFKEKFCKFLYCLSLHFVYLYLNESETLRVYIFCAATVKPCVPRHFSGEGVIKKKKM

SEQ ID NO: 34302 - protein, 65 aa, Homo sapiens
LTAAPRGPPGLCLERKHSVRRFLVAGQRPGPGLAAGMLPYTVNFKVSARTLTGALNAHNKAAVDW

SEQ ID NO: 34303 - protein, 1260 aa, Homo sapiens
LTAAPRGPPGLCLERKHSVRRFLVAGQRPGPGLAAGMLPYTVNFKVSARTLTGALNAHNKAAVDWGWQGLIAYGCHSLVVVIDSITAQTLQVLEKHKADVVKVKWARENYHHNIGSPYCLRLASADVNGKIIVWDVAAGVAQCEIQEHAKPIQDVQWLWNQDASRDLLLAIHPPNYIVLWNADTGTKLWKKSYADNILSFSFDPFDPSHLTLLTSEGIVFISDFSPSKPPSGPGKKVYISSPHSSPAHNKLATATGAKKALNKVKILITQEKPSAEFITLNDCLQLAYLPSKRNHMLLLYPREILILDLEVNQTVGVIAIERTGVPFLQVIPCFQRDGLFCLHENGCITLRVRRSYNNIFTTSNEEPDPDPVQELTYDLRSQCDAIRVTKTVRPFSMVCCPVNENAAALVVSDGRVMIWELKSAVCNRNSRNSSSGVSPLYSPVSFCGIPVGVLQNKLPDLSLDNMIGQSAIAGEEHPRGSILREVHLKFLLTGLLSGLPAPQFAIRMCPPLTTKNIKMYQPLLAVGTSNGSVLVYHLTSGLLHKELSIHSCEVKGIEWTSLTSFLSFATSTPNNMGLVRNELQLVDLPTGRSIAFRGERGNDESAIEMIKVSHLKQYLAVVFRDKPLELWDVRTCTLLREMSKNFPTITALEWSPSHNLKSLRKKQLATREAMARQTVVSDTELSIVESSVISLLQEAESKSELSQNISAREHFVFTDIDGQVYHLTVEGNSVKDSARIPPDGSMGSITCIAWKGDTLVLGDMDGNLNFWDLKGRVSRGIPTHRSWVRKIRFAPGKGNQKLIAMYNDGAEVWDTKEVQMVSSLRSGRNVTFRILDVDWCTSDKVILASDDGCIRVLEMSMKSACFRMDEQELTEPVWCPYLLVPRASLALKAFLLHQPWNGQYSLDISHVDYPENEEIKNLLQEQLNSLSNDIKKLLLDPEFTLLQRCLLVSRLYGDESELHFWTVAAHYLHSLSQEKSASTTAPKEAAPRDKLSNPLDICYDVLCENAYFQKFQLERVNLQEVKRSTYDHTRKCTDQLLLLGQTDRAVQLLLETSADNQHYYCDSLKACLVTTVTSSGPSQSTIKLVATNMIANGKLAEGVQLLCLIDKAADACRYLQTYGEWNRAAWLAKVRLNPEECADVLRRWVDHLCSPQVNQKSKALLVLLSLGCFFSVAETLHSMRYFDRAALFVEACLKYGAFEVTEDTEKLITAIYADYARSLKNLGFKQGAVLFASKAGAAGKDLLNELESPKEEPIEE

SEQ ID NO: 34304 - protein, 781 aa, Homo sapiens
LIPLLPKLFKFLLTGLLSGLPAPQFAIRMCPPLTTKNIKMYQPLLAVGTSNGSVLVYHLTSGLLHKELSIHSCEVKGIEWTSLTSFLSFATSTPNNMGLVRNELQLVDLPTGRSIAFRGERGNDESAIEMIKVSHLKQYLAVVFRDKPLELWDVRTCTLLREMSKNFPTITALEWSPSHNLKSLRKKQLATREAMARQTVVSDTELSIVESSVISLLQEAESKSELSQNISAREHFVFTDIDGQVYHLTVEGNSVKDSARIPPDGSMGSITCIAWKGDTLVLGDMDGNLNFWDLKGRVSRGIPTHRSWVRKIRFAPGKGNQKLIAMYNDGAEVWDTKEVQMVSSLRSGRNVTFRILDVDWCTSDKVILASDDGCIRVLEMSMKSACFRMDEQELTEPVWCPYLLVPRASLALKAFLLHQPWNGQYSLDISHVDYPENEEIKNLLQEQLNSLSNDIKKLLLDPEFTLLQRCLLVSRLYGDESELHFWTVAAHYLHSLSQEKSASTTAPKEAAPRDKLSNPLDICYDVLCENAYFQKFQLERVNLQEVKRSTYDHTRKCTDQLLLLGQTDRAVQLLLETSADNQHYYCDSLKACLVTTVTSSGPSQSTIKLVATNMIANGKLAEGVQLLCLIDKAADACRYLQTYGEWNRAAWLAKVRLNPEECADVLRRWVDHLCSPQVNQKSKALLVLLSLGCFFSVAETLHSMRYFDRAALFVEACLKYGAFEVTEDTEKLITAIYADYARSLKNLGFKQGAVLFASKAGAAGKDLLNELESPKEEPIEE

SEQ ID NO: 34305 - protein, 68 aa, Homo sapiens
LLFYVLHMYFQALKDPVVLTSQGMLLNFQESFPSLVQCCCSSLIGSDLSTDSHPQVPNLPAEWYWPCV

SEQ ID NO: 34306 - protein, 51 aa, Homo sapiens
MEHIHNLKADKACKKLLADQAETRRSKTKEARKHREEHLQAKKEEIIKTLV

SEQ ID NO: 34307 - protein, 48 aa, Homo sapiens
LPVWLLLIEFLWCSLACSSVFCISCSVMFKLRNALCGSSESHLWFSRH

SEQ ID NO: 34308 - protein, 14 aa, Homo sapiens
LVQFSMFLCVLHLL

SEQ ID NO: 34309 - protein, 30 aa, Homo sapiens
LLIFLFYSVMFKLRNALCGSSESHLWFSRH

SEQ ID NO: 34310 - protein, 60 aa, Homo sapiens
LFFFFFFFCQEKEPLRVIPLKEVHKVQECKQSDIMMRDNLFEIVTTSRTFYVQVRCLFGN

SEQ ID NO: 34311 - protein, 522 aa, Homo sapiens [sequence omitted]

SEQ ID NO: 34312 - protein, 50 aa, Homo sapiens
MAGSPITVAMVKMLVLSAQLPSLSQHSGQKVGLSGYHHLYPQKDLNPVWP

SEQ ID NO: 34313 - protein, 619 aa, Homo sapiens
LSVLKAAQRLAKMELVRRLMPLTLLILSCLAELTMAEAEGNASCTVSLGGANMAETHKAMILQLNPSENCTWTIERPENKSIRIIFSYVQLDPDGSCESENIKVFDGTSSNGPLLGQVCSKNDYVPVFESSSSTLTFQIVTDSARIQRTVFVFYYFFSPNISIPNCGGYLDTLEGSFTSPNYPKPHPELAYCVWHIQVEKDYKIKLNFKEIFLEIDKQCKFDFLAIYDGPSTNSGLIGQVCGRVTPTFESSSNSLTVVLSTDYANSYRGFSASYTSIYAENINTTSLTCSSDRMRVIISKSYLEAFNSNGNNLQLKDPTCRPKLSNVVEFSVPLNGCGTIRKVEDQSITYTNIITFSASSTSEVITRQKQLQIIVKCEMGHNSTVEIIYITEDDVIQSQNALGKYNTSMALFESNSFEKTILESPYYVDLNQTLFVQVSLHTSDPNLVVFLDTCRASPTSDFASPTYDLIKSGCSRDETCKVYPLFGHYGRFQFNAFKFLRSMSSVYLQCKVLICDSSDHQSRCNQGCVSRSKRDISSYKWKTDSIIGPIRLKRDRSASGNSGFQHETHAEETPNQPFNSVHLFSFMVLALNVVTVATITVRHFVNQRADYKYQKLQNY

SEQ ID NO: 34314 - protein, 372 aa, Homo sapiens
LRVRAGQTVERRRRSQTPPVSPGSMKTAENIRGTGSDGPRKRGLCVLCGLPAAGKSTFARALAHRLQQEQGWAIGVVAYDDVMPDAFLAGARARPAPSQWKLLRQELLKYLEYFLMAVINGCQMSVPPNRTEAMWEDFITCLKDQDLIFSAAFEAQSCYLLTKTAVSRPLFLVLDDNFYYQSMRYEVYQLARKYSLGFCQLFLDCPLETCLQRNGQRPQALPPETIHLMGRKLEKPNPEKNAWEHNSLTIPSPACASEASLEVTDLLLTALENPVKYAEDNMEQKDTDRIICSTNILHKTDQTLRRIVSQTMKEAKGNQEAFSEMTFKQRWVRANHAAIWRIILGNEHIKCRSAKVGWLQCCRIEKRPLSTG

SEQ ID NO: 34315 - protein, 58 aa, Homo sapiens
MVSALLFVLIVSGIYWHSLSQRACFLPRPNQYALKTIRSEMFSGGGGKGSFGQTGCGW

SEQ ID NO: 34316 - protein, 833 aa, Homo sapiens
LGLAAWNTCLQGPASEGSPGKGGKKEGRGRPPCARPAPLRAPVRPGPAQPSPAGRSHAQPAGRLPRPSAPLCCALRPCPAPASAPAARPAPPVTVTLPWARGGAGMSRPGTATPALALVLLAVTLAGVGAQGAALEDPDYYGQEIWSREPYYARPEPELETFSPPLPAGPGEEWERRPQEPRPPKRATKPKKAPKREKSAPEPPPPGKHSNKKVMRTKSSEKAANDDHSVRVAREDVRESCPPLGLETLKITDFQLHASTVKRYGLGAHRGRLNIQAGINENDFYDGAWCAGRNDLQQWIEVDARRLTRFTGVITQGRNSLWLSDWVTSYKVMVSNDSHTWVTVKNGSGDMIFEGNSEKEIPVLNELPVPMVARYIRINPQSWFDNGSICMRMEILGCPLPDPNNYYHRRNEMTTTDDLDFKHHNYKEMRQLMKVVNEMCPNITRIYNIGKSHQGLKLYAVEISDHPGEHEVGEPEFHYIAGAHGNEVLGRELLLLLVQFVCQEYLARNARIVHLVEETRIHVLPSLNPDGYEKAYEGGSELGGWSLGRWTHDGIDINNNFPDLNTLLWEAEDRQNVPRKVPNHYIAIPEWFLSENATVAAETRAVIAWMEKIPFVLGGNLQGGELVVAYPYDLVRSPWKTQEHTPTPDDHVFRWLAYSYASTHRLMTDARRRVCHTEDFQKEEGTVNGASWHTVAGSLNDFSYLHTNCFELSIYVGCDKYPHESQLPEEWENNRESLIVFMEQVHRGIKGLVRDSHGKGIPNAIISVEGINHDIRTGRVSLQKLSLACRRVRCAFALSSSSTMIVRPPQPYGTVPHSSPDPVTTKISPLRNF

SEQ ID NO: 34317 - protein, 607 aa, Homo sapiens
LYLCFPSIFCDHKAFLRFSSTTCGHPDSWGAHPWLGKPAAQGTGTTMRHCINCCIQLLPDGAHKQQVNCQGGPHHGHQACPTCKGENKILFRVDSKQMNLLAVLEVRTEGNENWGGFLRFKKGKRCSLVFGLIIMTLVMASYILSGAHQELLISSPFHYGGFPSNPSLMDSENPSDTKEHHHQSSVNNISYMKDYPSIKLIINSITTRIEFTTRQLPDLEDLKKQELHMFSVIPNKFLPNSKSPCWYEEFSGQNTTDPYLTNSYVLYSKRFRSTFDALRKAFWGHLAHAHGKHFRLRCLPHFYIIGQPKCGTTDLYDRLRLHPEVKFSAIKEPHWWTRKRFGIVRLRDGLRDRYPVEDYLDLFDLAAHQIHQGLQASSAKEQSKMNTIIIGEASASTMWDNNAWTFFYDNSTDGEPPFLTQDFIHAFQPNARLIVMLRDPVERLYSDYLYFASSNKSADDFHEKVTEALQLFENCMLDYSLRACVYNNTLNNAMPVRLQVGLYAVYLLDWLSVFDKQQFLILRLEDHASNVKYTMHKVFQFLNLGPLSEKQEALMTKSPASNARRPEDRNLGPMWPITQKILRDFYRPFNARLAQVLADEAFAWKTT

SEQ ID NO: 34318 - protein, 38 aa, Homo sapiens
LKTDGLLVWLLPSSLLVTCHLPLLPQQEDEGAFRKITI

SEQ ID NO: 34319 - protein, 552 aa, Homo sapiens
LYLCFPSIFCDHKAFLRFSSTTCGHPDSWGAHPWLGKPAAQGTGTTMRHCINCCIQLLPDGAHKQQVNCQGGPHHGHQACPTCKGENKILFRVDSKQMNLLAVLEVRTEGNENWGGFLRFKKGKRCSLVFGLIIMTLVMASYILSGAHQELLISSPFHYGGFPSNPSLMDSENPSDTKEHHHQSSVNNISYMKDYPSIKLIINSITTRIEFTTRQLPDLEDLKKQELHMFSVIPNKFLPNSKSPCWYEEFSGQNTTDPYLTNSYVLYSKRFRSTFDALRKAFWGHLAHAHGKHFRLRCLPHFYIIGQPKCGTTDLYDRLRLHPEVKFSAIKEPHWWTRKRFGIVRLRDGLRDRYPVEDYLDLFDLAAHQIHQGLQASSAKEQSKMNTIIIGEASASTMWDNNAWTFFYDNSTDGEPPFLTQDFIHAFQPNARLIVMLRDPVERLYSDYLYFASSNKSADDFHEKVTEALQLFENCMLDYSLRACVYNNTLNNAMPVCTPPPRTPRAGPWQKELVCCYYASGIVGLRFSIGTERSVLMCKCCSPLFMDVKAEN

SEQ ID NO: 34320 - protein, 59 aa, Homo sapiens
VVGGHILHAQKREQLALWKEHTVGDGDRPSDEHHPEVKADGYVDNLAEAVDLLLQHADK

SEQ ID NO: 34321 - protein, 43 aa, Homo sapiens
LLAMAYVVIPGFLALSGGFITLNGFEPMKVYSLKKTDSPSCEL

SEQ ID NO: 34322 - protein, 89 aa, Homo sapiens
LDEPRVSSTYDNFLRIYLHVFFLSRKWSQNPQMSLSICTLCLLPRRQEYCILKVPGLLFFLITNDLGSSDHSCLPRVKVPFKALLPGEL

SEQ ID NO: 34323 - protein, 74 aa, Homo sapiens
LKKAEQQEKRKWSQNPQMSLSICTLCLLPRRQEYCILKVPGLLFFLITNDLGSSDHSCLPRVKVPFKALLPGEL

SEQ ID NO: 34324 - protein, 67 aa, Homo sapiens
LNRKWSQNPQMSLSICTLCLLPRRQEYCILKVPGLLFFLITNDLGSSDHSCLPRVKVPFKALLPGEL

SEQ ID NO: 34325 - protein, 952 aa, Homo sapiens
MTGSTVRVLKMILFGIFYGHLKISICWSAPTCPYLEEADTQQSAYVSEMYIFRDNNKPINVLTGIDYWLDNLICNVPELVMCFHVNGIVQKYEMIKTEEIPNLENSNFSTKVIKDIAQNILSFLKSNCTKEGHTYWLFKASGSDIVKLYDLTTLCEETEDKYQNPFTMPVAILLYKVACNMMMKKNQNKKHYGTIRTLLLNCLKLLDKSRHPQIIASANYMLSELFQLDEPKKEENSESPLNENSDESYSEEEEEMPDSDENGSYSTSSDPSDDSKAVAIIKSVGELSVPEKYKSIHQIRPSCAFPVCHDTEERCRLVLSYVLEGLKSVDSSIKKESDLPAADPSTPIPLKYEDESSRGGPEGLEKQMALFLDKMGSLQKGNYSSQSGMIPGSWQHKMKLQLILKSSKAYYVLSDAAMSLQKYGRALRYIKLALQSHDTYCCLCTNMLSEVLLFLSQYLTLCGDIQLMLAQNANNRAAHLEEFHYQTKEDQEILHSLHRESSCQGFAWATDLSTDLESQLSVSCKCYEAANEILQFSDLKSQNPEHYVQVLKRMGNIRNEIGVFYMNQAAALQSERLVSKSVSAAEQQLWKKSFSCFEKGIHNFESIEDATNAALLLCNTGRLMRICAQAHCGAGDELKREFSPEEGLYYNKAIDYYLKALRSLGTRDIHPAVWDSVNWELSTTYFTMATLQQDYAPLSRKAQEQIEKEVSEAMMKSLKYCDVDSVSARQPLCQYRAATIHHRLASMYHSCLRNQVGDEHLRKQHRVLADLHYSKAAKLFQLLKDAPCELLRVQLERVAFAEFQMTSQNSNVGKLKTLSGALDIMVRTEHAFQLIQKELIEEFGQPKSGDAAAAADASPSLNREEVMKLLSIFESRLSFLLLQSIKLLSSTKKKTSNNIEDDTILKTNKHIYSQLLRATANKTATLLERINVIVHLLGQLAAGSAASSNAVQ

SEQ ID NO: 34326 - protein, 262 aa, Homo sapiens
LEPRTLYRFRLKVTSPSGECEYSPLVSVSTTREPISSEHLHRAVSVNDEDLLVRILQGGRVKVDVPNKFGFTALMVAAQKGYTRLVKILVSNGTDVNLKNGSGKDSLMLACYAGHLDVVKYLRRHGASWQARDLGGCTALHWAADGGHCSVIEWMIKDGCEVDVVDTGSGWTPLMRVSAVSGNQRVASLLIDAGANVNVKDRNGKTPLMVAVLNNHEELVQLLLDKGADASVKNEFGKGVLEMARVFDRQVGMLFLPIKANF

SEQ ID NO: 34327 - protein, 14 aa, Homo sapiens
LLLLYTFLILGFDR

SEQ ID NO: 34328 - protein, 54 aa, Homo sapiens
LTSLGGGAFLCLLNFMRILRLNYRPLFPGKSIHQCILKKKKKKKKPAKTVSKCS

SEQ ID NO: 34329 - protein, 113 aa, Homo sapiens
MFTEFILNVPMGLLTIQKLYCLIEIVHSDLFTQHDCREILLPMMTDQLKYHLERQEDLEACCQLLSHILEVLYRKDVGPTQRHVQIIMEKLLRTVNRTVISMGRDSELIVSAW

SEQ ID NO: 34330 - protein, 32 aa, Homo sapiens
VANLGKRISPAFVRLELLLAMYFPPDSTANLF

SEQ ID NO: 34331 - protein, 10 aa, Homo sapiens
LSLLFTSLGL

SEQ ID NO: 34332 - protein, 31 aa, Homo sapiens
MSNRSSFSRLTWWVSLCRALLALGEPRSVET

SEQ ID NO: 34333 - protein, 270 aa, Homo sapiens
LKSLEIEEKINKIRWLPQQNAAHFLLSTNDKTIKLWKISERDKRAEGYNLKDEDGRLRDPFRITALRVPILKPMDLMVEASPRRIFANAHTYHINSISVNSDHETYLSADDLRINLWHLEITDRSFNIVDIKPANMEELTEVITAAEFHPHQCNVFVYSSSKGTIRLCDMRSSALCDRHSKFFEEPEDPSSRSFFSEIISSISDVKFSHSGRYMMTRDPVGEGVGPQHRAGRWRPTRSTSTCAASSALSMRTTASLTSLSVAGTVRIAPS

SEQ ID NO: 34334 - protein, 509 aa, Homo sapiens
LPLPALPAGHAPSSGCRAHPDPAMRSGAERRGSSAAASPGSPPPGRARPAGSDAPSALPPPAAGQPRARDSGDVRSQPRPLFQWSKWKKRMGSSMSAATARRPVFDDKEDVNFDHFQILRAIGKGSFGKVCIVQKRDTEKMYAMKYMNKQQCIERDEVRNVFRELEILQEIEHVFLVNLWYSFQDEEDMFMVVDLLLGGDLRYHLQQNVQFSEDTVRLYICEMALALDYLRGQHIIHRDVKPDNILLDERGHAHLTDFNIATIIKDGERATALAGTKPYMAPEIFHSFVNGGTGYSFEVDWWSVGVMAYELLRGWRPYDIHSSNAVESLVQLFSTVSVQYVPTWSKEMVALLRKLLTVNPEHRLSSLQDVQAAPALAGVLWDHLSEKRVEPGFVPNKGRLHCDPTFELEEMILESRPLHKKKKRLAKNKSRDNSRDSSQSENDYLQDCLDAIQQDFVIFNREKLKRSQDLPREPLPAPESRDAAEPVEDEAERSALPMCGPICPSAGSG

SEQ ID NO: 34335 - protein, 55 aa, Homo sapiens
VASIVGLLLSAAGLASASVGGDAAGDSRPRRMSCCPWKRTDGGKQLLRSSLCGCC

SEQ ID NO: 34336 - protein, 2747 aa, Homo sapiens
VAGSSRLENPTDSGRQDAPRTPERADEQGAGAMDLVITQELARAESQQDAASLKKAYELIKSANLGKSEFDPSESFSPDLFVLCAEQALKMRQPEVSEDCIQMYFKVKAPITQFLGRAHLCRAQMCAPKSAENLEEFENCVTEYMKAINFAKGEPRYYFLVYNASVLYWQMVRPFLKPGYRHHLIPSLSQIINVLSQTEEEDKEWRAELMLELLECYLQAGRKEEAARFCSTAAPFIKSHVPQKYRQIFSVMVRHELMDELQLKEEKKNSISLSVTFYINMLKAKAEQNDLPGDISVILRKAYRHLGHYNHQRFPSISEEKMLLLFELARFSLTLKCMEISSACLSDLKKMESKDPGKLIEMECLECESEALRLESKMKVYNRAAVEAQLDIIQRLDVALQRAVRLGDPRVIHVVCATQWNTCLPLLQHNLRHHLRKPLAGVADVLEKLDSLMTLLRCQVHMEMAQIEEDEDRLEPATEHLRKAARLDSLGLYRDRIQMASTRLRLCTTLYQAPERAEDKAIMAVEQAKKATPKDSVRKKRALLVNAGLALAPDAFQIVLDSENEAKVSTGKNRGRFTYLCAKAWHHTVSVDKAAGHLRRLGNENDKERIQIWAELAKVARKQGVWDVCRTASRFCLLYDNVKVKKLRLRRGKKKRGRDGSVQDTWSQPEVVLQRQVCPDLLRKFAEVGFIHAEATVHLLRSEGVELNDRAIPPEDLSQHPAGYVPEPPEVNAEWITYRTWIESLSRCAMNNWLRSAEIGQEIQEAWIVQNAVVYVLNHNHHLILAGRQKELVDALYHLLSIVKATGHSGDPVMLVTLCNTLARGLIISWIPVQAAEKSRKFMRPNAFHSPLDAGATSEIKTAVEVCEFALNLTNGSAPEETVPTGTRQQLIATWVKAKQLLQQQIGPRLGTEEQGTNEDVSSVTRVLVALEMYSCNGLGLMDFTVPSLAQLVKMASECNWSDPLVELQTLTRLTHFAHAARDHETTMACAHRALEMGIKYLKKFGPEESRLVAEMLCTATAIQGRSIMENLKGRKQLRLVAAKAFTESARFGGIAGSSALVMLAARHYWNAWLPLLSSAVYRKKAKGALKRLIGIINKTEARKQEKGKTLLLHQWPTADFQGGGTTEGYFLPGAEDDLALRAALYGLLFHSHADQDDWEGGLKVLDEAVQVLPRTAHRLLIFKHMVIVKAKLGQNFSMEIQKFKAESEDYLARMWHRLALNSPSVSGELACYNNAIQALQKPEMEWQKVEYLMEFGQWLHHRHFPLEDVVFHLRWAVEILLAMKPPGDVPEPQPTPDGEYVAVEMPPRSPVSEAEEAVSLEQLRSVRQLEALARVHILLALVLSPGAEGYEDCCLAAYAFFRHIWQVSLMTAGKSVLENRPLAATSSHLLLPKKEKENERSKEKEKERSKEKENERSKEKDKEKGKEEKVKEPKQSQSPAPIKQLEDLPMSIEEWASYSCPEEVLSVLKQDRSDSTVNPSSIQKPTYSLYFLDHLVKALQKMCLHELTVPVLQLGVLISDSVVGSKGLSDLYHLRLAHACSELKLREAAARHEEAVGQVCVSELEQASCRKEIALKKEKNKEPLLEESLPALNEQTLPVQPGEIKPLDAKDKILKMNGETGRDLDGTSFPHLWMLKAEVLLEMNLYQPARLLLSEAYLAFQELDEPCAEAQCLLLLAQLANKEKNYGQAKKMIAQAQHLGGSEEFWYNSTLTLAEALLSMEHSGREATVCHIFQKLINAFKILKKERPNRLPLLEFMITDLEARCLSLRVRVAQHSAVTEPTECSLLLKEMDDGLLEIERKFIDCGCKENCVDVKLERAKIKRLRAQNEKDEEQKTAYYLEAYGLAQGAVAEEEGRLHSIQGLYGLAQGAMAEEEGRLHSVQGLLSLQDLQNVNTPLMRKLARLKLGLVEMALDMLQFIWEEAHGQQSEQGSLEKLLADYLQNTSDYTSVGLQWFTLKRTLAHGALAQLGSLQPLSVGCVEIRARLLGLAGRALHLLAMQADPVHPTCYWEAGPSVGAKLSGLKSLELEVEEEGATKSSRDPPASRAAPEEHCRRGEDLKRRMVLAQQYLAQASEVLLQCLQVALGSGLLDVAAAASLEMVECVGTLDPATTCQFLALSQSCSASETMRDVLLAATANTSSSQLAALLQLQHQLRCQDRTTTSLGARVEQRLAAVSKAWQNLCVTEQHFNLLNEMPPTFWILFLHLSGDRSRLYGAAYEKPKFITAAKGKVQAVGGSCKVMRLAISPTAFSHLLACAQQFRKQTQAQVYSEDMALNIGSEPEGLQVEEKERPVQRLSSVLGPLEELLQPLFPLLSLSKARVQTPAVVADSGKSKGKDKERKTSTGQHSTVQPEVADKIVLVADRHLLELPLEGLSVFDEGTISSVSREFSLQMLWNRLHKEETEGGVKKEGRSRDPKKRSLAKKGRKGSIPRTIPPDCIIVDSDNFKFVVDPYEEAQGPEMLTPVSITQDILERFQDTFTSRWAGHLGSKHFPSQAQWEQALGSCSGFFFYGMESFLSHILVERLVAMNLQECQVAVLLDLARSYQSLKRHMESVEHRRSVGRWEANWRNSASPSEDEWRRGGEPRRGFSDLEGQAAAAPKLRAPSHHAQLGPVWAAAPSHRVVQAWTCLPSAAGAPALASALGSAPLPTHPHLPAPIPSSQLALPFLGLSPALGAASARDPPPATSRKAAAWTSSSACLCAPWGLRRGWSCVSSRGQDKGGLPLAALVLSCLDQKTIQTVSLFLI

SEQ ID NO: 34337 - protein, 437 aa, Homo sapiens
VAGSSRLENPTDSGRQDAPRTPERADEQGAGAMDLVITQELARAESQQDAASLKKAYELIKSANLGKSEFDPSESFSPDLFVLCAEQALKMRQPEVSEDCIQMYFKVKAPITQFLGRAHLCRAQMCAPKSAENLEEFENCVTEYMKAINFAKGEPRYYFLVYNASVLYWQMVRPFLKPGYRHHLIPSLSQIINVLSQTEEEDKEWRAELMLELLECYLQAGRKEEAARFCSTAAPFIKSHVPQKYRQIFSVMVRHELMDELQLKEEKKNSISLSVTFYINMLKAKAEQNDLPGDISVILRKAYRHLGHYNHQRFPSISEEKMLLLFELARFSLTLKCMEISSACLSDLKKMESKVSGFMTLLPGDEALLTVQLDKRQRKEEQFTRPRPPGLRSVVGTLPSFLPVFCTVAVRWCLQFYTCPFLFTFLVATGPQHHSCF

SEQ ID NO: 34338 - protein, 744 aa, Homo sapiens
LSPPPLLPDPAMRGLGLWLLGAMMLPGPAPREGELRPWGHRAQLHPPPAEEQGPAGLRLHRDLYGCQWLRGDGAASRAGPLLLPGPRRGVPGLSRQPQHLCRPQVGSDLHLIEPLDEGGEGGRHAVYQAEHLLQTAGTCGVSDDSLGSLLGPRTAAVFRPRPGDSLPSRETRYVELYVVVDNAEFQMLGSEAAVRHRVLEVVNHVDKLYQKLNFRVVLVGLEIWNSQDRFHVSPDPSVTLENLLTWQARQRTRRHLHDNVQLITGVDFTGTTVGFARVSAMCSHSSGAVNQDHSKNPVGVACTMAHEMGHNLGMDHDENVQGCRCQERFEAGRCIMAGSIGSSFPRMFSDCSQAYLESFLERPQSVCLANAPDLSHLVGGPVCGNLFVERGEQCDCGPPEDCRNRCCNSTTCQLAEGAQCAHGTCCQECKVKPAGELCRPKKDMCDLEEFCDGRHPECPEDAFQENGTPCSGGYCYNGACPTLAQQCQAFWGPGGQAAEESCFSYDILPGCKASRYRADMCGVLQCKGGQQPLGRAICIVDVCHALTTEDGTAYEPVPEGTRCGPEKVCNHKQECHCHAGWAPPHCAKLLTEVHAASGSLPVFVVVVLVLLAVVLVTLAGIIVYRKARSRILSRNVAPKTTMGRSNPLFHQAASRVPAKGGAPAPSRGPQELVPTTHPGQPARHPASSVALKRPPPAPPVTVSSPPFPVPVYTRQAPKQGAVGPKVALKPPIQRKQGAGAPTAP

SEQ ID NO: 34339 - protein, 232 aa, Homo sapiens
MRAALWTLGLGPLLLNLWAVPIGGPGALRLAYRHSTCDGVVLVRHHGAWGYVCNQEWTLAEASVVCRQLGCGPAVGAPKYVPLPGEMAQPWLHNVSCRGNESSLWECSLGSWCQSPCPHAWVVVALCSNGTFRELRLVKGRSPCAGLPEIRNVNGVDRLCVLHVEEAMVFCRELGCGPVLQAPRRDVGVVRKYLACRGTEPTIRSCRLDNNFRSGCDLRLDAEVVCSGEAAT

SEQ ID NO: 34340 - protein, 192 aa, Homo sapiens
LRLLFLLTALRTDVRQQLFQELKGVRLLTDTLELTLGVTPEGNPPPTLLPSQETERAMEILKVLFNITLDSIKGEVDEEDAALYRHLGTLLRHCVMIATAGDRTEEFHGHAVNLLGNLPLKCLDVLLTLEPHGDSTEFMGVNMDVIRALLIFLEKRLHKTHRLKESVAPVLSVLTECARMHRPARKFLKAQV

SEQ ID NO: 34341 - protein, 55 aa, Homo sapiens
VLCRPLGLCLLRVLTSLVSGFPFQIKGMKDRLEFWCTDVKSMEMLVEHQAHDILT

SEQ ID NO: 34342 - protein, 317 aa, Homo sapiens
LLLPWPRTWVFPSPASGWRWLTRSRYPLTWSRTSTRSSMGMSLVSGPLQGLLPCRRDPRVCPGTPSSQRHLPVGEVVKQADVVLLGYPVPFSLSPDVRRKNLEIYEAVTSPQGPAMTWSMFAVGWMELKDAVRARGLLDRSFANMAEPFKVWTENADGSGAVNFLTGMGGFLQAVVFGCTGFRVTRAGVTFDPVCLSGISRVSVSGIFYQGNKLNFSFSEDSVTVEVTARAGPWAPHLEAELWPSQSRLSLLPGHKVSFPRSAGRIQMSPPKLPGSSSSEFPGRTFSDVRDPLQSPLWVTLGSSSPTESLTVDPASE

SEQ ID NO: 34343 - protein, 145 aa, Homo sapiens
LRTIPVTRSPLVTMNHIVQTFSPVNSGQPPNYEMLKEEQEVAMLGVPHNPAPPMSTVIHIRSETSVPDHVVWSLFNTLFMNTCCLGFIAFAYSVKSRDRKMVGDVTGAQAYASTAKCLNIWALILGIFMTILLIIIPVLVVQAQR

SEQ ID NO: 34344 - protein, 38 aa, Homo sapiens
LTARRAHTLTVLFILTCTLGYVTLLEETPQDTAYNTKR

SEQ ID NO: 34345 - protein, 31 aa, Homo sapiens
VSVVYELFLIFILFQNGIVGWAASSHPAQCL

SEQ ID NO: 34346 - protein, 318 aa, Homo sapiens
LLSPRLEYCSLSAASCEPLASVLRAKPDFKELTVSNNDINEAGVRVLCQGLKDSPCQLEALKLESCGVTSDNCRDLCGIVASKASLRELALGSNKLGDVGMAELCPGLLHPSSRLRTLWIWECGITAKGCGDLCRVLRAKESLKELSLAGNELGDEGARLLCETLLEPGCQLESLWVKSCSFTAACCSHFSSVLAQNRFLLELQISNNRLEDAGVRELCQGLGQPGSVLRVLWLADCDVSDSSCSSLAATLLANHSLRELDLSNNCLGDAGILQLVESVRQPGCLLEQLVLYDIYWSEEMEDRLQALEKDKPSLRVIS

SEQ ID NO: 34347 - protein, 122 aa, Homo sapiens
LHHFPKWILPTFWGFWMRALSPPHPPLPALWHQCCCFQGAFLAIQASSPGSCPAVVPRPVLGRCSGNVSTNQGLGWLSLPDHFPQAPGGYLSCALRASGTSFHIQGLCLGRLQGVAAVPIPG

SEQ ID NO: 34348 - protein, 850 aa, Homo sapiens
VTAAKMGSWALLWPPLLFTGLLVRPPGTMAQAQYCSVNKDIFEVEENTNVTEPLVDIHVPEGQEVTLGALSTPFAFRIQGNQLFLNVTPDYEEKSLLEAQLLCQSGGTLVTQLRVFVSVLDVNDNAPEFPFKTKEIRVEEDTKVNSTVIPETQLQAEDRDKDDILFYTLQEMTAGASDYFSLVSVNRPALRLDRPLDFYERPNMTFWLLVRDTPGENVEPSHTATATLVLNVVPADLRPPWFLPCTFSDGYVCIQAQYHGAVPTGHILPSPLVLRPGPIYAEDGDRGINQPIIYSIFRGNVNGTFIIHPDSGNLTVARSVPSPMTFLLLVKGQQADLARYSVTQVTVEAVAAAGSPPRFPQRLYRGTVARGAGAGVVVKDAAAPSQPLRIQAQDPEFSDLNSAITYRITNHSHFRMEGEVVLTTTTLAQAGAFYAEVEAHNTVTSGTATTVIEIQVSEQEPPSTDVPPSPEAGGTTGPWTSTTSEVPRPPEPSQGPSTTSSGGGTGPHPPSGTTLRPPTSSTPGGPPGAENSTSHQPATPGGDTAQTPKPGTSQPMPPGVGTSTSHQPATPSGGTAQTPEPGTSQPMPPSMGTSTSHQPATPGGGTAQTPEAGTSQPMPPGMGTSTSHQPTTPGGGTAQTPEPGTSQPMPLSKSTPSSGGGPSEDKRFSVVDMAALGGVLGALLLLALLGLAVLVHKHYGPRLKCCCGKAPEPQPQGFDNQAFLPDHKANWAPVPSPTHDPKPAEAPMPAEPAPPGPASPGGAPEPPAAARAGGSPTAVRSILTKERRPEGGYKAVWFGEDIGTEADVVVLNAPTLDVDGASDSGSGDEGEGAGRGGGPYDAPGGDDSYI

SEQ ID NO: 34349 - protein, 656 aa, Homo sapiens
VTAAKMGSWALLWPPLLFTGLLVRPPGTMAQAQYCSVNKDIFEVEENTNVTEPLVDIHVPEGQEVTLGALSTPFAFRIQGNQLFLNVTPDYEEKSLLEAQLLCQSGGTLVTQLRVFVSVLDVNDNAPEFPFKTKEIRVEEDTKVNSTVIPETQLQAEDRDKDDILFYTLQEMTAGASDYFSLVSVNRPALRLDRPLDFYERPNMTFWLLVRDTPGENVEPSHTATATLVLNVVPADLRPPWFLPCTFSDGYVCIQAQYHGAVPTGHILPSPLVLRPGPIYAEDGDRGINQPIIYSIFRGNVNGTFIIHPDSGNLTVARSVPSPMTFLLLVKGQQADLARYSVTQVTVEAVAAAGSPPRFPQRLYRGTVARGAGAGVVVKDAAAPSQPLRIQAQDPEFSDLNSAITYRITNHSHFRMEGEVVLTTTTLAQAGAFYAEVEAHNTVTSGTATTVIEIQVSEQEPPSTGGGPSEDKRFSVVDMAALGGVLGALLLLALLGLAVLVHKHYGPRLKCCCGKAPEPQPQGFDNQAFLPDHKANWAPVPSPTHDPKPAEAPMPAEPAPPGPASPGGAPEPPAAARAGGSPTAVRSILTKERRPEGGYKAVWFGEDIGTEADVVVLNAPTLDVDGASDSGSGDEGEGAGRGGGPYDAPGGDDSYI

SEQ ID NO: 34350 - protein, 227 aa, Homo sapiens
LGGGTSRQAARPRAPPTQRPWPAFPHATRAPPPPGPLRPRLCAPRARPSPGSLRPRLCARRAQPPPGPLRPRLCAPRARPPPGPLRLQLCSPRRRQSRRAPTPDSTADPQEAACQDHRPGAQGHEGPAGGGRGLPAVLDALLRGAHHAGAVSCLLRAPAAGQRRHLAGLRQQRPQPRHLHCLQRRVPQRLPQGPACLLLSRAPPDAPRPDGQASGTKEMGRALLYVN

SEQ ID NO: 34351 - protein, 190 aa, Homo sapiens
MLFYLSGTYYALYFLATLLMITYKSQVFSYPHRYLVLDLALLFLMGILEAVRLYLGTRGNLTEAERPLAASLALTAGTALLSAHFLLWQALVLWADWALSATLLALHGLEAVLQVVAIAAFTSHTSPFRGFGGEVRAKAGDETAGERAAEGHIRSLRPLQFYQLLPFARSAKQILALCFFPIPRFTISSP

SEQ ID NO: 34352 - protein, 840 aa, Homo sapiens
VTPQPVAQVPPLPAPPRPGPAERPTRPRETWRPGRGANRRTHRRAPRGQAERGAPEAGPSRGPDRGGSTAHPLPVGRSQEALPGCRSPEGNQWPGSTSWVWDRHWPQTGATLRSALLPLAATQDTMSQSGAVSCCPGATNGSLGRSDGVAKMSPKDLFEQRKKYSNSNVIMHETSQYHVQHLATFIMDKSEAITSVDDAIRKLVQLSSKEKIWTQEMLLQVNDQSLRLLDIESQEELEDFPLPTVQRSQTVLNQLRYPSVLLLVCQDSEQSKPDVHFFHCDEVEAELVHEDIESALADCRLGKKMRPQTLKGHQEKIRQRQSILPPPQGPAPIPFQHRGGDSPEAKNRVGPQVPLSEPGFRRRESQEEPRAVLAQKIEKETQILNCALDDIEWFVARLQKAAEAFKQLNQRKKGKKKGKKAPAEGVLTLRARPPSEGEFIDCFQKIKLAINLLAKLQKHIQNPSAAELVHFLFGPLDLIVNTCSGPDIARSVSCPLLSRDAVDFLRGHLVPKEMSLWESLGESWMRPRSEWPREPQVPLYVPKFHSGWEPPVDVLQEAPWEVEGLASAPIEEVSPVSRQSIRNSQKHSPTSEPTPPGDALPPVSSPHTHRGYQPTPAMAKYVKILYDFTARNANELSVLKDEVLEVLEDGRQWWKLRSRSGQAGYVPCNILGEARPEDAGAPFEQAGQKYWGPASPTHKLPPSFPGNKDELMQHMDEVNDELIRKISNIRAQPQRHFRVERSQPVSQPLTYESGPDEVRAWLEAKAFSPRIVENLGILTGPQLFSLNKEELKKVCGEEGVRVYSQLTMQKAFLEKQQSGSELEELMNKFHSMNQRRGEDS

SEQ ID NO: 34353 - protein, 75 aa, Homo sapiens
VGRDMEQAWKAGSCPPAQASDLEKIHLDEKSFRWLHNEDQMAVEKLSDGIRKFAADAVKLERMLTERMFNAENGK

SEQ ID NO: 34354 - protein, 112 aa, Homo sapiens
VFLSVCPCLAGVGVGWEVCASRAAVSLAGRVDLGPRTLALRATSASPLPRRATPGHTGCLSPGCPDQPARWSEWPGPSGPPGPELQQPGDTAGLCPADARSGCALAVSQLPL

SEQ ID NO: 34355 - protein, 262 aa, Homo sapiens
VVTQASGVQGDHKVSPTLQPRPRWPGSRAPHSIQSPCFPKEKGPPRLPLTPPPASAASPGAAWTGLPACWDMSGLQGPSVGDGCNGGGARAGGSCCRRRCFRGFGRRVQGAAFPGRQPAELGPVPRGLPAAAAPVCPAASAAAAGGILASEHSRGPSAAGGHPGPAASEPVLPPLPGPQRVDLGPRTLALRATSASPLPRRATPGHTGCLSPGCPDQPARWSEWPGPSGPPGPELQQPGDTAGLCPADARSGCALAVSQLPL

SEQ ID NO: 34356 - protein, 198 aa, Homo sapiens
LSSHPLRAACSAASPGAAWTGLPACWDMSGLQGPSVGDGCNGGGARAGGSCCRRRCFRGFGRRVQGAAFPGRQPAELGPVPRGLPAAAAPVCPAASAAAAGGILASEHSRGPSAAGGHPGPAASEPVLPPLPGPQRRATPGHTGCLSPGCPDQPARWSEWPGPSGPPGPELQQPGDTAGLCPADARSGCALAVSQLPL

SEQ ID NO: 34357 - protein, 100 aa, Homo sapiens
LPDPATCWRVRGEARFSLVGDFLDREVISELNGKNIEDVIAQGIGKLASVPAGGAVAVSAAPGSAAPAAGSAPAAAEEKKDEKKEESEESDDDMGFGLFD

SEQ ID NO: 34358 - protein, 536 aa, Homo sapiens
LPGPRLQRASGEQAAHRGLAAHGTRGPAAAAAMFPREKTWNISFAGCGFLGVYYVGVASCLREHAPFLVANATHIYGASAGALTATALVTGVCLGEAGAKFIEVSKEARKRFLGPLHPSFNLVKIIRSFLLKVLPADSHEHASGRLGISLTRVSDGENVIISHFNSKDELIQANVCSGFIPVYCGLIPPSLQGVRYVDGGISDNLPLYELKNTITVSPFSGESDICPQDSSTNIHELRVTNTSIQFNLRNLYRLSKALFPPEPLVLREMCKQGYRDGLRFLQRNGLLNRPNPLLALPPARPHGPEDKDQAVESAQAEDYSQLPGEDHILEHLPARLNEALLEACVEPTDLLTTLSNMLPVRLATAMMVPYTLPLESALSFTIRLLEWLPDVPEDIRWMKEQTGSICQYLVMRAKRKLGRHLPSRLPEQVELRRVQSLPSVPLSCAAYREALPGWMRNNLSLGDALAKWEECQRQLLLGLFCTNVAFPPEALRMRAPADPAPAPADPASPQHQLAGPAPLLSTPAPEARPVIGALGL

SEQ ID NO: 34359 - protein, 152 aa, Homo sapiens
VSRRWPRSHCPLCCFSACMLSALVTRVLVLHRVSRPGQAQPSVSCDSLGGTRHDFPQNLHFMRQQPGLQGGGAAPGAGPHTGTAQGTHTSPTTHAGQGRKRSREGCPARSKCSCPAQGRRSLLRVCCWRREACFPLLPAPASVPARPPGSGL

SEQ ID NO: 34360 - protein, 130 aa, Homo sapiens
LGLTYHPRPVFSTRPRSARAHSQPLALRVPLLHGRAAGGGSVVLRASQNFARGERRSRLELELQSREQDLERAGLRQREVSTRPLPCPHGHPCTLPLCLSVPGLSGAWGTRSTPGKRGRSSPVSILPPSS

SEQ ID NO: 34361 - protein, 192 aa, Homo sapiens
LALRVPLLHGRAAGGGSVVLRASQNFARGERRSRLELELQSREQDLERAGLRQRELEQQLHAQAAEHLEAQAQNSQLWRAHEALRTQLEGAQEQIRRLESEARGRQEQTQRDVVAVSRNMQKEKVSLLRQLELLRELNTRLRDDRDACEARRAGSSCRKALTTARLPGPTCCCCCCWARPPRRGSGHLPSAR

SEQ ID NO: 34362 - protein, 102 aa, Homo sapiens
LGAAAPAAAAAAARARTRTRGSPRMGEFNEKKTTCGTVCLKYLLFTYNCCFWVRRGRLAPTPTPTPPGPPSDLGRCDDLCVLLVAGWPGCHGSGHLDAGPQE

SEQ ID NO: 34363 - protein, 277 aa, Homo sapiens
LGAAAPAAAAAAARARTRTRGSPRMGEFNEKKTTCGTVCLKYLLFTYNCCFWLAGLAVMAVGIWTLALKSDYISLLASGTYLATAYILVVAGTVVMVTGVLGCCATFKERRNLLRLYFILLLIIFLLEIIAGILAYAYYQQLNTELKENLKDTMTKRYHQPGHEAVTSAVDQLQQEFHCCGSNNSQDWRDSEWIRSQEAGGRVVPDSCCKTVVALCGQRDHASNIYKVEGGCITKLETFIQEHLRVIGAVGIGIACVQVFGMIFTCCLYRSLKLEHY

SEQ ID NO: 34364 - protein, 22 aa, Homo sapiens
VPRVLGSFCPPVLQRSRFQPGW

SEQ ID NO: 34365 - protein, 457 aa, Homo sapiens
LPSPLSWPSPSPSQRAVRGGGARAPGAGLPARWSVFRPCVCGRPASLTCSPLDPEVGPYCDTPTMRTLFNLLWLALACSPVHTTLSKSDAKKAASKTLLEKSQFSDKPVQDRGLVVTDLKAESVVLEHRSYCSAKARDRHFAGDVLGYVTPWNSHGYDVTKVFGSKFTQISPVWLQLKRRGREMFEVTGLHDVDQGWMRAVRKHAKGLHIVPRLLFEDWTYDDFRNVLDSEDEIEELSKTVVQVAKNQHFDGFVVEVWNQLLSQKRVGLIHMLTHLAEALHQARLLALLVIPPAITPGTDQLGMFTHKEFEQLAPVLDGFSLMTYDYSTAHQPGPNAPLSWVRACVQVLDPKSKWRSKILLGLNFYGMDYATSKDAREPVVGARYIQTLKDHRPRMVWDSQASEHFFEYKKSRSGRHVVFYPTLKSLQVRLELARELGVGVSIWELGQGLDYFYDLL

SEQ ID NO: 34366 - protein, 483 aa, Homo sapiens
VAQVLPLGDPGQGLLVRTGQSHEAATVGKGPACADSANEESPRAAATPPRSTGQPGEDTNPAPKAPQPPGTSNNQVPLDPEVGPYCDTPTMRTLFNLLWLALACSPVHTTLSKSDAKKAASKTLLEKSQFSDKPVQDRGLVVTDLKAESVVLEHRSYCSAKARDRHFAGDVLGYVTPWNSHGYDVTKVFGSKFTQISPVWLQLKRRGREMFEVTGLHDVDQGWMRAVRKHAKGLHIVPRLLFEDWTYDDFRNVLDSEDEIEELSKTVVQVAKNQHFDGFVVEVWNQLLSQKRVGLIHMLTHLAEALHQARLLALLVIPPAITPGTDQLGMFTHKEFEQLAPVLDGFSLMTYDYSTAHQPGPNAPLSWVRACVQVLDPKSKWRSKILLGLNFYGMDYATSKDAREPVVGARYIQTLKDHRPRMVWDSQASEHFFEYKKSRSGRHVVFYPTLKSLQVRLELARELGVGVSIWELGQGLDYFYDLL

SEQ ID NO: 34367 - protein, 242 aa, Homo sapiens
LSLPQPVPAPWFVCKNNGVLFENQLLQIGLKSEFRQNLGRMFIFYGNKTSTQFLNFTPTLICSDDLQPNLNLQTKPVDPTVEGGAQVQQVVNIECVSDFTEAPVLNIQFRYGGTFQNVSVQLPITLNKFFQPTEMASQDFFQRWKQLSNPQQEVQNIFKAKHPMDTEVTKAKIIGFGSALLEEVDPNPANFVGAGIIHTKTTQIGCLLRLEPNLQAQMYRLTLRTSKEAVSQRLCELLSAQF

SEQ ID NO: 34368 - protein, 133 aa, Homo sapiens
LSPSQAPAGAQEVARRVTVGSASHGGRRSTMATTVSTQRGPVYIGELPQDFLRITPTQQQRQVQLDAQAAQQLQYGGAVGTVGRLNITVVQVGLGAPSCLPGAGALGGGGISDFGVYTAFPKRANRTSDSRFS

SEQ ID NO: 34369 - protein, 579 aa, Homo sapiens
LRRHPGYKRTASATLSDPAAAAMQPSSLLPLALCLLAAPASALVRIPLHKFTSIRRTMSEVGGSVEDLIAKGPVSKYSQAVPAVTEGPIPEVLKNYMDAQYYGEIGIGTPPQCFTVVFDTGSSNLWVPSIHCKLLDIACWIHHKYNSDKSSTYVKNGTSFDIHYGSGSLSGYLSQDTVSVPCQSASSASALGGVKVERQVFGEATKQPGITFIAAKFDGILGMAYPRISVNNVLPVFDNLMQQKLVDQNIFSFYLSRDPDAQPGGELMLGGTDSKYYKGSLSYLNVTRKAYWQVHLDQVEVASGLTLCKEGCEAIVDTGTSLMVGPVDEVRELQKAIGAVPLIQGEYMIPCEKVSTLPAITLKLGGKGYKLSPEDYTLKAQGPGQCPAPLGDPASTTDGAQEARVPLDGAFWIPRPPAGSPKGCFACVSKPPALQAPAAPAPEPSASPPMAPTLFPMESKSSKTDSVRAAGAPPACKHLAEKKTMTNPTTVIEVYPDTTEVNDYYLWSIFNFVYLNFCCLGFIALAYSLKVRDKKLLNDLNGAVEDAKTARLFNITSSALAASCIILVFIFLRYPLTDY

SEQ ID NO: 34370 - protein, 604 aa, Homo sapiens
LRRHPGYKRTASATLSDPAAAAMQPSSLLPLALCLLAAPASALVRIPLHKFTSIRRTMSEVGGSVEDLIAKGPVSKYSQAVPAVTEGPIPEVLKNYMDAQYYGEIGIGTPPQCFTVVFDTGSSNLWVPSIHCKLLDIACWIHHKYNSDKSSTYVKNGTSFDIHYGSGSLSGYLSQDTVSVPCQSASSASALGGVKVERQVFGEATKQPGITFIAAKFDGILGMAYPRISVNNVLPVFDNLMQQKLVDQNIFSFYLSRDPDAQPGGELMLGGTDSKYYKGSLSYLNVTRKAYWQVHLDQVEVASGLTLCKEGCEAIVDTGTSLMVGPVDEVRELQKAIGAVPLIQGEYMIPCEKVSTLPAITLKLGGKGYKLSPEDYTLKAQGPGQCPAPLGDPASTTDGAQEARVPLDGAFWIPRPPAGSPKGCFACVSKPPALQAPAAPAPEPSASPPMAPTLFPMESKSSKTDSVRAAGAPPACKHLAEKKTMTNPTTVIEVYPDTTEVNDYYLWSIFNFVYLNFCCLGFIALAYSLKPRLEWPRPDVLHQCSCPAGWGRRQGMQGEKRLGRGWLGGRTPGQLRLCSILELEPHPARHRNCGRRSPPAPDSS

SEQ ID NO: 34371 - protein, 276 aa, Homo sapiens
LQPHPGLGEGTGREGEGGSMAVPCQSASSASALGGVKVERQVFGEATKQPGITFIAAKFDGILGMAYPRISVNNVLPVFDNLMQQKLVDQNIFSFYLSRDPDAQPGGELMLGGTDSKYYKGSLSYLNVTRKAYWQVHLDQVEVASGLTLCKEGCEAIVDTGTSLMVGPVDEVRELQKAIGAVPLIQGEYMIPCEKVSTLPAITLKLGGKGYKLSPEDYTLKVSQAGKTLCLSGFMGMDIPPPSGPLWILGDVFIGRYYTVFDRDNNRVGFAEAARL

SEQ ID NO: 34372 - protein, 427 aa, Homo sapiens
LRRHPGYKRTASATLSDPAAAAMQPSSLLPLALCLLAAPASALVRIPLHKFTSIRRTMSEVGGSVEDLIAKGPVSKYSQAVPAVTEGPIPEAQYYGEIGIGTPPQCFTVVFDTGSSNLWVPSIHCKLLDIACWIHHKYNSDKSSTYVKNGTSFDIHYGSGSLSGYLSQDTVSVPCQSASSASALGGVKVERQVFGEATKQPGITFIAAKFDGILGMAYPRISVNNVLPVFDNLMQQKLVDQNIFSFYLSRDPDAQPGGELMLGGTDSKYYKGSLSYLNVTRKAYWQVHLDQVEVASGLTLCKEGCEAIVDTGTSLMVGPVDEVRELQKAIGAVPLIQGEYMIPCEKVSTLPAITLKLGGKGYKLSPEDYTLKVSQAGKTLCLSGFMGMDIPPPSGPLWILGDVFIGRYYTVFDRDNNRVGFAEAARL

SEQ ID NO: 34373 - protein, 427 aa, Homo sapiens
LRRHPGYKRTASATLSDPAAAAMQPSSLLPLALCLLAAPASALVRIPLHKFTSIRRTMSEVGGSVEDLIAKGPVSKYSQAVPAVTEGPIPEVLKNYMDAQYYGEIGIGTPPQCFTVVFDTGSSNLWVPSIHCKLLDIACWIHHKYNSDKSSTYVKNGTSFDIHYGSGSLSGYLSQDTVSVPCQSASSASALGGVKVERQVFGEATKQPGITFIAAKFDGILGMAYPRISVNNVLPVFDNLMQQKLVDQNIFSFYLSRDPDAQPGGELMLGGTDSKYYKGSLSYLNVTRKAYWQVHLDQVEVASGLTLCKEGCEAIVDTGTSLMVGPVDEVRELQKAIGAVPLIQGEVSTLPAITLKLGGKGYKLSPEDYTLKVSQAGKTLCLSGFMGMDIPPPSGPLWILGDVFIGRYYTVFDRDNNRVGFAEAARL

SEQ ID NO: 34374 - protein, 432 aa, Homo sapiens
LRRHPGYKRTASATLSDPAAAAMQPSSLLPLALCLLAAPASALVRIPLHKFTSIRRTMSEVGGSVEDLIAKGPVSKYSQAVPAVTEGPIPEVLKNYMDYYGEIGIGTPPQCFTVVFDTGSSNLWVPSIHCKLLDIACWIHHKYNSDKSSTYVKNGTSFDIHYGSGSLSGYLSQDTVSVPCQSASSASALGGVKVERQVFGEATKQPGITFIAAKFDGILGMAYPRISVNNVLPVFDNLMQQKLVDQNIFSFYLSRDPDAQPGGELMLGGTDSKYYKGSLSYLNVTRKAYWQVHLDQVEVASGLTLCKEGCEAIVDTGTSLMVGPVDEVRELQKAIGAVPLIQGEYMIPCEKVSTLPAITLKLGGKGYKLSPEDYTLKVSQAGKTLCLSGFMGMDIPPPSGPLWILGDVFIGRYYTVFDRDNNRVGFAEAARL

SEQ ID NO: 34375 - protein, 445 aa, Homo sapiens
VQTRGSADPAQLRRHPGYKRTASATLSDPAAAAMQPSSLLPLALCLLAAPASALVRIPLHKFTSIRRTMSEVGGSVEDLIAKGPVSKYSQAVPAVTEGPIPEVLKNYMDAQYYGEIGIGTPPQCFTVVFDTGSSNLWVPSIHCKLLDIACWIHHKYNSDKSSTYVKNGTSFDIHYGSGSLSGYLSQDTVSVPCQSASSASALGGVKVERQVFGEATKQPGITFIAAKFDGILGMAYPRISVNNVLPVFDNLMQQKLVDQNIFSFYLSRDPDAQPGGELMLGGTDSKYYKGSLSYLNVTRKAYWQVHLDQVEVASGLTLCKEGCEAIVDTGTSLMVGPVDEVRELQKAIGAVPLIQGEYMIPCEKVSTLPAITLKLGGKGYKLSPEDYTLKVSQAGKTLCLSGFMGMDIPPPSGPLWILGDVFIGRYYTVFDRDNNRVGFAEAARL

SEQ ID NO: 34376 - protein, 261 aa, Homo sapiens
LARPSPKTARPPWTIRRILPPPPKKSHPPALPRRTFGPRDSARAALAEECPAGGPTPAVRFATRSREVGGSVAGFQTPMGIPMGKSMLVLLTFLAFASCCIAAYRPSETLCGGELVDTLQFVCGDRGFYFRLPGRPASRVSRRSRGIVEECCFRSCDLALLETYCATPAKSERDVSTPPTVLPDNFPRYPVGKFFQYDTWKQSTQRLRRGLPALLRARRGHVLAKELEAFREAKRHRPLIALPTQDPAHGGAPPEMASNRK

SEQ ID NO: 34377 - protein, 258 aa, Homo sapiens
LARPSPKTARPPWTIRRILPPPPKKSHPPALPRRTFGPRDSARAALAEECPAGGPTPAVRFATRSREVGGSVAGFQTPMGIPMGKSMLVLLTFLAFASCCIAAYRPSETLCGGELVDTLQFVCGDRGFYFSRPASRVSRRSRGIVEECCFRSCDLALLETYCATPAKSERDVSTPPTVLPDNFPRYPVGKFFQYDTWKQSTQRLRRGLPALLRARRGHVLAKELEAFREAKRHRPLIALPTQDPAHGGAPPEMASNRK

SEQ ID NO: 34378 - protein, 145 aa, Homo sapiens [sequence omitted]

SEQ ID NO: 34379 - protein, 244 aa, Homo sapiens
VLSHHVWKVTASLFLSPSGSQLWKWRDSEKLAGGVILGVALWLRHDPQTTNLLYLELGDKPAPNTFYVGIYILIAVGAVMMFVGFLGCYGAIQESQCLLGTFFTCLVILFACEVAAGIWGFVNKDQIAKDVKQFYDQALQQAVVDDDANNAKAVVKTFHETLDCCGSSTLTALTTSVLKNNLCPSGSNIISNLFKEDCHQKIDDLFSGKLYLIGIAAIVVAVIMIFEMILSMVLCCGIRNSSVY

SEQ ID NO: 34380 - protein, 709 aa, Homo sapiens
LAAVAARTAPGRSPSLQLPVPPLGPAPRQALLVMAAASSPPRAERKRWGWGRLPGARRGSAGLAKKCPFSLELAEGGPAGGALYAPIAPGAPGPAPPASPAAPAAPPVASDLGPRPPVSLDPRVSIYSTRRPVLARTHVQGRVYNFLERPTGWKCFVYHFAVFLIVLVCLIFSVLSTIEQYAALATGTLFWMEIVLVVFFGTEYVVRLWSAGCRSKYVGLWGRLRFARKPISIIDLIVVVASMVVLCVGSKGQVFATSAIRGIRFLQILRMLHVDRQGGTWRLLGSVVFIHRQELITTLYIGFLGLIFSSYFVYLAEKDAVNESGRVEFGSYADALWWGVVTVTTIGYGDKVPQTWVGKTIASCFSVFAISFFALPAGILGSGFALKVQQKQRQKHFNRQIPAAASLIQTAWRCYAAENPDSSTWKIYIRKAPRSHTLLSPSPKPKKSVVVKKKKFKLDKDNGVTPGEKMLTVPHITCDPPEERRLDHFSVDGYDSSVRKSPTLLEVSMPHFMRTNSFAEDLDLEGETLLTPITHISQLREHHRATIKVIRRMQYFVAKKKFQQARKPYDVRDVIEQYSQGHLNLMVRIKELQRRLDQSIGKPSLFISVSEKSKDRGSNTIGARLNRVEDKVTQLDQRLALITDMLHQLLSLHGGSTPGSGGPPREGGAHITQPCGSGGSVDPELFLPSNTLPTYEQLTVPRRGPDEGS

SEQ ID NO: 34381 - protein, 486 aa, Homo sapiens
LERSPHRHPCPSPPLQRQARPGGCCLGPSDSAPLPGSTGLLPPAPPASCLDLSWVSLLRLSRMQGARAPRDQGRSPGRMSALGRSSVILLTYVLAATELTCLFMQFSIVPYLSRKLGLDSIAFGYLQTTFGVLQLLGGPVFGRFADQRGARAALTLSFLAALALYLLLAAASSPALPGVYLLFASRLPGALMHTLPAAQMVITDLSAPEERPAALGRLGLCFGVGVILGSLLGGTLVSAYGIQCPAILAALATLLGAVLSFTCIPASTKGAKTDAQAPLPGGPRASVFDLKAIASLLRLPDVPRIFLVKVASNCPTGLFMVMFSIISMDFFQLEAAQAGYLMSFFGLLQMVTQGLVIGQLSSHFSEEVLLRASVLVFIVVGLAMAWMSSVFHFCLLVPGLVFSLCTLNVVTDSMLIKAVSTSDTGTMLGLCASVQPLLRTLGPTVGGLLYRSFGVPVFGHVQVAINTLVLLVLWRKPMPQRKDKVR

SEQ ID NO: 34382 - protein, 388 aa, Homo sapiens
LERSPHRHPCPSPPLQRQARPGGCCLGPSDSAPLPGSTGLLPPAPPASCLDLSWVSLLRLSRMQGARAPRDQGRSPGRMSALGRSSVILLTYVLAATELTCLFMQFSIVPYLSRKLGLDSIAFGYLQTTFGVLQLLGGPVFGRIQCPAILAALATLLGAVLSFTCIPASTKGAKTDAQAPLPGGPRASVFDLKAIASLLRLPDVPRIFLVKVASNCPTGLFMVMFSIISMDFFQLEAAQAGYLMSFFGLLQMVTQGLVIGQLSSHFSEEVLLRASVLVFIVVGLAMAWMSSVFHFCLLVPGLVFSLCTLNVVTDSMLIKAVSTSDTGTMLGLCASVQPLLRTLGPTVGGLLYRSFGVPVFGHVQVAINTLVLLVLWRKPMPQRKDKVR

SEQ ID NO: 34383 - protein, 51 aa, Homo sapiens
LSRQSSTSCPRGSVSPASRRSCDPQAPGDPEVKRQALWRPGDGVICPENLS

SEQ ID NO: 34384 - protein, 122 aa, Homo sapiens
VKLLMVLTLQFLSHDQGQITKELQQFVVSGSPMRAPEEGKYVGDIFLYSWTSTLVTCSCIQRDHTAGAYDRLNHHSLPSDQLEIKSGDGCGAHRTGTSHCRAGGTGHLLFCALGGSRHRAPH

SEQ ID NO: 34385 - protein, 80 aa, Homo sapiens [sequence omitted]

SEQ ID NO: 34386 - protein, 545 aa, Homo sapiens
LRPRVMDVCVRLALWLLWGLLLHQGQSLSHSHSEKATGTSSGANSEESTAAEFCRIDKPLCHSEDEKLSFEAVRNIHKLMDDDANGDVDVEESDEFLREDLNYHDPTVKHSTFHGEDKLISVEDLWKAWKSSEVYNWTVDEVVQWLITYVELPQYEETFRKLQLSGHAMPRLAVTNTTMTGTVLKMTDRSHRQKLQLKALDTVLFGPPLLTRHNHLKDFMLVVSIVIGVGGCWFAYIQNRYSKEHMKKMMKDLEGLHRAEQSLHDLQERLHKAQEEHRTVEVEKVHLEKKLRDEINLAKQEAQRLKELREGTENERSRQKYAEEELEQVREALRKAEKELESHSSWYAPEALQKWLQLTHEVEVQYYNIKKQNAEKQLLVAKEGAEKIKKKRNTLFGTFHVAHSSSLDDVDHKILTAKQALSEVTAALRERLHRWQQIEILCGFQIVNNPGIHSLVAALNIDPSWMGSTRPNPAHFIMTDDVDDMDEEIVSPLSMQSPSLQSSVRQRLTEPQHGLGSQRGSSLKANRLSSKGFDPFRFGVLPPHE

SEQ ID NO: 34387 - protein, 690 aa, Homo sapiens
LRPRVMDVCVRLALWLLWGLLLHQGQSLSHSHSEKATGTSSGANSEESTAAEFCRIDKPLCHSEDEKLSFEAVRNIHKLMDDDANGDVDVEESDEFLREDLNYHDPTVKHSTFHGEDKLISVEDLWKAWKSSEVYNWTVDEVVQWLITYVELPQYEETFRKLQLSGHAMPRLAVTNTTMTGTVLKMTDRSHRQKLQLKALDTVLFGPPLLTRHNHLKDFMLVVSIVIGVGGCWFAYIQNRYSKEHMKKMMKDLEGLHRAEQSLHDLQERLHKAQEEHRTVEVEKVHLEKKLRDEINLAKQEAQRLKELREGTENERSRQKYAEEELEQVREALRKAEKELESHSSWYAPEALQKWLQLTHEVEVQYYNIKKQNAEKQLLVAKEGAEKIKKKRNTLFGTFHVAHSSSLDDVDHKILTAKQALSEVTAALRERLHRWQQIEILCGFQIVNNPGIHSLVAALNIDPSWMGSTRPNPAHFIMTDDVDDMDEEIVSPLSMQSPSLQSSVRQRLTEPQHGLGSQRDLTHSDSESSLHMSDRQRVAPKPPQMSRAADEALNAMTSNGSHRLIEGVHPGSLVEKLPDSPALAKKALLALNHGLDKAHSLMELSPSAPPGGSPHLDSSRSHSPSSPDPDTPSPVGDSRALQASRNTRIPHLAGKKAVAEEDNGSIGEETDSSPGRKKFPLKIFKKPLKK

SEQ ID NO: 34388 - protein, 796 aa, Homo sapiens
LRPRVMDVCVRLALWLLWGLLLHQGQSLSHSHSEKATGTSSGANSEESTAAEFCRIDKPLCHSEDEKLSFEAVRNIHKLMDDDANGDVDVEESDEFLREDLNYHDPTVKHSTFHGEDKLISVEDLWKAWKSSEVYNWTVDEVVQWLITYVELPQYEETFRKLQLSGHAMPRLAVTNTTMTGTVLKMTDRSHRQKLQLKALDTVLFGPPLLTRHNHLKDFMLVVSIVIGVGGCWFAYIQNRYSKEHMKKMMKDLEGLHRAEQSLHDLQERLHKAQEEHRTVEVEKVHLEKKLRDEINLAKQEAQRLKELREGTENERSRQKYAEEELEQVREALRKAEKELESHSSWYAPEALQKWLQLTHEVEVQYYNIKKQNAEKQLLVAKEGAEKIKKKRNTLFGTFHVAHSSSLDDVDHKILTAKQALSEVTAALRERLHRWQQIEILCGFQIVNNPGIHSLVAALNIDPSWMGSTRPNPAHFIMTDDVDDMDEEIVSPLSMQSPSLQSSVRQRLTEPQHGLGSQRLVEGEAGHFLTSRVSLRRMRSLSSGQSFSSEGYGTSSPSASAAASCSSSITTITTTTTTTTTFTTVHVHPVYYHHSTSYFLQMEPYPDTPPSDSTAVMPGHSESLGDLTHSDSESSLHMSDRQRVAPKPPQMSRAADEALNAMTSNGSHRLIEGVHPGSLVEKLPDSPALAKKALLALNHGLDKAHSLMELSPSAPPGGSPHLDSSRSHSPSSPDPDTPSPVGDSRALQASRNTRIPHLAGKKAVAEEDNGSIGEETDSSPGRKKFPLKIFKKPLKK

SEQ ID NO: 34389 - protein, 175 aa, Homo sapiens [sequence omitted]

SEQ ID NO: 34390 - protein, 66 aa, Homo sapiens
LGAAGYWACAAGLWVLGLCRSLALSAELPGTAASDAGPLDAAEPGFFTLSFRREAPVRAEEGVGTS

SEQ ID NO: 34391 - protein, 147 aa, Homo sapiens
LSRLKKNLLFMVVLGEMKRKVLPLHFLPFMRLLVVYPWTQRFFDSFGNLSSASAIMGNPKVKAHGKKVLTSLGDAIKHLDDLKGTFAQLSELHCDKLHVDPENFKLLGNVLVTVLAIHFGKEFTPEVQASWQKMVTGVASALSSRYH

SEQ ID NO: 34392 - protein, 49 aa, Homo sapiens
LLPHAQLSGISSLKLLQLDLISMGGRLLFSTQQEMSYEENGPCSLGSRP

SEQ ID NO: 34393 - protein, 29 aa, Homo sapiens
LLPHAQLSGISSLKLLQLDLISMGGRKKF

SEQ ID NO: 34394 - protein, 90 aa, Homo sapiens
MASASASQRGQSGSGNFDGGMEVVSVGMTTLVMEETSVVVVALVATMVLVDMVAVGMAITDLVIMKAILEVVEATVILAITTISLQISDP

SEQ ID NO: 34395 - protein, 63 aa, Homo sapiens
MGTLMDCVVMRDPNTKCSRGFGFVTYATVEEVDAAMNARPHTVDGRVVEPKRAVSREDSQRPT

SEQ ID NO: 34396 - protein, 542 aa, Homo sapiens
VPWIALKSFDHLILLTSGTSWLLIPQMCGSERILQAGNILEIRVGQAGARRVATMTSPVLVDIREEVTCPICLELLTEPLSIDCGHSFCQACITPNGRESVIGQEGERSCPVCQTSYQPGNLRPNRHLANIVRRLREVVLGPGKQLKAVLCADHGEKLQLFCQEDGKVICWLCERSQEHRGHHTFLVEEVAQEYQEKFQESLKKLKNEEQEAEKLTAFIREKKTSWKNQMEPERCRIQTEFNQLRNILDRVEQRELKKLEQEEKKGLRIIEEAENDLVHQTQSLRELISDLERRCQGSTMELLQDVSDVTERSEFWTLRKPEALPTKLRSMFRAPDLKRMLRVCRELTDVQSYWVDVTLNPHTANLNLVLAKNRRQVRFVGAKVSGPSCLEKHYDCSVLGSQHFSSGKHYWEVDVAKKTAWILGVCSNSLGPTFSFNHFAQNHSAYSRYQPQSGYWVIGLQHNHEYRAYEDSSPSLLLSMTVPPRRVGVFLDYEAGTVSFYNVTNHGFPIYTFSKYYFPTTLCPYFNPCNCVIPMTLRRPSS

SEQ ID NO: 34397 - protein, 868 aa, Homo sapiens
VPWIALKSFDHLILLTSGTSWLLIPQMCGSERILQAGNILEIRVGQAGARRVATMTSPVLVDIREEVTCPICLELLTEPLSIDCGHSFCQACITPNGRESVIGQEGERSCPVCQTSYQPGNLRPNRHLANIVRRLREVVLGPGKQLKAVLCADHGEKLQLFCQEDGKVICWLCERSQEHRGHHTFLVEEVAQEYQEKFQESLKKLKNEEQEAEKLTAFIREKKTSWKNQMEPERCRIQTEFNQLRNILDRVEQRELKKLEQEEKKGLRIIEEAENDLVHQTQSLRELISDLERRCQGSTMELLQDVSDVTERSEFWTLRKPEALPTKLRSMFRAPDLKRMLRVCRELTDVQSYWAIQGSLTRRERRASGVRTRRSQGSSAMASKILLNVQEEVTCPICLELLTEPLSLDCGHSLCRACITVSNKEAVTSMGGKSSCPVCGISYSFEHLQANQHLANIVERLKEVKLSPDNGKKRDLCDHHGEKLLLFCKEDRKVICWLCERSQEHRGHHTVLTEEVFKECQEKLQAVLKRLKKEEEEAEKLEADIREEKTSWKYQVQTERQRIQTEFDQLRSILNNEEQRELQRLEEEEKKTLDKFAEAEDELVQQKQLVRELISDVECRSQWSTMELLQDMSGIMKWSEIWRLKKPKMVSKKLKTVFHAPDLSRMLQMFRELTAVRCYWVDVTLNSVNLNLNLVLSEDQRQVISVPIWPFQCYNYGVLGSQYFSSGKHYWEVDVSKKTAWILGVYCRTYSRHMKYVVRRCANRQNLYTKYRPLFGYWVIGLQNKCKYGVFEESLSSDPEVLTLSMAVPPCRVGVFLDYEAGIVSFFNVTSHGSLIYKFSKCCFSQPVYPYFNPWNCPAPMTLCPPSS

SEQ ID NO: 34398 - protein, 405 aa, Homo sapiens
LELLGFSFPRCAGQRDHGEKLQLFCQEDGKVICWLCERSQEHRGHHTFLVEEVAQEYQEKFQESLKKLKNEEQEAEKLTAFIREKKTSWKNQMEPERCRIQTEFNQLRNILDRVEQRELKKLEQEEKKGLRIIEEAENDLVHQTQSLRELISDLERRCQGSTMELLQDVSDVTERSEFWTLRKPEALPTKLRSMFRAPDLKRMLRVCRELTDVQSYWVDVTLNPHTANLNLVLAKNRRQVRFVGAKVSGPSCLEKHYDCSVLGSQHFSSGKHYWEVDVAKKTAWILGVCSNSLGPTFSFNHFAQNHSAYSRYQPQSGYWVIGLQHNHEYRAYEDSSPSLLLSMTVPPRRVGVFLDYEAGTVSFYNVTNHGFPIYTFSKYYFPTTLCPYFNPCNCVIPMTLRRPSS

SEQ ID NO: 34399 - protein, 139 aa, Homo sapiens
LQIDNARLAADDFRIKYETELAMCQSVKSEIHGLHKVIDDTNVTRLQLETEIEALKEELLFMKNHEKEVKGLQAQIASSGLTMETDAPKSQDHAKIMADIRNNTTSWLGRTERSWTSTGLSRLRRAPQWSHAVRQGRSC

SEQ ID NO: 34400 - protein, 272 aa, Homo sapiens
LQADGAERSGIMRESALERGPVPEAPAGGPVHAVTVVTLLEKLASMLETLRERQGGLARRQGGLAGSVRRIQSGLGALSRSHDTTSNTLAQLLAKAERVSSHANAAQERAVRRAAQVQRLEANHGLLVARGKLHVLLFKEEGEVPASAFQKAPEPLGPADQSELGPEQLEAEVGESSDEEPVESRAQRLRRTGLQKVQSLRRALSGRKGPAAPPPTPVKPPRLGPGRSAEAQPEAQPALEPTLEPEPPQDTEEDPGRPGAAEEALLQMESVA

SEQ ID NO: 34401 - protein, 304 aa, Homo sapiens
LQADGAERSGIMRESALERGPVPEAPAGGPVHAVTVVTLLEKLASMLETLRERQGGLARRQGGLAGSVRRIQSGLGALSRSHDTTSNTLAQLLAKAERVSSHANAAQERAVRRAAQVQRLEANHGLLVARGKLHVLLFKASPTLQRFAVRTQLSLPLPSHACLSPQTLAAEEEGEVPASAFQKAPEPLGPADQSELGPEQLEAEVGESSDEEPVESRAQRLRRTGLQKVQSLRRALSGRKGPAAPPPTPVKPPRLGPGRSAEAQPEAQPALEPTLEPEPPQDTEEDPGRPGAAEEALLQMESVA

SEQ ID NO: 34402 - protein, 314 aa, Homo sapiens
MVYWTGDIPAHDVWHQTRQDQLRALTTVTALVRKFLGPVPVYPAVGNHESTPVNSFPPPFIEGNHSSRWLYEAMAKAWEPWLPAEALRTLRYLSSVETQEGKRKVHIIGHIPPGHCLKSWSWNYYRIVARYENTLAAQFFGHTHVDEFEVFYDEETLSRPLAVAFLAPSATTYIGLNPGYRVYQIDGNYSGSSHVVLDHETYILNLTQANIPGAIPHWQLLYRARETYGLPNTLPTAWHNLVYRMRGDMQLFQTFWFLYHKGHPPSEPCGTPCRLATLCAQLSARADSPALCRHLMPDGSLPEAQSLWPRPLFC

SEQ ID NO: 34403 - protein, 355 aa, Homo sapiens
LTQILYLLPLFCVWQCFAVRSLGWVEMTEEELAPGRSSVAVNNCIRQLSYHKNNLHDPMSGGWGEGKDLLLQLEDETLKLVEPQSQALLHAQPIISIRVWGVGRDSGRDFAYVARDKLTQMLKCHVFRCEAPAKNIATSLHEICSKIMAERRNARCLVNGLSLDHSKLVDVPFQVEFPAPKNELVQKFQVYYLGNVPVAKPVGVDVINGALESVLSSSSREQWTPSHVSVAPATLTILHQQTEAVLGECRVRFLSFLAVGRDVHTFAFIMAAGPASFCCHMFWCEPNAASLSEAVQAACMLRYQKCLDARSQASTSCLPAPPAESVARRVGWTVRRGVQSLWGSLKPKRLGAHTP

SEQ ID NO: 34404 - protein, 487 aa, Homo sapiens
LEWCGSAGRQGCMTQMRDSFWNPNAFETDSDLPAGWMRVQDTSGTYYWHIPTGTTQWEPPGRASPSQGSSPQEESQLTWTGFAHGEGFEDGEFWKDEPSDEAPMELGLKEPEEGTLTFPAQSLSPEPLPQEEEKLPPRNTNPGIKCFAVRSLGWVEMTEEELAPGRSSVAVNNCIRQLSYHKNNLHDPMSGGWGEGKDLLLQLEDETLKLVEPQSQALLHAQPIISIRVWGVGRDSGSNRDFAYVARDKLTQMLKCHVFRCEAPAKNIATSLHEICSKIMAERRNARCLVNGLSLDHSKLVDVPFQVEFPAPKNELVQKFQVYYLGNVPVAKPVGVDVINGALESVLSSSSREQWTPSHVSVAPATLTILHQQTEAVLGECRVRFLSFLAVGRDVHTFAFIMAAGPASFCCHMFWCEPNAASLSEAVQAACMLRYQKCLDARSQASTSCLPAPPAESVARRVGWTVRRGVQSLWGSLKPKRLGAHTP

SEQ ID NO: 34405 - protein, 487 aa, Homo sapiens
LEWCGSAGRQGCMTQMRDSFWNPNAFETDSDLPAGWMRVQDTSGTYYWHIPTGTTQWEPPGRASPSQGSSPQEESQLTWTGFAHGEGFEDGEFWKDEPSDEAPMELGLKEPEEGTLTFPAQSLSPEPLPQEEEKLPPRNTNPGIKCFAVRSLGWVEMTEEELAPGRSSVAVNNCIRQLSYHKNNLHDPMSGGWGEGKDLLLQLEDETLKLVEPQSQALLHAQPIISIRVWGVGRDSGRERDFAYVARDKLTQMLKCHVFRCEAPAKNIATSLHEICSKIMAERRNARCLVNGLSLDHSKLVDVPFQVEFPAPKNELVQKFQVYYLGNVPVAKPVGVDVINGALESVLSSSSREQWTPSHVSVAPATLTILHQQTEAVLGECRVRFLSFLAVGRDVHTFAFIMAAGPASFCCHMFWCEPNAASLSEAVQAACMLRYQKCLDARSQASTSCLPAPPAESVARRVGWTVRRGVQSLWGSLKPKRLGAHTP

SEQ ID NO: 34406 - protein, 491 aa, Homo sapiens
LEVGVVLLPTLYREFNWSPRAVLWPLQLSMARVLGAPVALGLWSLCWSLAIATPLPPTSAHGNVAEGETKPDPDVTERCSDGWSFDATTLDDNGTMLFFKGEFVWKSHKWDRELISERWKNFPSPVDAAFRQGHNSVFLIKGDKVWVYPPEKKEKGYPKLLQDEFPGIPSPLDAAVECHRGECQAEGVLFFQGDREWFWDLATGTMKERSWPAVGNCSSALRWLGRYYCFQGNQFLRFDPVRGEVPPRYPRDVRDYFMPCPGRGHGHRNGTGHGNSTHHGPEYMRCSPHLVLSALTSDNHGATYAFSGTHYWRLDTSRDGWHSWPIAHQWPQGPSAVDAAFSWEEKLYLVQGTQVYVFLTKGGYTLVSGYPKRLEKEVGTPHGIILDSVDAAFICPGSSRLHIMAGRRLWWLDLKSGAQATWTELPWPHEKVDGALCMEKSLGPNSCSANGPGLYLIHGPNLYCYSDVEKLNAAKALPQPQNVTSLLGCTH

SEQ ID NO: 34407 - protein, 771 aa, Homo sapiens
VAAVRALPSHPVPTRGWCEWREPSVGAMAKREDSPGPEVQPMDKQFLVCSICLDRYQCPKVLPCLHTFCERCLQNYIPAQSLTLSCPVCRQTSILPEQGVSALQNNFFISSLMEAMQQAPDGAHDPEDPHPLSVVAGRPLSCPNHEGKTMEFYCEACETAMCGECRAGEHREHGTVLLRDVVEQHKAALQRQLEAVRGRLPQLSAAIALVGGISQQLQERKAEALAQISAAFEDLEQALQQRKQALVSDLETICGAKQKVLQSQLDTLRQGQEHIGSSCSFAEQALRLGSAPEVLLVRKHMRERLAALAAQAFPERPHENAQLELVLEVDGLRRSVLNLGALLTTSATAHETVATGEGLRQALVGQPASLTVTTKDKDGRLVRTGSAELRAEITGPDGTRLPVPVVDHKNGTYELVYTARTEGELLLSVLLYGQPVRGSPFRVRALRPGDLPPSPDDVKRRVKSPGGPGSHVRQKAVRRPSSMYSTGGKRKDNPIEDELVFRVGSRGREKGEFTNLQGVSAASSGRIVVADSNNQCIQVFSNEGQFKFRFGVRGRSPGQLQRPTGVAVDTNGDIIVADYDNRWVSIFSPEGKFKTKIGAGRLMGPKGVAVDRNGHIIVVDNKSCCVFTFQPNGKLVGRFGGRGATDRHFAGPHFVAVNNKNEIVVTDFHNHSVKVYSADGEFLFKFGSHGEGNGQFNAPTGVAVDSNGNIIVADWGNSRIQVFDSSGSFLSYINTSAEPLYGPQGLALTSDGHVVVADAGNHCFKAYRYLQ

SEQ ID NO: 34408 - protein, 826 aa, Homo sapiens
VAAVRALPSHPVPTRKGPLWFSCSLSPAWRTPGPSLVLTSSLLQLASDPGLQTCRDRWLQVGGAGCTPGRGWCEWREPSVGAMAKREDSPGPEVQPMDKQFLVCSICLDRYQCPKVLPCLHTFCERCLQNYIPAQSLTLSCPVCRQTSILPEQGVSALQNNFFISSLMEAMQQAPDGAHDPEDPHPLSVVAGRPLSCPNHEGKTMEFYCEACETAMCGECRAGEHREHGTVLLRDVVEQHKAALQRQLEAVRGRLPQLSAAIALVGGISQQLQERKAEALAQISAAFEDLEQALQQRKQALVSDLETICGAKQKVLQSQLDTLRQGQEHIGSSCSFAEQALRLGSAPEVLLVRKHMRERLAALAAQAFPERPHENAQLELVLEVDGLRRSVLNLGALLTTSATAHETVATGEGLRQALVGQPASLTVTTKDKDGRLVRTGSAELRAEITGPDGTRLPVPVVDHKNGTYELVYTARTEGELLLSVLLYGQPVRGSPFRVRALRPGDLPPSPDDVKRRVKSPGGPGSHVRQKAVRRPSSMYSTGGKRKDNPIEDELVFRVGSRGREKGEFTNLQGVSAASSGRIVVADSNNQCIQVFSNEGQFKFRFGVRGRSPGQLQRPTGVAVDTNGDIIVADYDNRWVSIFSPEGKFKTKIGAGRLMGPKGVAVDRNGHIIVVDNKSCCVFTFQPNGKLVGRFGGRGATDRHFAGPHFVAVNNKNEIVVTDFHNHSVKVYSADGEFLFKFGSHGEGNGQFNAPTGVAVDSNGNIIVADWGNSRIQVFDSSGSFLSYINTSAEPLYGPQGLALTSDGHVVVADAGNHCFKAYRYLQ

SEQ ID NO: 34409 - protein, 566 aa, Homo sapiens
LKPTCCPYSLLGLFALILSGKCSYSPEPDQRRTLPPGWVSLGRADPEEELSLTFALRQQNVERLSELVQAVSDPSSPQYGKYLTLENVADLVRPSPLTLHTVQKWLLAAGAQKCHSVITQDFLTCWLSIRQAELLLPGAEFHHYVGGPTETHVVRSPHPYQLPQALAPHVDFVGGLHRFPPTSSLRQRPEPQVTGTVGLHLGVTPSVIRKRYNLTSQDVGSGTSNNSQACAQFLEQYFHDSDLAQFMRLFGGNFAHQASVARVVGQQGRGRAGIEASLDVQYLMSAGANISTWVYSSPGRHEGQEPFLQWLMLLSNESALPHVHTVSYGDDEDSLSSAYIQRVNTELMKAAARGLTLLFASGDSGAGCWSVSGRHQFRPTFPASSPYVTTVGGTSFQEPFLITNEIVDYISGGGFSNVFPRPSYQEEAVTKFLSSSPHLPPSSYFNASGRAYPDVAALSDGYWVVSNRVPIPWVSGTSASTPVFGGILSLINEHRILSGRPPLGFLNPRLYQQHGAGLFDVTRGCHESCLDEEVEGQGFCSGPGWDPVTGWGTPNFPALLKTLLNP

SEQ ID NO: 34410 - protein, 198 aa, Homo sapiens
MGLQACLLGLFALILSGKCSYSPEPDQRRTLPPGWVSLGRADPEEELSLTFALRQQNVERLSELVQAVSDPSSPQYGKYLTLENVADLVRPSPLTLHTVQKWLLAAGAQKCHSVITQDFLTCWLSIRQAELLLPGAEFHHYVGGPTETHVVRSPHPYQLPQALAPHVDFGNTYGVNGGWGTQIQGLRKFRCHWGLGVG

SEQ ID NO: 34411 - protein, 42 aa, Homo sapiens
LKPTCCPYSLLGLFALILSGKCSYSPEPDQRRTKIPDPRECG

SEQ ID NO: 34412 - protein, 84 aa, Homo sapiens
LKPTCCPYSLLGLFALILSGKCSYSPEPDQRRTLPPGWVSLGRADPEEELSLTFALRQQNVERLSELVQAVSDPSSPQYGAFWD

SEQ ID NO: 34413 - protein, 90 aa, Homo sapiens
MTADPRKGRMGLQACLLGLFALILSGKCSYSPEPDQRRTLPPGWVSLGRADPEEELSLTFALRQQNVERLSELVQAVSDPSSPQYGAFWD

SEQ ID NO: 34414 - protein, 11 aa, Homo sapiens
MITGLWSTFTL

SEQ ID NO: 34415 - protein, 148 aa, Homo sapiens
VERMDCLPALEKLDWHLVFLLGWIRDVMSSQLIDYGKLGDTNERAMRMADFWLTEKDLIPKLFQVLAPRYKDQTGGYTRMLQIPNRSLDRAKMAVIEYKGNCLPPLPLPRRDSHLTLLNQLLQGLRQDLRQSQEASNHSSHTAQTPGI

SEQ ID NO: 34416 - protein, 1855 aa, Homo sapiens
LQNFLVNTINFCKKSSIYKTKCIKSHLRSLLDPHIYRVTNFPQAHFIMQWIFQSDSEQEQVNISQFSQLIEILKETQNNLMEVKVKSESPETVEEAQRKSTYEVSLALSCFLNYLQKTEQTDTQLLLLSIAAAAGYHVINNTFQSLLGCDELSFLLDEMQTAQNKYQELKNICSYRAQAFLVLTGLTATVGDTAISSEEKTQRMSLMRHHMGQSLSKEVAHVLTKPGADHDWENLEKDLRLLINGDYEEVTISSLQMEEVSKQSLFYGKKQPHEPHDNENNKWEMIKNGAFLDLLQHLGLEHYYPKKLSKANFHLIYKTSVYNTQPSSEQELPFYFLQKLLMMDYELRYLVFKDDRNTEHQVHPNASDQEDEAFDPYENFFEDSDSPTKSSSTEPSPHIHPVDIQMTIFHCADNFARQYILAKLSTCQFALPLLVPNPCTSQIEFSLWSLRQITRSWQEARKSPKGKNYYKNQQMCCVSTSIVSFVRVGNGLSASKSQIMNCLLSKRKHDVFFHRHCTGSRKDCLLMGGMVEICWFCPGGEDEDRFDNCVTFTNLHGDAKEHEQQLSFLKEVSTVIVVLMSASDDNEGNRKIVRNLWQSSRPLICLLDDKEATMTNISGQRMRMGIKNRNEAELTEELTTTIRHLLELSDTALSLEDCSQIAHQQGFLIDEDQRDCKEAKEKAQALMAFLGKMKLSQIKEKLLPLQGQLWHHWCKKDKELYHLREKGNQSIEQHKSEIETDKQIIRHEQLARALPLNDLMQSVLQFLQEHSEIHTKLYFLQWLSVFLDKLTAGHLEELHEKQKYWWSLVQTVKQKAPNSHSLICLQSEIEAISTEISDCTLGIEQLIREVGQIYEALEEASSIKKIFFSLPQIAADLMISGVPIELMDGDAAYVPLTWVAAVFDKVSEKLGDKRLFVLSILGLQSSGKSTVLNALFGLQFTVSAGKCTQGAYMQLLKVEETFTEELGFDFVLAVDTEGLRAPEHSNKSKDRDNELVTFVIGLANLTLINIFGENPSEMQDILQIVVQAFLRMKQVKIFPSCLFVHQNVGEATATDQTMDGRRRLEQKLDEMAAIAAEQEQCLDVTCFSDVIRFDVNTHVYYFAHLWDGNPPMAPPNPRYSHNVQQLKSRILMTATQESRGNIMKISDVKSRVQDLWRGLMNENFIFSFRNTQEVMAMNKLETMYNHWTWELRSHVLGLQNQLINQIQNGKIQTLEASTFEVLVTEKYEVVKQELEKYFNEGPCSKILIQCKANFENKLIVLKEKLISDSKRQANELISFKNQSQERLNKKKTDYEKELLEKSRKLALTVKGKELSEEELHEKFNQLWKKWVCDVSTTLPQVTEPDIDLDSENILWEYFKNKTNVVGLLTNSAEKFQINYDKHIKVNKKYNHIPMTLTVFEKEFINMTTDYIVSRFNKIINNMWKQQCGYNPNYFHEILKTIEEEVKSASTQKRYTFTNTFIIDLCVCLFQRARENFKEMHRAFKRANDPVNYLESKKDDFFTSFKISCQGATSIKTFVDVLWYKLTPAVSTTIWEDMTFKIAGDMRATCPAFNGNRTNLEKHILFSLAEEENFDNYWEYLHNSKSFFRSYIKNHIKRYCSDNGGEKMKTFFEKSLIDIKNTILSAIHESTSVAKDKSSTASEWLDLFCDCLGCNLIFPRRDLISIEHQEIKHTEFLKEAMSAALDLTMKKIEQNYSSKPIEAMVSKIEKMLSEHLCGCWKQCPSCGAICTNTIPTHEGDHSVPFHRPQAVNGEEWYETDDFVIDCCTSLVASDCLLVLRDGRNFPFKNYRQAGGDYAMWSITPDTSIQLYWKWFVSHFRSNLEEKYQKKFAGKGKIPNAWAKITKQDVLEDLKKQ

SEQ ID NO: 34417 - protein, 177 aa, Homo sapiens
LPCLVFCRMMVALRGASALLVLFLAAFLPPPQCTQDPAMVHYIYQRFRVLEQGLEKCTQATRAYIQEFQEFSKNISVMLGRCQTYTSEYKSAVGNLALRVERAQREIDYIQYLREADECIESEDKTLAEMLLQEAEEEKKIRTLLNASKKTASFPSPSRDYYAQKHTDSEQSGSIIE

SEQ ID NO: 34418 - protein, 64 aa, Homo sapiens
LPCLVFCRMMVALRGASALLVLFLAAFLPPPQCTQDPAMVHYIYQRFRVLEQGLEKCTQAVTTC

SEQ ID NO: 34419 - protein, 410 aa, Homo sapiens
LPCLVFCRMMVALRGASALLVLFLAAFLPPPQCTQDPAMVHYIYQRFRVLEQGLEKCTQATRAYIQEFQEFSKNISVMLGRCQTYTSEYKSAVGNLALRVERAQREIDYIQYLREADECIESEDKTLAEMLLQEAEEEKKIRTLLNASCDNMLMGIKSLKIVKKMMDTHGSWMKDAVYNSPKVYLLIGSRNNTVWEFANIRAFMEDNTKPAPRKQILTLSWQGTGQVIYKGFLFFHNQATSNEIIKYNLQKRTVEDRMLLPGGVGRALVYQHSPSTYIDLAVDEHGLWAIHSGPGTHSHLVLTKIEPGTLGVEHSWDTPCRSQDAEASFLLCGVLYVVYSTGGQGPHRITCIYDPLGTISEEDLPNLFFPKRPRSHSMIHYNPRDKQLYAWNEGNQIIYKLQTKRKLPLK

SEQ ID NO: 34420 - protein, 29 aa, Homo sapiens
MSSSHSRRGKPDKEFSSGLFPSGRLRYYH

SEQ ID NO: 34421 - protein, 560 aa, Homo sapiens
MPPRCSSPTVGPPPLPQKSLETRAQKKLSCSLEDLRSESVDKCMDGNQPFPVLEPKDSPFLAEHKYPTLPGKLSGATPNGEAAKSPPTICQPDATGSSLLRLRDTESGWDDTAVVNDLSSTSSGTESGPQSPLTPDGKRNPKGIKKFWGKIRRTQSGNFYTDTLGMAEFRRGGLRATAGPRLSRTRDSKGQKSDANAPFAQWSTERVCAWLEDFGLAQYVIFARQWVSSGHTLLTATPQDMEKELGIKHPLHRKKLVLAVKAINTKQEEKSALLDHIWVTRWLDDIGLPQYKDQFHESRVDRRMLQYLTVNDLLFLKVTSQLHHLSIKCAIHVLHVNKFNPHCLHRRPADESNLSPSEVVQWSNHRVMEWLRSVDLAEYAPNLRGSGVHGGLIILEPRFTGDTLAMLLNIPPQKTLLRRHLTTKFNALIGPEAEQEKREKMASPAYTPLTTTAKVRPRKLGFSHFGNIRKKKFDESTDYICPMEPSDGVSDSHRVYSGYRGLSPLDAPELDGLDQMAPSEGTVTQIGLLSQDIHRLTTMLSQDQLLNDSRLPAPNSDDWR

SEQ ID NO: 34422 - protein, 256 aa, Homo sapiens
LLLTITVTGVTVLVLVLKSMNSRRREPITLQDPEAKYPLPLIEKEKISHNTRRFRFGLPSPDHVLGLPVGNYVQLLAKIDNELVVRAYTPVSSDDDRGFVDLIIKIYFKNVHPQYPEGGKMTQYLENMKIGETIFFRGPRGRLFYHGPGNLGIRPDQTSEPKKTLADHLGMIAGGTGITPMLQLIRHITKDPSDRTRMSLIFANQTEEDILVRKELEEIARTHPDQFNLWYTLDRPPIGPWSAEGATLLSNSAQFH

SEQ ID NO: 34423 - protein, 209 aa, Homo sapiens
LLLTITVTGVTVLVLVLKSMNSRRREPITLQDPEAKYPLPLIEKEKISHNTRRFRFGLPSPDHVLGLPVGNYVQLLAKIDNELVVRAYTPVSSDDDRGFVDLIIKIYFKNVHPQYPEGGKMTQYLENMKIGETIFFRGPRGRLFYHGPGNLGIRPDQTSEPKKTLADHLGMIAGGTGITPMLQLIRHITKDPSDRTRMSLIFANQVSSC

SEQ ID NO: 34424 - protein, 58 aa, Homo sapiens
LLLTITVTGVTVLVLVLKSMNSRRREPITLQDPEAKYPLPLIEKEVMGQPCGWKAVSG

SEQ ID NO: 34425 - protein, 565 aa, Homo sapiens
MSLKMLISRNKLILLLGIVFFERGKSATLSLPKAPSCGQSLVKVQPWNYFNIFSRILGGSQVEKGSYPWQVSLKQRQKHICGGSIVSPQWVITAAHCIANRNIVSTLNVTAGEYDLSQTDPGEQTLTIETVIIHPHFSTKKPMDYDIALLKMAGAFQFGHFVGPICLPELREQFEAGFICTTAGWGRLTEGGVLSQVLQEVNLPILTWEECVAALLTLKRPISGKTFLCTGFPDGGRDACQGDSGGSLMCRNKKGAWTLAGVTSWGLGCGRGWRNNVRKSDQGSPGIFTDISKVLPWIHEHIQTGNRRKSSRAWCSEQDVIVSGAEGKLHFPESLHLYYESKQRCVWTLLVPEEMHVLLSFSHLDVESCHHSYLSMYSLEDRPIGKFCGESLPIGSNSLRLKFVSDATDNAAGFNLTYKALKPNYIPDSGCSYLTVLFEEGLIQSLNYPENYSDKANCDWIFQASKHHLIKLSFQSLEIEESGDCTSDYVTVHSDVERKKEIARLCGYDVPTPVLSPSSIMLISFQSDENGTCRGFQATVSFIPKAVYPDLNISISEDESMFLET

SEQ ID NO: 34426 - protein, 33 aa, Homo sapiens
LISLFPLSPKKLVSLASWGPILHALPTSPDSET

SEQ ID NO: 34427 - protein, 241 aa, Homo sapiens
LLLARLPRSRPGRLAPAPSPQSLLLRSLPAGLRSGLRSVCPRRRSRLSGLGARAGPAGAAQAAGGGSRSHAPLRILGASPAGAVGTMVLDQEDGVPMLSVQPKGKQKGCAGCNRKIKDRYLLKALDKYWHEDCLKCACCDCRLGEVGSTLYTKANLILCRRDYLRLFGTTGNCAACSKLIPAFEMVMRARDNVYHLDCFACQLCNQRFCVGDKFFLKNNMILCQMDYEEGQLNGTFESQVQ

SEQ ID NO: 34428 - protein, 50 aa, Homo sapiens
MKMEGAGALGLVLAGLPLECALGADQERWSPGRSRLGLPPGFGAGSPRPS

SEQ ID NO: 34429 - protein, 219 aa, Homo sapiens
LGSRWSVRWGRTRSGGLQGGRGWGSHPDLEQGRRGPADPPAFVRCVPTQGAMDNCLAAAALNGVDRRSLQRSARLALEVLERAKRRAVDWHALERPKGCMGVLAREAPHLEKQPAAGPQRVLPGEKYYSSVPEEGGATHVYRYHRGESKLHMCLDIGNGQRKDRKKTSLGPGGSYQISEHAPEASQPVSTELLTHWVSPPLQLHEPVDMVLRGLFELSL

SEQ ID NO: 34430 - protein, 246 aa, Homo sapiens
LGSRWSVRWGRTRSGGLQGGRGWGSHPDLEQGRRGPADPPAFVRCVPTQGAMDNCLAAAALNGVDRRSLQRSARLALEVLERAKRRAVDWHALERPKGCMGVLAREAPHLEKQPAAGPQRVLPGEREERPPTLSASFRTMAEFMDYTSSQCGKYYSSVPEEGGATHVYRYHRGESKLHMCLDIGNGQRKDRKKTSLGPGGSYQISEHAPEASQPVSTELLTHWVSPPLQLHEPVDMVLRGLFELSL

SEQ ID NO: 34431 - protein, 206 aa, Homo sapiens
LEQGRRGPADPPAFVRCVPTQGAMDNCLAAAALNGVDRRSLQRSARLALEVLERAKRRAVDWHALERPKGCMGVLAREAPHLEKQPAAGPQRVLPGEKYYSSVPEEGGATHVYRYHRGESKLHMCLDIGNGQRKDRKKTSLGPGGSYQISEHAPEASQPAENISKDLYIEVYPGTYSVTVGSNDLTKKTHVVAVDSGQSVDLVFPV

SEQ ID NO: 34432 - protein, 165 aa, Homo sapiens
LNNGPRLELHLTKGPIGPSGWPRICRPLSPGRPERVSPECGTDNAVREDAGGCRPGHLTLPSHRMPFKRGDRACNLGGAGRRSLKKNNCPALIVSCRVAWMGERSGACRETTLGLGSKGWPSKHLQSYRLILSPGSTEACFWTRSWPSICFYRGFAVPRVWPASV

SEQ ID NO: 34433 - protein, 160 aa, Homo sapiens
MTNTKGKRRGTRYMFSRPFRKHGVVPLATYMRIYKKADIVDIKGMGTAQKGMPHKCYHGKTGRVYNVTQHAVGIVVNKQVKGKILAKRIKVRIEHIKHSKSRDSFLKHVKENDQKKKDAKEKGTWVQLKRQPAPPREAHFVRTNGKQPELLEPISYEFMA

SEQ ID NO: 34434 - protein, 503 aa, Homo sapiens
LGRRGWRGSRAAAMGSLKEELLKAIWHAFTALDQDHSGKVSKSQLKVLSHNLCTVLKVPHDPVALEEHFRDDDEGPVSNQGYMPYLNRFILEKVQDNFDKIEFNRMCWTLCVKKNLTKNPLLITEEDAFKIWVIFNFLSEDKYPLIIVSEEIEYLLKKLTEAMGGGWQQEQFEHYKINFDDSKNGLSAWELIELIGNGQFSKGMDRQTVSMAINEVFNELILDVLKQGYMMKKGHRRKNWTERWFVLKPNIISYYVSEDLKDKKGDILLDENCCVESLPDKDGKKCLFLVKCFDKTFEISASDKKKKQEWIQAIHSTIHLLKLGSPPPHKEARQRRKELRKKQLAEQEELERQMKELQAANESKQQELEAVRKKLEEAASRAAEEEKKRLQTQVELQARFSTELEREKLIRQQMEEQVAQKSSELEQYLQRVRELEDMYLKLQEALEDERQARQDEETVRKLQARCQICLQTLPLCTLPGLIQFLGMTNTLVEREKCLCSGCD

SEQ ID NO: 34435 - protein, 24 aa, Homo sapiens
VNSFYLPRPRRSLLLRFQHVLWLS

SEQ ID NO: 34436 - protein, 68 aa, Homo sapiens
MSSGASASALQLLVEQLKLEAGVERIKVSQAAAELQQYCMQNACKDALLVGVPAGSNPFREPRSCALL

SEQ ID NO: 34437 - protein, 39 aa, Homo sapiens
LRFAAGMKLVSVALMYLGSLAFLGADTARLDVASEFRKK

SEQ ID NO: 34438 - protein, 145 aa, Homo sapiens
LRFAAGMKLVSVALMYLGSLAFLGADTARLDVASEFRKKWNKWALSRGKRELRMSSSYPTGLADVKAGPAQTLIRPQDMKGASRSPEDSCLSSPSPRPQQSGCRPHPSQALPPEHEQLPGPPELWLPLRDVHGAEAGTPDLPVHR

SEQ ID NO: 34439 - protein, 847 aa, Homo sapiens
LLRRPSLLPRGPPGRGSAALRPLNARPPRLLRGAAWPGPGPGWPQCPAAPLRSAQRVPFAPALRPSLSAGGMALSSEPAEMPRQFPKLNISEVDEQVRLLAEKVFAKVLREEDSKDALSLFTVPEDCPIGQKEAKERELQKELAEQKSVETAKRKKSFKMIRSQSLSLQMPPQQDWKGPPAASPAMSPTTPVVTGATSLPTPAPYAMPEFQRVTISGDYCAGITLEDYEQAAKSLAKALMIREKYARLAYHRFPRITSQYLGHPRADTAPPEEGLPDFHPPPLPQEDPYCLDDAPPNLDYLVHMQGGILFVYDNKKMLEHQEPHSLPYPDLETYTVDMSHILALITDGPTKTYCHRRLNFLESKFSLHEMLNEMSEFKELKSNPHRDFYNVRKVDTHIHAAACMNQKHLLRFIKHTYQTEPDRTVAEKRGRKITLRQVFDGLHMDPYDLTVDSLDVHAGRQTFHRFDKFNSKYNPVGASELRDLYLKTENYLGGEYFARMVKEVARELEESKYQYSEPRLSIYGRSPEEWPNLAYWFIQHKVYSPNMRWIIQVPRIYDIFRSKKLLPNFGKMLENIFLPLFKATINPQDHRELHLFLKYVTGFDSVDDESKHSDHMFSDKSPNPDVWTSEQNPPYSYYLYYMYANIMVLNNLRRERGLSTFLFRPHCGEAGSITHLVSAFLTADNISHGLLLKKSPVLQYLYYLAQIPIAMSPLSNNSLFLEYSKNPLREFLHKGLHVSLSTDDPMQFHYTKEALMEEYAIAAQVWKLSTCDLCEIARNSVLQSGLSHQEKQKFLGQNYYKEGPEGNDIRKTNVAQIRMAFRYETLCNELSFLSDAMKSEEITALTN

SEQ ID NO: 34440 - protein, 41 aa, Homo sapiens
LTIHSPGSYSQLQKHRKESGGLPLKRIGHLCLVKSLRRPNK

SEQ ID NO: 34441 - protein, 11 aa, Homo sapiens
MSAIGRRCTKL

SEQ ID NO: 34442 - protein, 52 aa, Homo sapiens
LVLFLVPGISFLLSPPLPTPSINIILLKILRCQAAKVESAIAEGGASRFRYL

SEQ ID NO: 34443 - protein, 67 aa, Homo sapiens
LVTPLPTPSLNFILLKSAFQAAKVERGITERRTPYFRKGVPYLRAPGSRMRDHLIHERMMFHLRIDE

SEQ ID NO: 34444 - protein, 62 aa, Homo sapiens
LAVDPVQASVKSAFQAAKVERGITERRTPYFRKGVPYLRAPGSRMRDHLIHERMMFHLRIDE

SEQ ID NO: 34445 - protein, 15 aa, Homo sapiens
MTFGFSAFVFCFSAL

SEQ ID NO: 34446 - protein, 408 aa, Homo sapiens
LPDLQTSSPALSANLSDMSGPVPSRARVYTDVNTHRPREYWDYESHVVEWGNQDDYQLVRKLGRGKYSEVFEAINITNNEKVVVKILKPVKKKKIKREIKILENLRGGPNIITLADIVKDPVSRTPALVFEHVNNTDFKQLYQTLTDYDIRFYMYEILKALDYCHSMGIMHRDVKPHNVMIDHEHRKLRLIDWGLAEFYHPGQEYNVRVASRYFKGPELLVDYQMYDYSLDMWRLGCMLASMIFRKEPFFHGRDNYDQLVRIAKFLGTEDLYGYIDKYNIELDPRFNDILGRHSRKRWERFVHSENQHLVSPEALDFLDKLLRYDHQSRLTAREAMEHPYFYTVVKDQARMGSSSMPGGSTPVSSANVMSGISSVPTPSPLGPLAGSPVIAAANPLGMPVPAATGAQQ

SEQ ID NO: 34447 - protein, 30 aa, Homo sapiens
LAMGSGVAADTGSGKVSQTYTSGRAAAGYP

SEQ ID NO: 34448 - protein, 72 aa, Homo sapiens
MQRLGATLLCLLLAAAVPTAPAPAPTATSAPVKPGPALSYPQEEATLNEMFREVEELMEDTQHKLRSAVEEI

SEQ ID NO: 34449 - protein, 385 aa, Homo sapiens
LHPQPGGLPAGASRSSPARSATRSSRGGGCGRRAEMQRLGATLLCLLLAAAVPTAPAPAPTATSAPVKPGPALSYPQEEATLNEMFREVEELMEDTQHKLRSAVEEMEAEEAAAKASSEVNLANLPPSYHNETNTDTKVGNNTIHVHREIHKITNNQTGQMVFSETVITSVGDEEGRRSHECIIDEDCGPSMYCQFASFQYTCQPCRGQRMLCTRDSECCGDQLCVWGHCTKMATRGSNGTICDNQRDCQPGLCCAFQRGLLFPVCTPLPVEGELCHDPASRLLDLITWELEPDGALDRCPCASGLLCQPHSHSLVYVCKPTFVGSRDQDGEILLPREVPDEYEVGSFMEEVRQELEDLERSLTEEMALREPAAAAAALLGGEEI

SEQ ID NO: 34450 - protein, 170 aa, Homo sapiens
LNARLGAGIFPEDFTGQRLAWKDQGGGCGRRAEMQRLGATLLCLLLAAAVPTAPAPAPTATSAPVKPGPALSYPQEEATLNEMFREVEELMEDTQHKLRSAVEEMEAEEAAAKASSEVNLANLPPSYHNETNTDTKVGNNTIHVHREIHKEECKYDIPHFQKRNPLLLQN

SEQ ID NO: 34451 - protein, 176 aa, Homo sapiens
MQRLGATLLCLLLAAAVPTAPAPAPTATSAPVKPGPALSYPQEEATLNEMFREVEELMEDTQHKLRSAVEEMEAEEAAAKASSEVNLANLPPSYHNETNTDTKVGNNTIHVHREIHKPKLQLRIIKYGLKTRRSNVTVESGETMYQDPKLLLHLSNIFNPRLPASPVAKECPGIII

SEQ ID NO: 34452 - protein, 201 aa, Homo sapiens
LHPQPGGLPAGASRSSPARSATRSSRGGGCGRRAEMQRLGATLLCLLLAAAVPTAPAPAPTATSAPVKPGPALSYPQEEATLNEMFREVEELMEDTQHKLRSAVEEMEAEEAAAKASSEVNLANLPPSYHNETNTDTKVGNNTIHVHREIHKVSHGQHFLLSIASSPIRELRFFCFCFFICDIQAQTTIENHKIRIENQKE

SEQ ID NO: 34453 - protein, 800 aa, Homo sapiens
LTGIRQLQLILFKVALMLGVEIHVNVEFVKVLEPPEDQENQKIGWRAEFLPTDHSLSEFEFDVIIGADGRRNTLEGFRRKEFRGKLAIAITANFINRNSTAEAKVEEISGVAFIFNQKFFQDLKEETGIDLENIVYYKDCTHYFVMTAKKQSLLDKGVIINDYIDTEMLLCAENVNQDNLLSYAREAADFATNYQLPSLDFAMNHYGQPDVAMFDFTCMYASENAALVRERQAHQLLVALVGDSLLEPFWPMGTGCARGFLAAFDTAWMVKSWNQGTPPLELLAERESLYRLLPQTTPENINKNFEQYTLDPGTRYPNLNSHCVRPHQVKHLYITKELEHYPLERLGSVRRSVNLSRKESDIRPSKLLTWCQQQTEGYQHVNVTDLTTSWRSGLALCAIIHRFRPELINFDSLNEDDAVENNQLAFDVAEREFGIPPVTTGKEMASAQEPDKLSMVMYLSKFYELFRGTPLRPVDSWRKNYGENADLSLAKSSISNNYLNLTFPRKRTPRVDGQTGENDMNKRRRKGFTNLDEPSNFSSRSLGSNQECGSSKEGGNQNKVKSMANQLLAKFEESTRNPSLMKQESMRKSFPLNLGGSDTCYFCKKRVYVMERLSAEGHFFHRECFRCSICATTLRLAAYTFDCDEGKFYCKPHFIHCKTNSKQRKRRAELKQQREEEATWQEQEAPRRDTPTESSCAVAAIGTLEGSPPGISTSFFRKVLGWPLRLPRDLCNWMQGLLQAAGLHIRDNAYNYCYMYELLSLGLPLLWAFSEVLAAMYRESEGSLESICNWVLRCFPVKLR

SEQ ID NO: 34454 - protein, 523 aa, Homo sapiens
VLGQSELTSRRLEDPGRVAGLGWFSDVFCARLCGGDRAWVNEAFRLDRSQPGHTRPPVLQGAVLGHPPCLGQPRGARRGPGSAAPSRAEGGAREGAREGAREGKGERELPQMLGIIPLPFGKPQPQSRRRPLRPPSASSASRPARGSLRRAMATSPQKSPSVPKSPTPKSPPSRKKDDSFLGKLGGTLARRKKAKEVSELQEEGMNAINLPLSPIPFELDPEDTMLEENEVRTMVDPNSRSDPKLQELMKVLIDWINDVLVGERIIVKDLAEDLYDGQVLQKLFEKLESEKLNVAEVTQSEIAQKQKLQTVLEKINETLKLPPRSIKWNVDSVHAKSLVAILHLLVALSQYFRAPIRLPDHVSIQVVVVQKREGILQSRQIQEEITGNTEALSGRHERDAFDTLFDHAPDKLNVVKKTLITFVNKHLNKLNLEVTELETQFADGVYLVLLMGLLEGYFVPLHSFFLTPDSFEQKVLNVSFAFELMQDGGLEKPKPRPEDIVNCDLKSTLRVLYNLFTKYRNVE

SEQ ID NO: 34455 - protein, 202 aa, Homo sapiens
LRPPSASSASRPARGSLRRAMATSPQKSPSVPKSPTPKSPPSRKKDDSFLGKLGGTLARRKKAKEVSELQEEGMNAINLPLSPIPFELDPEDTMLEENEVRTMVDPNSRSDPKLQELMKVLIDWINDVLVGERIIVKDLAEDLYDGQVLQKLFGRRVECCNGCVFNCRWLDHLLVARRSYSQFTVAYLEMDYKCVEHGITAQ

SEQ ID NO: 34456 - protein, 48 aa, Homo sapiens
VTLCPYFFLFQNFCFTTISLSLQVFFHSALGKLGTAGHHHPFNQLTPV

SEQ ID NO: 34457 - protein, 10 aa, Homo sapiens
MGATCVLSEQ

SEQ ID NO: 34458 - protein, 180 aa, Homo sapiens [sequence omitted]

SEQ ID NO: 34459 - protein, 360 aa, Homo sapiens
VTGAAPQLSAAGTPSQVFPPVSVPRSSEAPPAAERSESFKEGEVLQAYRYLWNRLRYPAPPPSNSRRLLCRSLSDTFGSTSLILSFAGGRNQARAATMFRNQYDNDVTVWSPQGRIHQIEYAMEAVKQGSATVGLKSKTHAVLVALKRAQSELAAHQKKILHVDNHIGISIAGLTADARLLCNFMRQECLDSRFVFDRPLPVSRLVSLIGSKTQIPTQRYGRRPYGVGLLIAGYDDMGPHIFQTCPSANYFDCRAMSIGARSQSARTYLERHMSEFMECNLNELVKHGLRALRETLPAEQDLTTKNVSIGIVGKDLEFTIYDDDDVSPFLEGLEERPQRKAQPAQPADEPAEKADEPMEH

SEQ ID NO: 34460 - protein, 275 aa, Homo sapiens
LSPGNVMQLSKVKFRNQYDNDVTVWSPQGRIHQIEYAMEAVKQGSATVGLKSKTHAVLVALKRAQSELAAHQKKILHVDNHIGISIAGLTADARLLCNFMRQECLDSRFVFDRPLPVSRLVSLIGSKTQIPTQRYGRRPYGVGLLIAGYDDMGPHIFQTCPSANYFDCRAMSIGARSQSARTYLERHMSEFMECNLNELVKHGLRALRETLPAEQDLTTKNVSIGIVGKDLEFTIYDDDDVSPFLEGLEERPQRKAQPAQPADEPAEKADEPMEH

SEQ ID NO: 34461 - protein, 146 aa, Homo sapiens
LILSFAGGRNQARAATMFRNQYDNDVTVWSPQGRIHQIEYAMEAVKQGSATVGLKSKTHAVLVALKRAQSELAAHQKKILHVDNHIGISIAGLTADARLLCNFMRQECLDSRFVFDRPLPVSRLVSLIGSSILFMLAFMDMNFEGF

SEQ ID NO: 34462 - protein, 204 aa, Homo sapiens
MVIFLHTCCHLNVVFLLFSKIFSLDLGGISTVVLNGYDVVKECLVHQSEIFADRPCLPLFMKMTKMGGLLNSRYGRGWVDHRRLAVNSFRYFGYGQKSFESKILEETKFFNDAIETYKGRPFDFKQLITNAVSNITNLIIFGERFTYEDTDFQHMIELFSENVELAASASVFLYNAFPWIGILPFGKHQQLFRNAAVRPRSVPS

SEQ ID NO: 34463 - protein, 66 aa, Homo sapiens
LLKNLQGQGSPCHLELGHCQAILSQKKKKKKIAIWNGRKRRKEGRKEKSRKGERKKRSLCGYEPLG

SEQ ID NO: 34464 - protein, 213 aa, Homo sapiens
LGPWRIVSCWFCGWEERREGSAFFVGIPARMSAARESHPHGVKRSASPDDDLGSSNWEAADLGNEERKQKFLRLMGAGKKEHTGRLVIGDHKSTSHFRTGEEDKKINEELESQYQQSMDSKLSGRYRRHCGLGFSEVEDHDGEGDVAGDDDDDDDDSPDPESPDDSESDSESEKEESAEELQAAEHPDEVEDPKNKKDAKSNYKMMFVKSSGS

SEQ ID NO: 34465 - protein, 106 aa, Homo sapiens [sequence omitted]

SEQ ID NO: 34466 - protein, 169 aa, Homo sapiens
VASCGVSTLALLSLPDRRHHGSHACSRGLSQSALPYRRSVPTWLKLTSDDVKEQIYKLAKKGLTPSQIGVILRDSHGVAQVRFVTGNKILRILKSKGLAPDLPEDLYHLIKKAVAVRKHLERNRKDKDAKFRLILIESRIHRLARYYKTKRVLPPNWKYESSTASALVA

SEQ ID NO: 34467 - protein, 174 aa, Homo sapiens
LRVGWLPAAFPLSLSFRCLIAAIMGRMHAPGKGLSQSALPYRRSVPTWLKLTSDDVKEQIYKLAKKGLTPSQIGVILRDSHGVAQVRFVTGNKILRILKSKGLAPDLPEDLYHLIKKAVAVRKHLERNRKDKDAKFRLILIESRIHRLARYYKTKRVLPPNWKYESSTASALVA

SEQ ID NO: 34468 - protein, 80 aa, Homo sapiens
LRVGWLPAAFPLSLSFRCLIAAIMGRMHAPGKGLSQSALPYRRSVPTWLKLTSDDVKEQIYKLAKKGLTPSQIGECLCLT

SEQ ID NO: 34469 - protein, 55 aa, Homo sapiens
LNMRWRTILLQYCFLLITCLLTALEAVPIDIDKTKVQNIHPVESAKIEPPVSEMK

SEQ ID NO: 34470 - protein, 340 aa, Homo sapiens
LNMRWRTILLQYCFLLITCLLTALEAVPIDIDKTKVQNIHPVESAKIEPPDTGLYYDEYLKQVIDVLETDKHFREKLQKADIEEIKSGRLSKELDLVSHHVRTKLDELKRQEVGRLRMLIKAKLDSLQDIGMDHQALLKQFDHLNHLNPDKFESTDLDMLIKAATSDLEHYDKTRHEEFKKYEMMKEHERREYLKTLNEEKRKEEESKFEEMKKKHENHPKVNHPGSKDQLKEVWEETDGLDPNDFDPKTFFKLHDVNSDGFLDEQELEALFTKELEKVYDPKNEEDDMVEMEEERLRMREHVMNEVDTNKDRLVTLEEFLKATEKKEFLEPDSWESPSI

SEQ ID NO: 34471 - protein, 422 aa, Homo sapiens
LNMRWRTILLQYCFLLITCLLTALEAVPIDIDKTKVQNIHPVESAKIEPPDTGLYYDEYLKQVIDVLETDKHFREKLQKADIEEIKSGRLSKELDLVSHHVRTKLDELKRQEVGRLRMLIKAKLDSLQDIGMDHQALLKQFDHLNHLNPDKFESTDLDMLIKAATSDLEHYDKTRHEEFKKYEMMKEHERREYLKTLNEEKRKEEESKFEEMKKKHENHPKVNHPGSKDQLKEVWEETDGLDPNDFDPKTFFKLHDVNSDGFLDEQELEALFTKELEKVYDPKNEEDDMVEMEEERLRMREHVMNEVDTNKDRLVTLEEFLKATEKKEFLEPDSWETLDQQQFFTEEELKEYENIIALQENELKKKADELQKQKEELQRQHDQLEAQKLEYHQVIQQMEQKKLQQGIPPSGPAGELKFEPRV

SEQ ID NO: 34472 - protein, 422 aa, Homo sapiens
LNMRWRTILLQYCFLLITCLLTALEAVPIDIDKTKVQNIHPVESAKIEPPDTGLYYDEYLKQVIDVLETDKHFREKLQKADIEEIKSGRLSKELDLVSHHVRTKLDELKRQEVGRLRMLIKAKLDSLQDIGMDHQALLKQFDHLNHLNPDKFESTDLDMLIKAATSDLEHYDKTRHEEFKKYEMMKEHERREYLKTLNEEKRKEEESKFEEMKKKHENHPKVNHPGSKDQLKEVWEETDGLDPNDFDPKTFFKLHDVNSDGFLDEQELEALFTKELEKVYDPKNEEDDMVEMEEERLRMREHVMNEVDTNKDRLVTLEEFLKATEKKEFLEPDSWETLDQQQFFTEEELKEYENIIALQENELKKKADELQKQKEELQRQHDQLEAQKLEYHQVIQQMEQKKLQQGIPPSGPAGELKFEPHI

SEQ ID NO: 34473 - protein, 139 aa, Homo sapiens
MKRSLPSGVDGHTWLLRQVSCGSEHNLAIIGGVCYSWGWNEHGMCGDGTEANVWAPKPVQALLSSSGLLVGCGAGHSLALCQLPAHPALVQDPKVTYLSPDAIEDTESQKAMDKERNWKERQSETSTQSQSDWSRNGGL

SEQ ID NO: 34474 - protein, 51 aa, Homo sapiens
LPLVLLASAAREGIPAPGRCRSRFPEAQPRDVWAAAHTTHVFGARRALLLL

SEQ ID NO: 34475 - protein, 15 aa, Homo sapiens
LWQLMAFLHVSLVFT

SEQ ID NO: 34476 - protein, 54 aa, Homo sapiens [sequence omitted]

SEQ ID NO: 34477 - protein, 202 aa, Homo sapiens
VIFIFSFFIVDILTYVAWKISGFPKNRVIGSGCNLDSARFRYLMGERLGVHPLSCHGWVLGEHGDSSVPVWSGMNVAGVSLKTLHPDLGTDKDKEQWKEVHKQVVESAYEVIKLKGYTSWAIGLSVADLAESIMKNLRRVHPVSTMIKGLYGIKDDVFLSVPCILGQNGISDLVKVTLTSEEEARLKKSADTLWGIQKELQF

SEQ ID NO: 34478 - protein, 345 aa, Homo sapiens
LVSLLCLPSKVLQMSTVKEQLIEKLIEDDENSQCKITIVGTGAVGMACAISILLKDLADELALVDVALDKLKGEMMDLQHGSLFFSTSKITSGKDYSVSANSRIVIVTAGARQQEGETRLALVQRNVAIMKSIIPAIVHYSPDCKILVVSNPVDILTYIVWKISGLPVTRVIGSGCNLDSARFRYLIGEKLGVHPTSCHGWIIGEHGDSSVPLWSGVNVAGVALKTLDPKLGTDSDKEHWKNIHKQVIQSAYEIIKLKGYTSWAIGLSVMDLVGSILKNLRRVHPVSTMVKGLYGIKEELFLSIPCVLGRNGVSDVVKINLNSEEEALFKKSAETLWNIQKDLIF

SEQ ID NO: 34479 - protein, 363 aa, Homo sapiens
LVSLLCLPSKVVLCPCGSSVLIAPSKAFVLQMSTVKEQLIEKLIEDDENSQCKITIVGTGAVGMACAISILLKDLADELALVDVALDKLKGEMMDLQHGSLFFSTSKITSGKDYSVSANSRIVIVTAGARQQEGETRLALVQRNVAIMKSIIPAIVHYSPDCKILVVSNPVDILTYIVWKISGLPVTRVIGSGCNLDSARFRYLIGEKLGVHPTSCHGWIIGEHGDSSVPLWSGVNVAGVALKTLDPKLGTDSDKEHWKNIHKQVIQSAYEIIKLKGYTSWAIGLSVMDLVGSILKNLRRVHPVSTMVKGLYGIKEELFLSIPCVLGRNGVSDVVKINLNSEEEALFKKSAETLWNIQKDLIF

SEQ ID NO: 34480 - protein, 41 aa, Homo sapiens
MMIVVLWMLLIAGTMWKGYKYPPGGTPVEVSKDDPGEVMQL

SEQ ID NO: 34481 - protein, 702 aa, Homo sapiens
LSVLSECLAQSLPPRPNMDFREILMIASKGQGVNNVPKRYSLAVGPPKKDPKVKGVQSAAVQAFLKRKEEELRRKALEEKRRKEELVKKRIELKHDKKARAMAKRTKDNFHGYNGIPIEEKSKKRQATESHTSQGTDREYEMEEENEFLEYNHAESEQEYEEEQEPPKVESKPKVPLKSAPPPMNFTDLLRLAEKKQFEPVEIKVVKKSEERPMTAEELREREFLERKHRRKKLETDGKLPPTVSKKAPSQKESVGTKLSKGSGDRHPSSKGMPLPHAEKKSRPSMANEKHLALSSSKSMPGERIKAGSGNSSQPSLREGHDKPVFNGAGKPHSSTSSPSVPKTSASRTQKSAVEHKAKKSLSHPSHSRPGPMVTPHNKAKSPGVRQPGSSSSSAPGQPSTGVARPTVSSGPVPRRQNGSSSSGPERSISGSKKPTNDSNPSRRTVSGTCGPGQPASSSGGPGRPISGSVSSARPLGSSRGPGRPVSSPHELRRPVSGLGPPGRSVSGPGRSISGSIPAGRTVSNSVPGRPVSSLGPGQTVSSSGPTIKPKCTVVSETISSKNIISRSSNGQMNGMKPPLSGYRAAQGPQRLPFPTGYKRQREYEEEDDDDDEYDSEMEDFIEDEGEPQEEISKHIREIFGYDRKKYKDESDYALRYMESSWKEQQKEEAKSLRLGMQEDLEEMRREEEEMQRRRAKKLKRR

SEQ ID NO: 34482 - protein, 492 aa, Homo sapiens
LPSSLSRCGLLGRWRGRGWARRYGIFERCKELVEAGYDVRQPDKENVSLLHWAAINNRLDLVKFYISKGAVVDQLGGDLNSTPLHWAIRQGHLPMVILLLQHGADPTLIDGEGFSSIHLAVLFQHMPIIAYLISKGQSVNMTDVNGQTPLMLSAHKVIGPEPTGFLLKFNPSLNVVDKIHQNTPLHWAVAAGNVNAVDKLLEAGSSLDIQNVKGETPLDMALQNKNQLIIHMLKTEAKMRANQKFRLWRWLQKCELFLLLMLSVITMWAIGYILDFNSDSWLLKGCLLVTLFFLTSLFPRFLVGYKNLVYLPTAFLLSSVFWIFMTWFILFFPDLAGAPFYFSFIFSIVAFLYFFYKTWATDPGFTKASEEEKKVNIITLAETGSLDFRTFCTSCLIRKPLRSLHCHVCNCCVARYDQHCLWTGRCIGFGNHHYYIFFLFFLSMVCGWIIYGSFICKCKFFLQQAHTSTPISTFPCKPLYITFWLGDYKPYS

SEQ ID NO: 34483 - protein, 586 aa, Homo sapiens
LPSSLSRCGLLGRWRGRGWARRYGIFERCKELVEAGYDVRQPDKENVSLLHWAAINNRLDLVKFYISKGAVVDQLGGDLNSTPLHWAIRQGHLPMVILLLQHGADPTLIDGEGFSSIHLAVLFQHMPIIAYLISKGQSVNMTDVNGQTPLMLSAHKVIGPEPTGFLLKFNPSLNVVDKIHQNTPLHWAVAAGNVNAVDKLLEAGSSLDIQNVKGETPLDMALQNKNQLIIHMLKTEAKMRANQKFRLWRWLQKCELFLLLMLSVITMWAIGYILDFNSDSWLLKGCLLVTLFFLTSLFPRFLVGYKNLVYLPTAFLLSSVFWIFMTWFILFFPDLAGAPFYFSFIFSIVAFLYFFYKTWATDPGFTKASEEEKKVNIITLAETGSLDFRTFCTSCLIRKPLRSLHCHVCNCCVARYDQHCLWTGRCIGFGNHHYYIFFLFFLSMVCGWIIYGSFIYLSSHCATTFKEDGLWTYLNQIVACSPWVLYILMLATFHFSWSTFLLLNQLFQIAFLGLTSHERISLQKQSKHMKQTLSLRKTPYNLGFMQNLADFFQCGCFGLVKPCVVDWTSQYTMVFHPAREKVLRSV

SEQ ID NO: 34484 - protein, 211 aa, Homo sapiens
LNGVHTGRLDLDQIVFKMPNWGGGAKCGACEKTVYHAEEIQCNGRSFHKTCFHCMACRKALDSTTVAAHESEIYCKVCYGRRYGPKGIGYGQGAGCLSTDTGEHLGLQFQQSPKPARSVTTSNPSKFTAKFGESEKCPRCGKSVYAAEKVMGGGKPWHKTCFRCAICGKSLESTNVTDKDGELYCKVCYAKNFGPTGIGFGGLTQQVEKKE

SEQ ID NO: 34485 - protein, 83 aa, Homo sapiens
LAIGMNLSSMFKILNCAGNEDVMMLGAEDNADNLALVFEALNQEKVSDYKMKLMDLDVEQLGIPKQEYSCVVKMPAGEFACIC

SEQ ID NO: 34486 - protein, 23 aa, Homo sapiens
LVLTRVLALVTFNALQSYDTGKP

SEQ ID NO: 34487 - protein, 277 aa, Homo sapiens
LMAGPAALSAAAAAALAAALLLLRREDPGPGAGPSMAETEALSKLREDFRMQNKSVFILGASGETGRVLLKEILEQGLFSKVTLIGRRKLTFDEEAYKNVNQEVVDFEKLDDYASAFQGHDVGFCCLGTTRGKAGAEGFVRVDRDYVLKSAELAKAGGCKHFNLLSSKGADKSSNFLYLQVKGEVEAKVEELKFDRYSVFRPGVLLCDRQESRPGEWLVRKFFGSLPDSWASGHSVPVVTVVRAMLNNVVRPRDKQMELLENKAIHDLGKAHGSLKP

SEQ ID NO: 34488 - protein, 18 aa, Homo sapiens
MVAMMMTTMIMTTMMMMK

SEQ ID NO: 34489 - protein, 65 aa, Homo sapiens [sequence omitted]

SEQ ID NO: 34490 - protein, 1004 aa, Homo sapiens
LSNFYFSLLFSLTGLQKLCFSHRELEKSVWAAKGKYNEGMNISKSEITKETSLKPSRRSLPCLAQSYAYSKSLSQSTSLFQSTESESQAPTSITLISTDKAEQVNTEENKNDSVLRCSFADLSDFCLALGKDKDYTDESEHATYDRSRLINDFVIKDKSEFKTKLSKNDMNYIASSGPLFKDGKKRIDYILVYRKTNIQYDKRNTFEKNLRAEGLMLEKEPAIASPDIMFIKIHIPWDTLCKYAERLNIRMPFRKKCYYTDGRSKSMGRMQTYFRRIKNWMAQNPMVLDKSAFPDLEESDCYTGPFSRARIHHFIINNKDTFFSNATRSRIVYHMLERTKYENGISKVGIRKLINNGSYIAAFPPHEGAYKSSQPIKTHGPQNNRHLLYERWARWGMWYKHQPLDLIRLYFGEKIGLYFAWLGWYTGMLIPAAIVGLCVFFYGLFTMNNSQVSQEICKATEVFMCPLCDKNCSLQRLNDSCIYAKVTYLFDNGGTVFFAIFMAIWATVFLEFWKRRRSILTYTWDLIEWEEEEETLRPQFEAKYYKMEIVNPITGKPEPHQPSSDKVTRLLVSVSGIFFMISLVITAVFGVVVYRLVVMEQFASFKWNFIKQYWQFATSAAAVCINFIIIMLLNLAYEKIAYLLTNLEYPRTESEWENSFALKMFLFQFVNLNSSIFYIAFFLGRFVGHPGKYNKLFDRWRLEECHPSGCLIDLCLQMGVIMFLKQIWNNFMELGYPLIQNWWSRHKIKRGIHDASIPQWENDWNLQPMNLHGLMDEYLEMVLQFGFTTIFVAAFPLAPLLALLNNIIEIRLDAYKFVTQWRRPLPARATDIGIWLGILEGIGILAVITNAFVIAITSDYIPRFVYEYKYGPCANHVEPSENCLKGYVNNSLSFFDLSELGMGKSGYCRYRDYRGPPWSSKPYEFTLQYWHILAARLAFIIVFEHLVFGIKSFIAYLIPDVPKGLHDRIRREKYLVQEMMYEAELEHLQQQRRKSGQPVHHEWP

SEQ ID NO: 34491 - protein, 25 aa, Homo sapiens
MKTVAGSAWTYNTTSAVTVKSPSED

SEQ ID NO: 34492 - protein, 18 aa, Homo sapiens
LQPETPWLPPQPPKALGL

SEQ ID NO: 34493 - protein, 210 aa, Homo sapiens
LFENRKKKNNIKLYVRRDFIMDNCEELIPEYLNFIRGVVDSEDLPLNISREMLQQSKILKVIRKNLVKKCLELFTELAEDKENCKKFYEQFSKNIKLGIQEDSQNRKKLSELLRYYTSASGDEMVSLKDYCTRMKEKQKHIYYITGETKDQVANSAFVERLGKHGLEVIYMIEPIDEYCVQQLKEFEGKTLVPVTKEGLELPEDEEKKKK

SEQ ID NO: 34494 - protein, 343 aa, Homo sapiens
MPEETQTQDQPMEEEEVETFAFQAEIAQLMSLIINTFYSNKEIFLRELISNSSDALDKIWYESLTDPSKLDSGKELHINLIPNKQDQTLTIVDTGIGMTKADLINNLGTIAKSGTKAFMEALQAGADISMIGQFGVSFYSAYLVAEKVTVITKHNDDEQYAWESSAGGSFTVRTDTGERMGRGTKVILHLKEDQTEYLEEQRIKEIVKKHSQLIGYPITLFVEKECDKEVSDDETEEKEDKEEEKEKEEKESKDKPEIEDVGSDEEEEKKDGDKKKKKTKEKYIDQEELNKTKPIWTRNPDDITNEEYGEFCKNLTNDWEDHLAVKHFSVEGQLEFRALLFVP

SEQ ID NO: 34495 - protein, 196 aa, Homo sapiens [sequence omitted]

SEQ ID NO: 34496 - protein, 378 aa, Homo sapiens
LAEGLASPLLRAGPNPVAAAALRVPIPELPLLSLAQRLPLGRPLLGTMARGGRGRRLGLALGLLLALVLAPRVLRAKPTVRKERVVRPDSELGERPPEDNQSFQYDHEAFLGKEDSKTFDQLTPDESKERLGKIVDRIDNDGDGFVTTEELKTWIKRVQKRYIFDNVAKVWKDYDRDKDDKISWEEYKQATYGYYLGNPAEFHDSSDHHTFKKMLPRDERRFKAADLNGDLTATREEFTAFLHPEEFEHMKEIVVLETLEDIDKNGDGFVDQDEYIADMFSHEENGPEPDWVLSEREQFNEFRDLNKDGKLDKDEIRHWILPQDYDHAQAEARHLVYESDKNKDEKLTKEEILENWNMFVGSQATNYGEDLTKNHDEL

SEQ ID NO: 34497 - protein, 258 aa, Homo sapiens
VWVSFFFFLYCRKIVDRIDNDGDGFVTTEELKTWIKRVQKRYIFDNVAKVWKDYDRDKDDKISWEEYKQATYGYYLGNPAEFHDSSDHHTFKKMLPRDERRFKAADLNGDLTATREEFTAFLHPEEFEHMKEIVVLETLEDIDKNGDGFVDQDEYIADMFSHEENGPEPDWVLSEREQFNEFRDLNKDGKLDKDEIRHWILPQDYDHAQAEARHLVYESDKNKDEKLTKEEILENWNMFVGSQATNYGEDLTKNHDEL

SEQ ID NO: 34498 - protein, 39 aa, Homo sapiens
LLLLLFKDRKQVSGNAELKPGSLNVQLEVLPTTPLPLQS

SEQ ID NO: 34499 - protein, 29 aa, Homo sapiens
MSVPAFIDISEEDQFFRKRTEFEIVLCHS

SEQ ID NO: 34500 - protein, 34 aa, Homo sapiens
VQRRRMTVFLASARILLPSALFLDTVGVEWMRAI

SEQ ID NO: 34501 - protein, 109 aa, Homo sapiens [sequence omitted]

SEQ ID NO: 34502 - protein, 73 aa, Homo sapiens
LGLQVYNKCWKFEHCNFNDVTTRLRENELTYYCCKKDLCNFNEQLENGGTSLSEKTVLLLVTPFLAAAWSLHP

SEQ ID NO: 34503 - protein, 113 aa, Homo sapiens
LTFFLILGHSLQCYNCPNPTADCKTAVNCSSDFDACLITKAGLQVYNKCWKFEHCNFNDVTTRLRENELTYYCCKKDLCNFNEQLENGGTSLSEKTVLLLVTPFLAAAWSLHP

SEQ ID NO: 34504 - protein, 138 aa, Homo sapiens
LGLQVLWTITMGIQGGSVLFGLLLVLAVFCHSGHSLQCYNCPNPTADCKTAVNCSSDFDACLITKAGLQVYNKCWKFEHCNFNDVTTRLRENELTYYCCKKDLCNFNEQLENGGTSLSEKTVLLLVTPFLAAAWSLHP

SEQ ID NO: 34505 - protein, 143 aa, Homo sapiens
LEEDLGRRQVLWTITMGIQGGSVLFGLLLVLAVFCHSGHSLQCYNCPNPTADCKTAVNCSSDFDACLITKAGLQVYNKCWKFEHCNFNDVTTRLRENELTYYCCKKDLCNFNEQLENGGTSLSEKTVLLLVTPFLAAAWSLHP

SEQ ID NO: 34506 - protein, 172 aa, Homo sapiens
LSGPKRSRTLGAGLTLVRLSLMLGLLSREPVDEVLQIPPSLLTCGGCQQNIGDRYFLKAIDQYWHEDCLSCDLCGCRLGEVGRRLYYKLGRKLCRRDYLRLFGQDGLCASCDKRIRAYEMTMRVKDKVYHLECFKCAACQKHFCVGDRYLLINSDIVCEQDIYEWTKINGMI

SEQ ID NO: 34507 - protein, 182 aa, Homo sapiens
VQRDRAKRPAPTERATLPGRDHHPCPLSCPLVISSGLRARTMPSATSHSGSGSKSSGPPPPSGSSGSEAAAGAGAAAPASQHPATGTGAVQTEAMKQILGVIDKKLRNLEKKKVPGVGGEGRGGCGRALRPLRPWSLEPSLLFVSGALLGPLLPPPGPHAPSPRSAGASCPENGLLEEALVT

SEQ ID NO: 34508 - protein, 130 aa, Homo sapiens
VQRDRAKRPAPTERATLPGRDHHPCPLSCPLVISSGLRARTMPSATSHSGSGSKSSGPPPPSGSSGSEAAAGAGAAAPASQHPATGTGAVQTEAMKQILGVIDKKLRNLEKKKRLDEWIPGPCQWIQRRI

SEQ ID NO: 34509 - protein, 735 aa, Homo sapiens
VQRDRAKRPAPTERATLPGRDHHPCPLSCPLVISSGLRARTMPSATSHSGSGSKSSGPPPPSGSSGSEAAAGAGAAAPASQHPATGTGAVQTEAMKQILGVIDKKLRNLEKKKGKLDDYQERMNKGERLNQDQLDAVSKYQEVTNNLEFAKELQRSFMALSQDIQKTIKKTARREQLMREEAEQKRLKTVLELQYVLDKLGDDEVRTDLKQGLNGVPILSEEELSLLDEFYKLVDPERDMSLRLNEQYEHASIHLWDLLEGKEKPVCGTTYKVLKEIVERVFQSNYFDSTHNHQNGLCEEEEAASAPAVEDQVPEAEPEPAEEYTEQSEVESTEYVNRQFMAETQFTSGEKEQVDEWTVETVEVVNSLQQQPQAASPSVPEPHSLTPVAQADPLVRRQRVQDLMAQMQGPYNFIQDSMLDFENQTLDPAIVSAQPMNPTQNMDMPQLVCPPVHSESRLAQPNQVPVQPEATQVPLVSSTSEGYTASQPLYQPSHATEQRPQKEPIDQIQATISLNTDQTTASSSLPAASQPQVFQAGTSKPLHSSGINVNAAPFQSMQTVFNMNAPVPPVNEPETLKQQNQYQASYNQSFSSQPHQVEQTELQQEQLQTVVGTYHGSPDQSHQVTGNHQQPPQQNTGFPRSNQPYYNSRGVSRGGSRGARGLMNGYRGPANGFRGGYDGYRPSFSNTPNSGYTQSQFSAPRDYSGYQRDGYQQNFKRGSGQSGPRGAPRGNILWW

SEQ ID NO: 34510 - protein, 723 aa, Homo sapiens
LSRVSPRPSPDWPLLSFLPLFLLSPCGLKMPSATSHSGSGSKSSGPPPPSGSSGSEAAAGAGAAAPASQHPATGTGAVQTEAMKQILGVIDKKLRNLEKKKGKLDDYQERMNKGERLNQDQLDAVSKYQEVTNNLEFAKELQRSFMALSQDIQKTIKKTARREQLMREEAEQKRLKTVLELQYVLDKLGDDEVRTDLKQGLNGVPILSEEELSLLDEFYKLVDPERDMSLRLNEQYEHASIHLWDLLEGKEKPVCGTTYKVLKEIVERVFQSNYFDSTHNHQNGLCEEEEAASAPAVEDQVPEAEPEPAEEYTEQSEVESTEYVNRQFMAETQFTSGEKEQVDEWTVETVEVVNSLQQQPQAASPSVPEPHSLTPVAQADPLVRRQRVQDLMAQMQGPYNFIQDSMLDFENQTLDPAIVSAQPMNPTQNMDMPQLVCPPVHSESRLAQPNQVPVQPEATQVPLVSSTSEGYTASQPLYQPSHATEQRPQKEPIDQIQATISLNTDQTTASSSLPAASQPQVFQAGTSKPLHSSGINVNAAPFQSMQTVFNMNAPVPPVNEPETLKQQNQYQASYNQSFSSQPHQVEQTELQQEQLQTVVGTYHGSPDQSHQVTGNHQQPPQQNTGFPRSNQPYYNSRGVSRGGSRGARGLMNGYRGPANGFRGGYDGYRPSFSNTPNSGYTQSQFSAPRDYSGYQRDGYQQNFKRGSGQSGPRGAPRGNILWW

SEQ ID NO: 34511 - protein, 31 aa, Homo sapiens
MPSETGILLILLGHCGEVLAPMWTDLGTVGN

SEQ ID NO: 34512 - protein, 192 aa, Homo sapiens
LPTMAQMEKALSIGFETCRYGFIEGHVVIPRIHPNSICAANNTGVYILTSNTSQYDTYCFNASAPPEEDCTSVTDLPNAFDGPITITIVNRDGTRYVQKGEYRTNPEDIYPSNPTDDDVSSGSSSERSSTSGGYIFYTFSTVHPIPDEDSPWITDSTDRIPATSKENKSLCFPIAIPWQNVSDLPEHCTLTC

SEQ ID NO: 34513 - protein, 295 aa, Homo sapiens
MELGCWTQLGLTFLQLLLISSLPREYTVINEACPGAEWNIMCRECCEYDQIECVCPGKREVVGYTIPCCRNEENECDSCLIHPGCTIFENCKSCRNGSWGGTLDDFYVKGFYCAECRAGWYGGDCMRCGQVLRAPKGQILLESYPLNAHCEWTIHAKPGFVIQLRFVMLSLEFDYMCQYDYVEVRDGDNRDGQIIKRVCGNERPAPIQSIGSSLHVLFHSDGSKNFDGFHAIYEEITACSSSPCFHDGTCVLDKAGSYKCACLAGYTGQRCENRLKDTNVQTPWLAPRSVINTLE

SEQ ID NO: 34514 - protein, 23 aa, Homo sapiens
LGCWTQLGLTFLQLLLISSLPRE

SEQ ID NO: 34515 - protein, 503 aa, Homo sapiens
LGSGGDSSSQRRAERRTEPRSAPRPRWGRSARSPGAHKLPGPPRRRDPGAWARLEAAAAHRHSRGSMGRRMRGAAATAGLWLLALGSLLALWGGLLPPRTELPASRPPEDRLPRRPARSGGPAPAPRFPLPPPLAWDARGGSLKTFRALLTLAAGADGPPRQSRSEPRWHVSARQPRPEESAAVHGGVFWSRGLEEQVPPGFSEAQAAAWLEAARGARMVALERGGCGRSSNRLARFADGTRACVRYGINPEQIQGEALSYYLARLLGLQRHVPPLALARVEARGAQWAQVQEELRAAHWTEGSVVSLTRWLPNLTDVVVPAPWRSEDGRLRPLRDAGGELANLSQAELVDLVQWTDLILFDYLTANFDRLVSNLFSLQWDPRVMQRATSNLHRGPGGALVFLDNEAGLVHGYRVAGMWDKYNEPLLQSVCVFRERTARRVLELHRGQDAAARLLRLYRRHEPRFPELAALADPHAQLLQRRLDFLAKHILHCKAKYGRRSGT

SEQ ID NO: 34516 - protein, 123 aa, Homo sapiens
LTSLLADFYSEQSTRLRTRRLESFPLLQVTRDQMKMFIQQEFKKVQKVIADEEQKALHLVDIQEAMATAHVTEILADIQSHMDRLMTQMAQAKEQLDTSNESAEPKAEGDEEGPSGASEEEDT

SEQ ID NO: 34517 - protein, 34 aa, Homo sapiens
LLLPLMSFWLTFWRSLLDTFLLVLEDQIHGTFEN

SEQ ID NO: 34518 - protein, 86 aa, Homo sapiens
LGLSLTMPTVEELYRNYGILADATEQVGQHKDAYQVILDGVKGGTKEKRLAAQFIPKFFKHFPELADSAINAQLDLCEDEDVSVSL

SEQ ID NO: 34519 - protein, 516 aa, Homo sapiens
LGLSLTMPTVEELYRNYGILADATEQVGQHKDAYQVILDGVKGGTKEKRLAAQFIPKFFKHFPELADSAINAQLDLCEDEDVSIRRQAIKELPQFATGENLPRVADILTQLLQTDDSAEFNLVNNALLSIFKMDAKGTLGGLFSQILQGEDIVRERAIKFLSTKLKTLPDEVLTKEVEELILTESKKVLEDVTGEEFVLFMKILSGLKSLQTVSGRQQLVELVAEQADLEQTFNPSDPDCVDRLLQCTRQAVPLFSKNVHSTRFVTYFCEQVLPNLGTLTTPVEGLDIQLEVLKLLAEMSSFCGDMEKLETNLRKLFDKLLEYMPLPPEEAENGENAGNEEPKLQFSYVECLLYSFHQLGRKLPDFLTAKLNAEKLKDFKIRLQYFARGLQVYIRQLRLALQGKTGEALKTEENKIKVVALKITNNINVLIKDLFHIPPSYKSTVTLSWKPVQKVEIGQKRASEDTTSGSPPKKSSAGPKRDARQIYNPPSGKYSSNLGNFNYGERFRLGTRNMRD

SEQ ID NO: 34520 - protein, 456 aa, Homo sapiens
LGLSLTMPTVEELYRNYGILADATEQVGQIRRQAIKELPQFATGENLPRVADILTQLLQTDDSAEFNLVNNALLSIFKMDAKGTLGGLFSQILQGEDIVRERAIKFLSTKLKTLPDEVLTKEVEELILTESKKVLEDVTGEEFVLFMKILSGLKSLQTVSGRQQLVELVAEQADLEQTFNPSDPDCVDRLLQCTRQAVPLFSKNVHSTRFVTYFCEQVLPNLGTLTTPVEGLDIQLEVLKLLAEMSSFCGDMEKLETNLRKLFDKLLEYMPLPPEEAENGENAGNEEPKLQFSYVECLLYSFHQLGRKLPDFLTAKLNAEKLKDFKIRLQYFARGLQVYIRQLRLALQGKTGEALKTEENKIKVVALKITNNINVLIKDLFHIPPSYKSTVTLSWKPVQKVEIGQKRASEDTTSGSPPKKSSAGPKRDARQIYNPPSGKYSSNLGNFNYERSLQGK

SEQ ID NO: 34521 - protein, 510 aa, Homo sapiens
LGLSLTMPTVEELYRNYGILADATEQVGQHKDAYQVILDGVKGGTKEKRLAAQFIPKFFKHFPELADSAINAQLDLCEDEDVSIRRQAIKELPQFATGENLPRVADILTQLLQTDDSAEFNLVNNALLSIFKMDAKGTLGGLFSQILQGEDIVRERAIKFLSTKLKTLPDEVLTKEVEELILTESKKVLEDVTGEEFVLFMKILSGLKSLQTVSGRQQLVELVAEQADLEQTFNPSDPDCVDRLLQCTRQAVPLFSKNVHSTRFVTYFCEQVLPNLGTLTTPVEGLDIQLEVLKLLAEMSSFCGDMEKLETNLRKLFDKLLEYMPLPPEEAENGENAGNEEPKLQFSYVECLLYSFHQLGRKLPDFLTAKLNAEKLKDFKIRLQYFARGLQVYIRQLRLALQGKTGEALKTEENKIKVVALKITNNINVLIKDLFHIPPSYKSTVTLSWKPVQKVEIGQKRASEDTTSGSPPKKSSAGPKRDARQIYNPPSGKYSSNLGNFNYERSLQGK

SEQ ID NO: 34522 - protein, 530 aa, Homo sapiens
LGLSLTMPTVEELYRNYGILADATEQVGQHKDAYQVILDGVKGGTKEKRLAAQFIPKFFKHFPELADSAINAQLDLCEDEDVSIRRQAIKELPQFATGENLPRVADILTQLLQTDDSAEFNLVNNALLSIFKMDAKGTLGGLFSQILQGEDIVRERAIKFLSTKLKTLPDEVLTKEVEELILTESKKVLEDVTGEEFVLFMKILSGLKSLQTVSGRQQLVELVAEQADLEQTFNPSDPDCVDRLLQCTRQAVPLFSKNVHSTRFVTYFCEQVLPNLGTLTTPVEGLDIQLEVLKLLAEMSSFCGDMEKLETNLRKLFDKLLEYMPLPPEEAENGENAGNEEPKLQFSYVECLLYSFHQLGRKLPDFLTAKLNAEKLKDFKIRLQYFARGLQVYIRQLRLALQGKTGEALKTEENKIKVVALKITNNINVLIKDLFHIPPSYKSTVTLSWKPVQKVEIGQKRASEDTTSGSPPKKSSAGPKRDARQIYNPPSGKYSSNLGNFNYEQRGAFRGSRGGRGWGTRGNRSRGRLY

SEQ ID NO: 34523 - protein, 129 aa, Homo sapiens
LGLSLTMPTVEELYRNYGILADATEQVGQHKDAYQVILDGVKGGTKEKRLAAQFIPKFFKHFPELADSAINAQLDLCEDEDVSKTSAFFSIVMSLIYLNSTTHWIAGDVPLNRLLPSAKNLMFFIPLYV

SEQ ID NO: 34524 - protein, 34 aa, Homo sapiens
MQVSSLPLPLHCRRSKTPLLELLHMCMGKIVLKG

SEQ ID NO: 34525 - protein, 13 aa, Homo sapiens
LAVFCLLRLLAEF

SEQ ID NO: 34526 - protein, 162 aa, Homo sapiens
LLPASLAIMNVLLSLLQMTQLVLPGMVERSKGAILNISSGSGMLPVPLLTIYSATKTFVDFFSQCLHEEYRSKGVFVQSVLPYFVATKLAKIRKPTLDKPSPETFVKSAIKTVGLQSRTNGYLIHALMGSIISNLPSWIYLKIVMNMNKSTRAHYLKKTKKN

SEQ ID NO: 34527 - protein, 71 aa, Homo sapiens
VADPARRRPSTRRPPRVEMFTLPQKDFRAPTTCLGPTCMQDLGSSHGEDLEGECSRKLDQKLPELRGVGHH

SEQ ID NO: 34528 - protein, 331 aa, Homo sapiens
LSPGLCSPTPTEARAGDAGPAARSRKQNPQSPPCCCVDDTWAQAEVGPVTSCTGFVEGSSRTGGMGSACIKVTKYFLFLFNLIFFILGAVILGFGVWILADKSSFISVLQTSSSSLRMGAYVFIGVGAVTMLMGFLGCIGAVNEVRCLLGLYFAFLLLILIAQVTAGALFYFNMGKLKQEMGGIVTELIRDYNSSREDSLQDAWDYVQAQVKCCGWVSFYNWTDNAELMNRPEVTYPCSCEVKGEEDNSLSVRKGFCEAPGNRTQSGNHPEDWPVYQEGCMEKVQAWLQENLGIILGVGVGVAIIELLGMVLSICLCRHVHSEDYSKVPKY

SEQ ID NO: 34529 - protein, 306 aa, Homo sapiens
LSPGLCSPTPTEARAGDAGPAARSRKQNPQSPPCCCVDDTWAQAEVGPVTSCTGFVEGSSRTGGMGSACIKVTKYFLFLFNLIFFILGAVILGFGVWILADKSSFISVLQTSSSSLRMGAYVFIGVGAVTMLMGFLGCIGAVNEVRCLLGLLKQEMGGIVTELIRDYNSSREDSLQDAWDYVQAQVKCCGWVSFYNWTDNAELMNRPEVTYPCSCEVKGEEDNSLSVRKGFCEAPGNRTQSGNHPEDWPVYQEGCMEKVQAWLQENLGIILGVGVGVAIIELLGMVLSICLCRHVHSEDYSKVPKY

SEQ ID NO: 34530 - protein, 122 aa, Homo sapiens
LSPGLCSPTPTEARAGDAGPAARSRKQNPQSPPCCCVDDTLSVRKGFCEAPGNRTQSGNHPEDWPVYQEGCMEKVQAWLQENLGIILGVGVGVAIIELLGMVLSICLCRHVHSEDYSKVPKY

SEQ ID NO: 34531 - protein, 31 aa, Homo sapiens
MAMLVPARQGDVRVGDGVWKAHEAQNLLQLA

SEQ ID NO: 34532 - protein, 356 aa, Homo sapiens
LPIYVDRPKKGAPSAELARKVILGGAGHARVSPRGFLPRRLLSGARAPPAGGPRESLAGEPGAWFPRQPPSRPPRRPPWGRGSPARGRGRRAIGLCAEPRGGTSAGRQTRPSAEAGLEEKMAAKQPPPLMKKHSQTDLVSRLKTRKILGVGGEDDDGEVHRSKISQVLGNEIKFTIREPLGLRVWQFVSAVLFSGIAIMALAFPDQLYDAVFDGAQVTSKTPIRLYGGALLKVETESDRGEVTCLRSQLVSGEAKIGTQAIQLGRTKDGVSETSPASALLLAFSLIQTWLQPLGWDWPPYLPFNPVLPCCQKELSRKHMSPQPSLAGTQPLQETKLPPTDHRTSKTHHRHLLLFLP

SEQ ID NO: 34533 - protein, 309 aa, Homo sapiens
LPIYVDRPKKGAPSAELARKVILGGAGHARVSPRGFLPRRLLSGARAPPAGGPRESLAGEPGAWFPRQPPSRPPRRPPWGRGSPARGRGRRAIGLCAEPRGGTSAGRQTRPSAEAGLEEKMAAKQPPPLMKKHSQTDLVSRLKTRKILGVGGEDDDGEVHRSKISQVLGNEIKFTIREPLGLRVWQFVSAVLFSGIAIMALAFPDQLYDAVFDGAQVTSKTPIRLYGGALLSISLIMWNALYTAEKVIIRWTLLTEACYFGVQFLVVTATLAETGLMSLGILLLLVSRLLFVVISIYYYYQVGRRPKKA

SEQ ID NO: 34534 - protein, 468 aa, Homo sapiens [sequence omitted]

SEQ ID NO: 34535 - protein, 389 aa, Homo sapiens
VVHRFFKSSAFWPAEVKQPRGGPKTGSRKEGAGSRAPQPVVRSFCGSVGAEGRMEKLRLLGLRYQEYVTRHPAATAQLETAVRGFSYLLAGRFADSHELSELVYSASNLLVLLNDGILRKELRKKLPVSLSQQKLLTWLSVLECVEVFMEMGAAKVWGEVGRWLVIALVQLAKAVLRMLLLLWFKAGLQTSPPIVPLDRETQAQPPDGDHSPGNHEQSYVGKRSNRVVRTLQNTPSLHSRHWGAPQQREGRQQQHHEELSATPTPLGLQETIAEFLYIARPLLHLLSLGLWGQRSWKPWLLAGVVDVTSLSLLSDRKGLTRRERRELRRRTILLLYYLLRSPFYDRFSEARILFLLQLLADHVPGVGLVTRPLMDYLPTWQKIYFYSWG

SEQ ID NO: 34536 - protein, 113 aa, Homo sapiens
VVHRFFKSSAFWPAEVKQPRGGPKTGSRKEGAGSRAPQPVVRSFCGSVGAEGRMEKLRLLGLRYQEYVTRHPAATAQLETAVRGFSYLLAGRFADSHELSELGRSSVRLENSH

SEQ ID NO: 34537 - protein, 55 aa, Homo sapiens
MKKSSLLLLLLLLLLRVPASSCQGGQPASSRRGARELKESQFPQNCCSEKRSLLL

SEQ ID NO: 34538 - protein, 34 aa, Homo sapiens
MKKSSLLLLLLLLLLRVPASSCQGGQPASSRRLQ

SEQ ID NO: 34539 - protein, 56 aa, Homo sapiens
MKKSSLLLLLLLLLLRVPASSCQGGQPASSRRGARELKESQFPQNWFLYCRTSQNL

SEQ ID NO: 34540 - protein, 39 aa, Homo sapiens
MKKSSLLLLLLLLLLRVPASSCQGGQPASSRRDKLEVSL

SEQ ID NO: 34541 - protein, 225 aa, Homo sapiens
MAPSRGFLAQSTCPWCLERSRSEEALLQGLVTSAAREPTGCGVRGPSSGVLQRDPQRQLRSKMCERTRFRPVLVYPAVGQRVSSGKEGWPQEVQPCHASCPQLQELHRAGGDLMHRDEQSRTLLHHAVSTGSKDVVRYLLDHAPPEILDAVEENGETCLHQAAALGQRTICHYIVEAGASLMKTDQQGDTPRQRAEKAQDTELAAYLENRQHYQMIQREDQETAV

SEQ ID NO: 34542 - protein, 75 aa, Homo sapiens
VVPGSHYGGRDLGPTSRASWLRVPRSGAAVTVHVADRHLRLQKGPGSQAPDVLLLRLRELSHPRRLALFSASLTG

SEQ ID NO: 34543 - protein, 155 aa, Homo sapiens
LPSLDRRGRGSSARARFLLRFCRARLSGTGLAMDPLSELQDDLTLDDTSEALNQLKLASIDEKNWPSDEMPDFPKSDDSKSSSPELVTHLKWDDPYYDIARHQIVEVAGKHTQHYFPNPQSSWPQEVSPSHHRGRASLQSDRWPWCSWHVGSHVA

SEQ ID NO: 34544 - protein, 1986 aa, Homo sapiens
VAGAAARGAGRSGPGHPLPVPWRGSVGSGSTGGGGGPRATCGARRPPCTRDASPSGTLRGLLRRAVRREPAGPRASGAGGTMRRQWGALLLGALLCAHGLASSPECACGRSHFTCAVSALGECTCIPAQWQCDGDNDCGDHSDEDGCILPTCSPLDFHCDNGKCIRRSWVCDGDNDCEDDSDEQDCPPRECEEDEFPCQNGYCIRSLWHCDGDNDCGDNSDEQCDMRKCSDKEFRCSDGSCIAEHWYCDGDTDCKDGSDEENCPSAVPAPPCNLEEFQCAYGRCILDIYHCDGDDDCGDWSDESDCSSHQPCRSGEFMCDSGLCINAGWRCDGDADCDDQSDERNCTTSMCTAEQFRCHSGRCVRLSWRCDGEDDCADNSDEENCENTGSPQCALDQFLCWNGRCIGQRKLCNGVNDCGDNSDESPQQNCRPRTGEENCNVNNGGCAQKCQMVRGAVQCTCHTGYRLTEDGHTCQDVNECAEEGYCSQGCTNSEGAFQCWCETGYELRPDRRSCKALGPEPVLLFANRIDIRQVLPHRSEYTLLLNNLENAIALDFHHRRELVFWSDVTLDRILRANLNGSNVEEVVSTGLESPGGLAVDWVHDKLYWTDSGTSRIEVANLDGAHRKVLLWQNLEKPRAIALHPMEGTIYWTDWGNTPRIEASSMDGSGRRIIADTHLFWPNGLTIDYAGRRMYWVDAKHHVIERANLDGSHRKAVISQGLPHPFAITVFEDSLYWTDWHTKSINSANKFTGKNQEIIRNKLHFPMDIHTLHPQRQPAGKNRCGDNNGGCTHLCLPSGQNYTCACPTGFRKISSHACAQSLDKFLLFARRMDIRRISFDTEDLSDDVIPLADVRSAVALDWDSRDDHVYWTDVSTDTISRAKWDGTGQEVVVDTSLESPAGLAIDWVTNKLYWTDAGTDRIEVANTDGSMRTVLIWENLDRPRDIVVEPMGGYMYWTDWGASPKIERAGMDASGRQVIISSNLTWPNGLAIDYGSQRLYWADAGMKTIEFAGLDGSKRKVLIGSQLPHPFGLTLYGERIYWTDWQTKSIQSADRLTGLDRETLQENLENLMDIHVFHRRRPPVSTPCAMENGGCSHLCLRSPNPSGFSCTCPTGINLLSDGKTCSPGMNSFLIFARRIDIRMVSLDIPYFADVVVPINITMKNTIAIGVDPQEGKVYWSDSTLHRISRANLDGSQHEDIITTGLQTTDGLAVDAIGRKVYWTDTGTNRIEVGNLDGSMRKVLVWQNLDSPRAIVLYHEMGFMYWTDWGENAKLERSGMDGSDRAVLINNNLGWPNGLTVDKASSQLLWADAHTERIEAADLNGANRHTLVSPVQHPYGLTLLDSYIYWTDWQTRSIHRADKGTGSNVILVRSNLPGLMDMQAVDRAQPLGFNKCGSRNGGCSHLCLPRPSGFSCACPTGIQLKGDGKTCDPSPETYLLFSSRGSIRRISLDTSDHTDVHVPVPELNNVISLDYDSVDGKVYYTDVFLDVIRRADLNGSNMETVIGRGLKTTDGLAVDWVARNLYWTDTGRNTIEASRLDGSCRKVLINNSLDEPRAIAVFPRKGYLFWTDWGHIAKIERANLDGSERKVLINTDLGWPNGLTLDYDTRRIYWVDAHLDRIESADLNGKLRQVLVSHVSHPFALTQQDRWIYWTDWQTKSIQRVDKYSGRNKETVLANVEGLMDIIVVSPQRQTGTNACGVNNGGCTHLCFARASDFVCACPDEPDSRPCSLVPGLVPPAPRATGMSEKSPVLPNTPPTTLYSSTTRTRTSLEEVEGRCSERDARLGLCARSNDAVPAAPGEGLHISYAIGGLLSILLILVVIAALMLYRHKKSKFTDPGMGNLTYSNPSYRTSTQEVKIEAIPKPAMYNQLCYKKEGGPDHNYTKEKIKIVEGICLLSGDDAEWDDLKQLRSSRGGLLRDHVCMKTDTVSIQASSGSLDDTETEQLLQEEQSECSSVHTAATPERRGSLPDTGWKHERKLSSESQV

SEQ ID NO: 34545 - protein, 98 aa, Homo sapiens
LGQPRSVLMRTFRSEPSKFARSILAMWPQSVQKRYLRHNSAIIIKAWEDSTQRLREHRGPTNTIFPPSPSSLDLSSAGHKLTPSWGKQQWPGAHPGYC

SEQ ID NO: 34546 - protein, 424 aa, Homo sapiens
VMAGKRSGWSRAALLQLLLGVNLVVMPPTRARSLRFVTLLYRHGDRSPVKTYPKDPYQEEEWPQGFGQLTKEGMLQHWELGQALRQRYHGFLNTSYHRQEVYVRSTDFDRTLMSAEANLAGLFPPNGMQRFNPNISWQPIPVHTVPITEDRLLKFPLGPCPRYEQLQNETRQTPEYQNESSRNAQFLDMVANETGLTDLTLETVWNVYDTLFCEQTHGLRLPPWASPQTMQRLSRLKDFSFRFLFGIYQQAEKARLQGGVLLAQIRKNLTLMATTSQLPKLLVYSAHDTTLVALQMALDVYNGEQAPYASCHIFELYQEDSGNFSVEMYFRNESDKAPWPLSLPGCPHRCPLQDFLRLTEPVVPKDWQQECQLASGPADTEVIVALAVCGSILFLLIVLLLTVLFRMQAQPPGYRHVADGEDHA

SEQ ID NO: 34547 - protein, 361 aa, Homo sapiens
VMAGKRSGWSRAALLQLLLGVNLVVMPPTRARSLRFVTLLYRHGDRSPVKTYPKDPYQEEEWPQGFGQLTKEGMLQHWELGQALRQRYHGFLNTSYHRQEVYVRSTDFDRTLMSAEANLAGLFPPNGMQRFNPNISWQPIPVHTVPITEDRQTHGLRLPPWASPQTMQRLSRLKDFSFRFLFGIYQQAEKARLQGGVLLAQIRKNLTLMATTSQLPKLLVYSAHDTTLVALQMALDVYNGEQAPYASCHIFELYQEDSGNFSVEMYFRNESDKAPWPLSLPGCPHRCPLQDFLRLTEPVVPKDWQQECQLASGPADTEVIVALAVCGSILFLLIVLLLTVLFRMQAQPPGYRHVADGEDHA

SEQ ID NO: 34548 - protein, 392 aa, Homo sapiens
VMAGKRSGWSRAALLQLLLGVNLVVMPPTRARSLRFVTLEGMLQHWELGQALRQRYHGFLNTSYHRQEVYVRSTDFDRTLMSAEANLAGLFPPNGMQRFNPNISWQPIPVHTVPITEDRLLKFPLGPCPRYEQLQNETRQTPEYQNESSRNAQFLDMVANETGLTDLTLETVWNVYDTLFCEQTHGLRLPPWASPQTMQRLSRLKDFSFRFLFGIYQQAEKARLQGGVLLAQIRKNLTLMATTSQLPKLLVYSAHDTTLVALQMALDVYNGEQAPYASCHIFELYQEDSGNFSVEMYFRNESDKAPWPLSLPGCPHRCPLQDFLRLTEPVVPKDWQQECQLASGPADTEVIVALAVCGSILFLLIVLLLTVLFRMQAQPPGYRHVADGEDHA

SEQ ID NO: 34549 - protein, 163 aa, Homo sapiens
VMAGKRSGWSRAALLQLLLGVNLVVMPPTRARSLRFVTLLYRHGDRSPVKTYPKDPYQEEEWPQGFGQLTKEGMLQHWELGQALRQRYHGFLNTSYHRQEVYVRSTDFDRTLMSAEANLAGLFPPNGMQRFNPNISWQPIPVHTVPITEDRQAQVTRTVEHSA

SEQ ID NO: 34550 - protein, 161 aa, Homo sapiens
VMAGKRSGWSRAALLQLLLGVNLVVMPPTRARSLRFVTLLYRHGDRSPVKTYPKDPYQEEEWPQGFGQLTKEGMLQHWELGQALRQRYHGFLNTSYHRQEVYVRSTDFDRTLMSAEANLAGLFPPNGMQRFNPNISWQPIPVHTVPITEDRSRTETLIHFS

SEQ ID NO: 34551 - protein, 152 aa, Homo sapiens
VMAGKRSGWSRAALLQLLLGVNLVVMPPTRARSLRFVTLLYRHGDRSPVKTYPKDPYQEEEWPQGFGQLTKEGMLQHWELGQALRQRYHGFLNTSYHRQEVYVRSTDFDRTLMSAEANLAGLFPPNGMQRFNPNISWQPIPVHTVPITEDRD

SEQ ID NO: 34552 - protein, 161 aa, Homo sapiens
VMAGKRSGWSRAALLQLLLGVNLVVMPPTRARSLRFVTLLYRHGDRSPVKTYPKDPYQEEEWPQGFGQLTKEGMLQHWELGQALRQRYHGFLNTSYHRQEVYVRSTDFDRTLMSAEANLAGLFPPNGMQRFNPNISWQPIPVHTVPITEDRVRVASPSLGW

SEQ ID NO: 34553 - protein, 123 aa, Homo sapiens
VMAGKRSGWSRAALLQLLLGVNLVVMPPTRARSLRFVTLLYRHGDRSPVKTYPKDPYQEEEWPQGFGQLTKEGMLQHWELGQALRQRYHGFLNTSYHRQEVRLGAPEARGTRYAALIFCPQGA

SEQ ID NO: 34554 - protein, 107 aa, Homo sapiens
VMAGKRSGWSRAALLQLLLGVNLVVMPPTRARSLRFVTLLYRHGDRSPVKTYPKDPYQEEEWPQGFGQLTKVGQKPAFPQDELQNERRLEQSTKLGVLLNCLFPYGC

SEQ ID NO: 34555 - protein, 31 aa, Homo sapiens
LAVAEEHKKDSALVMTRAPGRDVLVAGGPCA

SEQ ID NO: 34556 - protein, 53 aa, Homo sapiens
LGLQVLLVLSSSSLAGHRDFWTGNCTILFSQQGGSRDCPPRKSGGLGIWTVPW

SEQ ID NO: 34557 - protein, 81 aa, Homo sapiens
LGLQVLLVLSSSSLAGHRDFWTGNCTILFSQQGGSRDCPPRKSGGLGIWWVCSLAVAWGSVALVMTRAPGRDVLVAGGPCA

SEQ ID NO: 34558 - protein, 24 aa, Homo sapiens
LQDSALVMTRAPGRDVLVAGGPCA

SEQ ID NO: 34559 - protein, 59 aa, Homo sapiens
MLCSLLFSLLSLGLEEHGPPREWASASLDSCLLPRARPGGPEARVPRASKIFGFKPISC

SEQ ID NO: 34560 - protein, 89 aa, Homo sapiens
MAILLHEIPHEVGDFAILLRAGFDRWSAAKLQLSTALGGLLGAGFAICTQSPKGVEETAAWVLPFTSGGFLYIALVNVLPDLLEEEDPW

SEQ ID NO: 34561 - protein, 95 aa, Homo sapiens
VTRQEKMATVWDEAEQDGIGEEVLKMSTEEIIQRTRLLDSEIKVGAQLLCGRWSPHRTGPGDPSRLSYFLIGHPGGDMGLGLPPHIRKRGKKTKP

SEQ ID NO: 34562 - protein, 14 aa, Homo sapiens
LVSSVLLWSLGAIS

SEQ ID NO: 34563 - protein, 545 aa, Homo sapiens
VEPEAEVPGSGMKGGNADSWQREKLASMESPEEPGASMDENYFVNYTFKDRSHSGRVAQGIMKLCLEEELFADVTISVEGREFQLHRLVLSAQSCFFRSMFTSNLKEAHNRVIVLQDVSESVFQLLVDYIYHGTVKLRAEELQEIYEVSDMYQLTSLFEECSRFLARTVQVGNCLQVMWLADRHSDPELYTAAKHCAKTHLAQLQNTEEFLHLPHRLLTDIISDGVPCSQNPTEAIEAWINFNKEEREAFAESLRTSLKEIGENVHIYLIGKESSRTHSLAVSLHCAEDDSISVSGQNSLCHQITAACKHGGDLYVVGGSIPRRMWKCNNATVDWEWCAPLPRDRLQHTLVSVPGKDAIYSLGGKTLQDTLSNAVIYYRVGDNVWTETTQLEVAVSGAAGANLNGIIYLLGGEENDLDFFTKPSRLIQCFDTETDKCHVKPYVLPFAGRMHAAVHKDLVFIVAEGDSLVCYNPLLDSFTRLCLPEAWSSAPSLWKIASCNGSIYVFRDRYKKGDANTYKLDPATSAVTVTRGIKVLLTNLQFVLA

SEQ ID NO: 34564 - protein, 12 aa, Homo sapiens
LTVLSQMVFLFT

SEQ ID NO: 34565 - protein, 79 aa, Homo sapiens
LANFLAEIDAITAPQPAAPVGASAPPPTPPRPEPKEAATSTLSSSTSNGTDSTQTSGWQYDTQCSLAGGKLDPLIFKEK

SEQ ID NO: 34566 - protein, 485 aa, Homo sapiens
MVSVVELKQSSVMQRLLTGWMPTAIRGDQSPSDRPLSLAVHCVEHDAFIFALCQDHKLRMWSYKEQMCLMVADMLEYVPVKKDLRLTAGTGHKLRLAYSPTMGLYLGIYMHAPKRGQRRGFAMLPGLKLLSSSSPPTSASQCAGITSVNHSTQPEFFFCIFQLVSTESNRYSLDHISSLFTSQETLIDFALTSTDIWALWHDAENQTVVKYINFEHNVAGQWNPVFMQPLPEEEIVIRDDQDPREMYLQSLFTPGQFTNEALCKALQIFCRGTERNLDLSWSELKKEVTLAVENELQGSVTEYEFSQEEFRNLQQEFWCKFYACCLQYQEALSHPLALHLNPHTNMVCLLKKGYLSFLIPSSLVDHLYLLPYENLLTEDETTISDDVDIARDVICLIKCLRLIEESVTVDMSVIMEMSCYNLQSPEKAAEQILEDMITIDVENVMEDICSKLQEIRNPIHAIGLLIREMDYETEVEMEKGFNPGK

SEQ ID NO: 34567 - protein, 78 aa, Homo sapiens [sequence omitted]

SEQ ID NO: 34568 - protein, 1451 aa, Homo sapiens
MTRGGGSGSSRGSRDRVAARWGWAPLAPPREAPARSGTRPPRGSRARLRRVAAAAAAAAMSPGKPGAGGAGTRRTGWRRRRRRRRQEAATTVPGLGRTAGPDSRVRGTFQGARGMKPAAREARLPPRSPGLRWALPLLLLLLRLGQILCAGGTPSPIPDPSVATVATGENGITQISSTAESFHKQNGTGTPQVETNTSEDGESSGANDSLRTPEQGSNGTDGASQKTPSSTGPSPVFDIKAVSISPTNVILTWKSNDTAASEYKYVVKHKMENEKTITVVHQPWCNITGLRPATSYVFSITPGIGNETWGDPRVIKVITEPIPVSDLRVALTGVRKAALSWSNGNGTASCRVLLESIGSHEELTQDSRLQVNISGLKPGVQYNINPYLLQSNKTKGDPLGTEGGLDASNTERSRAGSPTAPVHDESLVGPVDPSSGQQSRDTEVLLVGLEPGTRYNATVYSQAANGTEGQPQAIEFRTNAIQVFDVTAVNISATSLTLIWKVSDNESSSNYTYKIHVAGETDSSNLNVSEPRAVIPGLRSSTFYNITVCPVLGDIEGTPGFLQVHTPPVPVSDFRVTVVSTTEIGLAWSSHDAESFQMHITQEGAGNSRVEITTNQSIIIGGLFPGTKYCFEIVPKGPNGTEGASRTVCNRTVPSAVFDIHVVYVTTTEMWLDWKSPDGASEYVYHLVIESKHGSNHTSTYDKAITLQGLIPGTLYNITISPEVDHVWGDPNSTAQYTRPSNVSNIDVSTNTTAATLSWQNFDDASPTYSYCLLIEKAGNSSNATQVVTDIGITDATVTELIPGSSYTVEIFAQVGDGIKSLEPGRKSFCTDPASMASFDCEVVPKEPALVLKWTCPPGANAGFELEVSSGAWNNATHLESCSSENGTEYRTEVTYLNFSTSYNISITTVSCGKMAAPTRNTCTTGITDPPPPDGSPNITSVSHNSVKVKFSGFEASHGPIKAYAVILTTGEAGHPSADVLKYTYEDFKKGASDTYVTYLIRTEEKGRSQSLSEVLKYEIDVGNESTTLGYYNGKLEPLGSYRACVAGFTNITFHPQNKGLIDGAESYVSFSRYSDAVSLPQDPGVICGAVFGCIFGALVIVTVGGFIFWRKKRKDAKNNEVSFSQIKPKKSKLIRVENFEAYFKKQQADSNCGFAEEYEDLKLVGISQPKYAAELAENRGKNRYNNVLPYDISRVKLSVQTHSTDDYINANYMPGYHSKKDFIATQGPLPNTLKDFWRMVWEKNVYAIIMLTKCVEQGRTKCEEYWPSKQAQDYGDITVAMTSEIVLPEWTIRDFTVKNIQTSESHPLRQFHFTSWPDHGVPDTTDLLINFRYLVRDYMKQSPPESPILVHCSAGVGRTGTFIAIDRLIYQIENENTVDVYGIVYDLRMHRPLMVQTEDQYVFLNQCVLDIVRSQKDSKVDLIYQNTTAMTIYENLAPVTTFGKTNGYIA

SEQ ID NO: 34569 - protein, 146 aa, Homo sapiens
MFLSLNNPFLCSIFEQWLRRHRLLQEVYPEANAPIGHNRESYMVPFIPLYRNGDFFISSKDLGYDYSYLQDSDPDSFQDYIKSYLEQASRIWSWLLGAAMVGAVLTALLAGLVSLLCRHKRKQLPEEKQPLLMEKEDYHSLYQSHL

SEQ ID NO: 34570 - protein, 23 aa, Homo sapiens
LQRLLVFQVFLFIQLDTMMQRSS

SEQ ID NO: 34571 - protein, 100 aa, Homo sapiens
LLPAPCWAAEVPKAQPRGRDRVLPASARVAVSVLLWLPHLAPLARPPSRLAAVPSSPRRASLRTALLSQWLGYYNPFYFLSPGPPALTRVQLLASAPRLQ

SEQ ID NO: 34572 - protein, 728 aa, Homo sapiens
LVSLVQPGALPRPPQAGVDMAETLEFNDVYQEVKGSMNDGRLRLSRQGIIFKNSKTGKVDNIQAGELTEGIWRRVALGHGLKLLTKNGHVYKYDGFRESEFEKLSDFFKTHYRLELMEKDLCVKGWNWGTVKFGGQLLSFDIGDQPVFEIPLSNVSQCTTGKNEVTLEFHQNDDAEVSLMEVRFYVPPTQEDGVDPVEAFAQNVLSKADVIQATGDAICIFRELQCLTPRGRYDIRIYPTFLHLHGKTFDYKIPYTTVLRLFLLPHKDQRQMFFVISLDPPIKQGQTRYHFLILLFSKDEDISLTLNMNEEEVEKRFEGRLTKNMSGSLYEMVSRVMKALVNRKITVPGNFQGHSGAQCITCSYKASSGLLYPLERGFIYVHKPPVHIRFDEISFVNFARGTTTTRSFDFEIETKQGTQYTFSSIEREEYGKLFDFVNAKKLNIKNRGLKEGMNPSYDEYADSDEDQHDAYLERMKEEGKIREENANDSSDDSGEETDESFNPGEEEEDVAEEFDSNASASSSSNEGDSDRDEKKRKQLKKAKMAKDRKSRKKPVEVKKGKDPNAPKRPMSAYMLWLNASREKIKSDHPGISITDLSKKAGEIWKGMSKEKKEEWDRKAEDARRDYEKAMKEYEGGRGESSKRDKSKKKKKVKVKMEKKSTPSRGSSSKSSSRQLSESFKSKEFVSSDESSSGENKSKKKRRRSEDSEEEELASTPPSSEDSASGSDE

SEQ ID NO: 34573 - protein, 325 aa, Homo sapiens
LPWQQMVLSRHWLAWEQGLLLGYQYVLLQAFAQNVLSKADVIQATGDAICIFRELQCLTPRGRYDIRIYPTFLHLHGKTFDYKIPYTTVLRLFLLPHKDQRQMFFVISLDPPIKQGQTRYHFLILLFSKDEDISLTLNMNEEEVEKRFEGRLTKNMSGSLYEMVSRVMKALVNRKITVPGNFQGHSGAQCITCSYKASSGLLYPLERGFIYVHKPPVHIRFDEISFVNFARGTTTTRSFDFEIETKQGTQYTFSSIEREEYGKLFDFVNAKKLNIKNRGLKEVLLCGEDETLSWSFYRGERGGDFFRLLFHSFFSSYPYRKKRCV

SEQ ID NO: 34574 - protein, 509 aa, Homo sapiens
MWGGGEPWVWGRGVVGAVRGKPCTLSWIGSRAMCGLLADPGVPLLVAMAPAGAARAGVGLGVSGIPGPVLHPGLDLDPRALQRPSVGFQAEEILRHPGAAGSCYLAPSVSTARCCLSCLSVFLLNSDSQPAEHPHTHSGVGAQLPVYLVSLVQPGALPRPPQAGVDMAETLEFNDVYQEVKGSMNDGRLRLSRQGIIFKNSKTGKVDNIQAGELTEGIWRRVALGHGLKLLTKNGHVYKYDGFRESEFEKLSDFFKTHYRLELMEKDLCVKGWNWGTVKFGGESWGRLRFGEEDRVKGFSLLLVLLFSLCHCLWFPIYLHVHHVFIEYLQYTAWGWGYSLNRLTAVSCLCGTQFGGNIAYADLRGGACGWISPFLTGQLLSFDIGDQPVFEIPLSNVSQCTTGKNEVTLEFHQNDDAEVSLMEVRFYVPPTQEDGVDPVEVRLPLVALAADGAEQALAGLGAGPAAWLPICAFAGLCPECVVKGGCNPGHGRCHLHLPGAAVSDSSWSL

SEQ ID NO: 34575 - protein, 502 aa, Homo sapiens
MCFRFFYTTATLIIAFTSAGSAVLLFLAMPMLTIGGILFLITNLQIGNLFGQHRSTIITLYNGAFDSSSAVFLIIKLLYEKGISLRASFIFISVCSTWHVARTFLLMPRGHIPYPLPPNYSYGLCPGNGTTKEEKETAEHENRELQSKEFLSAKEETPGAGQKQELRSFWSYAFSRRFAWHLVWLSVIQLWHYLFIGTLNSLLTNMAGGDMARVSTYTNAFAFTQFGVLCAPWNGLLMDRLKQKYQKEARKTGSFNIRGPHSLCFPNHHLPHATYRDKAKMKLPLLLALLFGAVSALHLRSETSTFETPLGAKTLPEDEETPEQEMEETPCRELEEEEEWGSGSEDASKKDGAVESISVPDMVDKNLTCPEEEDTVKVVGIPGCQTCRYLLVRSLQTFSQAWFTCRRCYRGNLVSIHNFNINYRIQCSVSALNQGQVWIGGRITGSGRCRRFQWVDGSRWNFAYWAAHQPWSRGGHCVALCTRGGHWRRAHCLRRLPFICSY

SEQ ID NO: 34576 - protein, 152 aa, Homo sapiens
MKLPLLLALLFGAVSALHLRSETSTFETPLGAKTLPEDEETPEQEMEETPCRELEEEEEWGSGSEDASKKDGAVESISVPDMVDKNLTCPEEEDTVKVVGIPGCQTCRYLLVRSLQTFSQAWVSGLWLRLRWEHGTGVGYAPSIAITGSFSH

SEQ ID NO: 34577 - protein, 493 aa, Homo sapiens
LLMAGQGLPLHVATLLTGLLECLGFAGVLFGWPSLVFVFKNEDYFKDLCGPDAGPIGNATGQADCKAQDERFSLIFTLGSFMNNFMTFPTGYIFDRFKTTVARLIAIFFYTTATLIIAFTSAGSAVLLFLAMPMLTIGGILFLITNLQIGNLFGQHRSTIITLYNGAFDSSSAVFLIIKLLYEKGISLRASFIFISVCSTWHVARTFLLMPRGHIPYPLPPNYSYGLCPGNGTTKEEKETAEHENRELQSKEFLSAKEETPGAGQKQELRSFWSYAFSRRFAWHLVWLSVIQLWHYLFIGTLNSLLTNMAGGDMARVSTYTNAFAFTQFGVLCAPWNGLLMDRLKQKYQKEARKTGSSTLAVALCSTVPSLALTSLLCLGFALCASVPILPLQYLTFILQVISRSFLYGSNAAFLTLAFPSEHFGKLFGLVMALSAVVSLLQFPIFTLIKGSLQNDPFYVNVMFMLAILLTFFHPFLVYRECRTWKESPSAIA

SEQ ID NO: 34578 - protein, 51 aa, Homo sapiens
MCCLCVLWVLGVTFSLGDGIQNSSAGAPLLHLLPGSYWDPENHPLMVFAQA

SEQ ID NO: 34579 - protein, 100 aa, Homo sapiens
LSLLPPWVGGDQGASYLLLAVCLLVPLGGIGKQATPEVPCAMSVHTCMCLCMCECERDTALLSEGKGPEVPAVSWVRGWGSAPSRARRAGSLSGAAACKS

SEQ ID NO: 34580 - protein, 493 aa, Homo sapiens
LELPGDQKFGDRASSNPNATSSSSQDPESLQDRGEGKVATTVISKMLFVEPILEVSSLPTTNSTTNSATKITANTTDEPTTQPTTEPTTQPTIQPTQPTTQLPTDSPTQPTTGSFCPGPVTLCSDLESHSTEAVLGDALVDFSLKLYHAFSAMKKVETNMAFSPFSIASLLTQVLLGAGENTKTNLESILSYPKDFTCVHQALKGFTTKGVTSVSQIFHSPDLAIRDTFVNASRTLYSSSPRVLSNNSDANLELINTWVAKNTNNKISRLLDSLPSDTRLVLLNAIYLSAKWKTTFDPKKTRMEPFHFKNSVIKVPMMNSKKYPVAHFIDQTLKAKVGQLQLSHNLSLVILVPQNLKHRLEDMEQALSPSVFKAIMEKLEMSKFQPTLLTLPRIKVTTSQDMLSIMEKLEFFDFSYDLNLCGLTEDPDLQVSAMQHQTVLELTETGVEAAAASAISVARTLLVFEVQQPFLFVLWDQQHKFPVFMGRVYDPRA

SEQ ID NO: 34581 - protein, 128 aa, Homo sapiens
LMNPPHNPPQSPPPNPPSNPPNQLPSSQQILLPSQDMLSIMEKLEFFDFSYDLNLCGLTEDPDLQVSAMQHQTVLELTETGVEAAAASAISVARTLLVFEVQQPFLFVLWDQQHKFPVFMGRVYDPRA

SEQ ID NO: 34582 - protein, 60 aa, Homo sapiens
LESILSYPKDFTCVHQALKGFTTKGVTSVSQIFHSPGGAAAALPQSEFGDPGTPEPETSS

SEQ ID NO: 34583 - protein, 169 aa, Homo sapiens
VSPQSLRSSTAQVGQLQLSHNLSLVILVPQNLKHRLEDMEQALSPSVFKAIMEKLEMSKFQPTLLTLPRIKVTTSQDMLSIMEKLEFFDFSYDLNLCGLTEDPDLQVSAMQHQTVLELTETGVEAAAASAISVARTLLVFEVQQPFLFVLWDQQHKFPVFMGRVYDPRA

SEQ ID NO: 34584 - protein, 11 aa, Homo sapiens
LLGSWLRRSDI

SEQ ID NO: 34585 - protein, 11 aa, Homo sapiens
VGATTLFFAFT

SEQ ID NO: 34586 - protein, 54 aa, Homo sapiens
VATFLPSRGSPPVHGHFLNHRFQEDEECFLKCSRLGESESWGPETGVATPPFIF

SEQ ID NO: 34587 - protein, 38 aa, Homo sapiens
MAFPAVLNLLIKAAFQALGHCLGSILQLGQRPAPVGLS

SEQ ID NO: 34588 - protein, 47 aa, Homo sapiens
MFSKVANTILFFRLDIRMGLLYITLCIGGTRTGQEGHLDCGVLCQLV

SEQ ID NO: 34589 - protein, 37 aa, Homo sapiens
LLSATMPTDVLEVTKKIHERSSLNSGEKGRRNQTVLH

SEQ ID NO: 34590 - protein, 49 aa, Homo sapiens
LTGTCTVWTDSPVLGKSSPCYSILARNSRHFRWQNKFNPCFSILSSSRS

SEQ ID NO: 34591 - protein, 838 aa, Homo sapiens
VADAVAVWGAPGGDGGSRRRFRSCISRRRRLMAATELRGVVGPGPAAIAALGGGGAGPPVVGGGGGRGDAGPGSGAASGTVVAAAAGGPGPGAGGVAAAGPAPAPPTGGSGGSGAGGSGSAREGWLFKWTNYIKGYQRRWFVLSNGLLSYYRSKAEMRHTCRGTINLATANITVEDSCNFIISNGGAQTYHLKASSEVERQRWVTALELAKAKAVKMLAESDESGDEESVSQTDKTELQNTLRTLSSKVEDLSTCNDLIAKHGTALQRSLSELESLKLPAESNEKIKQVNERATLFRITSNAMINACRDFLMLAQTHSKKWQKSLQYERDQRIRLEETLEQLAKQHNHLERAFRGATVLPANTPGNVGSGKDQCCSGKGDMSDEDDENEFFDAPEIITMPENLGHKRTGSNISGASSDISLDEQYKHQLEETKKEKRTRIPYKPNYSLNLWSIMKNCIGKELSKIPMPVNFNEPLSMLQRLTEDLEYHELLDRAAKCENSLEQLCYVAAFTVSSYSTTVFRTSKPFNPLLGETFELDRLEENGYRSLCEQVSHHPPAAAHHAESKNGWTLRQEIKITSKFRGKYLSIMPLGTIHCIFHATGHHYTWKKVTTTVHNIIVGKLWIDQSGEIDIVNHKTGDKCNLKFVPYSYFSRDVARKVTGEVTDPSGKVHFALLGTWDEKMECFKVQPVIGENGGDARQRGHEAEESRVMLWKRNPLPKNAENMYYFSELALTLNAWESGTAPTDSRLRPDQRLMENGRWDEANAEKQRLEEKQRLSRKKREAEAMKATEDGTPYDPYKALWFERKKDPVTKELTHIYRGEYWECKEKQDWSSCPDIF

SEQ ID NO: 34592 - protein, 91 aa, Homo sapiens
LVVASFIIVALMLHQEALLDTSPLGPQSGKIPSSIFQCIYFYFFGIDYVGNWLLHQHFSSNTGYRPLHGEDAYLPPWLWNSDALCHPFERI

SEQ ID NO: 34593 - protein, 289 aa, Homo sapiens
LSGVLSRLQLGSGAPLLTWVQETAGVAGGAPRRRTPVTMWRLLARASAPLLRVPLSDSWALLPASAGVKTLLPVPSFEDVSIPEKPKLRFIERAPLVPKVRREPKNLSDIRGPSTEATEFTEGNFAILALGGGYLHWGHFEMMRLTINRSMDPKNMFAIWRVPAPFKPITRKSVGHRMGGGKGAIDHYVTPVKAGRLVVEMGGRCEFEEVQGFLDQVAHKLPFAAKAVSRGTLEKMRKDQEERERNNQNPWTFERIATANMLGIRKVLSPYDLTHKGKYWGKFYMPKRV

SEQ ID NO: 34594 - protein, 120 aa, Homo sapiens
VDFFGFLYLLTFCGIRVSEHGVGILIESLIVYEPTNFDFNLHIPVSCYVQRRFPIILVMRGRENDSRRECRRSVGQHRSLSHELEDLEIRPRVSYVNSVPLLSYLIVSLPKCKNKAVHSG

SEQ ID NO: 34595 - protein, 10 aa, Homo sapiens
VISSVFCFLF

SEQ ID NO: 34596 - protein, 69 aa, Homo sapiens
MAISGVLLVFCLLEFGIACASSHFGCQLVCCQSSNVSVIYPNIYAANPVITPEPVTSPPSYSSEIQANK

SEQ ID NO: 34597 - protein, 27 aa, Homo sapiens
LLDGLVKKIQKQMGTRTKKTAKKVFWS

SEQ ID NO: 34598 - protein, 48 aa, Homo sapiens
MMRLSLHPSPPPPLLADSQRHRVTDEEVQQSRFQMPPLEEGESGWEGV

SEQ ID NO: 34599 - protein, 12 aa, Homo sapiens
LADPGSVGAAAV

SEQ ID NO: 34600 - protein, 184 aa, Homo sapiens
LHVVLSQGLWWKQEVQKVTFLPPFSAATTDEERQHLQEVGLFHLGEFVNVFCHGSLVMQNLGETSTPTQGSVLFGTVNGMIGLVTSLSESWYNLLLDMQNRLNKVIKSVGKIEHSFWRSFHTERKTEPATGFIDGDLIESFLDISRPKMQEVVANLQYDDGSGMKREATADDLIKVVEELTRIH

SEQ ID NO: 34601 - protein, 245 aa, Homo sapiens
LLQSTIVCHNRVDPNGSRYLLGDMEGRLFMLLLEKEEQMDGTVTLKDLRVELLGETSIAECLTYLDNGVVFVGSRLGDSQLVKLNVDSNEQGSYVVAMETFTNLGPIVDMCVVDLERQGQGQLVTCSGAFKEGSLRIIRNGIGIHEHASIDLPGIKGLWPLRSDPNRETDDTLVLSFVGQTRVLMLNGEEVEETELMGFVDDQQTFFCGNVAHQQLIQPPGSGRLVKPEGKFCQFADQVWDVPRY

SEQ ID NO: 34602 - protein, 87 aa, Homo sapiens
VRVSLSCFDPQGRHVKTYEVSLREKEFNKGPWKQENVEAEASMVIAVPEPFGGAIIIGQESITYHNGDKYLAIAPPIIKNDDISVNI

SEQ ID NO: 34603 - protein, 81 aa, Homo sapiens
VLRVEQSSLHALFLIGTLGVSLSSCSVPGSKPTFELSADEVELGLGIHGEAGVRRIKVGGPSGTGRPKAKAPQMQLIPGSL

SEQ ID NO: 34604 - protein, 22 aa, Homo sapiens
LQMLSDLLKVPISQELEPRPVL

SEQ ID NO: 34605 - protein, 27 aa, Homo sapiens
MASLAAMLELSLFGARPAPGPPSVAAS

SEQ ID NO: 34606 - protein, 475 aa, Homo sapiens
LSILRTRDLPSGAMSEGVDLIDIYADEEFNQDPEFNNTDQIDLYDDVLTATSQPSDDRSSSTEPPPPVRQEPSPKPNNKTPAILYTYSGLRNRRAAVYVGSFSWWTTDQQLIQVIRSIGVYDVVELKFAENRANGQSKGYAEVVVASENSVHKLLELLPGKVLNGEKVDVRPATRQNLSQFEAQARKRIPPRAHSRDSSDSADGRATPSENLVPSSARVDKPPSVLPYFNRPPSALPLMGLPPPPIPPPPPLSSSFGVPPPPPGIHYQHLMPPPPRLPPHLAVPPPGAIPPALHLNPAFFPPPNATVGPPPDTYMKASAPYNHHGSRDSGPPPSTVSEAEFEDIMKRNRAISSSAISKAVSGASAGDYSDAIETLLTAIAVIKQSRVANDERCRVLISSLKDCLHGIEAKSYSVGASGSSSRKRHRSRERSPSRSRESSRRHRDLLHNEDRHDDYFQERNREHERHRDRERDRHH

SEQ ID NO: 34607 - protein, 149 aa, Homo sapiens
LGAFGGLGIMLSLCAQDLTQMLALSRHSLLSPLLSVTSFRRFYRGDSPTDSQKDMIEIPLPPWQERTDESIETKRARLLYESRKRGMLENCILLSLFAKEHLQHMTEKQLNLYDRLINEPSNDWDIYYWATGTGYDKQHNVKIGQFRLI

SEQ ID NO: 34608 - protein, 174 aa, Homo sapiens
LGAFGGLGIMLSLCAQDLTQMLALSRHSLLSPLLSVTSFRRFYRGDSPTDSQKDMIEIPLPPWQERTDESIETKRARLLYESRKRGMLENCILLSLFAKEHLQHMTEKQLNLYDRLINEPSNDWDIYYWATEAKPAPEIFENEVMALLRDFAKNKNKEQRLRAPDLEYLFEKPR

SEQ ID NO: 34609 - protein, 143 aa, Homo sapiens
VNTAPVPGQTPHDESDRRTEPRSSVSDLVNSLTSEMLMLSPGSEEDEAHEGCSRENLGRIQFSVGYNFQESTLTVKIMKAQELPAKDFSGTSDPFVKIYLLPDKKHKLETKVKRKNLNPHWNETFLFEAGSLGKYFKPSEPHL

SEQ ID NO: 34610 - protein, 587 aa, Homo sapiens
VVGSPLHTAASRLPPSWAPGPAPGRPQEGFIPGPGSPQVDTTEQLKRISRMRLVHYRYKPEFAASAGIEATAPETGVIAQEVKEILPEAVKDTGDMVFANGKTIENFLVVNKERIFMENVGAVKELCKLTDNLETRIDELERWSHKLAKLRRLDSLKSTGSSGAFSHAGSQFSRAGSVPHKKRPPKVASKSSSVVPDQACISQRFLQGTIIALVVVMAFSVVSMSTLYVLSLRTEEDLVDTDGSFAVSTSCLLALLRPQPPGGSEALCPWSSQSFGTTQLRQSPLTTGLPGIQPSLLLVTTSLTSSAPGSAVRTLDMCSSHPCPVICCSSPTTNPTTGPSLGPSFNPGHVLSPSPSPSTNRSGPSQMALLPVTNIRAKSWGLSVNGIGHSKHHKSLEPLASPAVPFPGGQGKAKNSPSLGFHGRARRGALQSSVGPAEPTWAQGQSEPVPSLTSIQVLENSMSITSQYCAPGDACRPGNFTYHIPVSSGTPLHLSLTLQMNSSSPVSVVLCSLRSKEEPCEEGSLPQSLHTHQDTQGTSHRWPITILSFREFTYHFRVALLGQANCSSEALAQPATDYHFHFYRLCD

SEQ ID NO: 34611 - protein, 14 aa, Homo sapiens
LFSLEGLVAMRAAV

SEQ ID NO: 34612 - protein, 23 aa, Homo sapiens
MGGTAERRWAESWSPWSWLCLCL

SEQ ID NO: 34613 - protein, 106 aa, Homo sapiens
LQHDFGHLSVFSTSKWNHLLHHFVIGHLKGAPASWWNHMHFQHHAKPNCFRKDPDINMHPFFFALGKILSVEVRGGISGKPCCLSTSSGIFSILLSSERSGWTWPG

SEQ ID NO: 34614 - protein, 32 aa, Homo sapiens
LHLSIWVAMAMACPPATVCPRPPQRQNEPIGS

SEQ ID NO: 34615 - protein, 258 aa, Homo sapiens
VLGRNPALVPHPGRPPIASPPSPLHRTLGLPQGPRRRSSAAQPPPPPPPLLSRRHDDRVHLAGAPELPPGLRGRHQPPDQPGALRLLRLPVHDRHSYLSLGIPSITHSVFPFQSYYFDRDDVALKNFAKYFLHQSHEEREHAEKLMKLQNQRGGRIFLQDIKKPDCDDWESGLNAMECALHLEKNVNQSLLELHKLATDKNDPHLCDFIETHYLNEQVKAIKELGDHVTNLRKMGAPESGLAEYLFDKHTLGDSDNES

SEQ ID NO: 34616 - protein, 152 aa, Homo sapiens
MTTASTSQVRQNYHQDSEAAINRQINLELYASYVYLSMSYYFDRDDVALKNFAKYFLHQSHEEREHAEKLMKLQNQRGGRIFLQDIKKPDCDDWESGLNAMECALHLEKNVNQSLLELHKLATDKNDPHVSIGTPGNKWRKSFALGIGKAAH

SEQ ID NO: 34617 - protein, 15 aa, Homo sapiens
LNVSILVFGILAFGR

SEQ ID NO: 34618 - protein, 118 aa, Homo sapiens
LRCPGVSRGPCTRAASLGWLWTTLSPSCCLGSADMNPIVVVHGGGAGPISKDRKERVHQGMVRAATVGYGILREGGSAVDAVEGAVVALEDDPEFNAGKCAFQLVNNVSQVKLLLQNK

SEQ ID NO: 34619 - protein, 104 aa, Homo sapiens
LRCPGVSRGPCTRAASLGWLWTTLSPSCCLGSADMNPIVVVHGGGAGPISKDRKERVHQGMVRAATVGYGILREGGSAVDAVEGAVVALEDDPEFNADTSLLSD

SEQ ID NO: 34620 - protein, 342 aa, Homo sapiens
LRCPGVSRGPCTRAASLGWLWTTLSPSCCLGSADMNPIVVVHGGGAGPISKDRKERVHQGMVRAATVGYGILREGGSAVDAVEGAVVALEDDPEFNAGCGSVLNTNGEVEMDASIMDGKDLSAGAVSAVQCIANPIKLARLVMEKTPHCFLTDQGAAQFAAAMGVPEIPGEKLVTERNKKRLEKEKHEKGAQKTDCQKNLGTVGAVALDCKGNVAYATSTGGIVNKMVGRVGDSPCLGAGGYADNDIGAVSTTGHGESILKVNLARLTLFHIEQGKTVEEAADLSLGYMKSRVKGLGGLIVVSKTGDWVAKWTSTSMPWAAAKDGKLHFGIDPDDTTITDLP

SEQ ID NO: 34621 - protein, 24 aa, Homo sapiens
LALTETGSVFAFGENKMGQLGLGN

SEQ ID NO: 34622 - protein, 479 aa, Homo sapiens
LFRPRFPAAVSPRLSSFPLPSLPGGLLCGSAENPTPFLCGITMAAGTLYTYPENWRAFKALIAAQYSGAQVRVLSAPPHFHFGQTNRTPEFLRKFPAGKVPAFEGDDGFCVFESNAIAYYVSNEELRGSTPEAAAQVVQWVSFADSDIVPPASTWVFPTLGIMHHNKQATENAKEEVRRILGLLDAYLKTRTFLVGERVTLADITVVCTLLWLYKQVLEPSFRQAFPNTNRWFLTCINQPQFRAVLGEVKLCEKMAQFDAKKFAETQPKKDTPRKEKGSREEKQKPQAERKEEKKAAAPAPEEEMDECEQALAAEPKAKDPFAHLPKSTFVLDEFKRKYSNEDTLSVALPYFWEHFDKDGWSLWYSEYRFPEELTQTFMSCNLITGMFQRLDKLRKNAFASVILFGTNNSSSISGVWVFRGQELAFPLSPDWQVDYESYTWRKLDPGSEETQTLVREYFSWEGAFQHVGKAFNQGKIFK

SEQ ID NO: 34623 - protein, 487 aa, Homo sapiens
MAERWVAPAVLRRARFASTFFLSPQIYAHKDGDLRSAFFILSFKRGEFIPFLNWTLYTYPENWRAFKALIAAQYSGAQVRVLSAPPHFHFGQTNRTPEFLRKFPAGKVPAFEGDDGFCVFESNAIAYYVSNEELRGSTPEAAAQVVQWVSFADSDIVPPASTWVFPTLGIMHHNKQATENAKEEVRRILGLLDAYLKTRTFLVGERVTLADITVVCTLLWLYKQVLEPSFRQAFPNTNRWFLTCINQPQFRAVLGEVKLCEKMAQFDAKKFAETQPKKDTPRKEKGSREEKQKPQAERKEEKKAAAPAPEEEMDECEQALAAEPKAKDPFAHLPKSTFVLDEFKRKYSNEDTLSVALPYFWEHFDKDGWSLWYSEYRFPEELTQTFMSCNLITGMFQRLDKLRKNAFASVILFGTNNSSSISGVWVFRGQELAFPLSPDWQVDYESYTWRKLDPGSEETQTLVREYFSWEGAFQHVGKAFNQGKIFK

SEQ ID NO: 34624 - protein, 993 aa, Homo sapiens
LFVLRRCGTGRPCHPTPGSRERPRESPRARGGLETAAPGPQRPLQAPSPRPTAPPRGGGTAPFARAPGCFPFPSPRPWPPRLRRLLRRRRSEQPGGRMDGAAGPGDGPAREALQSLSQRLRVQEQEMELVKAALAEALRLLRLQVPPSSLQGSGTPAPPGDSLAAPPGLPPTCTPSLVSRGTQTETEVELKSSPGPPGLSNGPPAPQGASEEPSGTQSEGGGSSSSGAGSPGPPGILRPLQPPQRADTPRRNSSSSSSPSERPRQKLSRKAISSANLLVRSGSTESRGGKDPLSSPGGPGSRRSNYNLEGISVKMFLRGRPITMYIPSGIRSLEELPSGPPPETLSLDWVYGYRGRDSRSNLFVLRSGEVVYFIACVVVLYRPGGGPGGPGGGGQRHYRGHTDCVRCLAVHPDGVRVASGQTAGVDKDGKPLQPVVHIWDSETLLKLQEIGLGAFERGVGALAFSAADQGAFLCVVDDSNEHMLSVWDCSRGMKLAEIKSTNDSVLAVGFNPRDSSCIVTSGKSHVHFWNWSGGVGVPGNGTLTRKQGVFGKYKKPKFIPCFVFLPDGDILTGDSEGNILTWGRSPSDSKTPGRGGAKETYGIVAQAHAHEGSIFALCLRRDGTVLSGGGRDRRLVQWGPGLVALQEAEIPEHFGAVRAIAEGLGSELLVGTTKNALLRGDLAQGFSPVIQGHTDELWGLCTHPSQNRFLTCGHDRQLCLWDGESHALAWSIDLKETGLCADFHPSGAVVAVGLNTGRWLVLDTETREIVSDVIDGNEQLSVVRYSPDGLYLAIGSHDNVIYIYSVSSDGAKSSRFGRCMGHSSFITHLDWSKDGNFIMSNSGDYEILYWDVAGGCKQLKNRYESRDREWATYTCVLGFHVYGVWPDGSDGTDINSLCRSHNERVVAVADDFCKVHLFQYPCARAKAPSRMYGGHGSHVTSVRFTHDDSHLVSLGGKDASIFQWRVLGAGGAGPAPATPSRTPSLSPASSLDV

SEQ ID NO: 34625 - protein, 178 aa, Homo sapiens [sequence omitted]

SEQ ID NO: 34626 - protein, 51 aa, Homo sapiens
MPELDGCLEASPRAPPPQGLRASSTVPPVALPSCLGLAVTSGFPSVILRPT

SEQ ID NO: 34627 - protein, 46 aa, Homo sapiens
LQLGLALTASLLAQVLVWHTRTEKPKMKQEEQLQRQGRGSDPAIEV

SEQ ID NO: 34628 - protein, 862 aa, Homo sapiens
LQVLLVLELQGLQKNMTRFRIDELEPRRPRYRVPDVLVADPPIARLSVSGRDENSVELTMAEGPYKIILTARPFRLDLLEDRSLLLSVNARGLLEFEHQRAPRVSQGSKDPAEGDGAQPEETPRDGDKPEETQGKAEKDEPGAWEETFKTHSDSKPYGPMSVGLDFSLPGMEHVYGIPEHADNLRLKVTEGGEPYRLYNLDVFQYELYNPMALYGSVPVLLAHNPHRDLGIFWLNAAETWVDISSNTAGKTLFGKMMDYLQGSGETPQTDVRWMSETGIIDVFLLLGPSISDVFRQYASLTGTQALPPLFSLGYHQSRWNYRDEADVLEVDQGFDDHNLPCDVIWLDIEHADGKRYFTWDPSRFPQPRTMLERLASKRRKLVAIVDPHIKVDSGYRVHEELRNLGLYVKTRDGSDYEGWCWPGSAGYPDFTNPTMRAWWANMFSYDNYEGSAPNLFVWNDMNEPSVFNGPEVTMLKDAQHYGGWEHRDVHNIYGLYVHMATADGLRQRSGGMERPFVLARAFFAGSQRFGAVWTGDNTAEWDHLKISIPMCLSLGLVGLSFCGADVGGFFKNPEPELLVRWYQMGAYQPFFRAHAHLDTGRREPWLLPSQHNDIIRDALGQRYSLLPFWYTLLYQAHREGIPVMRPLWVQYPQDVTTFNIDDQYLLGDALLVHPVSDSGAHGVQVYLPGQGEVWYDIQSYQKHHGPQTLYLPVTLSSIPVFQRGGTIVPRWMRVRRSSECMKDDPITLFVALSPQGTAQGELFLDDGHTFNYQTRQEFLLRRFSFSGNTLVSSSADPEGHFETPIWIERVVIIGAGKPAAVVLQTKGSPESRLSFQHDPETSVLVLRKPGINVASDWSIHLR

SEQ ID NO: 34629 - protein, 969 aa, Homo sapiens
LHKMAAVAAVAARRRRSWASLVLAFLGVCLGITLAVDRSNFKTCEESSFCKRQRSIRPGLSPYRALLDSLQLGPDSLTVHLIHEVTKVLLVLELQGLQKNMTRFRIDELEPRRPRYRVPDVLVADPPIARLSVSGRDENSVELTMAEGPYKIILTARPFRLDLLEDRSLLLSVNARGLLEFEHQRAPRVSFSDKVNLTLGSIWDKIKNLFSRQGSKDPAEGDGAQPEETPRDGDKPEETQGKAEKDEPGAWEETFKTHSDSKPYGPMSVGLDFSLPGMEHVYGIPEHADNLRLKVTEGGEPYRLYNLDVFQYELYNPMALYGSVPVLLAHNPHRDLGIFWLNAAETWVDISSNTAGKTLFGKMMDYLQGSGETPQTDVRWMSETGIIDVFLLLGPSISDVFRQYASLTGTQALPPLFSLGYHQSRWNYRDEADVLEVDQGFDDHNLPCDVIWLDIEHADGKRYFTWDPSRFPQPRTMLERLASKRRKLVAIVDPHIKVDSGYRVHEELRNLGLYVKTRDGSDYEGWCWPGSAGYPDFTNPTMRAWWANMFSYDNYEGSAPNLFVWNDMNEPSVFNGPEVTMLKDAQHYGGWEHRDVHNIYGLYVHMATADGLRQRSGGMERPFVLARAFFAGSQRFGAVWTGDNTAEWDHLKISIPMCLSLGLVGLSFCGADVGGFFKNPEPELLVRWYQMGAYQPFFRAHAHLDTGRREPWLLPSQHNDIIRDALGQRYSLLPFWYTLLYQAHREGIPVMRPLWVQYPQDVTTFNIDDQYLLGDALLVHPVSDSGAHGVQVYLPGQGEVWYDIQSYQKHHGPQTLYLPVTLSSIPVFQRGGTIVPRWMRVRRSSECMKDDPITLFVALSPQGTAQGELFLDDGHTFNYQTRQEFLLRRFSFSGNTLVSSSADPEGHFETPIWIERVVIIGAGKPAAVVLQTKGSPESRLSFQHDPETSVLVLRKPGINVASDWSIHLR

SEQ ID NO: 34630 - protein, 947 aa, Homo sapiens
LHKMAAVAAVAARRRRSWASLVLAFLGVCLGITLAVDRSNFKTCEESSFCKRQRSIRPGLSPYRALLDSLQLGPDSLTVHLIHEVTKVLLVLELQGLQKNMTRFRIDELEPRRPRYRVPDVLVADPPIARLSVSGRDENSVELTMAEGPYKIILTARPFRLDLLEDRSLLLSVNARGLLEFEHQRAPRVSQGSKDPAEGDGAQPEETPRDGDKPEETQGKAEKDEPGAWEETFKTHSDSKPYGPMSVGLDFSLPGMEHVYGIPEHADNLRLKVTEGGEPYRLYNLDVFQYELYNPMALYGSVPVLLAHNPHRDLGIFWLNAAETWVDISSNTAGKTLFGKMMDYLQGSGETPQTDVRWMSETGIIDVFLLLGPSISDVFRQYASLTGTQALPPLFSLGYHQSRWNYRDEADVLEVDQGFDDHNLPCDVIWLDIEHADGKRYFTWDPSRFPQPRTMLERLASKRRKLVAIVDPHIKVDSGYRVHEELRNLGLYVKTRDGSDYEGWCWPGSAGYPDFTNPTMRAWWANMFSYDNYEGSAPNLFVWNDMNEPSVFNGPEVTMLKDAQHYGGWEHRDVHNIYGLYVHMATADGLRQRSGGMERPFVLARAFFAGSQRFGAVWTGDNTAEWDHLKISIPMCLSLGLVGLSFCGADVGGFFKNPEPELLVRWYQMGAYQPFFRAHAHLDTGRREPWLLPSQHNDIIRDALGQRYSLLPFWYTLLYQAHREGIPVMRPLWVQYPQDVTTFNIDDQYLLGDALLVHPVSDSGAHGVQVYLPGQGEVWYDIQSYQKHHGPQTLYLPVTLSSIPVFQRGGTIVPRWMRVRRSSECMKDDPITLFVALSPQGTAQGELFLDDGHTFNYQTRQEFLLRRFSFSGNTLVSSSADPEGHFETPIWIERVVIIGAGKPAAVVLQTKGSPESRLSFQHDPETSVLVLRKPGINVASDWSIHLR

SEQ ID NO: 34631 - protein, 855 aa, Homo sapiens
LHKMAAVAAVAARRRRLSVSGRDENSVELTMAEGPYKIILTARPFRLDLLEDRSLLLSVNARGLLEFEHQRAPRVSFSDKVNLTLGSIWDKIKNLFSRQGSKDPAEGDGAQPEETPRDGDKPEETQGKAEKDEPGAWEETFKTHSDSKPYGPMSVGLDFSLPGMEHVYGIPEHADNLRLKVTEGGEPYRLYNLDVFQYELYNPMALYGSVPVLLAHNPHRDLGIFWLNAAETWVDISSNTAGKTLFGKMMDYLQGSGETPQTDVRWMSETGIIDVFLLLGPSISDVFRQYASLTGTQALPPLFSLGYHQSRWNYRDEADVLEVDQGFDDHNLPCDVIWLDIEHADGKRYFTWDPSRFPQPRTMLERLASKRRKLVAIVDPHIKVDSGYRVHEELRNLGLYVKTRDGSDYEGWCWPGSAGYPDFTNPTMRAWWANMFSYDNYEGSAPNLFVWNDMNEPSVFNGPEVTMLKDAQHYGGWEHRDVHNIYGLYVHMATADGLRQRSGGMERPFVLARAFFAGSQRFGAVWTGDNTAEWDHLKISIPMCLSLGLVGLSFCGADVGGFFKNPEPELLVRWYQMGAYQPFFRAHAHLDTGRREPWLLPSQHNDIIRDALGQRYSLLPFWYTLLYQAHREGIPVMRPLWVQYPQDVTTFNIDDQYLLGDALLVHPVSDSGAHGVQVYLPGQGEVWYDIQSYQKHHGPQTLYLPVTLSSIPVFQRGGTIVPRWMRVRRSSECMKDDPITLFVALSPQGTAQGELFLDDGHTFNYQTRQEFLLRRFSFSGNTLVSSSADPEGHFETPIWIERVVIIGAGKPAAVVLQTKGSPESRLSFQHDPETSVLVLRKPGINVASDWSIHLR

SEQ ID NO: 34632 - protein, 105 aa, Homo sapiens
LQVLLVLELQGLQKNMTRFRIDELEPRRPRYRVPDVLVADPPIARLSVSGRDENSVELTMAEGPYKIILTARPFRLDLLEDRSLLLSVNARGLLEFEHQRAPRVS

SEQ ID NO: 34633 - protein, 72 aa, Homo sapiens
VAERARWGGRFGVKEQTLHKMAAVAAVAARRRRSWASLVLAFLGVCLGITLAVDRSNFKTCEESSFCKCCWC

SEQ ID NO: 34634 - protein, 79 aa, Homo sapiens
LHKMAAVAAVAARRRRSWASLVLAFLGVCLGITLAVDRSNFKTCEESSFCDREAYGQASLHTEPCWTLYSLVLIPSRSI

SEQ ID NO: 34635 - protein, 22 aa, Homo sapiens
LHKMAAVAAVAARRRRDRVSPC

SEQ ID NO: 34636 - protein, 131 aa, Homo sapiens
VNWSGIATMGAPGGKINRPRTELKKKLFKRRRVLNRERRLRHRVVGAVIDQGLITRHHLKKRASSARANITLSGKKRRKLLQQIRLAQKEKTAMEVEAPSKPARTSEPQLKRQKKTKAPQDVEMKDLEDES

SEQ ID NO: 34637 - protein, 20 aa, Homo sapiens
VSHTGLVPSAVLIVAKKCPS

SEQ ID NO: 34638 - protein, 247 aa, Homo sapiens
LHQGLPTVSMLGSPCLLWLLAVTFLVPRAQPLAPQDFEEEEADETETAWPPLPAVPCDYDHCRHLQVPCKELQRVGPAACLCPGLSSPAQPPDPPRMGEVRIAAEEGRAVVHWCAPFSPVLHYWLLLWDGSEAAQKGPPLNATVRRAELKGLKPGGIYVVCVVAANEAGASRVPQAGGEGLEGADIPAFGPCSRLAVPPNPRTLVHAAVGVGTALALLSCAALVWHFCLRDRWGCPRRAAARAAGAL

SEQ ID NO: 34639 - protein, 71 aa, Homo sapiens
LAGSGGWLQGAPPGVGCSRVGERALLEAERRNSGSNCGYSKATGFESGRATLGTTSCCIPWPGVASRWQSS

SEQ ID NO: 34640 - protein, 74 aa, Homo sapiens
LVSMVARLGRGSGRFAHPRAGGDWREAAVGCRALRRAWGVAVSVSELCSRRRGETREAIVATLRLLVSSQAVRP

SEQ ID NO: 34641 - protein, 821 aa, Homo sapiens
LGSVSRKGEGRRRRSKHCAAGPCAASAPACVRSLARAQCWRVRRRRAAAAAPARSDSVDGSQGRRRREAEEAAAAMEVKRLKVTELRSELQRRGLDSRGLKVDLAQRLQEALDAEMLEDEAGGGGAGPGGACKAEPRPVAASGGGPGGDEEEDEEEEEEDEEALLEDEDEEPPPAQALGQAAQPPPEPPEAAAMEAAAEPDASEKPAEATAGSGGVNGGEEQGLGKREEDEPEERSGDETPGSEVPGDKAAEEQGDDQDSEKSKPAGSDGERRGVKRQRDEKDEHGRAYYEFREEAYHSRSKSPLPPEEEAKDEEEDQTLVNLDTYTSDLHFQVSKDRYGGQPLFSEKFPTLWSGARSTYGVTKGKVCFEAKVTQNLPMKEGCTEVSLLRVGWSVDFSRPQLGEDEFSYGFDGRGLKAENGQFEEFGQTFGENDVIGCFANFETEEVELSFSKNGEDLGVAFWISKDSLADRALLPHVLCKNCVVELNFGQKEEPFFPPPEEFVFIHAVPVEERVRTAVPPKTIEECEVILMVGLPGSGKTQWALKYAKENPEKRYNVLGAETVLNQMRMKGLEEPEMDPKSRDLLVQQASQCLSKLVQIASRTKRNFILDQCNVYNSGQRRKLLLFKTFSRKVVVVVPNEEDWKKRLELRKEVEGDDVPESIMLEMKANFSLPEKCDYMDEVTYGELEKEEAQPIVTKYKEEARKLLPPSEKRTNRRNNRNKRNRQNRSRGQGYVGGQRRGYDNRAYGQQYWGQPGNRGGYRNFYDRYRGDYDRFYGRDYEYNRYRDYYRQYNRDGPSIFHIQENVMRHRYQRLDRHFTF

SEQ ID NO: 34642 - protein, 14 aa, Homo sapiens
LGVGDPPFSISRKM

SEQ ID NO: 34643 - protein, 129 aa, Homo sapiens
LALPRGLLSYSHCFCIRYFQLQLPTGWGTHFRQKVLVPSTDPTPRAATAACGFRMKGETPVNSTMSIGQARKMVEQLKIEASLCRIKVSKAAADLMTYCDAHACEDPLITPVPTSENPFREKKFFCALL

SEQ ID NO: 34644 - protein, 792 aa, Homo sapiens
VRSLARAQCWRVRRRRAAAAAPARSDSVDGSQGRRRREAEEAAAAMEVKRLKVTELRSELQRRGLDSRGLKVDLAQRLQEALDAEMLEDEAGGGGAGPGGACKAEPRPVAASGGGPGGDEEEDEEEEEEDEEALLEDEDEEPPPAQALGQAAQPPPEPPEAAAMEAAAEPDASEKPAEATAGSGGVNGGEEQGLGKREEDEPEERSGDETPGSEVPGDKAAEEQGDDQDSEKSKPAGSDGERRGVKRQRDEKDEHGRAYYEFREEAYHSRSKSPLPPEEEAKDEEEDQTLVNLDTYTSDLHFQVSKDRYGGQPLFSEKFPTLWSGARSTYGVTKGKVCFEAKVTQNLPMKEGCTEVSLLRVGWSVDFSRPQLGEDEFSYGFDGRGLKAENGQFEEFGQTFGENDVIGCFANFETEEVELSFSKNGEDLGVAFWISKDSLADRALLPHVLCKNCVVELNFGQKEEPFFPPPEEFVFIHAVPVEERVRTAVPPKTIEECEVILMVGLPGSGKTQWALKYAKENPEKRYNVLGAETVLNQMRMKGLEEPEMDPKSRDLLVQQASQCLSKLVQIASRTKRNFILDQCNVYNSGQRRKLLLFKTFSRKVVVVVPNEEDWKKRLELRKEVEGDDVPESIMLEMKANFSLPEKCDYMDEVTYGELEKEEAQPIVTKYKEEARKLLPPSEKRTNRRNNRNKRNRQNRSRGQGYVGGQRRGYDNRAYGQQYWGQPGNRGGYRNFYDRYRGDYDRFYGRDYEYNRYRDYYRQYNRDWQSYYYHHPQDRDRYYRNYYGYQGYR

SEQ ID NO: 34645 - protein, 200 aa, Homo sapiens
LLLSVILLPTPELHLLLHFPVPQEPWATVMEKRLQEAQLYKEEGNQRYREGKYRDAVSRYHRALLQLRGLDPSLPSPLPNLGPQGPALTPEQENILHTTQTDCYNNLAACLLQMEPVNYERVREYSQKVLERQPDNAKALYRAGVAFFHLQDYDQARHYLLAAVNRQPKDANVRRYLQLTQSELSSYHRKEKQLYLGMFG

SEQ ID NO: 34646 - protein, 97 aa, Homo sapiens
LVAQNIDVVLNRRSCMAATLRIIEENIPELKSERELDKIKGLKLEELWLDGNSLCDTFRDQSTYIRMAMSYPHQLPLMLKPPRRYRPAREAILEQKT

SEQ ID NO: 34647 - protein, 566 aa, Homo sapiens
LRGGTEAGESVLGPRVQVGVEPPSDRKLRRVAGSAGTMSQDTEVDMKEVELNELEPEKQPMNAASGAAMSLAGAEKNGLVKIKVAEDEAEAAAAAKFTGLSKEELLKVAGSPGWVRTRWALLLLFWLGWLGMLAGAVVIIVRAPRCRELPAQKWWHTGALYRIGDLQAFQGHGAGNLAGLKGRLDYLSSLKVKGLVLGPIHKNQKDDVAQTDLLQIDPNFGSKEDFDSLLQSAKKKSIRVILDLTPNYRGENSWFSTQVDTVATKVKDALEFWLQAGVDGFQVRDIENLKDASSFLAEWQNITKGFSEDRLLIAGTNSSDLQQILSLLESNKDLLLTSSYLSDSGSTGEHTKSLVTQYLNATGNRWCSWSLSQARLLTSFLPAQLLRLYQLMLFTLPGTPVFSYGDEIGLDAAALPGQPMEAPVMLWDESSFPDIPGAVSANMTVKGQSEDPGSLLSLFRRLSDQRSKERSLLHGDFHAFSAGPGLFSYIRHWDQNERFLVVLNFGDVGLSAGLQASDLPASASLPAKADLLLSTQPGREEGSPLELERLKLEPHEGLLLRFPYAA

SEQ ID NO: 34648 - protein, 127 aa, Homo sapiens
LPPPRPTLRRWEKGGWGGQGPLRGASLVNPAPISGLKGRLDYLSSLKVKGLVLGPIHKNQKDDVAQTDLLQIDPNFGSKEDFDSLLQSAKKKNGVSLLSPRLQCSGTISAYCSLLPQGSSDSRASAS

SEQ ID NO: 34649 - protein, 120 aa, Homo sapiens
LPPPRPTLRRWEKGGWGGQGPLRGASLVNPAPISGLKGRLDYLSSLKVKGLVLGPIHKNQKDDVAQTDLLQIDPNFGSKEDFDSLLQSAKKKSCSAVERSQLTAASSPRVQAILVPQPPE

SEQ ID NO: 34650 - protein, 181 aa, Homo sapiens
LPPPRPTLRRWEKGGWGGQGPLRGASLVNPAPISGLKGRLDYLSSLKVKGLVLGPIHKNQKDDVAQTDLLQIDPNFGSKEDFDSLLQSAKKKIETIFNMLTGLVLNSPGLPSHILRPFLAHICFNGMNFARVQIQAFVPSIRVILDLTPNYRGENSWFSTQVDTVATKVKASGNWERGDLD

SEQ ID NO: 34651 - protein, 134 aa, Homo sapiens
LPPPRPTLRRWEKGGWGGQGPLRGASLVNPAPISGLKGRLDYLSSLKVKGLVLGPIHKNQKDDVAQTDLLQIDPNFGSKEDFDSLLQSAKKKSIRVILDLTPNYRGENSWFSTQVDTVATKVKASGNWERGDLD

SEQ ID NO: 34652 - protein, 422 aa, Homo sapiens
LPPPRPTLRRWEKGGWGGQGPLRGASLVNPAPISGLKGRLDYLSSLKVKGLVLGPIHKNQKDDVAQTDLLQIDPNFGSKEDFDSLLQSAKKKSIRVILDLTPNYRGENSWFSTQVDTVATKVKDALEFWLQAGVDGFQVRDIENLKDASSFLAEWQNITKGFSEDRLLIAGTNSSDLQQILSLLESNKDLLLTSSYLSDSGSTGEHTKSLVTQYLNATGNRWCSWSLSQARLLTSFLPAQLLRLYQLMLFTLPGTPVFSYGDEIGLDAAALPGQPMEAPVMLWDESSFPDIPGAVSANMTVKGQSEDPGSLLSLFRRLSDQRSKERSLLHGDFHAFSAGPGLFSYIRHWDQNERFLVVLNFGDVGLSAGLQASDLPASASLPAKADLLLSTQPGREEGSPLELERLKLEPHEGLLLRFPYAA

SEQ ID NO: 34653 - protein, 66 aa, Homo sapiens
LGLCFEFQSFILGLALSSYCTHTFPRPQETGRGGILTDILDPVCCSLIMTVDASPCFSGSVSSSLK

SEQ ID NO: 34654 - protein, 340 aa, Homo sapiens
LGQMSQPSGGRAPGTRIYSWSCPTVMSPGEKLDPIPDSFILQPPVFHPVVPYVTTIFGGLHAGKMVMLQGVVPLDAHSRFQVDFQCGCSLCPRPDIAFHFNPRFHTTKPHVICNTLHGGRWQREARWPHLALRRGSSFLILFLFGNEEVKVSVNGQHFLHFRYRLPLSHVDTLGIFGDILVEAVGFLNINPFVEGSREYPAGHPFLLMSPRLEVPCSHALPQGLSPGQVIIVRGLVLQEPKHFTVSLRDQAAHAPVTLRASFADRTLAWISRWGQKKLISAPFLFYPQRFFEVLLLFQEGGLKLALNGQGLGATSMNQQALEQLRELRISGSVQLYCVHS

SEQ ID NO: 34655 - protein, 118 aa, Homo sapiens
LPRPGDEELQLLLCGARSDFLERCEEDWVCLWHHADHAAFPGSFQCHQCGFLPHPGSSLCHHQLQDLQVRHPSCTEVRRRPSIQTQIDHYVGIARDQTKSIVEKIQAKLPGIAKKKAE

SEQ ID NO: 34656 - protein, 175 aa, Homo sapiens
LTVFCGVLRAIMSVLTPLLLRGLTGSARRLPVPRAKIHSLPPEGKLGIMGKENGIGSRRICNHHRELWEAGKMEPNQCVGWRCGSGAAGLSYRSQVRRPGVPAPATGLEAHSLTTPKGIPLLGLLPRRGNEEGLASGRTAIGNPEAVGSAALFKDGGGGTSAAEAGAAGQRLRRC

SEQ ID NO: 34657 - protein, 46 aa, Homo sapiens
VGPRCGAPRAPRRWPTSCLLGQMLLRTAAMVACSACRSPQQECCLR

SEQ ID NO: 34658 - protein, 294 aa, Homo sapiens
VRASSFAGLRSTKVRAGHSGCRRRPWDVRGLRDLSLRPATFSGVNCLAYDEAIMAQQDRIQQEIAVQNPLVSERLELSVLYKEYAEDDNIYQQKIKDLHKKYSYIRKTRPDGNCFYRAFGFSHLEALLDDSKELQRFKAVSAKSKEDLVSQGFTEFTIEDFHNTFMDLIEQVEKQTSVADLLASFNDQSTSDYLVVYLRLLTSGYLQRESKFFEHFIEGGRTVKEFCQQEVEPMCKESDHIHIIALAQALSVSIQVEYMDRGEGGTTNPHIFPEGSEPKVYLLYRPGHYDILYK

SEQ ID NO: 34659 - protein, 39 aa, Homo sapiens
LVKLGSPPDAVTWGKVRKQAVGEKMDSFLDRQDQRVKRE

SEQ ID NO: 34660 - protein, 670 aa, Homo sapiens
LAIPGTAWNSRHSGARGKATQRPRSRRRHSYRPRLQPVLPYIRGGAKPGLLKGSDLNQSAQRVGNPPPNWNRSHSEGGSDMESGSPMGEVEISRTIRTNGRGQRGYDWQCKRPIRVAEVRSSLHSWSLRWVNELKEKGNKALSVGNIDDALQCYSEAIKLDPHNHVLYSNRSAAYAKKGDYQKAYEDGCKTVDLKPDWGKGYSRKAAALEFLNRFEEAKRTYEEGLKHEANNPQLKEGLQNMEARLAERKFMNPFNMPNLYQKLESDPRTRTLLSDPTYRELIEQLRNKPSDLGTKLQDPRIMTTLSVLLGVDLGSMDEEEEIATPPPPPPPKKETKPEPMEEDLPENKKQALKEKELGNDAYKKKDFDTALKHYDKAKELDPTNMTYITNQAAVYFEKGDYNKCRELCEKAIEVGRENREDYRQIAKAYARIGNSYFKEEKYKDAIHFYNKSLAEHRTPDVLKKCQQAEKILKEQERLAYINPDLALEEKNKGNECFQKGDYPQAMKHYTEAIKRNPKDAKLYSNRAACYTKLLEFQLALKDCEECIQLEPTFIKGYTRKAAALEAMKDYTKAMDVYQKALDLDSSCKEAADGYQRCMMAQYNRHDSPEDVKRRAMADPEVQQIMSDPAMRLILEQMQKDPQALSEHLKNPVIAQKIQKLMDVGLIAIR

SEQ ID NO: 34661 - protein, 677 aa, Homo sapiens
LQPPALARKAAAAAMAGMKTASGDYIDSSWELRVFVGEEDPEAESVTLRVTGESHIGGVLLKIVEQINRKQDWSDHAIWWEQKRQWLLQTHWTLDKYGILADARLFFGPQHRPVILRLPNRRALRLRASFSQPLFQAVAAICRLLSIRHPEELSLLRAPEKKEKKKKEKEPEEELYDLSKVVLAGGVAPALFRGMPAHFSDSAQTEACYHMLSRPQPPPDPLLLQRLPRPSSLSDKTQLHSRWLDSSRCLMQQGIKAGDALWLRFKYYSFFDLDPKTDPVRLTQLYEQARWDLLLEEIDCTEEEMMVFAALQYHINKLSQSGEVGEPAGTDPGLDDLDVALSNLEVKLEGSAPTDVLDSLTTIPELKDHLRIFRPRKLTLKGYRQHWVVFKETTLSYYKSQDEAPGDPIQQLNLKGCEVVPDVNVSGQKFCIKLLVPSPEGMSEIYLRCQDEQQYARWMAGCRLASKGRTMADSSYTSEVQAILAFLSLQRTGSGGPGNHPHGPDASAEGLNPYGLVAPRFQRKFKAKQLTPRILEAHQNVAQLSLAEAQLRFIQAWQSLPDFGISYVMVRFKGSRKDEILGIANNRLIRIDLAVGDVVKTWRFSNMRQWNVNWDIRQVAIEFDEHINVAFSCVSASCRIVHEYIGGYIFLSTRERARGEELDEDLFLQLTGGHEAF

SEQ ID NO: 34662 - protein, 121 aa, Homo sapiens
MCCLTTIPELKDHLRIFRPRKLTLKGYRQHWVVFKETTLSYYKSQDEAPGDPIQQLNLKGCEVVPDVNVSGQKFCIKLLVPSPEGMSEIYLRCQDVSEGWAGARAGQELGQGQGLRSIKLG

SEQ ID NO: 34663 - protein, 48 aa, Homo sapiens
MVGMPGRPGYPAGLGAPAGKMARFTAQGVVRGVEKRCGYPQEVCDRGG

SEQ ID NO: 34664 - protein, 83 aa, Homo sapiens
MLGFPDLPLVCLCLSILLFRPKKKDSAVKPDSPRPLCPRCTQHHQRPDPRTCRCRCRRRSFLRCQGRGLELNPDTCRCRKLRR

SEQ ID NO: 34665 - protein, 155 aa, Homo sapiens
LVATRTRLRRGGSTTGVDSGGAARRDMRLSWFRVLTVLSICLSAVATATGAEGKRKLQIGVKKRVDHCPIKSRKGDVLHMHYTGKLEDGTEFDSSLPQNQPFVFSLGTGQVIKGWDQGLLGMCEGEKRKLVIPSELGKRPLLRVQSEFGVCDWEG

SEQ ID NO: 34666 - protein, 168 aa, Homo sapiens
LVATRTRLRRGGSTTGVDSGGAARRDMRLSWFRVLTVLSICLSAVATATGAEGKRKLQIGVKKRVDHCPIKSRKGDVLHMHYTGKLEDGTEFDSSLPQNQPFVFSLGTGQVIKGWDQGLLGMCEGEKRKLVIPSELGYGERGAPPKIPGGATLVFEVELLKIERRTEL

SEQ ID NO: 34667 - protein, 229 aa, Homo sapiens
LQLGRRPRGTKGGRIGGEGAGRGQAKPGGSACCSCPRAPPPPPSPRSRAERSRRANPSQPAGVPEAVAQGGARRSHVAPAAAMADSGTAGGAALAAPAPGPGSGGPGPRVYFQSPPGAAGEGPGGADDEGPVRRQGKVTVKYDRKELRKRLNLEEWILEQLTRLYDCQEEEIPELEIDVDELLDMESDDARAARVKELLVDCYKPTEAFISGLLDKIRGMQKLSTPQKK

SEQ ID NO: 34668 - protein, 1273 aa, Homo sapiens
LAGGRALTPRGRSGPRGGSSGAVGPRQGSVGPRPAPGRAMAGAQPGVHALQLEPPTVVETLRRGSKFIKWDEETSSRNLVTLRVDPNGFFLYWTGPNMEVDTLDISSIRDTRTGRYARLPKDPKIREVLGFGGPDARLEEKLMTVVSGPDPVNTVFLNFMAVQDDTAKVWSEELFKLAMNILAQNASRNTFLRKAYTKLKLQVNQDGRIPVKNILKMFSADKKRVETALESCGLKFNRSESIRPDEFSLEIFERFLNKLCLRPDIDKILLEIGAKGKPYLTLEQLMDFINQKQRDPRLNEVLYPPLRPSQARLLIEKYEPNQQFLERDQMSMEGFSRYLGGEENGILPLEALDLSTDMTQPLSAYFINSSHNTYLTAGQLAGTSSVEMYRQALLWGCRCVELDVWKGRPPEEEPFITHGFTMTTEVPLRDVLEAIAETAFKTSPYPVILSFENHVDSAKQQAKMAEYCRSIFGDALLIEPLDKYPLAPGVPLPSPQDLMGRILVKNKKRHRPSAGGPDSAGRKRPLEQSNSALSESSAATEPSSPQLGSPSSDSCPGLSNGEEVGLEKPSLEPQKSLGDEGLNRGPYVLGPADREDEEEDEEEEEQTDPKKPTTDEGTASSEVNATEEMSTLVNYIEPVKFKSFEAARKRNKCFEMSSFVETKAMEQLTKSPMEFVEYNKQQLSRIYPKGTRVDSSNYMPQLFWNVGCQLVALNFQTLDVAMQLNAGVFEYNGRSGYLLKPEFMRRPDKSFDPFTEVIVDGIVANALRVKVISGQFLSDRKVGIYVEVDMFGLPVDTRRKYRTRTSQGNSFNPVWDEEPFDFPKVVLPTLASLRIAAFEEGGKFVGHRILPVSAIRSGYHYVCLRNEANQPLCLPALLIYTEASDYIPDDHQDYAEALINPIKHVSLMDQRARQLAALIGESEAQAGQETCQDTQSQQLGSQPSSNPTPSPLDASPRRPPGPTTSPASTSLSSPGQRDDLIASILSEVAPTPLDELRGHKALVKLRSRQERDLRELRKKHQRKAVTLTRRLLDGLAQAQAEGRCRLRPGALGGAADVEDTKEGEDEAKRYQEFQNRQVQSLLELREAQVDAEAQRRLEHLRQALQRLREVVLDANTTQFKRLKEMNEREKKELQKILDRKRHNSISEAKMRDKHKKEAELTEINRRHITESVNSIRRLEEAQKQRHDRLVAGQQQVLQQLAEEEPKLLAQLAQECQEQRARLPQEIRRSLLGEMPEGLGDGPLVACASNGHAPGSSGHLSGADSESQEENTQL

SEQ ID NO: 34669 - protein, 1177 aa, Homo sapiens
VGPRPAPGRAMAGAQPGVHALQLEPPTVVETLRRGSKFIKWDEEKLMTVVSGPDPVNTVFLNFMAVQDDTAKVWSEELFKLAMNILAQNASRNTFLRKAYTKLKLQVNQDGRIPVKNILKMFSADKKRVETALESCGLKFNRSESIRPDEFSLEIFERFLNKLCLRPDIDKILLEIGAKGKPYLTLEQLMDFINQKQRDPRLNEVLYPPLRPSQARLLIEKYEPNQQFLERDQMSMEGFSRYLGGEENGILPLEALDLSTDMTQPLSAYFINSSHNTYLTAGQLAGTSSVEMYRQALLWGCRCVELDVWKGRPPEEEPFITHGFTMTTEVPLRDVLEAIAETAFKTSPYPVILSFENHVDSAKQQAKMAEYCRSIFGDALLIEPLDKYPLAPGVPLPSPQDLMGRILVKNKKRHRPSAGGPDSAGRKRPLEQSNSALSESSAATEPSSPQLGSPSSDSCPGLSNGEEVGLEKPSLEPQKSLGDEGLNRGPYVLGPADREDEEEDEEEEEQTDPKKPTTDEGTASSEVNATEEMSTLVNYIEPVKFKSFEAARKRNKCFEMSSFVETKAMEQLTKSPMEFVEYNKQQLSRIYPKGTRVDSSNYMPQLFWNVGCQLVALNFQTLDVAMQLNAGVFEYNGRSGYLLKPEFMRRPDKSFDPFTEVIVDGIVANALRVKVISGQFLSDRKVGIYVEVDMFGLPVDTRRKYRTRTSQGNSFNPVWDEEPFDFPKVVLPTLASLRIAAFEEGGKFVGHRILPVSAIRSGYHYVCLRNEANQPLCLPALLIYTEASDYIPDDHQDYAEALINPIKHVSLMDQRARQLAALIGESEAQAGQETCQDTQSQQLGSQPSSNPTPSPLDASPRRPPGPTTSPASTSLSSPGQRDDLIASILSEVAPTPLDELRGHKALVKLRSRQERDLRELRKKHQRKAVTLTRRLLDGLAQAQAEGRCRLRPGALGGAADVEDTKEGEDEAKRYQEFQNRQVQSLLELREAQVDAEAQRRLEHLRQALQRLREVVLDANTTQFKRLKEMNEREKKELQKILDRKRHNSISEAKMRDKHKKEAELTEINRRHITESVNSIRRLEEAQKQRHDRLVAGQQQVLQQLAEEEPKLLAQLAQECQEQRARLPQEIRRSLLGEMPEGLGDGPLVACASNGHAPGSSGHLSGADSESQEENTQL

SEQ ID NO: 34670 - protein, 86 aa, Homo sapiens [sequence omitted]

SEQ ID NO: 34671 - protein, 255 aa, Homo sapiens
LRSGGGPGPPSAGCRRCAASGAPPAAVAPARRRSGSGRGAGMGLAGVCALRRSAGYILVGGAGGQSAAAAARRYSEGEWASGGVRSFSRAAAAMAPIKVGDAIPAVEVFEGEPGNKVNLAELFKGKKGVLFGVPGAFTPGCSKTHLPGFVEQAEALKAKGVQVVACLSVNDAFVTGEWGRAHKAEGKVRLLADPTGAFGKETDLLLDDSLVSIFGNRRLKRFSMVVQDGIVKALNVEPDGTGLTCSLAPNIISQL

SEQ ID NO: 34672 - protein, 1214 aa, Homo sapiens
MEGGKGPRLRDFLSGSLATWALGLAGLVGEAEDSEGEEEEEEEEPPLWLEKRFLRLSDGALLLRVLGIIAPSSRGGPRMLRGLDGPAAWRVWNLNHLWGRLRDFYQEELQLLILSPPPDLQTLGFDPLSEEAVEQLEGVLRLLLGASVQCEHRELFIRHIQGLSLEVQSELAAAIQEVTQPGAGVVLALSGPDPGELAPAELEMLSRSLMGTLSKLARERDLGAQRLAELLLEREPLCLRPEAPSRAPAEGPSHHLALQLANAKAQLRRLRQELEEKAELLLDSQAEVQGLEAEIRRLRQEAQALSGQAKRAELYREEAEALRERAGRLPRLQEELRRCRERLQAAEAYKSQLEEERVLSGVLEASKALLEEQLEAARERCARLHETQRENLLLRTRLGEAHAELDSLRHQVDQLAEENVELELELQRSLEPPPGSPGEAPLAGAAPSLQDEVREAEAGRLRTLERENRELRGLLQVLQGQPGGQHPLLEAPREDPVLPVLEEAPQTPVAFDHSPQGLVQKARDGGPQALDLAPPALDSVLEASAECPQAPDSDPQEAESPLQAAAMDPQASDWSPQESGSPVETQESPEKAGRRSSLQSPASVAPPQGPGTKIQAPQLLGGETEGREAPQGELVPEAWGLRQEGPEHKPGPSEPSSVQLEEQEGPNQGLDLATGQAEAREHDQRLEGTVRDPAWQKPQQKSEGALEVQVWEGPIPGESLASGVAEQEALREEVAQLRRKAEALGDELEAQARKLEAQNTEAARLSKELAQARRAEAEAHREAEAQAWEQARLREAVEAAGQELESASQEREALVEALAAAGRERRQWEREGSRLRAQSEAAEERMQVLESEGRQHLEEAERERREKEALQAELEKAVVRGKELGDRLEHLQRELEQAALERQEFLREKESQHQRYQGLEQRLEAELQAAATSKEEALMELKTRALQLEEELFQLRQGPAGLGPKKRAEPQLVETQNVRLIEVERSVSVGPQWALGRCPVQCECGSTVDPGLGGIPCSVSVDSQWARGWGCPMQCECGPVVGTRGCPRHLAIANPHFWAECDAGGREGSFAGAAAAPGGAAGEPAGPCPGAAAAEPAGAGAQQPPAGREVCAGDSGPGAAPEAGGAGGGGAGGTAVPGGDPRAAAGPASGPQGPGTAAAAAGGRARGTAGAAPRPQGQHAGTGAGPPGAAGPARAAAGPAGQRGGTGGGPAGRA

SEQ ID NO: 34673 - protein, 1727 aa, Homo sapiens
LSGGRGPGGAGAAVGMASGSRWRPTPPPLLLLLLLALAARADGLEFGGGPGQWARYARWAGAASSGELSFSLRTNATRALLLYLDDGGDCDFLELLLVDGRLRLRFTLSCAEPATLQLDTPVADDRWHMVLLTRDARRTALAVDGEARAAEVRSKRREMQVASDLFVGGIPPDVRLSALTLSTVKYEPPFRGLLANLKLGERPPALLGSQGLRGATADPLCAPARNPCANGGLCTVLAPGEVGCDCSHTGFGGKFCSEEEHPMEGPAHLTLNSEVGSLLFSEGGAGRGGAGDVHQPTKGKEEFVATFKGNEFFCYDLSHNPIQSSTDEITLAFRTLQRNGLMLHTGKSADYVNLSLKSGAVWLVINLGSGAFEALVEPVNGKFNDNAWHDVRVTRNLRQHAGIGHAMVNKLHYLVTISVDGILTTTGYTQEDYTMLGSDDFFYIGGSPNTADLPGSPVSNNFMGCLKDVVYKNNDFKLELSRLAKEGDPKMKLQGDLSFRCEDVAALDPVTFESPEAFVALPRWSAKRTGSISLDFRTTEPNGLLLFSQGRRAGGGAGSHSSAQRADYFAMELLDGHLYLLLDMGSGGIKLRASSRKVNDGEWCHVDFQRDGRKGSISVNSRSTPFLATGDSEILDLESELYLGGLPEGGRVDLPLPPEVWTAALRAGYVGCVRDLFIDGRSRDLRGLAEAQGAVGVAPFCSRETLKQCASAPCRNGGVCREGWNRFICDCIGTGFLGRVCEREATVLSYDGSMYMKIMLPNAMHTEAEDVSLRFMSQRAYGLMMATTSRESADTLRLELDGGQMKLTVNLDCLRVGCAPSKGPETLFAGHKLNDNEWHTVRVVRRGKSLQLSVDNVTVEGQMAGAHMRLEFHNIETGIMTERRFISVVPSNFIGHLSGLVFNGQPYMDQCKDGDITYCELNARFGLRAIVADPVTFKSRSSYLALATLQAYASMHLFFQFKTTAPDGLLLFNSGNGNDFIVIELVKGYIHYVFDLGNGPSLMKGNSDKPVNDNQWHNVVVSRDPGNVHTLKIDSRTVTQHSNGARNLDLKGELYIGGLSKNMFSNLPKLVASRDGFQGCLASVDLNGRLPDLIADALHRIGQVERGCDGPSTTCTEESCANQGVCLQQWDGFTCDCTMTSYGGPVCNDPGTTYIFGKGGALITYTWPPNDRPSTRMDRLAVGFSTHQRSAVLVRVDSASGLGDYLQLHIDQGTVGVIFNVGTDDITIDEPNAIVSDGKYHVVRFTRSGGNATLQVDSWPVNERYPAGNFDNERLAIARQRIPYRLGRVVDEWLLDKGRQLTIFNSQAAIKIGGRDQGRPFQGQVSGLYYNGLKVLALAAESDPNVRTEGHLRLVGEGPSVLLSAETTATTLLADMATTIMETTTTMATTTTRRGRSPTLRDSTTQNTDDLLVASAECPSDDEDLEECEPSTGGELILPIITEDSLDPPPVATRSPFVPPPPTFYPFLTGVGATQDTLPPPAARRPPSGGPCQAERDDSDCEEPIEASGFASGEVFDSSLPPTDDEDFYTTFPLVTDRTTLLSPRKPAPRPNLRTDGATGAPGVLFAPSAPAPNLPAGKMNHRDPLQPLLENPPLGPGAPTSFEPRRPPPLRPGVTSAPGFPHLPTANPTGPGERGPPGAVEVIRESSSTTGMVVGIVAAAALCILILLYAMYKYRNRDEGSYQVDQSRNYISNSAQSNGAVVKEKAPAAPKTPSKAKKNKDKEYYV

SEQ ID NO: 34674 - protein, 1657 aa, Homo sapiens
LSGGRGPGGAGAAVGMASGSRWRPTPPPLLLLLLLALAARADGLEFGGGPGQWARYARWAGAASSGELSFSLRTNATRALLLYLDDGGDCDFLELLLVDGRLRLRFTLSCAEPATLQLDTPVADDRWHMVLLTRDARRTALAVDGEARAAEVRSKRREMQVASDLFVGGIPPDVRLSALTLSTVKYEPPFRGLLANLKLGERPPALLGSQGLRGATADPLCAPARNPCANGGLCTVLAPGEVGCDCSHTGFGGKFCSEEEHPMEGPAHLTLNSEGKEEFVATFKGNEFFCYDLSHNPIQSSTDEITLAFRTLQRNGLMLHTGKSADYVNLSLKSGAVWLVINLGSGAFEALVEPVNGKFNDNAWHDVRVTRNLRQHAGIGHAMVTISVDGILTTTGYTQEDYTMLGSDDFFYIGGSPNTADLPGSPVSNNFMGCLKDVVYKNNDFKLELSRLAKEGDPKMKLQGDLSFRCEDVAALDPVTFESPEAFVALPRWSAKRTGSISLDFRTTEPNGLLLFSQGRRAGGGAGSHSSAQRADYFAMELLDGHLYLLLDMGSGGIKLRASSRKVNDGEWCHVDFQRDGRKGSISVNSRSTPFLATGDSEILDLESELYLGGLPEGGRVDLPLPPEVWTAALRAGYVGCVRDLFIDGRSRDLRGLAEAQGAVGVAPFCSRETLKQCASAPCRNGGVCREGWNRFICDCIGTGFLGRVCEREATVLSYDGSMYMKIMLPNAMHTEAEDVSLRFMSQRAYGLMMATTSRESADTLRLELDGGQMKLTVNLGKGPETLFAGHKLNDNEWHTVRVVRRGKSLQLSVDNVTVEGQMAGAHMRLEFHNIETGIMTERRFISVVPSNFIGHLSGLVFNGQPYMDQCKDGDITYCELNARFGLRAIVADPVTFKSRSSYLALATLQAYASMHLFFQFKTTAPDGLLLFNSGNGNDFIVIELVKGYIHYVFDLGNGPSLMKGNSDKPVNDNQWHNVVVSRDPGNVHTLKIDSRTVTQHSNGARNLDLKGELYIGGLSKNMFSNLPKLVASRDGFQGCLASVDLNGRLPDLIADALHRIGQVERGCDGPSTTCTEESCANQGVCLQQWDGFTCDCTMTSYGGPVCNDPGTTYIFGKGGALITYTWPPNDRPSTRMDRLAVGFSTHQRSAVLVRVDSASGLGDYLQLHIDQGTVGVIFNVGTDDITIDEPNAIVSDGKYHVVRFTRSGGNATLQVDSWPVNERYPAGRQLTIFNSQAAIKIGGRDQGRPFQGQVSGLYYNGLKVLALAAESDPNVRTEGHLRLVGEGPSVLLSAETTATTLLADMATTIMETTTTMATTTTRRGRSPTLRDSTTQNTDDLLVASAECPSDDEDLEECEPSTGGELILPIITEDSLDPPPVATRSPFVPPPPTFYPFLTGVGATQDTLPPPAARRPPSGGPCQAERDDSDCEEPIEASGFASGEVFDSSLPPTDDEDFYTTFPLVTDRTTLLSPRKPAPRPNLRTDGATGAPGVLFAPSAPAPNLPAGKMNHRDPLQPLLENPPLGPGAPTSFEPRRPPPLRPGVTSAPGFPHLPTANPTGPGERGPPGAVEVIRESSSTTGMVVGIVAAAALCILILLYAMYKYRNRDEGSYQVDQSRNYISNSAQSNGAVVKEKAPAAPKTPSKAKKNKDKEYYV

SEQ ID NO: 34675 - protein, 1720 aa, Homo sapiens
LSGGRGPGGAGAAVGMASGSRWRPTPPPLLLLLLLALAARADGLEFGGGPGQWARYARWAGAASSGELSFSLRTNATRALLLYLDDGGDCDFLELLLVDGRLRLRFTLSCAEPATLQLDTPVADDRWHMVLLTRDARRTALAVDGEARAAEVRSKRREMQVASDLFVGGIPPDVRLSALTLSTVKYEPPFRGLLANLKLGERPPALLGSQGLRGATADPLCAPARNPCANGGLCTVLAPGEVGCDCSHTGFGGKFCSEEEHPMEGPAHLTLNSEVGSLLFSEGGAGRGGAGDVHQPTKGKEEFVATFKGNEFFCYDLSHNPIQSSTDEITLAFRTLQRNGLMLHTGKSADYVNLSLKSGAVWLVINLGSGAFEALVEPVNGKFNDNAWHDVRVTRNLRQHAGIGHAMVTISVDGILTTTGYTQEDYTMLGSDDFFYIGGSPNTADLPGSPVSNNFMGCLKDVVYKNNDFKLELSRLAKEGDPKMKLQGDLSFRCEDVAALDPVTFESPEAFVALPRWSAKRTGSISLDFRTTEPNGLLLFSQGRRAGGGAGSHSSAQRADYFAMELLDGHLYLLLDMGSGGIKLRASSRKVNDGEWCHVDFQRDGRKGSISVNSRSTPFLATGDSEILDLESELYLGGLPEGGRVDLPLPPEVWTAALRAGYVGCVRDLFIDGRSRDLRGLAEAQGAVGVAPFCSRETLKQCASAPCRNGGVCREGWNRFICDCIGTGFLGRVCEREATVLSYDGSMYMKIMLPNAMHTEAEDVSLRFMSQRAYGLMMATTSRESADTLRLELDGGQMKLTVNLDCLRVGCAPSKGPETLFAGHKLNDNEWHTVRVVRRGKSLQLSVDNVTVEGQMAGAHMRLEFHNIETGIMTERRFISVVPSNFIGHLSGLVFNGQPYMDQCKDGDITYCELNARFGLRAIVADPVTFKSRSSYLALATLQAYASMHLFFQFKTTAPDGLLLFNSGNGNDFIVIELVKGYIHYVFDLGNGPSLMKGNSDKPVNDNQWHNVVVSRDPGNVHTLKIDSRTVTQHSNGARNLDLKGELYIGGLSKNMFSNLPKLVASRDGFQGCLASVDLNGRLPDLIADALHRIGQVERGCDGPSTTCTEESCANQGVCLQQWDGFTCDCTMTSYGGPVCNDPGTTYIFGKGGALITYTWPPNDRPSTRMDRLAVGFSTHQRSAVLVRVDSASGLGDYLQLHIDQGTVGVIFNVGTDDITIDEPNAIVSDGKYHVVRFTRSGGNATLQVDSWPVNERYPAGNFDNERLAIARQRIPYRLGRVVDEWLLDKGRQLTIFNSQAAIKIGGRDQGRPFQGQVSGLYYNGLKVLALAAESDPNVRTEGHLRLVGEGPSVLLSAETTATTLLADMATTIMETTTTMATTTTRRGRSPTLRDSTTQNTDDLLVASAECPSDDEDLEECEPSTGGELILPIITEDSLDPPPVATRSPFVPPPPTFYPFLTGVGATQDTLPPPAARRPPSGGPCQAERDDSDCEEPIEASGFASGEVFDSSLPPTDDEDFYTTFPLVTDRTTLLSPRKPAPRPNLRTDGATGAPGVLFAPSAPAPNLPAGKMNHRDPLQPLLENPPLGPGAPTSFEPRRPPPLRPGVTSAPGFPHLPTANPTGPGERGPPGAVEVIRESSSTTGMVVGIVAAAALCILILLYAMYKYRNRDEGSYQVDQSRNYISNSAQSNGAVVKEKAPAAPKTPSKAKKNKDKEYYV

SEQ ID NO: 34676 - protein, 464 aa, Homo sapiens
LSGGRGPGGAGAAVGMASGSRWRPTPPPLLLLLLLALAARADGLEFGGGPGQWARYARWAGAASSGELSFSLRTNATRALLLYLDDGGDCDFLELLLVDGRLRLRFTLSCAEPATLQLDTPVADDRWHMVLLTRDARRTALAVDGEARAAEVRSKRREMQVASDLFVGGIPPDVRLSALTLSTVKYEPPFRGLLANLKLGERPPALLGSQGLRGATADPLCAPARNPCANGGLCTVLAPGEVGCDCSHTGFGGKFCSEEEHPMEGKEEFVATFKGNEFFCYDLSHNPIQSSTDEITLAFRTLQRNGLMLHTGKSADYVNLSLKSGAVWLVINLGSGAFEALVEPVNGKFNDNAWHDVRVTRNLRQHAGIGHAMVNKLHYLVDITLIVLPFGLPWVFLTVRFSLFCFLSLFGFLVVLLFQLFFASWTIFRFCFSFSFPLSLFFLFWSKLKYKRQMEIEEFGLSLL

SEQ ID NO: 34677 - protein, 662 aa, Homo sapiens
VPAPPRFCPRGRSPARDSADSRSASPGTGVRSEPGGRLPERSLGPAHPAPAAMAGTLDLDKGCTVEELLRGCIEAFDDSGKVRDPQLVRMFLMMHPWYIPSSQLAAKLLHIYQQSRKDNSNSLQVKTCHLVRYWISAFPAEFDLNPELAEQIKELKALLDQEGNRRHSSLIDIDSVPTYKWKRQVTQRNPVGQKKRKMSLLFDHLEPMELAEHLTYLEYRSFCKILFQDYHSFVTHGCTVDNPVLERFISLFNSVSQWVQLMILSKPTAPQRALVITHFVHVAEKLLQLQNFNTLMAVVGGLSHSSISRLKETHSHVSPETIKLWEGLTELVTATGNYGNYRRRLAACVGFRFPILGVHLKDLVALQLALPDWLDPARTRLNGAKMKQLFSILEELAMVTSLRPPVQANPDLLSLLTVSLDQYQTEDELYQLSLQREPRSKSSPTSPTSCTPPPRPPVLEEWTSAAKPKLDQALVVEHIEKMVESVFRNFDVDGDGHISQEEFQIIRGNFPYLSAFGDLDQNQDGCISREEMVSYFLRSSSVLGGRMGFVHNFQESNSLRPVACRHCKALILGIYKQGLKCRACGVNCHKQCKDRLSVECRRRAQSVSLEGSAPSPSPMHSHHHRAFSFSLPRPGRRGSRPPAEIREEEVQTVEDGVFDIHL

SEQ ID NO: 34678 - protein, 200 aa, Homo sapiens
VPAPPRFCPRGRSPARDSADSRSASPGTGVRSEPGGRLPERSLGPAHPAPAAMAGTLDLDKGCTVEELLRGCIEAFDDSGKVRDPQLVRMFLMMHPWYIPSSQLAAKLLHIYQQSRKDNSNSLQVKTCHLVRYWISAFPAEFDLNPELAEQIKELKALLDQEGNRRHSSLIDIDSVCVGGAQRAGGALSILYHLCLINVC

SEQ ID NO: 34679 - protein, 60 aa, Homo sapiens
LGSQNNPAGEGRLWREGSGRGAEPSCGVLQVPLGRGREEKAPCGGLGASQSWDLGSSPSS

SEQ ID NO: 34680 - protein, 580 aa, Homo sapiens
VPVPVPGGAMATGANATPLDFPSKKRKRSRWNQDTMEQKTVIPGMPTVIPPGLTREQERAYIVQLQIEDLTRKLRTGDLGIPPNPEDRSPSPEPIYNSEGKRLNTREFRTRKKLEEERHNLITEMVALNPDFKPPADYKPPATRVSDKVMIPQDEYPEINFVGLLIGPRGNTLKNIEKECNAKIMIRGKGSVKEGKVGRKDGQMLPGEDEPLHALVTANTMENVKKAVEQIRNILKQGIETPEDQNDLRKMQLRELARLNGTLREDDNRILRPWQSSETRSITNTTVCTKCGGAGHIASDCKFQRPGDPQSAQDKARMDKEYLSLMAELGEAPVPASVGSTSGPATTPLASAPRPAAPANNPPPPSLMSTTQSRPPWMNSGPSESRPYHGMHGGGPGGPGGGPHSFPHPLPSLTGGHGGHPMQHNPNGPPPPWMQPPPPPMNQGPHPPGHHGPPPMGKSVPGKYACGLWGLSPASRKRYDAATTYGHDAAAAAASQWAAPTPSLWSSSPMATTAAAASATPSAQQQYGFQYPLAMAAKIPPRGGDGPSHESEDFPRPLVTLPGRQPQQRPWWTGWFGKAA

SEQ ID NO: 34681 - protein, 557 aa, Homo sapiens
VPVPVPGGAMATGANATPLDFPSKKRKRSRWNQDTMEQKTVIPGMPTVIPPGLTREQERAYIVQLQIEDLTRKLRTGDLGIPPNPEDRSPSPEPIYNSEGKRLNTREFRTRKKLEEERHNLITEMVALNPDFKPPADYKPPATRVSDKVMIPQDEYPEINFVGLLIGPRGNTLKNIEKECNAKIMIRGKGSVKEGKVGRKDGQMLPGEDEPLHALVTANTMENVKKAVEQIRNILKQGIETPEDQNDLRKMQLRELARLNGTLREDDNRILRPWQSSETRSITNTTVCTKCGGAGHIASDCKFQRPGDPQSAQDKARMDKEYLSLMAELGEAPVPASVGSTSGPATTPLASAPRPAAPANNPPPPSLMSTTQSRPPWMNSGPSESRPYHGMHGGGPGGPGGGPHSFPHPLPSLTGGHGGHPMQHNPNGPPPPWMQPPPPPMNQGPHPPGHHGPPPMDQYLGSTPVGSGVYRLHQGKGMMPPPPMGMMPPPPPPPSGQPPPPPSGPLPPWQQQQQQPPPPPPPSSSMASSTPLPWQQRSLPAAAMARAMRVRTFRAHW

SEQ ID NO: 34682 - protein, 109 aa, Homo sapiens
VPVPVPGGAMATGANATPLDFPSKKRKRSRWNQDTMEQKTVIPGMPTVIPPGLTREQERAYIVQLQIEDLTRKLRTGDLGIPPNPEDRLKTVGAAEFSPCSPTRQGSLN

SEQ ID NO: 34683 - protein, 120 aa, Homo sapiens
VPVPVPGGAMATGANATPLDFPSKKRKRSRWNQDTMEQKTVIPGMPTVIPPGLTREQERAYIVQLQIEDLTRKLRTGDLGIPPNPEDRLGNSFNQLTVTLLPFSQYVLLVATYCVSSIKS

SEQ ID NO: 34684 - protein, 89 aa, Homo sapiens
VPVPVPGGAMATGANATPLDFPSKKRKRSRWNQDTMEQKTVIPGMPTVIPPGLTREQERAYIGKYTFCIQMHFEIVTIYSEQDLHFLKV

SEQ ID NO: 34685 - protein, 668 aa, Homo sapiens
LFFSYCFILIFSGSSNLIFFLITCRPTRDSKTGRSSATSHPESAGSRRPPPAAMGLKAAQKTLFPLRSIDDVVRLFAAELGREEPDLVLLSLVLGFVEHFLAVNRVIPTNVPELTFQPSPAPDPPGGLTYFPVADLSIIAALYARFTAQIRGAVDLSLYPREGGVSSRELVKKVSDVIWNSLSRSYFKDRAHIQSLFSFITGWSPVGTKLDSSGVAFAVVGACQALGLRDVHLALSEDHAWVVFGPNGEQTAEVTWHGKGNEDRRGQTVNAGVAERSWLYLKGSYMRCDRKMEVAFMVCAINPSIDLHTDSLELLQLQQKLLWLLYDLGHLERYPMALGNLADLEELEPTPGRPDPLTLYHKGIASAKTYYRDEHIYPYMYLAGYHCRNRNVREALQAWADTATVIQDYNYCREDEEIYKEFFEVANDVIPNLLKEAASLLEAGEERPGEQSQGTQSQGSALQDPECFAHLLRFYDGICKWEEGSPTPVLHVGWATFLVQSLGRFEGQVRQKVRIVSREAEAAEAEEPWGEEAREGRRRGPRRESKPEEPPPPKKPALDKGLGTGQGAVSGPPRKPPGTVAGTARGPEGGSTAQVPAPTASPPPEGPVLTFQSEKMKGMKELLVATKINSSAIKLQLTAQSQVQMKKQKVSTPSDYTLSFLKRQRKGL

SEQ ID NO: 34686 - protein, 670 aa, Homo sapiens
VLEYLAGGSGKRVLHTDNLIFFLITCRPTRDSKTGRSSATSHPESAGSRRPPPAAMGLKAAQKTLFPLRSIDDVVRLFAAELGREEPDLVLLSLVLGFVEHFLAVNRVIPTNVPELTFQPSPAPDPPGGLTYFPVADLSIIAALYARFTAQIRGAVDLSLYPREGGVSSRELVKKVSDVIWNSLSRSYFKDRAHIQSLFSFITGWSPVGTKLDSSGVAFAVVGACQALGLRDVHLALSEDHAWVVFGPNGEQTAEVTWHGKGNEDRRGQTVNAGVAERSWLYLKGSYMRCDRKMEVAFMVCAINPSIDLHTDSLELLQLQQKLLWLLYDLGHLERYPMALGNLADLEELEPTPGRPDPLTLYHKGIASAKTYYRDEHIYPYMYLAGYHCRNRNVREALQAWADTATVIQDYNYCREDEEIYKEFFEVANDVIPNLLKEAASLLEAGEERPGEQSQGTQSQGSALQDPECFAHLLRFYDGICKWEEGSPTPVLHVGWATFLVQSLGRFEGQVRQKVRIVSREAEAAEAEEPWGEEAREGRRRGPRRESKPEEPPPPKKPALDKGLGTGQGAVSGPPRKPPGTVAGTARGPEGGSTAQVPAPTASPPPEGPVLTFQSEKMKGMKELLVATKINSSAIKLQLTAQSQVQMKKQKVSTPSDYTLSFLKRQRKGL

SEQ ID NO: 34687 - protein, 190 aa, Homo sapiens
LPQPCKERAGGASCVQELLQTQDFSKFQALKPKLLDTVDDMLANDIARLMVMVRQEESLMPSQVVKGGAFDGTMNGPFGHGYGEGAGEGIDDVEWVVGKDKPTYDEIFYTLSPVNGKITGANAKKEMVKSKLPNTVLGKIWKLADVDKDGLLDDEEFALANHLIKVKLEGHELPADLPPHLVPPSKRRHE

SEQ ID NO: 34688 - protein, 578 aa, Homo sapiens
LGCAPAQCGSLPIPCPGRPRLGSAPSPRSQPPLCPAAASPVSGSMFSWVSKDARRKKEPELFQTVAEGLRQLYAQKLLPLEEHYRFHEFHSPALEDADFDNKPMVLLVGQYSTGKTTFIRHLIEQDFPGMRIGPEPTTDSFIAVMHGPTEGVVPGNALVVDPRRPFRKLNAFGNAFLNRFMCAQLPNPVLDSISIIDTPGILSGEKQRISRGYDFAAVLEWFAERVDRIILLFDAHKLDISDEFSEVIKALKNHEDKIRVVLNKADQIETQQLMRVYGALMWSLGKIINTPEVVRVYIGSFWSHPLLIPDNRKLFEAEEQDLFKDIQSLPRNAALRKLNDLIKRARLAKVHAYIISSLKKEMPNVFGKESKKKELVNNLGEIYQKIEREHQISPGDFPSLRKMQELLQTQDFSKFQALKPKLLDTVDDMLANDIARLMVMVRQEESLMPSQVVKGGAFDGTMNGPFGHGYGEGAGEGIDDVEWVVGKDKPTYDEIFYTLSPVNGKITGANAKKEMVKSKLPNTVLGKIWKLADVDKDGLLDDEEFALANHLIKVKLEGHELPADLPPHLVPPSKRRHE

SEQ ID NO: 34689 - protein, 573 aa, Homo sapiens
LKILTSLDSQRGLCVAGEDGGGVSPMEQPGTAASPVSGSMFSWVSKDARRKKEPELFQTVAEGLRQLYAQKLLPLEEHYRFHEFHSPALEDADFDNKPMVLLVGQYSTGKTTFIRHLIEQDFPGMRIGPEPTTDSFIAVMHGPTEGVVPGNALVVDPRRPFRKLNAFGNAFLNRFMCAQLPNPVLDSISIIDTPGILSGEKQRISRGYDFAAVLEWFAERVDRIILLFDAHKLDISDEFSEVIKALKNHEDKIRVVLNKADQIETQQLMRVYGALMWSLGKIINTPEVVRVYIGSFWSHPLLIPDNRKLFEAEEQDLFKDIQSLPRNAALRKLNDLIKRARLAKVHAYIISSLKKEMPNVFGKESKKKELVNNLGEIYQKIEREHQISPGDFPSLRKMQELLQTQDFSKFQALKPKLLDTVDDMLANDIARLMVMVRQEESLMPSQVVKGGAFDGTMNGPFGHGYGEGAGEGIDDVEWVVGKDKPTYDEIFYTLSPVNGKITGANAKKEMVKSKLPNTVLGKIWKLADVDKDGLLDDEEFALANHLIKVKLEGHELPADLPPHLVPPSKRRHE

SEQ ID NO: 34690 - protein, 371 aa, Homo sapiens
VSGSMFSWVSKDARRKKEPELFQTVAEGLRQLYAQKLLPLEEHYRFHEFHSPALEDADFDNKPMVLLVGQYSTGKTTFIRHLIEQDFPGMRIGPEPTTDSFIAVMHGPTEGVVPGNALVVDPRRPFRKLNAFGNAFLNRFMCAQLPNPVLDSISIIDTPGILSGEKQRISRGYDFAAVLEWFAERVDRIILLFDAHKLDISDEFSEVIKALKNHEDKIRVVLNKADQIETQQLMRVYGALMWSLGKIINTPEVVRVYIGSFWSHPLLIPDNRKLFEAEEQDLFKDIQSLPRNAALRKLNDLIKRARLAKVDPGVRGAAYCQAGPWGSETGTQGPRIARDPSQLTSQADLHCAVSLYRNQSLVSTRVQPALN

SEQ ID NO: 34691 - protein, 88 aa, Homo sapiens
LPLPWPMRGPSLSPPWGPWSIYSRPAHPLHRHCPGCTLLPSLAVYFLVPFLFIGQGEGEGTGKKRFTVSWGKGGFTVIMVYSSFRGWG

SEQ ID NO: 34692 - protein, 72 aa, Homo sapiens
LLLRCLVNARLIGRWLLGAKGAFQGVATRCCEFLWLMASGLVPCTGPTLESYHSAAGVEGGPSCHPYPFLTK

SEQ ID NO: 34693 - protein, 11 aa, Homo sapiens
LLLLGGVAAWK

SEQ ID NO: 34694 - protein, 114 aa, Homo sapiens
MAPTQGPRAPLEFGGPLGAAALLLLLPATMFHLLLAARSGPARLLGPPASLPGLEVLWSPRALLLWLAWLGLQAALLCVPLLRPGQTPGALPMPLVPTALPHLLLLRAPQQWLG

SEQ ID NO: 34695 - protein, 163 aa, Homo sapiens
LDRFPLPNLLYPRAFLGFSYKPSFLYSVANMQLFVRAQELHTFEVTGQETVAQIKAHVASLEGIAPEDQVVLLAGAPLEDEATLGQCGVEALTTLEVAGRMLGGKVHGSLARAGKVRGQTPKVAKQEKKKKKTGRAKRRMQYNRRFVNVVPTFGKKKGPNANS

SEQ ID NO: 34696 - protein, 41 aa, Homo sapiens
LSHPAATAQPHSRQGPVRLLLTTAIPAPKEGHFSTGRTSEV

SEQ ID NO: 34697 - protein, 144 aa, Homo sapiens
MFRTAVMMAASLALTGAVVAHAYYLKHQFYPTVVYLTKSSPSMAVLYIQAFVLVFLLGKVMGKVFFGQLRAAEMEHLLERSWYAVTETCLAFTVFRDDFSPRFVALFTLLLFLKCFHWLAEDRVDFMERSPNISWLFHCRIVCE

SEQ ID NO: 34698 - protein, 38 aa, Homo sapiens
LYIQAFVLVFLLGKVMGKVFFGQLRAAEMEVRCRLPQR

SEQ ID NO: 34699 - protein, 26 aa, Homo sapiens
LRSGIALWMVSSLSLVLEQTCAINAR

SEQ ID NO: 34700 - protein, 187 aa, Homo sapiens [sequence omitted]

SEQ ID NO: 34701 - protein, 71 aa, Homo sapiens [sequence omitted]

SEQ ID NO: 34702 - protein, 8 aa, Homo sapiens
MAGLVWAL

SEQ ID NO: 34703 - protein, 33 aa, Homo sapiens
LSSKLIRIVVLLCYISRPLSHCLHNDFGCIFIL

SEQ ID NO: 34704 - protein, 78 aa, Homo sapiens
LACKLPLSPGWDCSVLALLFCVTSWGVRFCLQETNFGRRMEATASLCAEKEGACFKGSSKGGLFYSPGPVCLRRGDKG

SEQ ID NO: 34705 - protein, 16 aa, Homo sapiens
LLCFLLHLALFTSICI

SEQ ID NO: 34706 - protein, 17 aa, Homo sapiens
MASLWVFFFYTNLRKTK

SEQ ID NO: 34707 - protein, 18 aa, Homo sapiens
VIFSALFMCGFLSPLPWS

SEQ ID NO: 34708 - protein, 1380 aa, Homo sapiens
LVWASSWGWEVSALPAVQSASPRLPPGPRGPLPPASPAALPRCPLPSPGAPGPLLPSGAGPSPRPGAPPLPRVLRPRMPGPRGAAGGLAPEMRGAGAAGLLALLLLLLLLLLGLGGRVEGGPAGERGAGGGGALARERFKVVFAPVICKRTCLKGQCRDSCQQGSNMTLIGENGHSTDTLTGSGFRVVVCPLPCMNGGQCSSRNQCLCPPDFTGRFCQVPAGGAGGGTGGSGPGLSRTGALSTGALPPLAPEGDSVASKHAIYAVQVIADPPGPGEGPPAQHAAFLVPLGPGQISAEVQAPPPVVNVRVHHPPEASVQVHRIESSNAESAAPSQHLLPHPKPSHPRPPTQKPLGRCFQDTLPKQPCGSNPLPGLTKQEDCCGSIGTAWGQSKCHKCPQLQYTGVQKPGPVRGEVGADCPQGYKRLNSTHCQDINECAMPGVCRHGDCLNNPGSYRCVCPPGHSLGPSRTQCIADKPEEKSLCFRLVSPEHQCQHPLTTRLTRQLCCCSVGKAWGARCQRCPTDGTAAFKEICPAGKGYHILTSHQTLTIQGESDFSLFLHPDGPPKPQQLPESPSQAPPPEDTEEERGVTTDSPVSEERSVQQSHPTATTTPARPYPELISRPSPPTMRWFLPDLPPSRSAVEIAPTQVTETDECRLNQNICGHGECVPGPPDYSCHCNPGYRSHPQHRYCVDVNECEAEPCGPGRGICMNTGGSYNCHCNRGYRLHVGAGGRSCVDLNECAKPHLCGDGGFCINFPGHYKCNCYPGYRLKASRPPVCEDIDECRDPSSCPDGKCENKPGSFKCIACQPGYRSQGGGACRDVNECAEGSPCSPGWCENLPGSFRCTCAQGYAPAPDGRSCLDVDECEAGDVCDNGICSNTPGSFQCQCLSGYHLSRDRSHCEDIDECDFPAACIGGDCINTNGSYRCLCPQGHRLVGGRKCQDIDECSQDPSLCLPHGACKNLQGSYVCVCDEGFTPTQDQHGCEEVEQPHHKKECYLNFDDTVFCDSVLATNVTQQECCCSLGAGWGDHCEIYPCPVYSSAEFHSLCPDGKGYTQDNNIVNYGIPAHRDIDECMLFGSEICKEGKCVNTQPGYECYCKQGFYYDGNLLECVDVDECLDESNCRNGVCENTRGGYRCACTPPAEYSPAQRQCLSPEEMDVDECQDPAACRPGRCVNLPGSYRCECRPPWVPGPSGRDCQLPESPAERAPERRDVCWSQRGEDGMCAGPLAGPALTFDDCCCRQGRGWGAQCRPCPPRGAGSHCPTSQSESNSFWDTSPLLLGKPPRDEDSSEEDSDECRCVSGRCVPRPGGAVCECPGGFQLDASRARCVDIDECRELNQRGLLCKSERCVNTSGSFRCVCKAGFARSRPHGACVPQRRR

SEQ ID NO: 34709 - protein, 102 aa, Homo sapiens
MGDYLLRGYRMLGETCADCGTILLQDKQRKIYCVACQELDSDVDKDNPGGAAAVGHVLVVPAVGPVRVNPGLQTPVPRPELLPGPVILPPFGQLLPTGCGPV

SEQ ID NO: 34710 - protein, 179 aa, Homo sapiens
VWKDSCMHPWRLSMCPACVLAALPALCSCLCSPDARPPHGWMSMPFTPHPLVSRAMPTCHPVNFADLFLPFPQPPEGAGLGFFEELWDSCLPEGAESRVWCPLGPQGLEGLVSRHLEPFVVVAQPPTSYCVAIHLPPDSKLLLRLEAALADGVPVALRTDDWAVLPLAGDYLRGLAAAV

SEQ ID NO: 34711 - protein, 488 aa, Homo sapiens
LGPGTGTTDNAANGVTRGAPLPNRKAWLRETRWEPPPTPGDSLAGRGRASPSAESILTRSVPRASYGDDLREHAGSGRTLKPRRAMETYAEVGKEGKPSCASVDLQGDSSLQVEISDAVSERDKVKFTVQTKSCLPHFAQTEFSVVRQHEEFIWLHDAYVENEEYAGLIIPPAPPRPDFEASREKLQKLGEGDSSVTREEFAKMKQELEAEYLAIFKKTVAMHEVFLQRLAAHPTLRRDHNFFVFLEYGQDLSVRGKNRKELLGGFLRNIVKSADEALITGMSGLKEVDDFFEHERTFLLEYHTRIRDACLRADRVMRAHKCLADDYIPISAALSSLGTQEVNQLRTSFLKLAELFERLRKLEGRVASDEDLKLSDMLRYYMRDSQAAKDLLYRRLRALADYENANKALDKARTRNREVRPAESHQQLCCQRFERLSDSAKQELMDFKSRRVSSFRKNLIELAELELKHAKASTLILRNTLVALKGEP

SEQ ID NO: 34712 - protein, 168 aa, Homo sapiens
LSLASGVAVSDGVIKVFNDMKVRKSSTPEEVKKRKKAVLFCLSEDKKNIILEEGKEILVGDVGQTVDDPYATFVKMLPDKDCRYALYDATYETKESKKEDLVFIFWAPESAPLKSKMIYASSKDAIKKKLTGIKHELQANCYEEVKDRCTLAEKLGGSAVISLEGKPL

SEQ ID NO: 34713 - protein, 206 aa, Homo sapiens
LEHAASKPGPGAARKKRARGLGARAPPKAVPVCASPSLGSRASGVAVSDGVIKVFNDMKVRKSSTPEEVKKRKKAVLFCLSEDKKNIILEEGKEILVGDVGQTVDDPYATFVKMLPDKDCRYALYDATYETKESKKEDLVFIFWAPESAPLKSKMIYASSKDAIKKKLTGIKHELQANCYEEVKDRCTLAEKLGGSAVISLEGKPL

SEQ ID NO: 34714 - protein, 221 aa, Homo sapiens
LLGPHISEKAELGSCLRSLQGQPRRLAVPSRPLSADVNECLTIPEACKGEMKCINHYGGYLCLPRSAAVINDLHGEGPPPPVPPAQHPNPCPPGYEPDDQDSCVGEWGLLWCLASSPLTRRLKLRPHVPPQLKRATGDVHTLIQTLMLFRTCRRWPQLVCHCSSQLRAPPLGCCRDTAGSLPSSVCPLGATGLGGRTVQESVLLGMFGQDLISCATPNMWF

SEQ ID NO: 34715 - protein, 110 aa, Homo sapiens
MALTAHPSCLLALLVAGLAQGIRGPLRAQDLGPQPLELKEAFKLFQIQFNRSYLSPEGITGHIHLQSKPPLFFFLRRSFTLVDQAGVQWCHLGSLQPPPPGFKRFSCFSL

SEQ ID NO: 34716 - protein, 34 aa, Homo sapiens
LCFGDYLFFFFFFFERVSPCVAQAGVQWCDLGSL

SEQ ID NO: 34717 - protein, 103 aa, Homo sapiens
VEESSSGLRLSLIKMTTSQKHRDFVAEPMGEKPVGSLAGIGEVLGKKLEERGFDKAYVVLGQFLVLKKDEDLFREWLKDTCGANAKQSRDCFGCLREWCDAFL

SEQ ID NO: 34718 - protein, 70 aa, Homo sapiens
LVSFPRQVAVPGRQCRLGSAKVTEGVIASAQPWLRTLGIFPLPRLRHLLGRIVFPLGQDQNPGPAGRNSS

SEQ ID NO: 34719 - protein, 63 aa, Homo sapiens
LVSFPRQVAVPGRQCRLGSAKVTEGVIASAQPWLRTLGIFPLPRLRHLLGRIVFPLGQDQNPD

SEQ ID NO: 34720 - protein, 51 aa, Homo sapiens
LGLAYVVLGQFLVLKKDEDLFREWLKDTCGANAKQSRDCFGCLREWCDAFL

SEQ ID NO: 34721 - protein, 895 aa, Homo sapiens
LRLAPASGLVARLPAAKMATEHPEPPKAELQLPPPPPPGHYGAWAAQELQAKLAEIGAPIQGNREELVERLQSYTRQTGIVLNRPVLRGEDGDKAAPPPMSAQLPGIPMPPPPLGLPPLQPPPPPPPPPPGLGLGFPMAHPPNLGPPPPLRVGEPVALSEEERLKLAQQQAALLMQQEERAKQAAVLLEQERQQEIAKMGTPVPRPPQDMGQIGVRTPLGPRVAAPVGPVGPTPTVLPMGAPVPRPRGPPPPPGDENREMDDPSVGPKIPQALEKILQLKESRQEEMNSQQEEEEMETDARSSLGQSASETEEDTVSVSKKEKNRKRRNRKKKKKPQRVRGVSSESSGDREKDSTRSRGSDSPAADVEIEYVTEEPEIYEPNFIFFKRIFEAFKLTDDVKKEKEKEPEKLDKLENSAAPKKKGFEEEHKDSDDDSSDDEQEKKPEAPKLSKKKLRRMNRFTVAELKQLVARPDVVEMHDVTAQDPKLLVHLKATRNSVPVPRHWCFKRKYLQGKRGIEKPPFELPDFIKRTGIQEMREALQEKEEQKTMKSKMREKVRPKMGKIDIDYQKLHDAFFKWQTKPKLTIHGDLYYEGKEFETRLKEKKPGDLSDELRISLGMPVGPNAHKVPPPWLIAMQRYGPPPSYPNLKIPGLNSPIPESCSFGYHAGGWGKPPVDETGKPLYGDVFGTNAAEFQTKTEEEEIDRTPWGELEPSDEESSEEEEEEESDEDKPDETGFITPADSGLITPGGFSSVPAGMETPELIELRKKKIEEAMDGSETPQLFTVLPEKRTATVGGAMMGSTHIYDMSTVMSRKGPAPELQGVEVALAPEELELDPMAMTQKYEEHVREQQAQVEKEDFSDMVAEHAAKQKQKKRKAQPQDSRGGSKKYKEFKF

SEQ ID NO: 34722 - protein, 910 aa, Homo sapiens
LAPASGLVARLPAAKMATEHPEPPKAELQLPPPPPPGHYGAWAAQELQAKLAEIGAPIQGNREELVERLQSYTRQTGIVLNRPVLRGEDGDKAAPPPMSAQLPGIPMPPPPLGLPPLQPPPPPPPPPPGLGLGFPMAHPPNLGPPPPLRVGEPVALSEEERLKLAQQQAALLMQQEERAKQQGDHSLKEHELLEQQKRAAVLLEQERQQEIAKMGTPVPRPPQDMGQIGVRTPLGPRVAAPVGPVGPTPTVLPMGAPVPRPRGPPPPPGDENREMDDPSVGPKIPQALEKILQLKESRQEEMNSQQEEEEMETDARSSLGQSASETEEDTVSVSKKEKNRKRRNRKKKKKPQRVRGVSSESSGDREKDSTRSRGSDSPAADVEIEYVTEEPEIYEPNFIFFKRIFEAFKLTDDVKKEKEKEPEKLDKLENSAAPKKKGFEEEHKDSDDDSSDDEQEKKPEAPKLSKKKLRRMNRFTVAELKQLVARPDVVEMHDVTAQDPKLLVHLKATRNSVPVPRHWCFKRKYLQGKRGIEKPPFELPDFIKRTGIQEMREALQEKEEQKTMKSKMREKVRPKMGKIDIDYQKLHDAFFKWQTKPKLTIHGDLYYEGKEFETRLKEKKPGDLSDELRISLGMPVGPNAHKVPPPWLIAMQRYGPPPSYPNLKIPGLNSPIPESCSFGYHAGGWGKPPVDETGKPLYGDVFGTNAAEFQTKTEEEEIDRTPWGELEPSDEESSEEEEEEESDEDKPDETGFITPADSGLITPGGFSSVPAGMETPELIELRKKKIEEAMDGSETPQLFTVLPEKRTATVGGAMMGSTHIYDMSTVMSRKGPAPELQGVEVALAPEELELDPMAMTQKYEEHVREQQAQVEKEDFSDMVAEHAAKQKQKKRKAQPQDSRGGSKKYKEFKF

SEQ ID NO: 34723 - protein, 123 aa, Homo sapiens
VGPVGPTPTVLPMGAPVPRPRGPPPPPGDENREMDDPSVGPKIPQALEKILQLKESRQEEMNSQQEEEEMETDARSSLGQSASETEEDTVSVSKKEVGIGAECGRKARRWDLGTEITQFVSVQ

SEQ ID NO: 34724 - protein, 682 aa, Homo sapiens
VFRPLRRHRGSGFTFKAARGLLGRPAGWRRRDRLAGAGPGEAGGSQSRSRARAPGADATAMAMMVFPREEKLSQDEIVLGTKAVIQGLETLRGEHRALLAPLVAPEAGEAEPGSQERCILLRRSLEAIELGLGEAQVILALSSHLGAVESEKQKLRAQVRRLVQENQWLREELAGTQQKLQRSEQAVAQLEEEKQHLLFMSQIRKLDEDASPNEEKGDVPKDTLDDLFPNEDEQSPAPSPGGGDVSGQHGGYEIPARLRTLHNLVIQYASQGRYEVAVPLCKQALEDLEKTSGHDHPDVATMLNILALVYRDQNKYKEAAHLLNDALAIREKTLGKDHPAVAATLNNLAVLYGKRGKYKEAEPLCKRALEIREKVLGKFHPDVAKQLSNLALLCQNQGKAEEVEYYYRRALEIYATRLGPDDPNVAKTKNNLASCYLKQGKYQDAETLYKEILTRAHEKEFGSVNGDNKPIWMHAEEREESKDKRRDSAPYGEYGSWYKACKVDSPTVNTTLRSLGALYRRQGKLEAAHTLEDCASRNRKQGLDPASQTKVVELLKDGSGRRGDRRSSRDMAGGAGPRSESDLEDVGPTAEWNGDGSGSLRRSGSFGKLRDALRRSSEMLVKKLQGGTPQEPPNPRMKRASSLNFLNKSVEEPTQPGGTGLSDSRTLSSSSMDLSRRSSLVG

SEQ ID NO: 34725 - protein, 605 aa, Homo sapiens
VFRPLRRHRGSGFTFKAARGLLGRPAGWRRRDRLAGAGPGEAGGSQSRSRARAPGADATAMAMMVFPREEKLSQDEIVLGTKAVIQGLETLRGEHRALLAPLVAPEAGEAEPGSQERCILLRRSLEAIELGLGEAQEEKGDVPKDTLDDLFPNEDEQSPAPSPGGGDVSGQHGGYEIPARLRTLHNLVIQYASQGRYEVAVPLCKQALEDLEKTSGHDHPDVATMLNILALVYRDQNKYKEAAHLLNDALAIREKTLGKDHPAVAATLNNLAVLYGKRGKYKEAEPLCKRALEIREKVLGKFHPDVAKQLSNLALLCQNQGKAEEVEYYYRRALEIYATRLGPDDPNVAKTKNNLASCYLKQGKYQDAETLYKEILTRAHEKEFGSVNGDNKPIWMHAEEREESKDKRRDSAPYGEYGSWYKACKVDSPTVNTTLRSLGALYRRQGKLEAAHTLEDCASRNRKQGLDPASQTKVVELLKDGSGRRGDRRSSRDMAGGAGPRSESDLEDVGPTAEWNGDGSGSLRRSGSFGKLRDALRRSSEMLVKKLQGGTPQEPPNPRMKRASSLNFLNKSVEEPTQPGGTGLSDSRTLSSSSMDLSRRSSLVG

SEQ ID NO: 34726 - protein, 189 aa, Homo sapiens
LEREAEQSRLGATERAAAAAMNPEYDYLFKLLLIGDSGVGKSCLLLRFADDTYTESYISTIGVDFKIRTIELDGKTIKLQIESYANVKQWLQEIDRYASENVNKLLVGNKSDLTTKKVVDNTTAKEFADSLGIPFLETSAKNATNVEQAFMTMAAEIKKRMGPGAASGGERPNLKIDSTPVKPAGGGCC

SEQ ID NO: 34727 - protein, 143 aa, Homo sapiens
MPGSEPPLLWRRFSPEVLGLCASTALVWVVMEVLALLLGLYLATVRSDLSTFHLLAYSGYKYVGMILSVLTGLLFGSDGYYVALAWTSSALMYFIVRSLRTAALGPDSMGGPVPRQRLQLYLTLGAAAFQPLIIYWLTFHLVR

SEQ ID NO: 34728 - protein, 12 aa, Homo sapiens
MDCTFWHLKWFL

SEQ ID NO: 34729 - protein, 60 aa, Homo sapiens
MFFCVFCFIFRDGVSLLPKLECNGAILAHFLGSSDSPALASQVTGIAGTHHHALLNFVLL

SEQ ID NO: 34730 - protein, 516 aa, Homo sapiens
LEGGLRPRWPRARYPVGRWSVCWVRAAGFALAMAPWLQLLSLLGLLPGAVAAPAQPRAASFQAWGPPSPELLAPTRFALEMFNRGRAAGTRAVLGLVRGRVRRAGQGSLYSLEATLEEPPCNDPMVCRLPVSKKTLLCSFQVLDELGRHVLLRKDCGPVDTKVPGAGEPKSAFTQGSAMISSLSQNHPDNRNETFSSVISLLNEDPLSQDLPVKMASIFKNFVITYNRTYESKEEARWRLSVFVNNMVRAQKIQALDRGTAQYGVTKFSDLTEEEFRTIYLNTLLRKEPGNKMKQAKSVGDLAPPEWDWRSKGAVTKVKDQGMCGSCWAFSVTGNVEGQWFLNQGTLLSLSEQELLDCDKMDKACMGGLPSNAYSAIKNLGGLETEDDYSYQGHMQSCNFSAEKAKVYINDSVELSQNEQKLAAWLAKRGPISVAINAFGMQFYRHGISRPLRPLCSPWLIDHAVLLVGYGNRSDVPFWAIKNSWGTDWGEKGYYYLHRGSGACGVNTMASSAVVD

SEQ ID NO: 34731 - protein, 381 aa, Homo sapiens
LRSFVRCLVFLSQALVRMVKLFIGNLPREATEQEIRSLFEQYGKVLECDIIKNYGFVHIEDKTAAEDAIRNLHHYKLHGVNINVEASKNKSKTSTKLHVGNISPTCTNKELRAKFEEYGPVIECDIVKDYAFVHMERAEDAVEAIRGLDNTEFQGKRMHVQLSTSRLRTAPGMGDQSGCYRCGKEGHWSKECPIDRSGRVADLTEQYNEQYGAVRTPYTMSYGDSLYYNNAYGALDAYYKRCRAARSYEAVAAAAASVYNYAEQTLSQLPQVQNTAMASHLTSTSLDPYDRHLLPTSGAAATAAAAAAAAAAVTAASTSYYGRDRSPLRRATAPVPTVGEGYGYGHESELSQASAAARNSLYDMARYEREQYADRARYSAF

SEQ ID NO: 34732 - protein, 538 aa, Homo sapiens
LPLFPARHGGDGRGRVRVASAGSLFGGMVLKKFLKEIQSILPGISAKLTWTSEEGSYSQDMTGVTPFQMIFEVDEKPRTLMTDCLVIKHFLRKIIMVHPKVRFHFSVKVNGILSTEIFGVENEPTLNLGNGIALLVDSQHYVSRPNFGTIESHCSRIHPVLGHPVMLFIPEDVAGMDLLGELILTPAAALCPSPKVSSNQLNRISSVSIFLYGPLGLPLILSTWEQPMTTFFKDTSSLVDWKKYHLCMIPNLDLNLDRDLVLPDVSYQVESSEEDQSQTMDPQGQTLLLFLFVDFHSAFPVQQMEIWGVYTLLTTHLNAILVESHSVVQGSIQFTVDKVLEQHHQAAKAQQKLQASLSVAVNSIMSILTGSTRSSFRKMCLQTLQAADTQEFRTKLHKVFREITQHQFLHHCSCEVKQLTLEKKDSAQGTEDAPDNSSLELLADTSGQAENKRLKRGSPRIEEMRALRSARAPSPSEAAPRRPEATAAPLTPRGREHREAHGRALAPGRASLGSRLEDVLWLQEVSNLSEWLSPSPGP

SEQ ID NO: 34733 - protein, 61 aa, Homo sapiens
LRCLAMLYLFVKATSVASASLSGFLLLASGWEGLADEGKMSQVLKDEQVTGVGRMVREWTS

SEQ ID NO: 34734 - protein, 286 aa, Homo sapiens [sequence omitted]

SEQ ID NO: 34735 - protein, 40 aa, Homo sapiens
LVGGGILFVSSNLLNLLTAPYKQQSAPMTLCPLPLVSRPQ

SEQ ID NO: 34736 - protein, 146 aa, Homo sapiens
LGLGSLWLMVFRHLCPPMCPCPIHLVKLLDSDQELYRNFPLTISERWQQEVAETVFDTINAETDRLEARKKAKNKQLGHEEGEGRRLLRHQAPACLEVSSWLGFKELTLDHSQKVAALGFKLRLGPGMVAHACNPSTLGGQGAQIT

SEQ ID NO: 34737 - protein, 972 aa, Homo sapiens
MAARLLAPPGPDSFKPFTPESLANIERRIAESKLKKPPKADGSHREDDEDSKPKPNSDLEAGKSLPFIYGDIPQGLVAVPLEDFDPYYLTQKTFVVLNRGKTLFRFSATPALYILSPFNLIRRIAIKILIHSVFSMIIMCTILTNCVFMTFSNPPDWSKNVEYTFTGIYTFESLVKIIARGFCIDGFTFLRDPWNWLDFSVIMMAYVTEFVDLGNVSALRTFRVLRALKTISVIPGLKTIVGALIQSVKKLSDVMILTVFCLSVFALIGLQLFMGNLRNKCVVWPINFNESYLENGTKGFDWEEYINNKTNFYTVPGMLEPLLCGNSSDAGQCPEGYQCMKAGRNPNYGYTSFDTFSWAFLALFRLMTQDYWENLYQLTLRAAGKTYMIFFVLVIFVGSFYLVNLILAVVAMAYEEQNQATLEEAEQKEAEFKAMLEQLKKQQEEAQAAAMATSAGTVSEDAIEEEGEEGGGSPRSSSEISKLSSKSAKERRNRRKKRKQKELSEGEEKGDPEKVFKSESEDGMRRKAFRLPDNRIGRKFSIMNQSLLSIPGSPFLSRHNSKSSIFSFRGPGRFRDPGSENEFADDEHSTVEESEGRRDSLFIPIRARERRSSYSGYSGYSQGSRSSRIFPSLRRSVKRNSTVDCNGVVSLIGGPGSHIGGRLLPEATTEVEIKKKGPGSLLVSMDQLASYGRKDRINSIMSVVTNTLVEELEESQRKCPPCWYKFANTFLIWECHPYWIKLKEIVNLIVMDPFVDLAITICIVLNTLFMAMEHHPMTPQFEHVLAVGNLVFTGIFTAEMFLKLIAMDPYYYFQEGWNIFDGFIVSLSLMELSLADVEGLSVLRSFRLLRVFKLAKSWPTLNMLIKIIGNSVGALGNLTLVLAIIVFIFAVVGMQLFGKSYKECVCKINQDCELPRWHMHDFFHSFLIVFRVLCGEWIETMWDCMEVAGQAMCLIVFMMVMVIGNLVVSTNL

SEQ ID NO: 34738 - protein, 373 aa, Homo sapiens
LEAGPRAGGGLGRAEGEPGRKEAAGGREAGAGQELLGWSGGAAMSDSEKLNLDSIIGRLLEVQGSRPGKNVQLTENEIRGLCLKSREIFLSQPILLELEAPLKICGDIHGQYYDLLRLFEYGGFPPESNYLFLGDYVDRGKQSLETICLLLAYKIKYPENFFLLRGNHECASINRIYGFYDECKRRYNIKLWKTFTDCFNCLPIAAIVDEKIFCCHGGLSPDLQSMEQIRRIMRPTDVPDQGLLCDLLWSDPDKDVQGWGENDRGVSFTFGAEVVAKFLHKHDLDLICRAHQVVEDGYEFFAKRQLVTLFSAPNYCGEFDNAGAMMSVDETLMCSFQILKPADKNKGKYGQFSGLNPGGRPITPPRNSAKAKK

SEQ ID NO: 34739 - protein, 82 aa, Homo sapiens
LFRVGLTLVRLALGTAEQRGACPGLLETLGALRAIPPAQLQEEAFMSQVHSVVLSERDLQREIKDQAVGKEEVLRGTYWVRH

SEQ ID NO: 34740 - protein, 99 aa, Homo sapiens
LVEPGGPDPPFTAENRKKTMDKIIRGKLALPPYLTPDARDLVKKFLKRNPSQRIGGGPGDAADVQVGLGPPPGVGLSLQGCREWGQGPRAEGVTGGQAG

SEQ ID NO: 34741 - protein, 110 aa, Homo sapiens
LRQRRGQFPPPPVPGPGRSQRPAFLTVPVEDVYAQASSSTSEGPSPRPLPSPLLPPQRRREGGLYIFIPNKILFLKARLTCCCKGGAEKSGNLETEDVTGVTHVQKVWGQ

SEQ ID NO: 34742 - protein, 522 aa, Homo sapiens
LSLPESCFLLPRGRDPEPPEAGAAAPCAPGAPDMSFRKVVRQSKFRHVFGQPVKNDQCYEDIRVSRVTWDSTFCAVNPKFLAVIVEASGGGAFLVLPLSKTGRIDKAYPTVCGHTGPVLDIDWCPHNDEVIASGSEDCTVMVWQIPENGLTSPLTEPVVVLEGHTKRVGIIAWHPTARNVLLSAGCDNVVLIWNVGTAEELYRLDSLHPDLIYNVSWNHNGSLFCSACKDKSVRIIDPRRGTLVAEREKAHEGARPMRAIFLADGKVFTTGFSRMSERQLALWDPENLEEPMALQELDSSNGALLPFYDPDTSVVYVCGKGDSSIRYFEITEEPPYIHFLNTFTSKEPQRGMGSMPKRGLEVSKCEIARFYKLHERKCEPIVMTVPRKSDLFQDDLYPDTAGPEAALEAEEWVSGRDADPILISLREAYVPSKQRDLKISRRNVLSDSRPAMAPGSSHLGAPASTTTAADATPSGSLARAGEAGKLEEVMQELRALRALVKEQGDRICRLEEQLGRMENGDA

SEQ ID NO: 34743 - protein, 285 aa, Homo sapiens
LLPRGRDPEPPEAGAAAPCAPGAPDMSFRKVVRQSKFRHVFGQPVKNDQCYEDIRVSRVTWDSTFCAVNPKFLAVIVEASGGGAFLVLPLSKTGRIDKAYPTVCGHTGPVLDIDWCPHNDEVIASGSEDCTVMVWQIPENGLTSPLTEPVVVLEGHTKRVGIIAWHPTARNVLLSAGCDNVVLIWNVGTAEELYRLDSLHPDLIYNVSWNHNGSLFCSACKDKSVRIIDPRRGTLVAEREKAHEGARPMRAIFLADGKVFTTGFSRMSERQLALWDPGVRRFCLA

SEQ ID NO: 34744 - protein, 315 aa, Homo sapiens
LSLPESCFLLPRGRDPEPPEAGAAAPCAPGAPDMSFRKVVRQSKFRHVFGQPVKNDQCYEDIRVSRVTWDSTFCAVNPKFLAVIVEASGGGAFLVLPLSKTGRIDKAYPTVCGHTGPVLDIDWCPHNDEVIASGSEDCTVMVWQIPENGLTSPLTEPVVVLEGHTKRVGIIAWHPTARNVLLSAGCDNVVLIWNVGTAEELYRLDSLHPDLIYNVSWNHNGSLFCSACKDKSVRIIDPRRGTLVAEREKAHEGARPMRAIFLADGKVFTTGFSRMSERQLALWDPGSPLLQKASSSSKPPGPSPLCFCIVTSRAP

SEQ ID NO: 34745 - protein, 208 aa, Homo sapiens
LLPRGRDPEPPEAGAAAPCAPGAPDMSFRKVVRQSKFRHVFGQPVKNDQCYEDIRVSRVTWDSTFCAVNPKFLAVIVEASGGGAFLVLPLSKTGRIDKAYPTVCGHTGPVLDIDWCPHNDEVIASGSEDCTVMVWQIPENGLTSPLTEPVVVLEGHTKRVGIIAWHPTARNVLLSAGLHRPPFCAPPPHGPLHTSQQPLQGPHDKWES

SEQ ID NO: 34746 - protein, 39 aa, Homo sapiens
MAGPLPLLMFIIFFFFNELEPGAVAHTCKPSCQGAEAGG

SEQ ID NO: 34747 - protein, 75 aa, Homo sapiens
LSALTSHRKWQGYRCSGPRVETAALKSLELQGLPFKQACSLSPGCEKLEKNPAAPKGELVIKITDYWAGSGGSRL

SEQ ID NO: 34748 - protein, 49 aa, Homo sapiens
VGGSALLLYRLCLPLDTEPPSILRRQLAAIITLPFYRACSVPCSGNRAW

SEQ ID NO: 34749 - protein, 178 aa, Homo sapiens
MREHSSLGHADLDALQQNPQPLIFHMEMLKVESPGTYQQDPWAMTDEEKAKAVPLIHQEGNRLYREGHVKEAAAKYYDAIACLKNLQMKEQPGSPEWIQLDQQITPLLLNYCQCKLVVEEYYEVLDHCSSILNKYDGEHRALGCRGLRVVREWPFSCHCWGQDLAFHNPHSELPRGPD

SEQ ID NO: 34750 - protein, 1267 aa, Homo sapiens
LTVAPCPAPGGAEAARGPPSAFRMLIKEYHILLPMSLDEYQVAQLYMIQKKSREESSGEGSGVEILANRPYTDGPGGSGQYTHKVYHVGSHIPGWFRALLPKAALQVEEESWNAYPYTRTRYTCPFVEKFSIEIETYYLPDGGQQPNVFNLSGAERRQRILDTIDIVRDAVAPGEYKAEEDPRLYHSVKTGRGPLSDDWARTAAQTGPLMCAYKLCKVEFRYWGMQAKIEQFIHDVGLRRVMLRAHRQAWCWQDEWTELSMADIRALEEETARMLAQRMAKCNTGSEGSEAQPPGKPSTEARSAASNTGTPDGPEAPPGPDASPDASFGKQWSSSSRSSYSSQHGGAVSPQSLSEWRMQNIARDSENSSEEEFFDAHEGFSDSEEVFPKEMTKWNSNDFIDAFASPVEAEGTPEPGAEAAKGIEDGAQAPRDSEGLDGAGELGAEACAVHALFLILHSGNILDSGPGDANSKQADVQTLSSAFEAVTRIHFPEALGHVALRLVPCPPICAAAYALVSNLSPYSHDGDSLSRSQDHIPLAALPLLATSSSRYQGAVATVIARTNQAYSAFLRSPEGAGFCGQVALIGDGVGGILGFDALCHSANAGTGSRGSSRRGSMNNELLSPEFGPVRDPLADGVEGLGRGSPEPSALPPQRIPSDMASPEPEGSQNSLQAAPATTSSWEPRRASTAFCPPAASSEAPDGPSSTARLDFKVSGFFLFGSPLGLVLALRKTVMPALEAAQMRPACEQIYNLFHAADPCASRLEPLLAPKFQAIAPLTVPRYQKFPLGDGSSLLLADTLQTHSSLFLEELEMLVPSTPTSTSGAFWKGSELATDPPAQPAAPSTTSEVVKILERWWGTKRIDYSLYCPEALTAFPTVTLPHLFHASYWESADVVAFILRQVIEKERPQLAECEEPSIYSPAFPREKWQRKRTQVKIRNVTSNHRASDTVVCEGRPQVLSGRFMYGPLDVVTLTGEKVDVYIMTQPLSGKWIHFGTEVTNSSGRLTFPVPPERALGIGVYPVRMVVRGDHTYAECCLTVVARGTEAVVFSIDGSFTASVSIMGSDPKVRAGAVDVVRHWQDSGYLIVYVTGRPDMQKHRVVAWLSQHNFPHGVVSFCDGLTHDPLRQKAMFLQSLVQEVELNIVAGYGSPKDVAVYAALGLSPSQTYIVGRAVRKLQAQCQFLSDGYVAHLGQLEAGSHSHASSGPPRAALGKSSYGVAAPVDFLRKQSQLLRSRGPSQAEREGPGTPPTTLARGKARSISLKLDSEE

SEQ ID NO: 34751 - protein, 283 aa, Homo sapiens
LRGDSGDSRAPLCGRRPGCSGRRGWGRRESAGPSRRAAGAVTQHWGGAGRDHPYKARRPRGLRWSFAAAVFATMPPYTVVYFPVRGRCAALRMLLADQGQSWKEEVVTVETWQEGSLKASCLYGQLPKFQDGDLTLYQSNTILRHLGRTLGLYGKDQQEAALVDMVNDGVEDLRCKYISLIYTNYEAGKDDYVKALPGQLKPFETLLSQNQGGKTFIVGDQISFADYNLLDLLLIHEVLAPGCLDAFPLLSAYVGRLSARPKLKAFLASPEYVNLPINGNGKQ

SEQ ID NO: 34752 - protein, 207 aa, Homo sapiens
VTQHWGGAGRDHPYKARRPRGLRWSFAAAVFATMPPYTVVYFPVRGRCAALRMLLADQGQSWKEEVVTVETWQEGSLKASCLYGQLPKFQDGDLTLYQSNTILRHLGRTLGLYGKDQQEAALVDMVNDGVEDLRCKYISLIYTNYISFADYNLLDLLLIHEVLAPGCLDAFPLLSAYVGRLSARPKLKAFLASPEYVNLPINGNGKQ

SEQ ID NO: 34753 - protein, 43 aa, Homo sapiens
VPLPEPCLPQQLYGQLPKFQDGDLTLYQSNTILRHLGRTLGES

SEQ ID NO: 34754 - protein, 167 aa, Homo sapiens
LAGAHRQPPGWPIPSDCVLIRRPVTRPAPLHPTPGLYGKDQQEAALVDMVNDGVEDLRCKYISLIYTNYEAGKDDYVKALPGQLKPFETLLSQNQGGKTFIVGDQISFADYNLLDLLLIHEVLAPGCLDAFPLLSAYVGRLSARPKLKAFLASPEYVNLPINGNGKQ

SEQ ID NO: 34755 - protein, 146 aa, Homo sapiens
LSTCCVAVSHPSTHILFPSSQAGAHRQPPGWPIPSDCVLIRRPVTRPAPLHPTPGLYGKDQQEAALVDMVNDGVEDLRCKYISLIYTNYEAGKDDYVKALPGQLKPFETLLSQNQGGKTFIVGDQVSIWPHAVPSSPPSASRWTQV

SEQ ID NO: 34756 - protein, 230 aa, Homo sapiens
MNKPSDGRPKYLVVNADEGEPGTCKDREILRHDPHKLLEGCLVGGRAMGARAAYIYIRGEFYNEASNLQVAIREAYEAGLIGKNACGSGYDFDVFVVRGAGAYICGEETALIESIEGKQGKPRLKPPFPADVGVFGCPTTVANVETVAVSPTICRRGGTWFAGFGRERNSGTKLFNISGHVNHPCTVEEEMSVPLKELIEKHAGTDRPGHSCGDRHGPLDGHRESHRPPH

SEQ ID NO: 34757 - protein, 80 aa, Homo sapiens
LTSVWRSGGWPRGPRAWTQPVACPSMRRRWRQRWPGRNVGTSYCHCATALSRVACWNSFTQAHGRSWPRRRCWCLCGTMT

SEQ ID NO: 34758 - protein, 86 aa, Homo sapiens
LPEATGARGWQGPLAGHLAPSSLGFRLRKMGLGRVPPPKGCSERSAIRVRRPRCTCRGATSSPRGPLVRVLARTPGPGHPFELFPA

SEQ ID NO: 34759 - protein, 81 aa, Homo sapiens
MAPEENAGTELLLQSLERRFLAARALRSFPWQSLEAKLRDSSDSELLRDILQKAGLGSDGKWNLVMTRNCFPTKSTWRWQC

SEQ ID NO: 34760 - protein, 131 aa, Homo sapiens
MAPEENAGTELLLQSLERRFLAARALRSFPWQSLEAKLRDSSDSELLRDILQKTCCIAQKPSCRWSGSCGGWLPAGSTSGLLKSMWPLPSATQRRASCSPLSYAGLGSDGKWNLVMTRNCFPTKSTWRWQC

SEQ ID NO: 34761 - protein, 171 aa, Homo sapiens
MRCLTTPMLLRALAQAARAGPPGGRSLHSSAVAATYKYVNMQDPEMDMKSVTDRAARTLLWTELFRGLGMTLSYLFREPATINYPFEKGPLSPRFRGEHALRRYPSGEERCIACKLCEAICPAQVSPCPNRPPRQPLPLGEGGQAALGPNPSPCLMCVPRKSLSPSEPLPS

SEQ ID NO: 34762 - protein, 135 aa, Homo sapiens
LGMRGQGRCRVGTDAWGRRVPLPTTPVLPTGLGMTLSYLFREPATINYPFEKGPLSPRFRGEHALRRYPSGEERCIACKLCEAICPAQVSPCPNRPPRQPLPLGEGGQAALGPNPSPCLMCVPRKSLSPSEPLPS

SEQ ID NO: 34763 - protein, 91 aa, Homo sapiens
VFLVIYKWLCVWAARAASAPSILIHFINMFLFSHSPSNRLLYPRQVGCGWWGPGSHGLMGTPRSQGHWELQDPRPRNGDAGPGPCRQGRQR

SEQ ID NO: 34764 - protein, 31 aa, Homo sapiens
MHLGQAVCGYEVVGRIQEHGGEWQEKWRQVV

SEQ ID NO: 34765 - protein, 67 aa, Homo sapiens
LDFTLHFSLELFLVINFLGGTGTRGPAARPRIAAAGQRGLGRAPRRSGAAQAERTLKVFSKLFEESD

SEQ ID NO: 34766 - protein, 345 aa, Homo sapiens
LEMAGNCSWEAHPGNRNKMCPGLSEAPELYSRGFLTIEQIAMLPPPAVMNYIFLLLCLCGLVGNGLVLWFFGFSIKRNPFSIYFLHLASADVGYLFSKAVFSILNTGGFLGTFADYIRSVCRVLGLCMFLTGVSLLPAVSAERCASVIFPAWYWRRRPKRLSAVVCALLWVLSLLVTCLHNYFCVFLGRGAPGAACRHMDIFLGILLFLLCCPLMVLPCLALILHVECRARRRQRSAKLNHVILAMVSVFLVSSIYLGIDWFLFWVFQIPAPFPEYVTDLCICINSSAKPIVYFLAGRDKSQRLWEPLRVVFQRALRDGAELGEAGGSTPNTVTMEMQCPPGNAS

SEQ ID NO: 34767 - protein, 101 aa, Homo sapiens
LKPHPRSALLSPSSYSPPPPPPAGPGIGFGAGSASKAISSSRRGLYSELLFSKAPGRARRWPAAPAGPPAGGGSHRKSPPQKEASADQDSCRLLPGGCADW

SEQ ID NO: 34768 - protein, 185 aa, Homo sapiens
LQSAQFLFGHYYFDYLGNLIALANLVSICVFLVLDADVLPAERDDFILGILNCVFIVYYLLEMLLKVFALGLRGYLSYPSNVFDGLLTVVLLEAGDGGPAVAVGHDPHAEHAHRVPLPAYHPQHEADGRGGQYRPGPGAEHACVWRDPGAWPLPMARRPVGASSSWSTGPTTSMTLRLPWSLCGT

SEQ ID NO: 34769 - protein, 61 aa, Homo sapiens
VKGQTVLGRQLFIGRVRVPVRPWEGFLPWGFLPVSPWCPSWGLATHALCWAEAVPGRALVH

SEQ ID NO: 34770 - protein, 82 aa, Homo sapiens
LLAAMAGSQDIFDAIVMADESRKMKVLESLIGMIQKFPYDDPTYDKLHEDLDKIRGKFKQFCSLLNVQPDFKISAEGSGLSF

SEQ ID NO: 34771 - protein, 1014 aa, Homo sapiens
LRSPPAEAAGAVDGEGAPPGGPSAQAATMRVNEKYSTLPAEDRSVHIINICAIEDIGYLPSEGTLLNSLSVDPDAECKYGLYFRDGRRKVDYILVYHHKRPSGNRTLVRRVQHSDTPSGARSVKQDHPLPGKGASLDAGSGEPPMDYHEDDKRFRREEYEGNLLEAGLELERDEDTKIHGVGFVKIHAPWNVLCREAEFLKLKMPTKKMYHINETRGLLKKINSVLQKITDPIQPKVAEHRPQTMKRLSYPFSREKQHLFDLSDKDSFFDSKTRSTIVYEILKRTTCTKAKYSMGITSLLANGVYAAAYPLHDGDYNGENVEFNDRKLLYEEWARYGVFYKYQPIDLVRKYFGEKIGLYFAWLGVYTQMLIPASIVGIIVFLYGCATMDENIPSMEMCDQRHNITMCPLCDKTCSYWKMSSACATARASHLFDNPATVFFSVFMALWAATFMEHWKRKQMRLNYRWDLTGFEEEEEAVKDHPRAEYEARVLEKSLKKESRNKEKRRHIPEESTNKWKQRVKTAMAGVKLTDKVKLTWRDRFPAYLTNLVSIIFMIAVTFAIVLGVIIYRISMAAALAMNSSPSVRSNIRVTVTATAVIINLVVIILLDEVYGCIARWLTKIEVPKTEKSFEERLIFKAFLLKFVNSYTPIFYVAFFKGRFVGRPGDYVYIFRSFRMEECAPGGCLMELCIQLSIIMLGKQLIQNNLFEIGIPKMKKLIRYLKLKQQSPPDHEECVKRKQRYEVDYNLEPFAGLTPEYMEMIIQFGFVTLFVASFPLAPLFALLNNIIEIRLDAKKFVTELRRPVAVRAKDIGIWYNILRGIGKLAVIINAFVISFTSDFIPRLVYLYMYSKNGTMHGFVNHTLSSFNVSDFQNGTAPNDPLDLGYEVQICRYKDYREPPWSENKYDISKDFWAVLAARLAFVIVFQNLVMFMSDFVDWVIPDIPKDISQQIHKEKVLMVELFMREEQDKQQLLETWMEKERQKDEPPCNHHNTKACPDSLGSPAPSHAYHGGVL

SEQ ID NO: 34772 - protein, 280 aa, Homo sapiens
LGSGSPPGSRSPDARGSLGSGRFSHAVIQFGFVTLFVASFPLAPLFALLNNIIEIRLDAKKFVTELRRPVAVRAKDIGIWYNILRGIGKLAVIINAFVISFTSDFIPRLVYLYMYSKNGTMHGFVNHTLSSFNVSDFQNGTAPNDPLDLGYEVQICRYKDYREPPWSENKYDISKDFWAVLAARLAFVIVFQNLVMFMSDFVDWVIPDIPKDISQQIHKEKVLMVELFMREEQDKQQLLETWMEKERQKDEPPCNHHNTKACPDSLGSPAPSHAYHGGVL

SEQ ID NO: 34773 - protein, 256 aa, Homo sapiens
VNQAPECRFGGGILGPLGKRRDLARASEPRTEGARRAGPQPRPLADPAMDPFLVLLHSVSSSLSSSELTELKFLCLGRVGKRKLERVQSGLDLFSMLLEQNDLEPGHTELLRELLASLRRHDLLRRVDDFEAGAAAGAAPGEEDLCAAFNVICDNVGKDWRRLARQLKVSDTKIDSIEDRYPRNLTERVRESLRIWKNTEKENATVAHLVGALRSCQMNLVADLVQEVQQARDLQNRSGAMSPMSWNSDASTSEAS

SEQ ID NO: 34774 - protein, 97 aa, Homo sapiens
MPAWYVAACRANVKSGAIMSALSDTEIQREIGISNPLHRLKLRLAIQEIMSLTSPSAPPTSRTVRSETTPAFFGNRECLSEGITALFTLLLQFLNSI

SEQ ID NO: 34775 - protein, 105 aa, Homo sapiens
LHLLLLNKSGSGACALSMYCLSALDPPPLPALQSWVGPVRRFSLVACTVLNWDTGEKGAFMSFPSCSCCTAARSALPGVCRPQRGPSTGCGLSGVGRWALLPDSL

SEQ ID NO: 34776 - protein, 2121 aa, Homo sapiens
LSGITKMTLHATRGAALLSWVNSLHVADPVEAVLQLQDCSIFIKIIDRIHGTEEGQQILKQPVSERLDFVCSFLQKNRKHPSSPECLVSAQKVLEGSELELAKMTMLLLYHSTMSSKSPRDWEQFEYKIQAELAVILKFVLDHEDGLNLNEDLENFLQKAPVPSTCSSTFPEELSPPSHQAKREIRFLELQKVASSSSGNNFLSGSPASPMGDILQTPQFQMRRLKKQLADERSNRDELELELAENRKLLTEKDAQIAMMQQRIDRLALLNEKQAASPLEPKELEELRDKNESLTMRLHETLKQCQDLKTEKSQMDRKINQLSEENGDLSFKLREFASHLQQLQDALNELTEEHSKATQEWLEKQAQLEKELSAALQDKKCLEEKNEILQGKLSQLEEHLSQLQDNPPQEKGEVLGDVLQLETLKQEAATLAANNTQLQARVEMLETERGQQEAKLLAERGHFEEEKQQLSSLITDLQSSISNLSQAKEELEQASQAHGARLTAQVASLTSELTTLNATIQQQDQELAGLKQQAKEKQAQLAQTLQQQEQASQGLRHQVEQLSSSLKQKEQQLKEVAEKQEATRQDHAQQLATAAEEREASLRERDAALKQLEALEKEKAAKLEILQQQLQVANEARDSAQTSVTQAQREKAELSRKVEELQACVETARQEQHEAQAQVAELELQLRSEQQKATEKERVAQEKDQLQEQLQALKESLKVTKGSLEEEKRRAADALEEQQRCISELKAETRSLVEQHKRERKELEEERAGRKGLEARLQQLGEAHQAETEVLRRELAEAMAAQHTAESECEQLVKEVAAWRERYEDSQQEEAQYGAMFQEQLMTLKEECEKARQELQEAKEKVAGIESHSELQISRQQNELAELHANLARALQQVQEKEVRAQKLADDLSTLQEKMAATSKEVARLETLVRKAGEQQETASRELVKEPARAGDRQPEWLEEQQGRQFCSTQAALQAMEREAEQMGNELERLRAALMESQGQQQEERGQQEREVARLTQERGRAQADLALEKAARAELEMRLQNALNEQRVEFATLQEALAHALTEKEGKDQELAKLRGLEAAQIKELEELRQTVKQLKEQLAKKEKEHASGSGAQSEAAGRTEPTGPKLEALRAEVSKLEQQCQKQQEQADSLERSLEAERASRAERDSALETLQGQLEEKAQELGHSQSALASAQRELAAFRTKVQDHSKAEDEWKAQVARGRQEAERKNSLISSLEEEVSILNRQVLEKEGESKELKRLVMAESEKSQKLEERLRLLQAETASNSARAAERSSALREEVQSLREEAEKQRVASENLRQELTSQAERAEELGQELKAWQEKFFQKEQALSTLQLEHTSTQALVSELLPAKHLCQQLQAEQAAAEKRHREELEQSKQAAGGLRAELLRAQRELGELIPLRQKVAEQERTAQQLRAEKASYAEQLSMLKKAHGLLAEENRGLGERANLGRQFLEVELDQAREKYVQELAAVRADAETRLAEVQREAQSTARELEVMTAKYEGAKVKVLEERQRFQEERQKLTAQVEQLEVFQREQTKQVEELSKKLADSDQASKVQQQKLKAVQAQGGESQQEAQRLQAQLNELQAQLSQKEQAAEHYKLQMEKAKTHYDAKKQQNQELQEQLRSLEQLQKENKELRAEAERLGHELQQAGLKTKEAEQTCRHLTAQVRSLEAQVAHADQQLRDLGKFQVATDALKSREPQAKPQLDLSIDSLDLSCEEGTPLSITSKLPRTQPDGTSVPGEPASPISQRLPPKVESLESLYFTPIPARSQAPLESSLDSLGDVFLDSGRKTRSARRRTTQIINITMTKKLDVEEPDSANSSFYSTRSAPASQASLRATSSTQSLARLGSPDYGNSALLSLPGYRPTTRSSARRSQAGVSSGAPPGRNSFYMGTCQDEPEQLDDWNRIAELQQRNRVCPPHLKTCYPLESRPSLSLGTITDEEMKTGDPQETLRRASMQPIQIAEGTGITTRQQRKRVSLEPHQGPGTPESKKATSCFPRPMTPRDRHEGRKQSTTEAQKKAAPASTKQADRRQSMAFSILNTPKKLGNSLLRRGASKKALSKASPNTRSGTRRSPRIATTTASAATAAAIGATPRAKGKAKH

SEQ ID NO: 34777 - protein, 60 aa, Homo sapiens
LPGRLRRKPTTFLLCVGLLSTGPPFLLSFQDLNANGGLKPVDTFGFRSLAHWSDCLASPR

SEQ ID NO: 34778 - protein, 106 aa, Homo sapiens [sequence omitted]

SEQ ID NO: 34779 - protein, 289 aa, Homo sapiens
VLTRARCLPCTEDRGCGDSLGAWIYCLLRERPTQTQPCMLPAATEVQLRLQGQKDMVWKWMPLLLLLVCVATMCSAQDRTDLLNVCMDAKHHKTKPGPEDKLHDQCSPWKKNACCTASTSQELHKDTSRLYNFNWDHCGKMEPACKRHFIQDTCLYECSPNLGPWIQQVNQSWRKERFLDVPLCKEDCQRWWEDCHTSHTCKSNWHRGWDWTSAALCEGLWSHSYKVSNYSRGSGRCIQMWFDSAQGNPNEEVARFYAAAMHVNAGEMLHGTGGLLLSLALMLQLWLLG

SEQ ID NO: 34780 - protein, 310 aa, Homo sapiens
VLTRARCLPCTEDRGCGDSLGAWIYCLLRERPTQTQPCMLPAATEVQLRLQGQKDMVWKWMPLLLLLVCVATMCSAQDRTDLLNVCMDAKHHKTKPGPEDKLHDQCSPWKKNACCTASTSQELHKDTSRLYNFNWDHCGKMEPACKRHFIQDTCLYECSPNLGPWIQQVNQSWRKERFLDVPLCKEDCQRWWEDCHTSHTCKSNWHRGWDWTSGVNKCPAGALCRTFESYFPTPAALCEGLWSHSYKVSNYSRGSGRCIQMWFDSAQGNPNEEVARFYAAAMHVNAGEMLHGTGGLLLSLALMLQLWLLG

SEQ ID NO: 34781 - protein, 54 aa, Homo sapiens
LAVAWQLTYLPLMPLPSLPSLRPAYLLTAHEDPFSAPKPEGGISPYSGPFVVGP

SEQ ID NO: 34782 - protein, 57 aa, Homo sapiens
LTLADPGITCWLLRRAAGLRLSPFGRAFAEQQCWESTLPSPRGCHYHIPLSCQALII

SEQ ID NO: 34783 - protein, 58 aa, Homo sapiens
LGMCALAAALVVHCYSKSPSNKDAALLEAARANNMQEVSRNRCALLHSAAVQEYGYGN

SEQ ID NO: 34784 - protein, 347 aa, Homo sapiens
LGPGAGPGGGTHCSSHQSPRAAPGLPGSCGGGAGTPAPAGPGGAAGKGPRKVASASAAASTLSEPPRRTQESRTRTRALGLPTLPMEKLAASTEPQGPRPVLGRESVQVPDDQDFRSFRSECEAECRMECCDVPAETLYDVLHDIEYRKKWDSNVIETFDIARLTVNADVGYYSWRCPKPLKNRDVITLRSWLPMGADYIIMNYSVKHPKYPPRKDLVRAVSIQTGYLIQSTGPKSCVITYLAQVDPKGSLPKWVVNKSSQFLAPKAMKKMYKACLKYPEWKQKHLPHFKPWLHPEQSPLPSLALSELSVQHADSLENIDESAVAESREERMGGAGGEGSDDDTSLT

SEQ ID NO: 34785 - protein, 340 aa, Homo sapiens
VLLELYRPCFSGPRKVASASAAASTLSEPPRRTQESRTRTRALGLPTLPMEKLAASTEPQGPRPVLGRESVQVPDDQDFRSFRSECEAEVGWNLTYSRAGVSVWVQAVEMDRTLHKIKCRMECCDVPAETLYDVLHDIEYRKKWDSNVIETFDIARLTVNADVGYYSWRCPKPLKNRDVITLRSWLPMGADYIIMNYSVKHPKYPPRKDLVRAVSIQTGYLIQSTGPKSCVITYLAQVDPKGSLPKWVVNKSSQFLAPKAMKKMYKACLKYPEWKQKHLPHFKPWLHPEQSPLPSLALSELSVQHADSLENIDESAVAESREERMGGAGGEGSDDDTSLT

SEQ ID NO: 34786 - protein, 294 aa, Homo sapiens
VLLELYRPCFSGPRKVASASAAASTLSEPPRRTQESRTRTRALGLPTLPMEKLAASTEPQGPRPVLGRESVQCRMECCDVPAETLYDVLHDIEYRKKWDSNVIETFDIARLTVNADVGYYSWRCPKPLKNRDVITLRSWLPMGADYIIMNYSVKHPKYPPRKDLVRAVSIQTGYLIQSTGPKSCVITYLAQVDPKGSLPKWVVNKSSQFLAPKAMKKMYKACLKYPEWKQKHLPHFKPWLHPEQSPLPSLALSELSVQHADSLENIDESAVAESREERMGGAGGEGSDDDTSLT

SEQ ID NO: 34787 - protein, 156 aa, Homo sapiens
VASASAAASTLSEPPRRTQESRTRTRALGLPTLPMEKLAASTEPQGPRPVLGRESVQVPDDQDFRSFRSECEAEVGWNLTYSRAGVSVWVQAVEMDRTLHKIKCRMECCDVPAETLYDVLHDIEYRKKWDSNVIETFDIARLTVNADVGYYSCEQA

SEQ ID NO: 34788 - protein, 145 aa, Homo sapiens
VLLELYRPCFSGPRKVASASAAASTLSEPPRRTQESRTRTRALGLPTLPMEKLAASTEPQGPRPVLGRESVQVPDDQDFRSFRSECEAEVGWNLTYSRAGVSVWVQAVEMDRTLHKIKVGLPAIPAASTAPLLPLSRSLLVLSPG

SEQ ID NO: 34789 - protein, 119 aa, Homo sapiens
LGHPGLLILEKSSSYPRLERLQASRSLAKCGDDGQPFVHTPASPLAYLSWFCLRSASATSLTLSHCVDVVKGLLDFKKRRGHSIGGAPEQRYQIIPVCVAARLPTRAQDVLQPPGHWRG

SEQ ID NO: 34790 - protein, 57 aa, Homo sapiens [sequence omitted]

SEQ ID NO: 34791 - protein, 46 aa, Homo sapiens
LAGVRLPPAGLLPPGQVLLLKRSFHTRARSLGRPLLSGPPPPPGPC

SEQ ID NO: 34792 - protein, 68 aa, Homo sapiens
LALLLASSVLWQVTSSPQVSRFPHLLPLQTSARTLHATVSGTELTGSRGCSTSGNLLQHFTDCKRGTC

SEQ ID NO: 34793 - protein, 198 aa, Homo sapiens
LTPAPRPAATPAPPPQRLAGRMLQMVKTLAQFTIALEDMRDMGPAAASGEPAGGSSTDAEEPGEAQDMRKHVAMTLLDTEQSYVESLRTLMQGYMQPLKQPENSVLCDPSLVDEIFDQIPELLEHHEQFLEQVRHCMQTWHAQQKVGALLVQSVSGPAAANSHKHRPSWKGLDVATDPTPTHPTWILTLFPDLTIELG

SEQ ID NO: 34794 - protein, 100 aa, Homo sapiens
MVWWDLLCRAWKTALLEANSTPVRVYSPYQDYYEVVPPNAHEATYVRSYYGPPYAGPGVTHVIVREDPCYSAGAPLAMGMLAGAATGAALGSLMWSPCWF

SEQ ID NO: 34795 - protein, 75 aa, Homo sapiens
LGCGGGGSCGSSGAARERSQIRLRFRLRHPQLLFPRSGSRVRKEGTALALGSQRTPLAPADTALLPFPAAGLARC

SEQ ID NO: 34796 - protein, 36 aa, Homo sapiens
VSLGGILLLHLVKAVPSVFSDALGTRLQGPVFGLHS

SEQ ID NO: 34797 - protein, 194 aa, Homo sapiens
MGLSSCRKTSSGLPLILHYGGILLSISRPYKTKPTHGIGKYKHLIKAEEPKKKKGKVEVRAINLGTDYEYGVLNIHLTAYDMTLAESYAQYVHNLCNSLSIKVEESYAMPTKTIEVLQLQDQGSKMLLDSVLTTHERVVQISGLSATFAEIFLEIIQSSLPEGVRLSVKEHTEEDFKGRFKARPELEELLAKLK

SEQ ID NO: 34798 - protein, 20 aa, Homo sapiens
MSSLLCGLAVLAISYHLPMR

SEQ ID NO: 34799 - protein, 264 aa, Homo sapiens
LGLWIQFLLLLSLPPAEFFDAEGSEVDLNFGGLQGRGVKKQDPQVERDLYLSLEDLFFGCTKKIKISRRVLNEDGYSSTIKDKILTIDVKPGWRQGTRITFEKEGDQALPENLLSSPHCTDEDMETSRGRNLAKVTRPTSPCHLLASPAQGPNIIPADIIFIVKEKLHPRFRRENDNLFFVNPIPLGKALTCCTVEVRTLDDRLLNIPINDIIHPKYFKKVPGEGMPLPEDPTKKGDLFIFFDIQFPTRLTPQKKQMLRQALLT

SEQ ID NO: 34800 - protein, 55 aa, Homo sapiens
LCLGLIKQQERTEELGSSAKQILPALVPIPAEFLYLVLLLIKGAPVSSFSPSPGT

SEQ ID NO: 34801 - protein, 39 aa, Homo sapiens
VKWLFPVHRALSHLPALILALQLTRTSQGSWSPFYKGEN

SEQ ID NO: 34802 - protein, 204 aa, Homo sapiens
LDAVRNRPGWEGKRCVTGQDLFLAVSLAILTEVGGPRECEAEAGSGKGVTISGNEGVNAVMGRTETGVEKVMERTLGGAVPAERRLLQGLRTQVGAGRPGPAPQAPPRAPPPRLKPRRRLRGAPLRSPAARALGLTVHARPARPTRPPPADRHSRTHCRVLPAARTHSMTIRCFVSHPFSMENQGDRAMIATGSFEERDTFREA

SEQ ID NO: 34803 - protein, 141 aa, Homo sapiens
MFLLHFGFFCFLHLPSSALLEQGNKLRNAMVISAMKSSPETSMLLDQVHPPINEDSLRASTQIRAFSRNRFKDHIEDHLLPSTENTFWRHDTKADTRAIQLLLGSLPSACDCRRAPPRLTGFRIFLVEMGFLCVGRLVCSS

SEQ ID NO: 34804 - protein, 43 aa, Homo sapiens
LPPRLPSGAGCRGTQAPWGGMAGGYCLGAGDGVELVKKSSGSS

SEQ ID NO: 34805 - protein, 613 aa, Homo sapiens
LRGSSRALAMGPGARLAALLAVLALGTGDPERAAARGDTFSALTSVARALAPERRLLGLLRRYLRGEEARLRDLTRFYDKVLSLHEDSTTPVANPLLAFTLIKRLQSDWRNVVHSLEASENIRALKDGYEKVEQDLPAFEDLEGAARALMRLQDVYMLNVKGLARGVFQRVTGSAITDLYSPKRLFSLTGDDCFQVGKVAYDMGDYYHAIPWLEEAVSLFRGSYGEWKTEDEASLEDALDHLAFAYFRAGNVSCALSLSREFLLYSPDNKRMARNVLKYERLLAESPNHVVAEAVIQRPNIPHLQTRDTYEGLCQTLGSQPTLYQIPSLYCSYETNSNAYLLLQPIRKEVIHLEPYIALYHDFVSDSEAQKIRELAEPWLQRSVVASGEKQLQVEYRISKSAWLKDTVDPKLVTLNHRIAALTGLDVRPPYAEYLQVVNYGIGGHYEPHFDHATSPSSPLYRMKSGNRVATFMIYLSSVEAGGATAFIYANLSVPVVRHCFGGTCTGVVKGTVTHFMLAVLSWWEISGWPTSGYMSMDRNSADPAAPALKTELLAERSWWSPVAFQRSQEPKAGVGEEKAEQPPGRRPCQLCLCLANQRQGRGCYQGTLRMYI

SEQ ID NO: 34806 - protein, 553 aa, Homo sapiens
LRGSSRALAMGPGARLAALLAVLALGTGDPERAAARGDTFSALTSVARALAPERRLLGLLRRYLRGEEARLRDLTRFYDKVLSLHEDSTTPVANPLLAFTLIKRLQSDWRNVVHSLEASENIRALKDGYEKVEQDLPAFEDLEGAARALMRLQDVYMLNVKGLARGVFQRVTGSAITDLYSPKRLFSLTGDDCFQVGKVAYDMGDYYHAIPWLEEAVSLFRGSYGEWKTEDEASLEDALDHLAFAYFRAGNVSCALSLSREFLLYSPDNKRMARNVLKYERLLAESPNHVVAEAVIQRPNIPHLQTRDTYEGLCQTLGSQPTLYQIPSLYCSYETNSNAYLLLQPIRKEVIHLEPYIALYHDFVSDSEAQKIRELAEPWLQRSVVASGEKQLQVEYRISKSAWLKDTVDPKLVTLNHRIAALTGLDVRPPYAEYLQVVNYGIGGHYEPHFDHATSPSSPLYRMKSGNRVATFMIYLSSVEAGGATAFIYANLSVPVVRNAALFWWNLHRSGEGDSDTLHAGCPVLVGDKWVANKWIHEYGQEFRRPCSSSPED

SEQ ID NO: 34807 - protein, 259 aa, Homo sapiens
LAMGPGARLAALLAVLALGTGDPERAAARGDTFSALTSVARALAPERRLLGLLRRYLRGEEARLRDLTRFYDKVLSLHEDSTTPVANPLLAFTLIKRLQSDWRNVVHSLEASENIRALKDGYEKVEQDLPAFEDLEGAARALMRLQDVYMLNVKGLARGVFQRVTGSAITDLYSPKRLFSLTGDDCFQVGKVAYDMGDYYHAIPWLEEAVSLFRGSYGEWKTEDEASLEDALDHLAFAYFRAGNVSCALSLSREFLLYR

SEQ ID NO: 34808 - protein, 106 aa, Homo sapiens
LAMGPGARLAALLAVLALGTGDPERAAARGDTFSALTSVARALAPERRLLGLLRRYLRGEEARLRDLTRFYDKVLSLHEDSTTPVANPLLAFTLIKRLQSDWRNVL

SEQ ID NO: 34809 - protein, 63 aa, Homo sapiens
LDTFNFMPFSLYLPLFLGTLAHFVTVKDYCPVTSLIRNLNCIHSECFKLSHKLHLPMDLWLFC

SEQ ID NO: 34810 - protein, 99 aa, Homo sapiens [sequence omitted]

SEQ ID NO: 34811 - protein, 538 aa, Homo sapiens
LGPARAAGALTLCLLVASWGPGETGPHEGTWASSVPQSERGLVGKVLQHTRKSASLGWACWEQSLGLEPRRPGAEGGPLAESSKASLHLSFKVTYKWLSYTLGVHVNQAKQMLYDYVERKRKENSGAQLHVTYLVSGSLIQNGHSCHKVAVVREDKLEAVKSKLAVTASIHVYSIQKAMLKDSGPLFNTDYDILKSNLQNCSKFSAIQCAAAVPRAPAESSSSSKKFEQSHLHMSSETQANNELTTNGHGPPASKQVSQQPKGIMGMFASKAAAKTQETNKETKTEAKEVTNASAAGNKAPGKGNMMSNFFGKAAMNKFKVNLDSEQAVKEEKIVEQPTVSVTEPKLATPAGLKKSSKKAEPVKVLQKEKKRGKRVALSDDETKETENMRKKRRRIKLPESDSSEDEVFPDSPGAYEAESPSPPPPPSPPLEPVPKTEPEPPSVKSSSGENKRKRKRVLKSKTYLDGEGCIVTEKVYESESCTDSEEELNMKTSSVHRPPAMTVKKEPREERKGPKKGTAALGKANRQVSITGFFQRK

SEQ ID NO: 34812 - protein, 179 aa, Homo sapiens
LCNTLNLFLDGNRGKRVALSDDETKETENMRKKRRRIKLPESDSSEDEVFPDSPGAYEAESPSPPPPPSPPLEPVPKTEPEPPSVKSSSGENKRKRKRVLKSKTYLDGEGCIVTEKVYESESCTDSEEELNMKTSSVHRPPAMTVKKEPREERKGPKKGTAALGKANRQVSITGFFQRK

SEQ ID NO: 34813 - protein, 93 aa, Homo sapiens
LFWFLFPFVLPVSTRGPRGLPDHGDEPLASGLAPHHHANRTTAHWLHPISAISTPLLFMLSPRKAARALALELDLRWGADRGGWGMWDTVWWA

SEQ ID NO: 34814 - protein, 94 aa, Homo sapiens
MAVQISKKRKFVADGIFKAELNEFLTRELAEDGYSGVEVRVTPTRTEIIILATRTQNVLGEKGRRIRELTAVVQKRFGFPEGSVEVSDSGICQR

SEQ ID NO: 34815 - protein, 206 aa, Homo sapiens
MSFLLGSWLKMATLELRTQNVLGEKGRRIRELTAVVQKRFGFPEGSVELYAEKVATRGLCAIAQAESLRYKLLGGLAVRRACYGVLRFIMESGAKGCEVVVSGKLRGQRAKSMKFVDGLMIHSGDPVNYYVDTAVRHVLLRQGVLGIKVKIMLPWDPTGKIGPKKPLPDHVSIVEPKDEILPTTPISEQKGGKPEPPAMPQPVPTA

SEQ ID NO: 34816 - protein, 100 aa, Homo sapiens
MSFLLGSWLKMATLELSGDPVNYYVDTAVRHVLLRQGVLGIKVKIMLPWDPTGKIGPKKPLPDHVSIVEPKDEILPTTPISEQKGGKPEPPAMPQPVPTA

SEQ ID NO: 34817 - protein, 195 aa, Homo sapiens
VAQLWEDEWEVLLISLQGTAPFLHVGAVAAVTMLSWIVAGQFARAERTSSQVTILCTFFTVVFALYLAPLTISSPCIMEKKDLGPKPALIGHRGAPMLAPEHTLMSFRKALEQKLYGLQADITISLDGVPFLMHDTTLRRTTNVEEEFPELARRPASMLNWTTLQRLNAGQWFLKVWLHLIPILGMENTSRDCKE

SEQ ID NO: 34818 - protein, 224 aa, Homo sapiens
MGYWSDWPVPILVTTAAAFAYIAGLLVLALCHIAVGQQMNLHWLHKGTAPFLHVGAVAAVTMLSWIVAGQFARAERTSSQVTILCTFFTVVFALYLAPLTISSPCIMEKKDLGPKPALIGHRGAPMLAPEHTLMSFRKALEQKLYGLQADITISLDGVPFLMHDTTLRRTTNVEEEFPELARRPASMLNWTTLQRLNAGQWFLKVWLHLIPILGMENTSRDCKE

SEQ ID NO: 34819 - protein, 154 aa, Homo sapiens [sequence omitted]

SEQ ID NO: 34820 - protein, 57 aa, Homo sapiens
LAAQGLLWASTIPSVREFLLLAAKLAFERTAPAGTPGGAGTCCGHLLGPCLALSRLP

SEQ ID NO: 34821 - protein, 31 aa, Homo sapiens
MNALPDWPRVSAPPLPCFPLVPLGCTARMEA

SEQ ID NO: 34822 - protein, 333 aa, Homo sapiens
VVHANHFLAMRSLLLLSAFCLLEAALAAEVKKPAAAAAPGTAEKLSPKAATLAERSAGLAFSLYQAMAKDQAVENILVSPVVVASSLGLVSLGGKATTASQAKAVLSAEQLRDEEVHAGLGELLRSLSNSTARNVTWKLGSRLYGPSSVSFADDFVRSSKQHYNCEHSKINFRDKRSALQSINEWAAQTTDGKLPEVTKDVERTDGALLVNAMFFKPHWDEKFHHKMVDNRGFMVTRSYTVGVMMMHRTGLYNYYDDEKEKLQIVEMPLAHKLSSLIILMPHHVEPLERLEKLLTKEQLKIWMGKMQKKAVAISLPKGVVEVTHDLQVRGGPA

SEQ ID NO: 34823 - protein, 427 aa, Homo sapiens
VVHANHFLAMRSLLLLSAFCLLEAALAAEVKKPAAAAAPGTAEKLSPKAATLAERSAGLAFSLYQAMAKDQAVENILVSPVVVASSLGLVSLGGKATTASQAKAVLSAEQLRDEEVHAGLGELLRSLSNSTARNVTWKLGSRLYGPSSVSFADDFVRSSKQHYNCEHSKINFRDKRSALQSINEWAAQTTDGKLPEVTKDVERTDGALLVNAMFFKPHWDEKFHHKMVDNRGFMVTRSYTVGVMMMHRTGLYNYYDDEKEKLQIVEMPLAHKLSSLIILMPHHVEPLERLEKLLTKEQLKIWMGKMQKKAVAISLPKGVVEVTHDLQKHLAGLGLTEAIDKNKADLSRMSGKKDLYLASVFHATAFELDTDGNPFDQDIYGREELRSPKLFYADHPFIFLVRDTQSGSLLFIGRLVRPKGDKMRDEL

SEQ ID NO: 34824 - protein, 233 aa, Homo sapiens
LWAVIVFGGGHVSLTLCFAPTTAHWDEKFHHKMVDNRGFMVTRSYTVGVMMMHRTGLYNYYDDEKEKLQIVEMPLAHKLSSLIILMPHHVEPLERLEKLLTKEQLKIWMGKMQKKAVAISLPKGVVEVTHDLQKHLAGLGLTEAIDKNKADLSRMSGKKDLYLASVFHATAFELDTDGNPFDQDIYGREELRSPKLFYADHPFIFLVRDTQSGSLLFIGRLVRPKGDKMRDEL

SEQ ID NO: 34825 - protein, 39 aa, Homo sapiens
MPSQGALEGLPWGLTLWALCFSQVTQAAEQKMDWREKPG

SEQ ID NO: 34826 - protein, 44 aa, Homo sapiens
MRPQILLLLALLTLGLAAQHQDKVPCKMVKSLTQMTPIPHTMES

SEQ ID NO: 34827 - protein, 24 aa, Homo sapiens
LLWRQMNWILIVTLLFSPCVTLEP

SEQ ID NO: 34828 - protein, 368 aa, Homo sapiens
VSVPRRLWRRLPAPTMPWPLLLLLAVSGAQTTRPCFPGCQCEVETFGLFDSFSLTRVDCSGLGPHIMPVPIPLDTAHLDLSSNRLEMVNESVLAGPGYTTLAGLDLSHNLLTSISPTAFSRLRYLESLDLSHNGLTALPAESFTSSPLSDVNLSHNQLREVSVSAFTTHSQGRALHVDLSHNLIHRLVPHPTRAGLPAPTIQSLNLAWNRLHAVPNLRDLPLRYLSLDGNPLAVIGPGAFAGLGGLTHLSLASLQRLPELAPSGFRELPGLQVLDLSGNPKLNWAGAEVFSGLSSLQELDLSGTNLVPLPEALLLHLPALQSVSVGQDVRCRRLVREGTYPRRPGSSPKVALHCVDTRDSAARGPTIL

SEQ ID NO: 34829 - protein, 134 aa, Homo sapiens
LLNLSFSYQRHVYVTRNCFGPVVYDVLLDKHLCKTEYFKENHLQLEFPPVWLFADLPLSSILHPVSAIISLITLSCFSVSTIIAYSLCSNYLKIMGRARWLMPVIPALWEAEVSRSQGQEIETILANTVKPRLY

SEQ ID NO: 34830 - protein, 48 aa, Homo sapiens
LGFPFGNLTFRLQILLSGSVFWLEVLDSLILPPHSVSGFAPGSWPWAI

SEQ ID NO: 34831 - protein, 2208 aa, Homo sapiens
LTWDHGDSSAGEKLGLAPRYTATLRHVSCHKRDLPFKGDHVWMDLRLGQEFDVPIGAVVKLCDSGQVQVVDDEDNEHWISPQNATHIKPMHPTSVHGVEDMIRLGDLNEAGILRNLLIRYRDHLIYTYTGSILVAVNPYQLLSIYSPEHIRQYTNKKIGEMPPHIFAIADNCYFNMKRNSRDQCCIISGESGAGKTESTKLILQFLAAISGQHSWIEQQVLEATPILEAFGNAKTIRNDNSSRFGKYIDIHFNKRGAIEGAKIEQYLLEKSRVCRQALDERNYHVFYCMLEGMSEDQKKKLGLGQASDYNYLAMGNCITCEGRVDSQEYANIRSAMKVLMFTDTENWEISKLLAAILHLGNLQYEARTFENLDACEVLFSPSLATAASLLEVNPPDLMSCLTSRTLITRGETVSTPLSREQALDVRDAFVKGIYGRLFVWIVDKINAAIYKPPSQDVKNSRRSIGLLDIFGFENFAVNSFEQLCINFANEHLQQFFVRHVFKLEQEEYDLESIDWLHIEFTDNQDALDMIANKPMNIISLIDEESKFPKGTDTTMLHKLNSQHKLNANYIPPKNNHETQFGINHFAGIVYYETQGFLEKNRDTLHGDIIQLVHSSRNKFIKQIFQADVAMGAETRKRSPTLSSQFKRSLELLMRTLGACQPFFVRCIKPNEFKKPMLFDRHLCVRQLRYSGMMETIRIRRAGYPIRYSFVEFVERYRVLLPGVKPAYKQGDLRGTCQRMAEAVLGTHDDWQIGKTKIFLKDHHDMLLEVERDKAITDRVILLQKVIRGFKDRSNFLKLKNAATLIQRHWRGHNCRKNYGLMRLGFLRLQALHRSRKLHQQYRLARQRIIQFQARCRAYLVRKAFRHRLWAVLTVQAYARGMIARRLHQRLRAEYLWRLEAEKMRLAEEEKLRKEMSAKKAKEEAERKHQERLAQLAREDAERELKEKEAARRKKELLEQMERARHEPVNHSDMVDKMFGFLGTSGGLPGQEGQAPSGFEDLERGRREMVEEDLDAALPLPDEDEEDLSEYKFAKFAATYFQGTTTHSYTRRPLKQPLLYHDDEGDQLAALAVWITILRFMGDLPEPKYHTAMSDGSEKIPVMTKIYETLGKKTYKRELQALQGEGEAQLPEGQKKSSVRHKLVHLTLKKKSKLTEEVTKRLHDGESTVQGNSMLEDRPTSNLEKLHFIIGNGILRPALRDEIYCQISKQLTHNPSKSSYARGWILVSLCVGCFAPSEKFVKYLRNFIHGGPPGYAPYCEERLRRTFVNGTRTQPPSWLELQATKSKKPIMLPVTFMDGTTKTLLTDSATTAKELCNALADKISLKDRFGFSLYIALFDKVSSLGSGSDHVMDAISQCEQYAKEQGAQERNAPWRLFFRKEVFTPWHSPSEDNVATNLIYQQVVRGVKFGEYRCEKEDDLAELASQQYFVDYGSEMILERLLNLVPTYIPDREITPLKTLEKWAQLAIAAHKKGIYAQRRTDAQKVKEDVVSYARFKWPLLFSRFYEAYKFSGPSLPKNDVIVAVNWTGVYFVDEQEQVLLELSFPEIMAVSSSRGAKTTAPSFTLATIKGDEYTFTSSNAEDIRDLVVTFLEGLRKRSKYVVALQDNPNPAGEESGFLSFAKGDLIILDHDTGEQVMNSGWANGINERTKQRGDFPTDSVYVMPTVTMPPREIVALVTMTPDQRQDVVRLLQLRTAEPEVRAKPYTLEEFSYDYFRPPPKHTLSRVMVSKARGKDRLWSHTREPLKQALLKKLLGSEELSQEACLAFIAVLKYMGDYPSKRTRSVNELTDQIFEGPLKAEPLKDEAYVQILKQLTDNHIRYSEERGWELLWLCTGLFPPSNILLPHVQRFLQSRKHCPLAIDCLQRLQKALRNGSRKYPPHLVEVEAIQHKTTQIFHKVYFPDDTDEAFEVESSTKAKDFCQNIATRLLLKSSEGFSLFVKIADKVLSVPENDFFFDFVRHLTDWIKKARPIKDGIVPSLTYQVFFMKKLWTTTVPGKDPMADSIFHYYQELPKYLRGYHKCTREEVLQLGALIYRVKFEEDKSYFPSIPKLLRELVPQDLIRQVSPDDWKRSIVAYFNKHAGKSKEEAKLAFLKLIFKWPTFGSAFFEVKQTTEPNFPEILLIAINKYGVSLIDPKTKDILTTHPFTKISNWSSGNTYFHITIGNLVRGSKLLCETSLGYKMDDLLTSYISQMLTAMSKQRGSRSGK

SEQ ID NO: 34832 - protein, 841 aa, Homo sapiens
LSVQWLLDGLACFFASLHVPLGRVQLHASARGIQEKEDDLAELASQQYFVDYGSEMILERLLNLVPTYIPDREITPLKTLEKWAQLAIAAHKKGIYAQRRTDAQKVKEDVVSYARFKWPLLFSRFYEAYKFSGPSLPKNDVIVAVNWTGVYFVDEQEQVLLELSFPEIMAVSSSRGAKTTAPSFTLATIKGDEYTFTSSNAEDIRDLVVTFLEGLRKRSKYVVALQDNPNPGEESGFLSFAKGDLIILDHDTGEQVMNSGWANGINERTKQRGDFPTDSVYVMPTVTMPPREIVALVTMTPDQRQDVVRLLQLRTAEPEVRAKPYTLEEFSYDYFRPPPKHTLSRVMVSKARGKDRLWSHTREPLKQALLKKLLGSEELSQEACLAFIAVLKYMGDYPSKRTRSVNELTDQIFEGPLKAEPLKDEAYVQILKQLTDNHIRYSEERGWELLWLCTGLFPPSNILLPHVQRFLQSRKHCPLAIDCLQRLQKALRNGSRKYPPHLVEVEAIQHKTTQIFHKVYFPDDTDEAFEVESSTKAKDFCQNIATRLLLKSSEGFSLFVKIADKVLSVPENDFFFDFVRHLTDWIKKARPIKDGIVPSLTYQVFFMKKLWTTTVPGKDPMADSIFHYYQELPKYLRGYHKCTREEVLQLGALIYRVKFEEDKSYFPSIPKLLRELVPQDLIRQVSPDDWKRSIVAYFNKHAGKSKEEAKLAFLKLIFKWPTFGSAFFEVKVHHGLLRAEEEGNRALIKHRDSSLGLWERAMALDTCPGEGRRAAPSALSQLSVLAGVSPGDRGTRRSSAWQWRQTCKQAGVMEDGLCSDTGEPSPRWQSSGGSAGCEKAS

SEQ ID NO: 34833 - protein, 40 aa, Homo sapiens
LTNAIAVCGQPQQLLQVLQQTLPPPVFQMPLTKLPTIREL

SEQ ID NO: 34834 - protein, 37 aa, Homo sapiens
VVVVVFLVVRGLRPGLKWKRRHHDRTAEPRTLTVSAG

SEQ ID NO: 34835 - protein, 59 aa, Homo sapiens
LFLLYIFVHIFRVQAFLIILDDQSSFQNVLCPTSDFTCSVTMFIRISKEEEKKKQTCKK

SEQ ID NO: 34836 - protein, 629 aa, Homo sapiens
MSLSWRPSRTSMFPMRTASSSCWGRMPGLRRRASWRVSIPGSWPSQTRARLVSSTWATHAMSTASFRPYSWRLSSFRHCVLRLTENNSQPLMTKLQWLFGFLEHSQRPAISPENFLSASWTPWFSPGTQQDCSEYLKYLLDRLHEEEKTGTRICQKLKQSSSPSPPEEPPAPSSTSVEKMFGGKIVTRICCLCCLNVSSREEAFTDLSLAFPPPERCRRRRLGSVMRPTEDITARELPPPTSAQGPGRVGPRRQRKHCITEDTPPTSLYIEGLDSKEAGGQSSQEERIEREEEGKEERTEKEEVGEEEESTRGEGEREKEEEVEEEEEKVEKETEKEAEQEKEEDSLGAGTHPDAAIPSGERTCGSEGSRSVLDLVNYFLSPEKLTAENRYYCESCASLQDAEKVVELSQGPCYLILTLLRFSFDLRTMRRRKILDDVSIPLLLRLPLAGGRGQAYDLCSVVVHSGVSSESGHYYCYAREGAARPAASLGTADRPEPENQWYLFNDTRVSFSSFESVSNVTSFFPKDTAYVLFYRQRPREGPEAELGSSRVRTEPTLHKDLMEAISKDNILYLQEQEKEARSRAAYISALPTSPHWGRGFDEDKDEDEGSPGGCNPAGGNGGDFHRLVF

SEQ ID NO: 34837 - protein, 16 aa, Homo sapiens
VSPYDSAFSLLDKYVD

SEQ ID NO: 34838 - protein, 22 aa, Homo sapiens
LGLCFLFCKMGVLSTCPRDLLC

SEQ ID NO: 34839 - protein, 114 aa, Homo sapiens
MWGSSAGRDAGRERPGAGAGRARAAGGSLGLRSPRELLLVSLELSAEPGPAPSWAPRYGSRSRGAAPPRERGATGAAPCLPAAVLAASPAVAACSHDGKTENQRGLVISQTLGR

SEQ ID NO: 34840 - protein, 1700 aa, Homo sapiens
VPGRPAEGPGAGLVTLPGQPITPGFISGPALLPHISPPLVHFARRSGWEHRHFRSWSRHCRRHFVSVEKEASVAAGSGRRSPARRRRFIPEVPPVSSPIPPPRSACGEAGAAREPGRGRGVGREAGYPERLQLQLQRTSEGGRGAMSEQTPAEAGAAGAREDACRDYQSSLEDLTFNSKPHINMLTILAEENLPFAKEIVSLIEAQTAKAPSSEKLPVMYLMDSIVKNVGREYLTAFTKNLVATFICVFEKVDENTRKSLFKLRSTWDEIFPLKKLYALDVRVNSLDPAWPIKPLPPNVNTSSIHVNPKFLNKSPEEPSTPGTVVSSPSISTPPIVPDIQKNLTQEQLIRQQLLAKQKQLLELQQKKLELELEQAKAQLAVSLSVQQETSNLGPGSAPSKLHVSQIPPMAVKAPHQVPVQSEKSRPGPSLQIQDLKGTNRDPRLNRISQHSHGKDQSHRKEFLMNTLNQSDTKTSKTIPSEKLNSSKQEKSKSGEKITKKELDQLDSKSKSKSKSPSPLKNKLSHTKDLKNQESESMRLSDMNKRDPRLKKHLQDKTDGKDDDVKEKRKTAEKKDKDEHMKSSEHRLAGSRNKIINGIVQKQDTITEESEKQGTKPGRSSTRKRSRSRSPKSRSPIIHSPKRRDRRSPKRRQRSMSPTSTPKAGKIRQSGAKQSHMEEFTPPSREDRNAKRSTKQDIRDPRRMKKTEEERPQETTNQHSTKSGTEPKENVENWQSSKSAKRWKSGWEENKSLQQVDEHSKPPHLRHRESWSSTKGILSPRAPKQQQHRLSVDANLQIPKELTLASKRELLQKTSERLASGEITQDDFLVVVHQIRQLFQYQEGVREEQRSPFNDRFPLKRPRYEDSDKPFVDSPASRFAGLDTNQRLTALAEDRPLFDGPSRPSVARDGPTKMIFEGPNKLSPRIDGPPTPASLRFDGSPGQMGGGGPLRFEGPQGQLGGGCPLRFEGPPGPVGTPLRFEGPIGQAGGGGFRFEGSPGLRFEGSPGGLRFEGPGGQPVGGLRFEGHRGQPVGGLRFEGPHGQPVGGLRFDNPRGQPVGGLRFEGGHGPSGAAIRFDGPHGQPGGGIRFEGPLLQQGVGMRFEGPHGQSVAGLRFEGQHNQLGGNLRFEGPHGQPGVGIRFEGPLVQQGGGMRFEGPSVPGGGLRIEGPLGQGGPRFEGCHALRFDGQPGQPSLLPRFDGLHGQPGPRFERTPGQPGPQRFDGPPGQQVQPRFDGVPQRFDGPQHQQASRFDIPLGLQGTRFDNHPSQRLESVSFNQTGPYNDPPGNAFNAPSQGLQFQRHEQIFDSPQGPNFNGPHGPGNQSFSNPLNRASGHYFDEKNLQSSQFGNFGNIPAPMTVGNIQASQQVLSGVAQPVAFGQGQQFLPVHPQNPGFVQNPSGALPKAYPDNHLSQVDVNELFSKLLKTGILKLSQTDSATTQVSEVTAQPPPEEEEDQNEDQDVPDLTNFTVEELKQRYDSVINRLYTGIQCYSCGMRFTTSQTDVYADHLDWHYRQNRTEKDVSRKVTHRRWYYSLTDWIEFEEIADLEERAKSQFFEKVHEEVVLKTQEAAKEKEFQSVPAGPAGAVESCEICQEQFEQYWDEEEEEWHLKNAIRVDGKIYHPSCYEDYQNTSSFDCTPSPSKTPVENPLNIMLNIVKNELQEPCDSPKVKEERIDTPPACTEESIATPSEIKTENDTVESV

SEQ ID NO: 34841 - protein, 58 aa, Homo sapiens
MKIELDQVKQQLMHETSRIRADNKLDINLERSRVTDMFTDQEKQLMETTTEFTKKFSF

SEQ ID NO: 34842 - protein, 89 aa, Homo sapiens
LLIYPEKLTSFQKQKVLSSHPFRNLLENGSVYVGLNAALCGLIANSLFRRILNVTKARIAAGLPMAGIPFLTTDLTYRCFVIWIVKPVP

SEQ ID NO: 34843 - protein, 23 aa, Homo sapiens
MEFHIRAMRLKLLVFFCLEKTNS

SEQ ID NO: 34844 - protein, 956 aa, Homo sapiens
LFSPENFEPHLLLLFLHALFKMIDLSFLTEEEQEAIMKVLQRDAALKRAEEERVRHLPEKIKDDQQLKNMSGQWFYEAKAKRHRDKIHGADIIRASMRKKRPQIAAEQSKDRENGAKESWVNNVNKDAFLPPELAGVVEEPEEDAAPASPSSSVVNPASSVIDMSQENTRKPNVSPEKQRKNPFNSSKLPEGHSSQQTKNEQSKNGRTGLFQTSKEDELSESKEKSTVADTSIQKLEKSKQTLPGLSNGSQIKAPIPKARKMIYKSTDLNKDDNQSFPRQRTDSLKARGAPRGILKRNSSSSSTDSETLRYNHNFEPKSKIVSPGLTIHERISEKEHSLEDNSSPNSLEPLKHVRFSAVKDELPQSPGLIHGREVGEFSVLESDRLKNGMEDAGDTEEFQSDPKPSQYRKPSLFHQSTSSPYVSKSETHQPMTSGSFPINGLHSHSEVLTARPQSMENSPTINEPKDKSSELTRLESVLPRSPADELSHCVEPEPSQVPGGSSRDRQQGSEEEPSPVLKTLERSAARKMPSKSLEDISSDSSNQAKVDNQPEELVRSAEDVSTVPTQPDNPFSHPDKLKRMSKSVPAFLQDESDDRETDTASESSYQLSRHKKSPSSLTNLSSSSGMTSLSSVSGSVMSVYSGDFGNLEVKGNIQFAIEYVESLKELHVFVAQCKDLAAADVKKQRSDPYVKAYLLPDKGKMGKKKTLVVKKTLNPVYNEILRYKIEKQILKTQKLNLSIWHRDTFKRNSFLGEVELDLETWDWDNKQNKQLRWYPLKRKTAPVALEAENRGEMKLALQYVPEPVPGKKLPTTGEVHIWVKECLDLPLLRGSHLNSFVKCTILPDTSRKSRQKTRAVGKTTNPIFNHTMVYDGFRPEDLMEACVELTVWDHYKLTNQFLGGLRIGFGTGKSYGTEVDWMDSTSEEVALWEKMVNSPNTWIEATLPLRMLLIAKISK

SEQ ID NO: 34845 - protein, 931 aa, Homo sapiens
LFSPENFEPHLLLLFLHALFKMIDLSFLTEEEQEAIMKVLQRDAALKRAEEERVRHLPEKIKDDQQLKNMSGQWFYEAKAKRHRDKIHGADIIRASMRKKRPQIAAEQSKDRENGAKESWVNNVNKDAFLPPELAGVVEEPEEDAAPASPSSSVVNPASSVIDMSQENTRKPNVSPEKRKNPFNSSKLPEGHSSQQTKNEQSKNGRTGLFQTSKEDELSESKEKSTVADTSIQKLEKSKQTLPGLSNGSQIKAPIPKARKMIYKSTDLNKDDNQSFPRQRTDSLKARGAPRGILKRNSSSSSTDSETLRYNHNFEPKSKIVSPGLTIHERISEKEHSLEDNSSPNSLEPLKHVRFSAVKDELPQSPGLIHGREVGEFSVLESDRLKNGMEDAGDTEEFQSDPKPSQYRKPSLFHQSTSSPYVSKSETHQPMTSGSFPINGLHSHSEVLTARPQSMENSPTINEPKDKSSELTRLESVLPRSPADELSHCVEPEPSQVPGGSSRDRQQGSEEEPSPVLKTLERSAARKMPSKSLEDISSDSSNQAKVDNQPEELVRSAEDDEKPDQKPVTNECVPRISTVPTQPDNPFSHPDKLKRMSKSVPAFLQDEVSGSVMSVYSGDFGNLEVKGNIQFAIEYVESLKELHVFVAQCKDLAAADVKKQRSDPYVKAYLLPDKGKMGKKKTLVVKKTLNPVYNEILRYKIEKQILKTQKLNLSIWHRDTFKRNSFLGEVELDLETWDWDNKQNKQLRWYPLKRKTAPVALEAENRGEMKLALQYVPEPVPGKKLPTTGEVHIWVKECLDLPLLRGSHLNSFVKCTILPDTSRKSRQKTRAVGKTTNPIFNHTMVYDGFRPEDLMEACVELTVWDHYKLTNQFLGGLRIGFGTGKSYGTEVDWMDSTSEEVALWEKMVNSPNTWIEATLPLRMLLIAKISK

SEQ ID NO: 34846 - protein, 955 aa, Homo sapiens
LFSPENFEPHLLLLFLHALFKMIDLSFLTEEEQEAIMKVLQRDAALKRAEEERVRHLPEKIKDDQQLKNMSGQWFYEAKAKRHRDKIHGADIIRASMRKKRPQIAAEQSKDRENGAKESWVNNVNKDAFLPPELAGVVEEPEEDAAPASPSSSVVNPASSVIDMSQENTRKPNVSPEKRKNPFNSSKLPEGHSSQQTKNEQSKNGRTGLFQTSKEDELSESKEKSTVADTSIQKLEKSKQTLPGLSNGSQIKAPIPKARKMIYKSTDLNKDDNQSFPRQRTDSLKARGAPRGILKRNSSSSSTDSETLRYNHNFEPKSKIVSPGLTIHERISEKEHSLEDNSSPNSLEPLKHVRFSAVKDELPQSPGLIHGREVGEFSVLESDRLKNGMEDAGDTEEFQSDPKPSQYRKPSLFHQSTSSPYVSKSETHQPMTSGSFPINGLHSHSEVLTARPQSMENSPTINEPKDKSSELTRLESVLPRSPADELSHCVEPEPSQVPGGSSRDRQQGSEEEPSPVLKTLERSAARKMPSKSLEDISSDSSNQAKVDNQPEELVRSAEDVSTVPTQPDNPFSHPDKLKRMSKSVPAFLQDESDDRETDTASESSYQLSRHKKSPSSLTNLSSSSGMTSLSSVSGSVMSVYSGDFGNLEVKGNIQFAIEYVESLKELHVFVAQCKDLAAADVKKQRSDPYVKAYLLPDKGKMGKKKTLVVKKTLNPVYNEILRYKIEKQILKTQKLNLSIWHRDTFKRNSFLGEVELDLETWDWDNKQNKQLRWYPLKRKTAPVALEAENRGEMKLALQYVPEPVPGKKLPTTGEVHIWVKECLDLPLLRGSHLNSFVKCTILPDTSRKSRQKTRAVGKTTNPIFNHTMVYDGFRPEDLMEACVELTVWDHYKLTNQFLGGLRIGFGTGKSYGTEVDWMDSTSEEVALWEKMVNSPNTWIEATLPLRMLLIAKISK

SEQ ID NO: 34847 - protein, 477 aa, Homo sapiens
LHALFKMIDLSFLTEEEQEAIMKVLQRDAALKRAEEERVRHLPEKIKDDQQLKNMSGQWFYEAKAKRHRDKIHGADIIRASMRKKRPQIAAEQSKDRENGAKESWVNNVNKDAFLPPELAGVVEEPEEDAAPASPSSSVVNPASSVIDMSQENTRKPNVSPEKRKNPFNSSKLPEGHSSQQTKNEQSKNGRTGLFQTSKEDELSESKEKSTVADTSIQKLEKSKQTLPGLSNGSQIKAPIPKARKMIYKSTDLNKDDNQSFPRQRTDSLKARGAPRGILKRNSSSSSTDSETLRYNHNFEPKSKIVSPGLTIHERISEKEHSLEDNSSPNSLEPLKHVRFSAVKDELPQSPGLIHGREVGEFSVLESDRLKNGMEDAGDTEEFQSDPKPSQYRKPSLFHQSTSSPYVSKSETHQPMTSGSFPINGLHSHSEVLTARPQSMENSPTINEPKDKSSELTRLESVLPRSPAGKRVVTTRL

SEQ ID NO: 34848 - protein, 686 aa, Homo sapiens
VGVGGAVGGGDPPALGGPSPRRLLSGWGGGGAAEMSGQSLTDRITAAQHSVTGSAVSKTVCKATTHEIMGPKKKHLDYLIQCTNEMNVNIPQLADSLFERTTNSSWVVVFKSLITTHHLMVYGNERFIQYLASRNTLFNLSNFLDKSGLQGYDMSTFIRRYSRYLNEKAVSYRQVAFDFTKVKRGADGVMRTMNTEKLLKTVPIIQNQMDALLDFNVNSNELTNGVINAAFMLLFKDAIRLFAAYNEGIINLLEKYFDMKKNQCKEGLDIYKKFLTRMTRISEFLKVAEQVGIDRGDIPDLSQAPSSLLDALEQHLASLEGKKIKDSTAASRATTLSNAVSSLASTGLSLTKVDEREKQAALEEEQARLKALKEQRLKELAKKPHTSLTTAASPVSTSAGGIMTAPAIDIFSTPSSSNSTSKLPNDLLDLQQPTFHPSVHPMSTASQVASTWGDPFSATVDAVDDAIPSLNPFLTKSSGDVHLSISSDVSTFTTRTPTHEMFVGFTPSPVAQPHPSAGLNVDFESVFGNKSTNVIVDSGGFDELGGLLKPTVASQNQNLPVAKLPPSKLVSDDLDSSLANLVGNLGIGNGTTKNDVNWSQPGEKKLTGGSNWQPKVAPTTAWNAATMAPPVMAYPATTPTGMIGYGIPPQMGSVPVMTQPTLIYSQPVMRPPNPFGPVSGAQIQFM

SEQ ID NO: 34849 - protein, 681 aa, Homo sapiens
VPDILSDSAGDTSRFSLDWWQRAAPNRAPGRQAGKEPVGVGGAVGGGDPPALGGPSPRRLLSGWGGGGAAEMSGQSLTDRITAAQHSVTGSAVSKTVCKATTHEIMGPKKKHLDYLIQCTNEMNVNIPQLADSLFERTTNSSWVVVFKSLITTHHLMVYGNERFIQYLASRNTLFNLSNFLDKSGLQGYDMSTFIRRYSRYLNEKAVSYRQVAFDFTKVKRGADGVMRTMNTEKLLKTVPIIQNQMDALLDFNVNSNELTNGVINAAFMLLFKDAIRLFAAYNEGIINLLEKYFDMKKNQCKEGLDIYKKFLTRMTRISEFLKVAEQVGIDRGDIPDLSQAPSSLLDALEQHLASLEGKKIKDSTAASRATTLSNAVSSLASTGLSLTKVDEREKQAALEEEQARLKALKEQRLKELAKKPHTSLTTAASPVSTSAGGIMTAPAIDIFSTPSSSNSTSKLPNDLLDLQQPTFHPSVHPMSTASQVASTWGGFTPSPVAQPHPSAGLNVDFESVFGNKSTNVIVDSGGFDELGGLLKPTVASQNQNLPVAKLPPSKLVSDDLDSSLANLVGNLGIGNGTTKNDVNWSQPGEKKLTGGSNWQPKVAPTTAWNAATMNGMHFPQYAPPVMAYPATTPTGMIGYGIPPQMGSVPVMTQPTLIYSQPVMRPPNPFGPVSGAQIQFM

SEQ ID NO: 34850 - protein, 175 aa, Homo sapiens
MSTFIRRYSRYLNEKAVSYRQVAFDFTKVKRGADGVMRTMNTEKLLKTVPIIQNQMDALLDFNVNSNELTNGVINAAFMLLFKDAIRLFAAYNEGIINLLEKYFDMKKNQCKEGLDIYKKFLTRMTRISEFLKVAEQVGIDRGDIPDLSQVSLLLKYQSTICCVQVVKSIKISNI

SEQ ID NO: 34851 - protein, 205 aa, Homo sapiens [sequence omitted]

SEQ ID NO: 34852 - protein, 58 aa, Homo sapiens
LTTLCVVFNLLSCFFPRCTTLTHHKCGAAIRQTSFSRDSSILIAVCDDASIWRWDRLR

SEQ ID NO: 34853 - protein, 99 aa, Homo sapiens
LNGAAVAMFGCLVAGRLVQTAAQQVAEDKFVFDLPDYESINHVVVFMLGTIPFPEGMGGSVYFSYPDSNGMPVWQLLGFVTNGKPSAIFKISGLKSGNY

SEQ ID NO: 34854 - protein, 201 aa, Homo sapiens
LNGAAVAMFGCLVAGRLVQTAAQQVAEDKFVFDLPDYESINHVVVFMLGTIPFPEGMGGSVYFSYPDSNGMPVWQLLGFVTNGKPSAIFKISGLKSGEGSQHPFGAMNIVRTPSVAQIGISVELLDSMAQQTPVGNAAVSSVDSFTQFTQKMLDNFYNFASSFAVSQAQMTPSPSEMFIPANVVLKWYEAFSVSNIKAFYN

SEQ ID NO: 34855 - protein, 325 aa, Homo sapiens
LPRTMGAALGTGTRLAPWPGRACGALPRWTPTAPAQGCHSKPGPARPVPLKKRGYDVTRNPHLNKGMAFTLEERLQLGIHGLIPPCFLSQDVQLLRIMRYYERQQSDLDKYIILMTLQDRNEKLFYRVLTSDVEKFMPIVYTPTVGLACQHYGLTFRRPRGLFITIHDKGHLATMLNSWPEDNIKAVVVTDGERILGLGDLGCYGMGIPVGKLALYTACGGVNPQQCLPVLLDVGTNNEELLRDPLYIGLKHQRVHGKAYDDLLDEFMQAVTDKFGINCLIQFEDFANANAFRLLNKYRNKYCMFNDDIQDDFSRGPKRSQLFFK

SEQ ID NO: 34856 - protein, 13 aa, Homo sapiens
LLWFLWTGLLTLP

SEQ ID NO: 34857 - protein, 50 aa, Homo sapiens [sequence omitted]

SEQ ID NO: 34858 - protein, 223 aa, Homo sapiens [sequence omitted]

SEQ ID NO: 34859 - protein, 165 aa, Homo sapiens
MGAGPSLLLAALLLLLSGDGAVRCDTPANCTYLDLLGTWVFQVGSSGSQRDVNCSVMGPQEKKVVVYLQKLDTAYDDLGNSGHFTIIYNQGFEIVLNDYKWFAFFKDVTDFISHLFMQLGTVGIYDLPHLRNKLEGDWRDYGFLMNFLLEPACLLFLSCLHYFIY

SEQ ID NO: 34860 - protein, 127 aa, Homo sapiens
MGAGPSLLLAALLLLLSGDGAVRCDTPANCTYLDLLGTWVFQVGSSGSQRDVNCSVMGPQEKKVVVYLQKLDTAYDDLGNSGHFTIIYNQGFEIVLNDYKWFAFFKVSFVGSWIYIFNDLISETSSD

SEQ ID NO: 34861 - protein, 48 aa, Homo sapiens
MGAGPSLLLAALLLLLSGDGAVRCDTPANCTYLDLLGTWVFQDHKKKK

SEQ ID NO: 34862 - protein, 131 aa, Homo sapiens
MMGINREKYDNSLEIISNASCTTNCLAPLAKVIHDNFGIMEGLMTTVHAIAATQKTVDSPSGKLWCDGCRALQNIIPASTGAAKAVDKPRCCQGCVIPELNRKLTGKAFCRPHHQRVGSGPDLPSGKTCQI

SEQ ID NO: 34863 - protein, 367 aa, Homo sapiens
MLLAVLYCLLWSFQTSAGHFPRACVSSKNLMEKECCPPWSGDRSPCGQLSGRGSCQNILLSNAPLGPQFPFTGVDDRESWPSVFYNRTCQCSGNFMGFNCGNCKFGFWGPNCTERRLLVRRNIFDLSAPEKDKFFAYLTLAKHTISSDYVIPIGTYGQMKNGSTPMFNDINIYDLFVWMHYYVSMDALLGGSEIWRDIDFAHEAPAFLPWHRLFLLRWEQEIQKLTGDENFTIPYWDWRDAEKCDICTDEYMGGQHPTNPNLLSPASFFSSWQIVCSRLEEYNSHQSLCNGTPEGPLRRNPGNHDKSRTPRLPSSADVEFCLSLTQYESGSMDKAANFSFRNTLEEMGFLHIGWAGLKLLTSRDPPP

SEQ ID NO: 34864 - protein, 374 aa, Homo sapiens [sequence omitted]

SEQ ID NO: 34865 - protein, 104 aa, Homo sapiens
LVPHWLQGWHQLPVSHCGAWWRPGHGTECMLSNTTAIAEAWARLDHKFDLMYAKRAFVHWYVGEGMEEGEFSEAREDMAALEKDYEEVGVDSVEGEGEEEREEY

SEQ ID NO: 34866 - protein, 12 aa, Homo sapiens
VHFGTALMYVFV

SEQ ID NO: 34867 - protein, 49 aa, Homo sapiens [sequence omitted]

SEQ ID NO: 34868 - protein, 622 aa, Homo sapiens
LHPLPESPGLGPSTRAGLRLSRDGGDLVRARTFECPSSGSVRILGRHLFVAAGQGVVKFQPSLWPWDSVRNNLRSALTEMCVLYDVLSIVRDKKFMTLDPVSQDALPPKQNPQTLQLISKKKSLAGAAQILLKGAERLTKSVTENQENKLQRDFNSELLRLRQHWKLRKVGDKILGDLSYRSAGSLFPHHGTFEVIKNTDLDLDKKIPEDYCPLDVQIPSDLEGSAYIKVSIQKQAPDIGDLGTVNLFKRPLPKSKPGSPHWQTKLEAAQNVLLCKEIFAQLSREAVQIKSQVPHIVVKNQIISQPFPSLQLSISLCHSSNDKKSQKFATEKQCPEDHLYVLEHNLHLLIREFHKQTLSSIMMPHPASAPFGHKRMRLSGPQAFDKNEINSLQSSEGLLEKIIKQAKHIFLRSRAAATIDSLASRIEDPQIQAHWSNINDVYESSVKVLITSQGYEQICKSIQLQLNIGVEQIRVVHRDGRVITLSYQEQELQDFLLSQMSQHQVHAVQQLAKVMGWQVLSFSNHVGLGPIESIGNASAITVASPSGDYAISVRNGPESGSKIMVQFPRNQCKDLPKSDVLQDNKWSHLRGPFKEVQWNKMEGRNFVYKMELLMSALSPCLL

SEQ ID NO: 34869 - protein, 713 aa, Homo sapiens
LFMNRNISHQKGDDENTFKILVATDIHLGFMEKDAVRGNDTFVTLDEILRLAQENEVDFILLGGDLFHENKPSRKTLHTCLELLRKYCMGDRPVQFEILSDQSVNFGFSKFPWVNYQDGNLNISIPVFSIHGNHDDPTGADALCALDILSCAGFVNHFGRSMSVEKIDISPVLLQKGSTKIALYGLGSIPDERLYRMFVNKKVTMLRPKEDENSWFNLFVIHQNRSKHGSTNFIPEQFLDDFIDLVIWGHEHECKIAPTKNEQQLFYISQPGSSVVTSLSPGEAVKKHVGLLRIKGRKMNMHKIPLHTVRQFFMEDIVLANHPDIFNPDNPKVTQAIQSFCLEKIEEMLENAERERLGNSHQPEKPLVRLRVDYSGGFEPFSVLRFSQKFVDRVANPKDIIHFFRHREQKEKTGEEINFGKLITKPSEGTTLRVEDLVKQYFQTAEKNVQLSLLTERGMGEAVQEFVDKEEKDAIEELVKYQLEKTQRFLKERHIDALEDKIDEEVRRFRETRQKNTNEEDDEVREAMTRARALRSQSEESASAFSADDLMSIDLAEQMANDSDDSISAATNKGRGRGRGRRGGRGQNSASRGGSQRGRADTGLETSTRSRNSKTAVSASRNMSIIDAFKSTRQQPSRNVTTKNYSEVIEVDESDVEEDIFPTTSKTDQRWSSTSSSKIMSQSQVSKGVDFESSEDDDDDPFMNTSSLRRNRR

SEQ ID NO: 34870 - protein, 92 aa, Homo sapiens
MKCRERNGRRSLPRNSGLRPCGFSEASSDRVVFFSRILPFLPEKKTALGRDCGASKSPAVGISRIWNRVHFLTFEYSTQGFLEKNLVPEELD

SEQ ID NO: 34871 - protein, 27 aa, Homo sapiens
MNIKSLFPLLGHFHLILLSFPMSVLVN

SEQ ID NO: 34872 - protein, 206 aa, Homo sapiens
LQYMGMLFFVGIRKVILFLLTPNSAGALNKWYKYNHDLPARIIVYRAGVGDGQLKTLIEYEVPQLLSSVAESSSNTSSRLSVIVVRKKCMPRFFTEMNRTVQNPPLGTVVDSEATRNEWYDFYLISQVACRGTVSPTYYNVIYDDNGLKPDHMQRLTFKLCHLYYNWPGIVSVPAPCQYAHKLTFLVAQSIHKEPSLELANHLFYL

SEQ ID NO: 34873 - protein, 70 aa, Homo sapiens [sequence omitted]

SEQ ID NO: 34874 - protein, 120 aa, Homo sapiens
MTTAARPTFEPARGGRGKGEGDLSQLSKQYSSRDLPSHTKIKYRQTTQDAPEEVRNRDFRRELEERERAAAREKNRDRPTREHTTSSSVSKKPRLDQIPAANLDADDPLTDVCFVSSFHL

SEQ ID NO: 34875 - protein, 47 aa, Homo sapiens
LFLQKKMAEFRLDRGEMLRVRLGVVICCLPPVICANSQATNNFSYAL

SEQ ID NO: 34876 - protein, 413 aa, Homo sapiens
LARRHWVGWGGSGGGGRRWRRPRGPGLSRRGPGGREAGGGGGGGARGPGGGGSRVLRRAPPRSGRRRRRRLRSRMAASALYACTKCTQRYPFEELSQGQQLCKECRIAHPIVKCTYCRSEFQQESKTNTICKKCAQNVKQFGTPKPCQYCNIIAAFIGTKCQRCTNSEKKYGPPQTCEQCKQQCAFDRKEEGRRKVDGKLLCWLCTLSYKRVLQKTKEQRKSLGSSHSNSSSSSLTEKDQHHPKHHHHHHHHHHRHSSSHHKISNLSPEEEQGLWKQSHKSSATIQNETPKKKPKLESKPSNGDSSSINQSADSGGTDNFVLISQLKEEVMSLKRLLQQRDQTILEKDKKLTELKADFQYQESNLRTKMNSMEKAHKETVEQLQAKNRELLKQVAALSKGKKFDKSGSILTSP

SEQ ID NO: 34877 - protein, 307 aa, Homo sapiens
LARRHWVGWGGSGGGGRRWRRPRGPGLSRRGPGGREAGGGGGGGARGPGGGGSRVLRRAPPRSGRRRRRRLRSRMAASALYACTKCTQRYPFEELSQGQQLCKECRIAHPIVKCTYCRSEFQQESKTNTICKKCAQNVKQFGTPKPCQYCNIIAAFIGTKCQRCTNSEKKYGPPQTCEQCKQQCAFDRKEEGRRKVDGKLLCWLCTLSYKRVLQKTKEQRKSLGSSHSNSSSSSLTEKDQHHPKHHHHHHHHHHRHSSSHHKISNLSPEEEQGLWKQSHKSSATIQNETPKKKPKLESKPSNGDRCM

SEQ ID NO: 34878 - protein, 41 aa, Homo sapiens
VRSTVLKFYIFFLCKFCNFTQRLSLPKNTLHVKDVLQSQSQ

SEQ ID NO: 34879 - protein, 77 aa, Homo sapiens
LFPTYPPPSWFLFFLPTLFLLTPLPHNFSTAPPQPLKTSIHVALNTELTLSKTDLPAIASSSLFPPHHPRGSNHCVR

SEQ ID NO: 34880 - protein, 62 aa, Homo sapiens [sequence omitted]

SEQ ID NO: 34881 - protein, 678 aa, Homo sapiens
LRMASSWKLMLFLSVTMCLSEYSKSLPGLSTSYAALLRIKKSSSSSLFGSKTRPRYSSPSLGTLSASSPSWLGAAQNYYSPINLYHSSDAFKQDESVDYGPVFVQEPDDIIFPTDSDEKKVALNCEVRGNPVPSYRWLRNGTEIDLESDYRYSLIDGTFIISNPSEAKDSGHYQCLATNTVGSILSREATLQFAYLGNFSGRTRSAVSVREGQGVVLMCSPPPHSPEIIYSWVFNEFPSFVAEDSRRFISQETGNLYISKVQTSDVGSYICLVKNTVTNARVLSPPTPLTLRNDGVMGEYEPKIEVHFPFTVTAAKGTTVKMECFALGNPVPTITWMKVNGYIPSKARLRKSQAVLEIPNVQLDDAGIYECRAENSRGKNSFRGQLQVYTYPHWVEKLNDTQLDSGSPLRWECKATGKPRPTYRWLKNGVPLSPQSRVEMVNGVLMIHNVNQSDAGMYQCLAENKYGAIYASAELKILASAPTFALNQLKKTIIVTKDQEVVIECKPQGSPKPTISWKKGDRAVRENKRIAILPDGSLRILNASKSDEGKYVCRGENVFGSAEIIASLSVKEPTRIELTPKRTELTVGESIVLNCKAIHDASLDVTFYWTLKGQPIDFEEEGGHFESIRAQASSADLMIRNILLMHAGRYGCRVQTTADSVSDEAELLVRGEYANSAV

SEQ ID NO: 34882 - protein, 14 aa, Homo sapiens
MREVLGASRQAALK

SEQ ID NO: 34883 - protein, 32 aa, Homo sapiens
MFLLPPGNKALKSAVEKPNVCEIQETMLANHW

SEQ ID NO: 34884 - protein, 33 aa, Homo sapiens
LPLKTNRTKTKHQGHISLSFLISVLYIEGVHIC

SEQ ID NO: 34885 - protein, 11 aa, Homo sapiens
MMISCVNLAFK

SEQ ID NO: 34886 - protein, 217 aa, Homo sapiens
MRLTVLCAVCLLPGSLALPLPQEAGGMSELQWEQAQDYLKRFYLYDSETKNANSLEAKLKEMQKFFGLPITGMLNSRVIEIMQKPRCGVPDVAEYSLFPNSPKWTSKVVTYRIVSYTRDLPHITVDRLVSKALNMWGKEIPLHFRKVVWGTADIMIGFARGAHGDSYPFDGPGNTLAHAFAPGTGLGGDAHFDEDERWTDGSSLGIASHVSSTPHPF

SEQ ID NO: 34887 - protein, 192 aa, Homo sapiens
MRLTVLCAVCLLPGSLALPLPQEAGGMSELQWEQAQDYLKRFYLYDSETKNANSLEAKLKEMQKFFGLPITGMLNSRVIEIMQKPRCGVPDVAEYSLFPNSPKWTSKVVTYRIVSYTRDLPHITVDRLVSKALNMWGKEIPLHFRKVVWGTADIMIGFARGGKKDSCRLILCPVLFVHGLYQCSFLMKIKIL

SEQ ID NO: 34888 - protein, 478 aa, Homo sapiens
VRMMHLAFLVLLCLPVCSAYPLSGAAKEEDSNKDLAQQYLEKYYNLEKDVKQFRRKDSNLIVKKIQGMQKFLGLEVTGKLDTDTLEVMRKPRCGVPDVGHFSSFPGMPKWRKTHLTYRIVNYTPDLPRDAVDSAIEKALKVWEEVTPLTFSRLYEGEADIMISFAVKEHGDFYSFDGPGHSLAHAYPPGPGLYGDIHFDDDEKWTEDASGTNLFLVAAHELGHSLGLFHSANTEALMYPLYNSFTELAQFRLSQDDVNGIQSLYGPPPASTEEPLVPTKSVPSGSEMPAKCDPALSFDAISTLRGEYLFFKDRYFWRRSHWNPEPEFHLISAFWPSLPSYLDAAYEVNSRDTVFIFKGNEFWAIRGNEVQAGYPRGIHTLGFPPTIRKIDAAVSDKEKKKTYFFAADKYWRFDENSQSMEQGFPRLIADDFPGVEPKVDAVLQAFGFFYFFSGSSQFEFDPNARMVTHILKSNSWLHC

SEQ ID NO: 34889 - protein, 477 aa, Homo sapiens
LRKKTKASMHSFPPLLLLLFWGVVSHSFPATLETQEQDVDLVQKYLEKYYNLKNDGRQVEKRRNSGPVVEKLKQMQEFFGLKVTGKPDAETLKVMKQPRCGVPDVAQFVLTEGNPRWEQTHLTYRIENYTPDLPRADVDHAIEKAFQLWSNVTPLTFTKVSEGQADIMISFVRGDHRDNSPFDGPGGNLAHAFQPGPGIGGDAHFDEDERWTNNFREYNLHRVAAHELGHSLGLSHSTDIGALMYPSYTFSGDVQLAQDDIDGIQAIYGRSQNPVQPIGPQTPKACDSKLTFDAITTIRGEVMFFKDRFYMRTNPFYPEVELNFISVFWPQLPNGLEAAYEFADRDEVRFFKGNKYWAVQGQNVLHGYPKDIYSSFGFPRTVKHIDAALSEENTGKTYFFVANKYWRYDEYKRSMDPGYPKMIAHDFPGIGHKVDAVFMKDGFFYFFHGTRQYKFDPKTKRILTLQKANSWFNCRKN

SEQ ID NO: 34890 - protein, 479 aa, Homo sapiens
VEMKSLPILLLLCVAVCSAYPLDGAARGEDTSMNLVQKYLENYYDLKKDVKQFVRRKDSGPVVKKIREMQKFLGLEVTGKLDSDTLEVMRKPRCGVPDVGHFRTFPGIPKWRKTHLTYRIVNYTPDLPKDAVDSAVEKALKVWEEVTPLTFSRLYEGEADIMISFAVREHGDFYPFDGPGNVLAHAYAPGPGINGDAHFDDDEQWTKDTTGTNLFLVAAHEIGHSLGLFHSANTEALMYPLYHSLTDLTRFRLSQDDINGIQSLYGPPPDSPETPLVPTEPVPPEPGTPANCDPALSFDAVSTLRGEILIFKDRHFWRKSLRKLEPELHLISSFWPSLPSGVDAAYEVTSKDLVFIFKGNQFWAIRGNEVRAGYPRGIHTLGFPPTVRKIDAAISDKEKNKTYFFVEDKYWRFDEKRNSMEPGFPKQIAEDFPGIDSKIDAVFEEFGFFYFFTGSSQLEFDPNAKKVTHTLKSNSWLNC

SEQ ID NO: 34891 - protein, 109 aa, Homo sapiens
LTFATLMHIFMTYLFPWQISGLLLEGCSFDGNQLSENQLDSPSVSSVLPCFMGWIPQDACGPYSPDECISLPVYTSAERDRVVTNIDVPCGGNQDQWIQCGAALFLKNQ

SEQ ID NO: 34892 - protein, 135 aa, Homo sapiens
MAVLAALLRSGARSRSPLLRRLVQEIRYVERSYVSKPTLKEVVIVSATRTPIGSFLGSLSLLPATKLGSIAIQGAIEKAGIPKEEVKEAYMGNVLQGGEGQAPTRQAVLGAGTWKTFLLLYLKCVKGAGCGGSCL

SEQ ID NO: 34893 - protein, 36 aa, Homo sapiens
LFHFLLFSMLTFKNQNDEIPKHFEIKNKFLLLLFSW

SEQ ID NO: 34894 - protein, 524 aa, Homo sapiens
LCQTFVCFVPKHFRENLFLTRIVFLGSAIIIASPVQPVLQGMVGMIPVSVVGQNGNNFSTPPRQVLHMPLTAPVCNRSIPQFPVPPKSQKAQGLRNKPCIGKQVNNLVDSSGHSVGCHAQKTEVSDKSIATDLGKKSEETTVPFPEESIVPAAKPCHRRVLCFDSTTAPVANTQGPNHKMVSQNKERNAVSFPNLDSPNVSSTLKPPSNNAIKREKEKPPLPKILSKSESAISRHTTIRETQSEKKVSPTEIVLESFHKATANKENELCSDVERQKNPENSKLSIGQQNGGLRSEKSIASLQEMTKKQGTSSNNKNVLSVGTAVKDLKQEQTKSASSLITTEMLQDIQRHSSVSRLADSSDLPVPRTPGSGAGEKHKEEPIDIIKAPSSRRFSEDSSTSKVMVPPVTPDLPACSPASETGSENSVNMAAHTLMILSRAAISRTTSATPLKDNTQQFRASSRSTTKKRKIEELDERERNSRPSSKNLTNSSIPMKKKKIKKKKLPSSFPAGMDVDKFLLSLHYDE

SEQ ID NO: 34895 - protein, 1439 aa, Homo sapiens
LFLIVVPAVVLIMLLPSDVARLVLGYLQQENLISTCQTFILESSDLKEYAEHCTDEGFIPACLLSLFGKNLTTILNEYVAMKTKETSNNVPAIMSSLWKKLDHTLSQIRSMQSSPRFAGSQRARTRTGIAEIKRQRKLASQTAPASAELLTLPYLSGQFTTPPSTGTQVTRPSGQISDPSRSYFVVVNHSQSQDTVTTGEALNVIPGAQEKKAHASLMSPGRRKSESQRKSTTLSGPHSTIRNFQDPNAFAVEKQMVIENAREKILSNKSLQEKLAENINKFLTSDNNIAQVPKQTDNNPTEPETSIDEFLGLPSEIHMSEEAIQDILEQTESDPAFQALFDLFDYGKTKNNKNISQSISSQPMESNPSIVLADETNLAVKGSFETEESDGQSGQPAFCTSYQNDDPLNALKNSNNHDVLRQEDQENFSQISTSIQKKAFKTAVPTEQKCDIDITFESVPNLNDFNQRGNSNAECNPHCAELYTNQMSTETEMAIGIEKNSLSSNVPSESQLQPDQPDIPITSFVSLGCEANNENLILSGKSSQLLSQDTSLTGKPSKKSQFCENSNDTVKLKINFHGSKSSDSSEVHKSKIEINVLEPVMSQLSNCQDNSCLQSEILPVSVESSHLNVSGQVEIHLGDSLSSTKQPSNDSASVELNHTENEAQASKSENSQEPSSSVKEENTIFLSLGGNANCEKVALTPPEGTPVENSHSLPPESVCSSVGDSHPESQNTDDKPSSNNSAEIDASNIVSLKVIISDDPFVSSDTELTSAVSSINGENLPTIILSSPTKSPTKNAELVKCLSSEETVGAVVYAEVGDSASMEQSLLTFKSEDSAVNNTQNEDGIAFSANVTPCVSKDGGYIQLMPATSTAFGNSNNILIATCVTDPTALGTSVSQSNVVVLPGNSAPMTAQPLPPQLQTPPRSNSVFAVNQAVSPNFSQGSAIIIASPVQPVLQGMVGMIPVSVVGQNGNNFSTPPRQVLHMPLTAPVCNRSIPQFPVPPKSQKAQGLRNKPCIGKQVNNLVDSSGHSVGCHAQKTEVSDKSIATDLGKKSEETTVPFPEESIVPAAKPCHRRVLCFDSTTAPVANTQGPNHKMVSQNKERNAVSFPNLDSPNVSSTLKPPSNNAIKREKEKPPLPKILSKSESAISRHTTIRETQSEKKVSPTEIVLESFHKATANKENELCSDVERQKNPENSKLSIGQQNGGLRSEKSIASLQEMTKKQGTSSNNKNVLSVGTAVKDLKQEQTKSASSLITTEMLQDIQRHSSVSRLADSSDLPVPRTPGSGAGEKHKEEPIDIIKAPSSRRFSEDSSTSKVMVPPVTPDLPACSPASETGSENSVNMAAHTLMILSRAAISRTTSATPLKDNTQQFRASSRSTTKKRKIEELDERERNSRPSSKNLTNSSIPMKKKKIKKKKLPSSFPAGMDVDKFLLSLHYDE

SEQ ID NO: 34896 - protein, 29 aa, Homo sapiens
LTSHLLISLSYLVLLVSEHLLIFQLQPRG

SEQ ID NO: 34897 - protein, 65 aa, Homo sapiens
LSKQDLLFLDMLKFLCLCVTTAQTNTVSFRAADIRRKLLMLIDSSTLEPTKSLHLHMQCVFFVSS

SEQ ID NO: 34898 - protein, 157 aa, Homo sapiens
MRGVTNDLLSIQGNTGPSWINKTERAFFRGRDSREERLQLVQLSKENPQLLDAGITGYFFFQEKEKELGKAKLMGFFDFFKENDEEAKKIAKEGQLMARDLLQPHRLYCYYYQVLQKYAERQSSKPEVRDGMELVPQPEDSTAICQCHRKKPSREEL

SEQ ID NO: 34899 - protein, 902 aa, Homo sapiens
LSHAGSVSLALGVSCLGLIRAVAAAAAMGKTANSPGSGARPDPVRSFNRWKKKHSHRQNKKKQLRKQLKKPEWQVERESISRLMQNYEKINVNEITRFSDFPLSKKTLKGLQEAQYRLVTEIQKQTIGLALQGKDVLGAAKTGSGKTLAFLVPVLEALYRLQWTSTDGLGVLIISPTRELAYQTFEVLRKVGKNHDFSAGLIIGGKDLKHEAERINNINILVCTPGRLLQHMDETVSFHATDLQMLVLDEADRILDMGFADTMNAVIENLPKKRQTLLFSATQTKSVKDLARLSLKNPEYVWVHEKAKYSTPATLEQNYIVCELQQKISVLYSFLRSHLKKKSIVFFSSCKEVQYLYRVFCRLRPGVSILALHGRQQQMRRMEVYNEFVRKRAAVLFATDIAARGLDFPAVNWVLQFDCPEDANTYIHRAGRTARYKEDGEALLILLPSEKAMVQQLLQKKVPVKEIKINPEKLIDVQKKLESILAQDQDLKERAQRCFVSYVRSVYLMKDKEVFDVSKLPIPEYALSLGLAVAPRVRFLQKMQKQPTKELVRSQADKVIEPRAPSLTNDEVEEFRAYFNEKMSILQKGGKRLEGTEHRQDNDTGNEEQEEEEDDEEEMEEKLAKAKGSQAPSLPNTSEAQKIKEVPTQFLDRDEEEEDADFLKVKRHNVFGLDLKDEKTLQKKEPSKSSIKKKMTKVAEAKKVMKRNFKVNKKITFTDEGELVQQWPQMQKSAIKDAEEDDDTGGINLHKAKERLQEEDKFDKEEYRKKIKAKHREKRLKEREARREANKRQAKAKDEEEAFLDWSDDDDDDDDGFDPSTLPDPDKYRSSEDSDSEDMENKISDTKKKQGMKKRSNSEVEDVGPTSHNRKKARWDTLEPLDTGLSLAEDEELVLHLLRSQS

SEQ ID NO: 34900 - protein, 162 aa, Homo sapiens
VSLALGVSCLGLIRAVAAAAAMGKTANSPGSGARPDPVRSFNRWKKKHSHRQNKKKQLRKQLKKPEWQVERESISRLMQNYEKINVNEITRFSDFPLSKKTLKGLQEAQYRLVTEIQKQTIGLALQGKDVLGAAKTGSGKTLAFLVPVSTLSLGQTVCYTIL

SEQ ID NO: 34901 - protein, 304 aa, Homo sapiens
LQPPLQPRGGGSLLAASRRSSLVPLQRKGERGDVFEVVSARISRAPLTPWSPCLPAVAPLVLGSLAHPLPLQGAVLGGVGSVLFLAGRNGVPKRGSLVGLAPPSPAPMSARAPKELRLALPPCLLNRTFASPNASGSGNTGARGPGAVGSGTCITQVGQQLFQSFSSTLVLIVLVTLIFCLIVLSLSTFHIHKRRMKKRKMQRAQEEYERDHCSGSRGGGGLPRPGRQAPTHAKETRLERQPRDSPFCAPSNASSLSSSSPGLPCQGPCAPPPPPPASSPQGAHAASSCLDTAGEGLLQTVVLS

SEQ ID NO: 34902 - protein, 54 aa, Homo sapiens
LEGCCMAEQERERMRERLCVCVCVCVCVLCVCMRERNANLVACEECLYLDTIVT

SEQ ID NO: 34903 - protein, 240 aa, Homo sapiens
VSFCTSAWATERDPVSRKQRELEEQTRKALELDQERKRAKEEAERLEKERRAAEEAKSAIAKQAADQMKNQEQLAAELAEFTAKIALLEEAKKKKEEEATEWQHKAFAAQEDLEKTKEELKTVMSAPPPPPPPPVIPPTENEHDEHDENNAEASAELSNEGVMNHRSEEERVTETQKNERVKKQLQALSSELAQARDETKKTQNDVLHAENVKAGRDKYKTLRQIRQGNTKQRIDEFEAM

SEQ ID NO: 34904 - protein, 598 aa, Homo sapiens
LKWRIFKEGNKKRKKMPKPINVRVTTMDAELEFAIQPNTTGKQLFDQVVKTVGLREVWFFGLQYVDSKGYSTWLKLNKKVTQQDVKKENPLQFKFRAKFFPEDVSEELIQEITQRLFFLQVKEAILNDEIYCPPETAVLLASYAVQAKYGDYNKEIHKPGYLANDRLLPQRVLEQHKLTKEQWEERIQNWHEEHRGMLREDSMMEYLKIAQDLEMYGVNYFEIKNKKGTELWLGVDALGLNIYEHDDKLTPKIGFPWSEIRNISFNDKKFVIKPIDKKAPDFVFYAPRLRINKRILALCMGNHELYMRRRKPDTIEVQQMKAQAREEKHQKQLERAQLENEKKKREIAEKEKERIEREKEELMERLKQIEEQTIKAQKELEEQTRKALELDQERKRAKEEAERLEKERRAAEEAKSAIAKQAADQMKNQEQLAAELAEFTAKIALLEEAKKKKEEEATEWQHKAFAAQEDLEKTKEELKTVMSAPPPPPPPPVIPPTENEHDEHDENNAEASAELSNEGVMNHRSEEERVTETQKNERVKKQLQALSSELAQARDETKKTQNDVLHAENVKAGRDKYKTLRQIRQGNTKQRIDEFEAM

SEQ ID NO: 34905 - protein, 10 aa, Homo sapiens
VYVPIFIPAF

SEQ ID NO: 34906 - protein, 623 aa, Homo sapiens
LGAGRGLGAGREAVTSSRRRKNMAGASELGTGPGAAGGDGDDSLYPIAVLIDELRNEDVQLRLNSIKKLSTIALALGVERTRSELLPFLTDTIYDEDEVLLALAEQLGNFTGLVGGPDFAHCLLPPLENLATVEETVVRDKAVESLRQISQEHTPVALEAYFVPLVKRLASGDWFTSRTSACGLFSVCYPRASNAVKAEIRQQFRSLCSDDTPMVRRAAASKLGEFAKVLELDSVKSEIVPLFTSLASDEQDSVRLLAVEACVSIAQLLSQDDLETLVMPTLRQAAEDKSWRVRYMVADRFSELQKAMGPKITLNDLIPAFQNLLKDCEAEVRAAAAHKVKELGENLPIEDRETIIMNQILPYIKELVSDTNQHVKSALASVIMGLSTILGKENTIEHLLPLFLAQLKDECPDVRLNIISNLDCVNEVIGIRQLSQSLLPAIVELAEDAKWRVRLAIIEYMPLLAGQLGVEFFDEKLNSLCMAWLVDHVYAIREAATNNLMKLVQKFGTEWAQNTIVPKVLVMANDPNYLHRMTTLFCINALSEACGQEITTKQMLPIVLKMAGDQVANVRFNVAKSLQKIGPILDTNALQGEVKPVLQKLGQDEDMDVKYFAQEAISVLALA

SEQ ID NO: 34907 - protein, 192 aa, Homo sapiens
LPMVIWVILSLLGELGKPGLLTSLKNMEQPSKDFCDSHKKSSKSSTYSASSYSSSGKRQNLACFLTNPHCGSLVNADGHGEVWTDWNNMSKFFQYGWRCTTNENTYSNRTLMGNWNQERYDLRNIVQPKPLPSQFGHYFETTYDTSYNNKMPLSTHRFKREPHWFPGHQPELDPPRYKCTEKSTYMNSYSKP

SEQ ID NO: 34908 - protein, 88 aa, Homo sapiens
MPQGLKNNEVLDCFRLLRFSLDEHGFISREFHRKYRIPADVDPLTITSSLSSDGVLTVNGPRKQVSGPERTIPITREEKPAVTAAPKK

SEQ ID NO: 34909 - protein, 193 aa, Homo sapiens
LQLKELTSQLTPHTHLATMDIAIHHPWIRRPFFPFHSPSRLFDQFFGEHLLESDLFPTSTSLSPFYLRPPSFLRAPSWFDTGLSEMRLEKDRFSVNLDVKHFSPEELKVKVLGDVIEVHGKHEERQDEHGFISREFHRKYRIPADVDPLTITSSLSSDGVLTVNGPRKQVSGPERTIPITREEKPAVTAAPKK

SEQ ID NO: 34910 - protein, 173 aa, Homo sapiens
LQLKELTSQLTPHTHLATMDIAIHHPWIRRPFFPFHSPSRLFDQFFGEHLLESDLFPTSTSLSPFYLRPPSFLRAPSWFDTGLSEMRLEKDRFSVNLDVKHFSPEELKVKVLGDVIEVHGKHEERQVCSLFFCFLLIHSVHTVIVQVVLSALEAGYIPVPSHNSRDQGLQINV

SEQ ID NO: 34911 - protein, 23 aa, Homo sapiens
LGLITMSLRYHCGGSLKQTAMFI

SEQ ID NO: 34912 - protein, 20 aa, Homo sapiens
LGMCHIAKSRITSLHELLVS

SEQ ID NO: 34913 - protein, 44 aa, Homo sapiens
MPRSTGLSEFRPGSASGLSPGERSACRSGLGETRQWPGPQVRAE

SEQ ID NO: 34914 - protein, 255 aa, Homo sapiens
LATAWTVSKELSPSAFCPPGCQLWLLKRLPPAAVYTASGRGKEPQTFQIASSRNKLFVAGIKMAAEPVEDNCINFVAMKFIDNTLYFIAEDDENLESDYFGKLESKLSVIRNLNDQVLFIDQGNRPLFEDMTDSDCRDNAPRTIFIISMYKDSQPRGMAVTISVKCEKISTLSCENKIISFKEMNPPDNIKDTKSDIIFFQRSVPGHDNKMQFESSSYEGYFLACEKERDLFKLILKKEDELGDRSIMFTVQNED

SEQ ID NO: 34915 - protein, 262 aa, Homo sapiens
LATAWTVSKELSPSAFCPPGCQLWLLKRLPPAAVYTASGRGKEPQTFQIASSRNKLFVADGSLLSLGIKMAAEPVEDNCINFVAMKFIDNTLYFIAEDDENLESDYFGKLESKLSVIRNLNDQVLFIDQGNRPLFEDMTDSDCRDNAPRTIFIISMYKDSQPRGMAVTISVKCEKISTLSCENKIISFKEMNPPDNIKDTKSDIIFFQRSVPGHDNKMQFESSSYEGYFLACEKERDLFKLILKKEDELGDRSIMFTVQNED

SEQ ID NO: 34916 - protein, 66 aa, Homo sapiens
MSTEGGGRRCQAQVSRRISFSASHRLYSKFLSDEENLKLFGKCNNPNGHGHNYKGERKTDDISALQ

SEQ ID NO: 34917 - protein, 147 aa, Homo sapiens
LHRKKMAYIPSSRTRRQKAEGEPSAPKLEGQMGEDGNSIKVNLIKQDDGGSPIRHYLVRYRALSSEWKPEIRLPSGSDHVMLKSLDWNAEYEVYVVAENQQGKSKAAHFVFRTSAQPTAIPATLGGNSASYTFVSLLFSAVTLLLLC

SEQ ID NO: 34918 - protein, 98 aa, Homo sapiens
LVSCILLAGFSQKLSSEWKPEIRLPSGSDHVMLKSLDWNAEYEVYVVAENQQGKSKAAHFVFRTSAQPTAIPATLGGNSASYTFVSLLFSAVTLLLLC

SEQ ID NO: 34919 - protein, 22 aa, Homo sapiens
LLFIDINKTVIKIITWLLVLEG

SEQ ID NO: 34920 - protein, 103 aa, Homo sapiens
LLMKLSVMMKLLSSEDEVLVGNAALCLGNCMEVPNVASSLLKTDLLQVLLKLAGSDTQKTAVQVNAGIALGKLCTAEPRFAAQLRKLHGLEILNSTMKYISDS

SEQ ID NO: 34921 - protein, 150 aa, Homo sapiens
LATRVTQSALVPVLAMASFVTEVLAHSGRLEKEDLGTRISRLTRRVEEIKGEVCNMISKKYSEFLPSMQSAQGLITQVDKLSEDIDLLKSRIESEIPAVWNLTYKLNFIYTLNNRTKRRRPLCHPSVLSSWHFLFLENYTASLNHLVRCC

SEQ ID NO: 34922 - protein, 19 aa, Homo sapiens
VTEELLFELFHQQVRKDYG

SEQ ID NO: 34923 - protein, 157 aa, Homo sapiens
LRLRQRRLRDWGRGCWSRVMLGGSLGSRLLRGVGGSHGRFGARGVREGGAAMAAGESMAQRMVWVDLEMTGLDIEKDQIIEMACLITDSDLNILAEGPNLIIKQPDELLDSMSDWCKEHHGKVTLPNNRIAALGISSKLFAPTPESDTIVGWYFKKA

SEQ ID NO: 34924 - protein, 256 aa, Homo sapiens
LRLRQRRLRDWGRGCWSRVMLGGSLGSRLLRGVGGSHGRFGARGVREGGAAMAAGESMAQRMVWVDLEMTGLDIEKDQIIEMACLITDSDLNILAEGPNLIIKQPDELLDSMSDWCKEHHGKSGLTKAVKESTITLQQAEYEFLSFVRQQTPPGLCPLAGNSVHEDKKFLDKYMPQFMKHLHYRIIDVSTVKELCRRWYPEEYEFAPKKAASHRALDDISESIKELQFYRNNIFKKKIDEKKRKIIENGENEKTVS

SEQ ID NO: 34925 - protein, 151 aa, Homo sapiens
LLVPGDARRLPGLQAVAGCRWESRTVRGPRCPRRWRSHGGRGEHGSADGLGGPGGNSVHEDKKFLDKYMPQFMKHLHYRIIDVSTVKELCRRWYPEEYEFAPKKAASHRALDDISESIKELQFYRNNIFKKKIDEKKRKIIENGENEKTVS

SEQ ID NO: 34926 - protein, 153 aa, Homo sapiens
LSRTHCGLSSITQVSLLDKSGLTKAVKESTITLQQAEYEFLSFVRQQTPPGLCPLAGNSVHEDKKFLDKYMPQFMKHLHYRIIDVSTVKELCRRWYPEEYEFAPKKAASHRALDDISESIKELQFYRNNIFKKKIDEKKRKIIENGENEKTVS

SEQ ID NO: 34927 - protein, 45 aa, Homo sapiens
MVRALDDISESIKELQFYRNNIFKKKIDEKKRKIIENGENEKTVS

SEQ ID NO: 34928 - protein, 406 aa, Homo sapiens
LSARAPEAANAASLRQVPDMASVVLPSGSQCAAAAAAAAPPGLRLRLLLLLFSAAALIPTGDGQNLFTKDVTVIEGEVATISCQVNKSDDSVIQLLNPNRQTIYFRDFRPLKDSRFQLLNFSSSELKVSLTNVSISDEGRYFCQLYTDPPQESYTTITVLVPPRNLMIDIQKDTAVEGEEIEVNCTAMASKPATTIRWFKGNTELKGKSEVEEWSDMYTVTSQLMLKVHKEDDGVPVICQVEHPAVTGNLQTQRYLEVQYKPQVHIQMTYPLQGLTREGDALELTCEAIGKPQPVMVTWVRVDDEMPQHAVLSGPNLFINNLNKTDNGTYRCEASNIVGKAHSDYMLYVYDSRAGEEGSIRAVDHAVIGGVVAVVVFAMLCLLIILGRYFARHKGLFSLTSSPRIK

SEQ ID NO: 34929 - protein, 448 aa, Homo sapiens
LRQVPDMASVVLPSGSQCAAAAAAAAPPGLRLRLLLLLFSAAALIPTGDGQNLFTKDVTVIEGEVATISCQVNKSDDSVIQLLNPNRQTIYFRDFRPLKDSRFQLLNFSSSELKVSLTNVSISDEGRYFCQLYTDPPQESYTTITVLVPPRNLMIDIQKDTAVEGEEIEVNCTAMASKPATTIRWFKGNTELKGKSEVEEWSDMYTVTSQLMLKVHKEDDGVPVICQVEHPAVTGNLQTQRYLEVQYKPQVHIQMTYPLQGLTREGDALELTCEAIGKPQPVMVTWVRVDDEMPQHAVLSGPNLFINNLNKTDNGTYRCEASNIVGKAHSDYMLYVYDPPTTIPPPTTTTTTTTTTTTTILTIITDSRAGEEGSIRAVDHAVIGGVVAVVVFAMLCLLIILGRYFARHKGTYFTHEAKGADDAADADTAIINAEGGQNNSEEKKEYFI

SEQ ID NO: 34930 - protein, 459 aa, Homo sapiens
LRQVPDMASVVLPSGSQCAAAAAAAAPPGLRLRLLLLLFSAAALIPTGDGQNLFTKDVTVIEGEVATISCQVNKSDDSVIQLLNPNRQTIYFRDFRPLKDSRFQLLNFSSSELKVSLTNVSISDEGRYFCQLYTDPPQESYTTITVLVPPRNLMIDIQKDTAVEGEEIEVNCTAMASKPATTIRWFKGNTELKGKSEVEEWSDMYTVTSQLMLKVHKEDDGVPVICQVEHPAVTGNLQTQRYLEVQYKPQVHIQMTYPLQGLTREGDALELTCEAIGKPQPVMVTWVRVDDEMPQHAVLSGPNLFINNLNKTDNGTYRCEASNIVGKAHSDYMLYVYDPPTTIPPPTTTTTTTTTTTTTILTIITDTTATTEPAVHDSRAGEEGSIRAVDHAVIGGVVAVVVFAMLCLLIILGRYFARHKGTYFTHEAKGADDAADADTAIINAEGGQNNSEEKKEYFI

SEQ ID NO: 34931 - protein, 449 aa, Homo sapiens
LRQVPDMASVVLPSGSQCAAAAAAAAPPGLRLRLLLLLFSAAALIPTGDGQNLFTKDVTVIEGEVATISCQVNKSDDSVIQLLNPNRQTIYFRDFRPLKDSRFQLLNFSSSELKVSLTNVSISDEGRYFCQLYTDPPQESYTTITVLVPPRNLMIDIQKDTAVEGEEIEVNCTAMASKPATTIRWFKGNTELKGKSEVEEWSDMYTVTSQLMLKVHKEDDGVPVICQVEHPAVTGNLQTQRYLEVQYKPQVHIQMTYPLQGLTREGDALELTCEAIGKPQPVMVTWVRVDDEMPQHAVLSGPNLFINNLNKTDNGTYRCEASNIVGKAHSDYMLYVYDTTATTEPAVHGLTQLPNSAEELDSEDLSDSRAGEEGSIRAVDHAVIGGVVAVVVFAMLCLLIILGRYFARHKGTYFTHEAKGADDAADADTAIINAEGGQNNSEEKKEYFI

SEQ ID NO: 34932 - protein, 433 aa, Homo sapiens
LSARAPEAANAASLRQVPDMASVVLPSGSQCAAAAAAAAPPGLRLRLLLLLFSAAALIPTGDGQNLFTKDVTVIEGEVATISCQVNKSDDSVIQLLNPNRQTIYFRDFRPLKDSRFQLLNFSSSELKVSLTNVSISDEGRYFCQLYTDPPQESYTTITVLVPPRNLMIDIQKDTAVEGEEIEVNCTAMASKPATTIRWFKGNTELKGKSEVEEWSDMYTVTSQLMLKVHKEDDGVPVICQVEHPAVTGNLQTQRYLEVQYKPQVHIQMTYPLQGLTREGDALELTCEAIGKPQPVMVTWVRVDDEMPQHAVLSGPNLFINNLNKTDNGTYRCEASNIVGKAHSDYMLYVYDSRAGEEGSIRAVDHAVIGGVVAVVVFAMLCLLIILGRYFARHKGTYFTHEAKGADDAADADTAIINAEGGQNNSEEKKEYFI

SEQ ID NO: 34933 - protein, 490 aa, Homo sapiens
LSARAPEAANAASLRQVPDMASVVLPSGSQCAAAAAAAAPPGLRLRLLLLLFSAAALIPTGDGQNLFTKDVTVIEGEVATISCQVNKSDDSVIQLLNPNRQTIYFRDFRPLKDSRFQLLNFSSSELKVSLTNVSISDEGRYFCQLYTDPPQESYTTITVLVPPRNLMIDIQKDTAVEGEEIEVNCTAMASKPATTIRWFKGNTELKGKSEVEEWSDMYTVTSQLMLKVHKEDDGVPVICQVEHPAVTGNLQTQRYLEVQYKPQVHIQMTYPLQGLTREGDALELTCEAIGKPQPVMVTWVRVDDEMPQHAVLSGPNLFINNLNKTDNGTYRCEASNIVGKAHSDYMLYVYDPPTTIPPPTTTTTTTTTTTTTILTIITDTTATTEPAVHGLTQLPNSAEELDSEDLSDSRAGEEGSIRAVDHAVIGGVVAVVVFAMLCLLIILGRYFARHKGTYFTHEAKGADDAADADTAIINAEGGQNNSEEKKEYFI

SEQ ID NO: 34934 - protein, 333 aa, Homo sapiens
MASVVLPSGSQCAAAAAAAAPPGLRLRLLLLLFSAAALIPTGDGQNLFTKDVTVIEGEVATISCQVNKSDDSVIQLLNPNRQTIYFRDFRPLKDSRFQLLNFSSSELKVSLTNVSISDEGRYFCQLYTDPPQESYTTITVLVPPRNLMIDIQKDTAVEGEEIEVNCTAMASKPATTIRWFKGNTELKGKSEVEEWSDMYTVTSQLMLKVHKEDDGVPVICQVEHPAVTGNLQTQRYLEVQYKPQVHIQMTYPLQGLTREGDALELTCEAIGKPQPVMVTWVRVDDEMPQHAVLSGPNLFINNLNKTDNGTYRCEASNIVGKAHSDYMLYVYGT

SEQ ID NO: 34935 - protein, 289 aa, Homo sapiens
VRPAACPGHSGSPAQGPPRPFRMKAAVLTLAVLFLTGSQARHFWQQDEPPQSPWDRVKDLATVYVDVLKDSGRDYVSQFEGSALGKQLNLKLLDNWDSVTSTFSKLREQLGPVTQEFWDNLEKETEGLRQEMSKDLEEVKAKVQPYLDDFQKKWQEEMELYRQKVEPLRAELQEGARQKLHELQEKLSPLGEEMRDRARAHVDALRTHLAPYSDELRQRLAARLEALKENGGARLAEYHAKATEHLSTLSEKAKPALEDLRQGLLPVLESFKVSFLSALEEYTKKLNTQ

SEQ ID NO: 34936 - protein, 287 aa, Homo sapiens
VRPAACPGHSGSPAQGSGLAPGRASGYLRSSPALCPSPHLAAMSGGARGFCMLKAPHSARPFFSSRSPTALQDESCGADLGRALPDGLKLLDNWDSVTSTFSKLREQLGPVTQEFWDNLEKETEGLRQEMSKDLEEVKAKVQPYLDDFQKKWQEEMELYRQKVEPLRAELQEGARQKLHELQEKLSPLGEEMRDRARAHVDALRTHLAPYSDELRQRLAARLEALKENGGARLAEYHAKATEHLSTLSEKAKPALEDLRQGLLPVLESFKVSFLSALEEYTKKLNTQ

SEQ ID NO: 34937 - protein, 41 aa, Homo sapiens
LNLHRGKRVPGMAILMLLAGSPCTLSFSTDTGSSAPGPKIP

SEQ ID NO: 34938 - protein, 641 aa, Homo sapiens
MACSTPHGSNRRLPRKCHFSLPTRTPTLCTSLRSVSPLCAGSQMGLRASRPSKLTWKKWATTAASNSCSRSVSSCRRCTGGRLMKEPWRRPSSSICYTSRSSTIKFSSNKFKTLSVLLSHLHLFRLHVKISQPSLPISSRGAASSSQFQGLPSRSAIFQQQPENCSSPPNVALTCLGMQQPAQSQQVTIQVQEPVDMLSNMPGTAAGSSGRGISISPSAGQMQMQHRTNLMATLSYGHRPLSKQLSADSAEAHSAHQQPPHYTTSALQQALLSPTPPDYTRHQQVPHILQGLLSPRHSLTGHSDIRLPPTEFAQLIKRQQQQRQQQQQQQQQQEYQELFRHMNQGDAGSLAPSLGGQSMTERQALSYQNADSYHHHTSPQHLLQIRAQECVSQASSPTPPHGYAHQPALMHSESMEEDCSCEGAKDGFQDSKSSSTLTKGCHDSPLLLSTGGPGDPESLLGTVSHAQELGIHPYGHQPTAAFSKNKVPSREPVIGNCMDRSSPGQAVELPDHNGLGYPARPSVHEHHRPRALQRHHTIQNSDDAYVQLDNLPGMSLVAGKALSSARMSDAVLSQSSLMGSQQFQDGENEECGASLGGHEHPDLSDGSQHLNSSCYPSTCITDILLSYKHPEVSFSMEQAGV

SEQ ID NO: 34939 - protein, 1265 aa, Homo sapiens
LHNKMAAAAASGAGGAAGAGTGGAGPAGRLLPPPAPGSPAAPAAVSPAAGQPRPPAPASRGPMPARIGYYEIDRTIGKGNFAVVKRATHLVTKAKVAIKIIDKTQLDEENLKKIFREVQIMKMLCHPHIIRLYQVMETERMIYLVTEYASGGEIFDHLVAHGRMAEKEARRKFKQIVTAVYFCHCRNIVHRDLKAENLLLDANLNIKIADFGFSNLFTPGQLLKTWCGSPPYAAPELFEGKEYDGPKVDIWSLGVVLYVLVCGALPFDGSTLQNLRARVLSGKFRIPFFMSTECEHLIRHMLVLDPNKRLSMEQICKHKWMKLGDADPNFDRLIAECQQLKEERQVDPLNEDVLLAMEDMGLDKEQTLQAEQAGTAMNISVPQVQLINPENQIVEPDGTLNLDSDEGEEPSPEALVRYLSMRRHTVGVADPRTEVMEDLQKLLPGFPGVNPQAPFLQVAPNVNFMHNLLPMQNLQPTGQLEYKEQSLLQPPTLQLLNGMGPLGRRASDGGANIQLHAQQLLKRPRGPSPLVTMTPAVPAVTPVDEESSDGEPDQEAVQRYLANRSKRHTLAMTNPTAEIPPDLQRQLGQQPFRSRVWPPHLVPDQHRSTYKDSNTLHLPTERFSPVRRFSDGAASIQAFKAHLEKMGNNSSIKQLQQECEQLQKMYGGQIDERTLEKTQQQHMLYQQEQHHQILQQQIQDSICPPQPSPPLQAACENQPALLTHQLQRLRIQPSSPPPNHPNNHLFRQPSNSPPPMSSAMIQPHGAASSSQFQGLPSRSAIFQQQPENCSSPPNVALTCLGMQQPAQSQQVTIQVQEPVDMLSNMPGTAAGSSGRGISISPSAGQMQMQHRTNLMATLSYGHRPLSKQLSADSAEAHSAHQQPPHYTTSALQQALLSPTPPDYTRHQQVPHILQGLLSPRHSLTGHSDIRLPPTEFAQLIKRQQQQRQQQQQQQQQQEYQELFRHMNQGDAGSLAPSLGGQSMTERQALSYQNADSYHHHTSPQHLLQIRAQECVSQASSPTPPHGYAHQPALMHSESMEEDCSCEGAKDGFQDSKSSSTLTKGCHDSPLLLSTGGPGDPESLLGTVSHAQELGIHPYGHQPTAAFSKNKVPSREPVIGNCMDRSSPGQAVELPDHNGLGYPARPSVHEHHRPRALQRHHTIQNSDDAYVQLDNLPGMSLVAGKALSSARMSDAVLSQSSLMGSQQFQDGENEECGASLGGHEHPDLSDGSQHLNSSCYPSTCITDILLSYKHPEVSFSMEQAGV

SEQ ID NO: 34940 - protein, 197 aa, Homo sapiens
LVLGPEEGRAGAGPTGPSERPTRHPPTPQPLGARTDPLLQCRMSQGDSNPAAIPHAAEDIQGDDRWMSQHNRFVLDCKDKEPDVLFVGDSMVQLMQQYEIWRELFSPLHALNFGIGGDTTRHVLWRLKNGELENIKPKVIVVWVGTNNHENTAEEVAGGIEAIVQLINTRQPQAKIIVLIIYWQDEQDYHERKVQMD

SEQ ID NO: 34941 - protein, 31 aa, Homo sapiens
VLLTLDDDLDTKGASGRDVLFPSTCPVLASL

SEQ ID NO: 34942 - protein, 60 aa, Homo sapiens
MLRETPEIQVDSPGARGRRESRLREGRRPGWAGSPLGRLQGQSGPWRSEGEEQRVAFKGL

SEQ ID NO: 34943 - protein, 105 aa, Homo sapiens
MLRETPEIQVDSPGARGRRESRLREGRRPGWAGSPLGRLQGQSGPWRSEGEEQRVAFKGRNRNALYRGRHEGEPSEEGPCGRCPEDSGRRSPRVQPPAPARPLPA

SEQ ID NO: 34944 - protein, 39 aa, Homo sapiens
LWESNWTIAGLGSVFLVIGSLFPPNLPLELCSQGAKRNR

SEQ ID NO: 34945 - protein, 127 aa, Homo sapiens
MAQALPWLLLWMGAGVLPAHGTQHGIRLPLRSGLGGAPLGLRLPRETDEEPEEPGRRGSFVEMVDNLRGKSGQGYYVEMTVGSPPQTLNILVDTGSSNFAVGAAPHPFLHRYYQRQLSSTYRDLRKA

SEQ ID NO: 34946 - protein, 844 aa, Homo sapiens
MPFPTHGRRSTEPVAPPEQLSEAALKAMEEAVAQVLEQDQRHLLESKQEKMQQLREKLCQEEEEEILRLHQQKEQSLSSLRERLQKAIEEEEARMREEESQRLSWLRAQVQSSTQADEDQIRAEQEASLQKLREELESQQKAERASLEQKNRQMLEQLKEEIEASEKSEQAALNAAKEKALQQLREQLEGERKEAVATLEKEHSAELERLCSSLEAKHREVVSSLQKKIQEAQQKEEAQLQKCLGQVEHRVHQKSYHVAGYEHELSSLLREKRQEVEGEHERRLDKMKEEHQQVMAKAREQYEAEERKQRAELLGHLTGELERLQRAHERELETVRQEQHKRLEDLRRRHREQERKLQDLELDLETRAKDVKARLALLEVQEETARREKQQLLDVQRQVALKSEEATATHQQLEEAQKEHTHLLQSNQQLREILDELQARKLKLESQVDLLQAQSQQLQKHFSSLEAEAQKKQHLLREVTVEENNASPHFEPDLHIEDLRKSLGTNQTKEVSSSLSQSKEDLYLDSLSSHNVWHLLSAEGVALRSAKEFLVQQTRSMRRRQTALKAAQQHWRHELASAQEVAKDPPGIKALEDMRKNLEKETRHLDEMKSAMRKGHNLLKKKEEKLNQLESSLWEEASDEGTLGGSPTKKAVTFDLSDMDSLSSESSESFSPPHLDSTPSLTSRKIHGLSHSLRQISSQLSSVLSILDSLNPQSPPPLLASMPAQLPPRDPKSTPTPTYYGSLARFSALSSATPTSTQWAWDSGQGPRLPSSVAQTVDDFLLEKWRKYFPCKPHSGRSLPTCLLLLLFLPFLLPSFSCSFSPLPLLHPFATPLLPQRYHSPLVH

SEQ ID NO: 34947 - protein, 99 aa, Homo sapiens
MELVLVFLCSLLAPMVLASAAEKEKEMDPFHYGERWQPWVQGSGGMQPCLAGGVGGTDTLSLAPSSLTLGSFGRLPDPEDWGTGVRCGPLLGWDPPYPK

SEQ ID NO: 34948 - protein, 74 aa, Homo sapiens [sequence omitted]

SEQ ID NO: 34949 - protein, 389 aa, Homo sapiens
LKVESSMFCPLKLILLPVLLDYSLGLNDLNVSPPELTVHVGDSALMGCVFQSTEDKCIFKIDWTLSPGEHAKDEYVLYYYSNLSVPIGRFQNRVHLMGDILCNDGSLLLQDVQEADQGTYICEIRLKGESQVFKKAVVLHVLPEEPKELMVHVGGLIQMGCVFQSTEVKHVTKEEIVFRYYHKLRMSVEYSQSWGHFQNRVNLVGDIFRNDGSIMLQGVRESDGGNYTCSIHLGNLVFKKTIVLHVSPEEPRTLVTPAALRPLVLGGNQLVIIVGIVCATILLLPVLILIVKKTCGNKSSVNSTVLVKNTKKTNPEIKEKPCHFERCEGEKHIYSPIIVREVIEEEEPSEKSEATYMTMHPVWPSLRSDRNNSLEKKSGGGMPKTQQAF

SEQ ID NO: 34950 - protein, 391 aa, Homo sapiens
VHCLPWVLFILDYSLGLNDLNVSPPELTVHVGDSALMGCVFQSTEDKCIFKIDWTLSPGEHAKDEYVLYYYSNLSVPIGRFQNRVHLMGDILCNDGSLLLQDVQEADQGTYICEIRLKGESQVFKKAVVLHVLPEEPKELMVHVGGLIQMGCVFQSTEVKHVTKVEWIFSGRRAKEEIVFRYYHKLRMSVEYSQSWGHFQNRVNLVGDIFRNDGSIMLQGVRESDGGNYTCSIHLGNLVFKKTIVLHVSPEEPRTLVTPAALRPLVLGGNQLVIIVGIVCATILLLPVLILIVKKTCGNKSSVNSTVLVKNTKKTNPEIKEKPCHFERCEGEKHIYSPIIVREVIEEEEPSEKSEATYMTMHPVWPSLRSDRNNSLEKKSGGGMPKTQQAF

SEQ ID NO: 34951 - protein, 52 aa, Homo sapiens
MQSGTHWRVLGLCLLSVGVWGQDGNEEMGGITQTREFIGLLFMPCLRMQIGG

SEQ ID NO: 34952 - protein, 140 aa, Homo sapiens
MQSGTHWRVLGLCLLSVGVWGQDGNEEMGGITQTPYKVSISGTTVILTCPQYPGSEILWQHNDKNIGGDEDDKNIGSDEDHLSLKEFSELEQSGYYVCYPRGSKPEDANFYLYLRARGNPGLQNRYHRLFREDHSKGHSQ

SEQ ID NO: 34953 - protein, 119 aa, Homo sapiens
MAFMHSLLTSSALCFPCLVISPLPTPPPTVCENCMEMDVMSVATIVIVDICITGGLLLLVYYWSKNRKAKAKPVTRGAGAGGRQRGQNKERPPPVPNPDYEPIRKGQRDLYSGLNQRRI

SEQ ID NO: 34954 - protein, 61 aa, Homo sapiens
LDEFRWEMEHSTFLSGLVLATLLSQAADTQALLRNDQVYQPLRDRDDAQYSHLGGNWARNK

SEQ ID NO: 34955 - protein, 134 aa, Homo sapiens
LDEFRWEMEHSTFLSGLVLATLLSQVSPFKIPIEELEDRVFVNCNTSITWVEGTVGTLLSDITRLDLGKRILDPRGIYRCNGTDIYKDKESTVQVHYRTADTQALLRNDQVYQPLRDRDDAQYSHLGGNWARNK

SEQ ID NO: 34956 - protein, 184 aa, Homo sapiens
VTWLYLLDEFRWEMEHSTFLSGLVLATLLSQVSPFKIPIEELEDRVFVNCNTSITWVEGTVGTLLSDITRLDLGKRILDPRGIYRCNGTDIYKDKESTVQVHYRMCQSCVELDPATVAGIIVTDVIATLLLALGVFCFAGHETGRLSGAADTQALLRNDQVYQPLRDRDDAQYSHLGGNWARNK

SEQ ID NO: 34957 - protein, 31 aa, Homo sapiens
MEQGKGLAVLILAIILLQGTLAQSIKGEAGP

SEQ ID NO: 34958 - protein, 28 aa, Homo sapiens
MEQGKGLAVLILAIILLQGTLAQSIKGV

SEQ ID NO: 34959 - protein, 272 aa, Homo sapiens
LLTALLTSLVLLILLGVNGLRMLGILHDAVVFLIEQLSGAKHCRNYKFRFHKPEEANEPPLNPHGSARAEVHLRKSAFDMFNFLASKHRQPPEYNPNDEEEEEVQLKSARRATSMDLPMPMRFRHLKKTSKEAVGVYRSPIHGRGLFCKRNIDAGEMVIEYAGNVIRSIQTDKREKYYDSKGIGCYMFRIDDSEVVDATMHGNAARFINHSCEPNCYSRVINIDGQKHIVIFAMRKIYRGEELTYDYKFPIEDASNKLPCNCGAKKCRKFLN

SEQ ID NO: 34960 - protein, 67 aa, Homo sapiens
LGSLLSCDLKNFVWWLCWNIVTVFTVMQGAQHCGQDGRDFLVIMEKCQQGTGKSTLPRPHLPSSFCP

SEQ ID NO: 34961 - protein, 73 aa, Homo sapiens
LGVILCFISFILKQYKVMEQMVLCRIMNTSQVTHSGNLQLFVCFGFQININMIYIGTNIVMHHVTKPSSVHGF

SEQ ID NO: 34962 - protein, 127 aa, Homo sapiens
MALPPGPAALRHTLLLLPALLSSGWGELEPQIDGQTWAERALRENERHAFTCRVAGGPGTPRLAWYLDGQLQEASTSRLLSVGGEAFSGGTSTFTVTAHRAQHELNCSLQDPRSGRSANASVILNVQ

SEQ ID NO: 34963 - protein, 131 aa, Homo sapiens
MALPPGPAALRHTLLLLPALLSSGWGELEPQIDGQTWAERALRENERHAFTCRVAGGPGTPRLAWYLDGQLQEASTSRLLSVGGEAFSGGTSTFTVTAHRAQHELNCSLQDPRSGRSANASVILNVQCEWP

SEQ ID NO: 34964 - protein, 282 aa, Homo sapiens
MALPPGPAALRHTLLLLPALLSSGWGELEPQIDGQTWAERALRENERHAFTCRVAGGPGTPRLAWYLDGQLQEASTSRLLSVGGEAFSGGTSTFTVTAHRAQHELNCSLQDPRSGRSANASVILNVQFKPEIAQVGAKYQEAQGPGLLVVLFALVRANPPANVTWIDQDGPVTVNTSDFLVLDAQNYPWLTNHTVQLQLRSLAHNLSVVATNDVGVTSASLPAPGLLATRVEVPLLGIVVAAGLALGTLVGFSTLVACLVCRKEKKTKGRPGTLGAVWMRSG

SEQ ID NO: 34965 - protein, 521 aa, Homo sapiens [sequence omitted]

SEQ ID NO: 34966 - protein, 373 aa, Homo sapiens
MDALNRNQIGPGCQTQTMVQKGPLDLIETGKGLKVQTDKPHLVSLGSGRLSTAITLLPLEEGRTVIGSAARDISLQGPGLAPEHCYIENLRGTLTLYPCGNACTIDGLPVRQPTRLTQGCMLCLGQSTFLRFNHPAEAKWMKSMIPAGGRAPGPPYSPVPESESLVNGNHTPQTATRGPSACASHSSLVSSIEKDLQEIMDSLVLEEPGAAGKKPAATSPLSPMANGGRYLLSPPTSPGAMSVGSSYENTSPAFSPLSSPASSGSCASHSPSGQEPGPSVPPLVPARSSSYHLALQPPQSRPSGARSESPRLSRKGGHERPPSPGLRGLLTDSPAATVLAEARRATESPRLGGQLPVVAISLSEYPASARRCT

SEQ ID NO: 34967 - protein, 595 aa, Homo sapiens
VPGLAHSVTVTATMPGRTWELCLLLLLGLGLGSQEALPPPCESEIYCHGELLNQVQMAKLYQDDKQFVDMPLSIAPEQVLQTFTELSRDHNHSIPREQLQAFVHEHFQAKGQELQPWTPADWKDSPQFLQKISDAKLRAWAGQLHQLWKKLGKKMKPEVLSHPERFSLIYSEHPFIVPGGRFVEFYYWDSYWVMEGLLLSEMAETVKGMLQNFLDLVKTYGHVPNGGRVYYLQRSQPPLLTLMMDCYLTHTNDTAFLQENIETLALELDFWTKNRTVSVSLEGKNYLLNRYYVPYGGPRPESYSKDVELADTLPEGDREALWAELKAGAESGWDFSSRWLIGGPNPNSLSGIRTSKLVPVDLNAFLCQAEELMSNFYSRLGNDSQATKYRILRSQRLAALNTVLWDEQTGAWFDYDLEKKKKNREFYPSNLTPLWAGCFSDPGVADKALKYLEDNRILTYQYGIPTSLQKTGQQWDFPNAWAPLQDLVIRGLAKAPLRRAQEVAFQLAQNWIRTNFDVYSQKSAMYEKYDVSNGGQPGGGGEYEVQEGFGWTNGVVLMLLDRYGDRLTSGPSWLSWSPTAWGHPSAQPPASLLPW

SEQ ID NO: 34968 - protein, 564 aa, Homo sapiens
VPGLAHSVTVTATMPGRTWELCLLLLLGLGLGSQEALPPPCESEIYCHGELLNQVQMAKLYQDDKQFVDMPLSIAPEQVLQTFTELSRDHNHSIPREQLQAFVHEHFQAKGQELQPWTPADWKDSPQFLQKISDAKLRAWAGQLHQLWKKLGKKMKPEVLSHPERFSLIYSEHPFIVPGGRFVEFYYCYGHVPNGGRVYYLQRSQPPLLTLMMDCYLTHTNDTAFLQENIETLALELDFWTKNRTVSVSLEGKNYLLNRYYVPYGGPRPESYSKDVELADTLPEGDREALWAELKAGAESGWDFSSRWLIGGPNPNSLSGIRTSKLVPVDLNAFLCQAEELMSNFYSRLGNDSQATKYRILRSQRLAALNTVLWDEQTGAWFDYDLEKKKKNREFYPSNLTPLWAGCFSDPGVADKALKYLEDNRILTYQYGIPTSLQKTGQQWDFPNAWAPLQDLVIRGLAKAPLRRAQEVAFQLAQNWIRTNFDVYSQKSAMYEKYDVSNGGQPGGGGEYEVQEGFGWTNGVVLMLLDRYGDRLTSGPSWLSWSPTAWGHPSAQPPASLLPW

SEQ ID NO: 34969 - protein, 53 aa, Homo sapiens
LGGMLLSLWVFHLLFWNYEDLKELRHFLFLTGEEKKAEKKEYTFFVPLVCTVC

SEQ ID NO: 34970 - protein, 27 aa, Homo sapiens
VQESKLLLLTVQRLTGACLHCNKGLIY

SEQ ID NO: 34971 - protein, 183 aa, Homo sapiens [sequence omitted]

SEQ ID NO: 34972 - protein, 26 aa, Homo sapiens
MDPQILRVPATRILLLTLQWKSQQPC

SEQ ID NO: 34973 - protein, 106 aa, Homo sapiens
LFPLFSGDCSFPPFLSHHAMSILSGQCLQSLSYQVWFLSAYLCSFLPLRASLALSLPSPFPSSSFPPGFPWLPAANWAVLCPLPKSLYLWIGGSKSGRILTRISHP

SEQ ID NO: 34974 - protein, 706 aa, Homo sapiens
VGGAAGLVGTFVPRLSQSWGRRSGGKRGTMADKVRRQRPRRRVCWALVAVLLADLLALSDTLAVMSVDLGSESMKVAIVKPGVPMEIVLNKESRRKTPVIVTLKENERFFGDSAASMAIKNPKATLRYFQHLLGKQADNPHVALYQARFPEHELTFDPQRQTVHFQISSQLQFSPEEVLGMVLNYSRSLAEDFAEQPIKDAVITVPVFFNQAERRAVLQAARMAGLKVLQLINDNTATALSYGVFRRKDINTTAQNIMFYDMGSGSTVCTIVTYQMVKTKEAGMQPQLQIRGVGFDRTLGGLEMELRLRERLAGLFNEQRKGQRAKDVRENPRAMAKLLREANRLKTVLSANADHMAQIEGLMDDVDFKAKVTRVEFEELCADLFERVPGPVQQALQSAEMSLDEIEQVILVGGATRVPRVQEVLLKAVGKEELGKNINADEAAAMGAVYQAAALSKAFKVKPFVVRDAVVYPILVEFTREVEEEPGIHSLKHNKRVLFSRMGPYPQRKVITFNRYSHDFNFHINYGDLGFLGPEDLRVFGSQNLTTVKLKGVGDSFKKYPDYESKGIKAHFNLDESGVLSLDRVESVFETLVEDSAEEESTLTKLGNTISSLFGGGTTPDAKENGTDTVQEEEESPAEGSKDEPGEQVELKEEAEAPVEDGSQPPPPEPKGDATPEGEKATEKENGDKSEAQASVCRASVTRFGF

SEQ ID NO: 34975 - protein, 707 aa, Homo sapiens
VGGAAGLVGTFVPRLSQSWGRRSGGKRGTMADKVRRQRPRRRVCWALVAVLLADLLALSDTLAVMSVDLGSESMKVAIVKPGVPMEIVLNKESRRKTPVIVTLKENERFFGDSAASMAIKNPKATLRYFQHLLGKQADNPHVALYQARFPEHELTFDPQRQTVHFQISSQLQFSPEEVLGMVLNYSRSLAEDFAEQPIKDAVITVPVFFNQAERRAVLQAARMAGLKVLQLINDNTATALSYGVFRRKDINTTAQNIMFYDMGSGSTVCTIVTYQMVKTKEAGMQPQLQIRGVGFDRTLGGLEMELRLRERLAGLFNEQRKGQRAKDVRENPRAMAKLLREANRLKTVLSANADHMAQIEGLMDDVDFKAKVTRVEFEELCADLFERVPGPVQQALQSAEMSLDEIEQVILVGGATRVPRVQEVLLKAVGKEELGKNINADEAAAMGAVYQAAALSKAFKVKPFVVRDAVVYPILVEFTREVEEEPGIHSLKHNKRVLFSRMGPYPQRKVITFNRYSHDFNFHINYGDLGFLGPEDLRVFGSQNLTTVKLKGVGDSFKKYPDYESKGIKAHFNLDESGVLSLDRVESVFETLVEDSAEEESTLTKLGNTISSLFGGGTTPDAKENGTDTVQEEEESPAEGSKDEPGEQVELKEEAEAPVEDGSQPPPPEPKGDATPEGEKATEKENGDKSEAQKPVVCRASVTRFGF

SEQ ID NO: 34976 - protein, 1028 aa, Homo sapiens
VGGAAGLVGTFVPRLSQSWGRRSGGKRGTMADKVRRQRPRRRVCWALVAVLLADLLALSDTLAVMSVDLGSESMKVAIVKPGVPMEIVLNKESRRKTPVIVTLKENERFFGDSAASMAIKNPKATLRYFQHLLGKQADNPHVALYQARFPEHELTFDPQRQTVHFQISSQLQFSPEEVLGMVLNYSRSLAEDFAEQPIKDAVITVPVFFNQAERRAVLQAARMAGLKVLQLINDNTATALSYGVFRRKDINTTAQNIMFYDMGSGSTVCTIVTYQMVKTKEAGMQPQLQIRGVGFDRTLGGLEMELRLRERLAGLFNEQRKGQRAKDVRENPRAMAKLLREANRLKTVLSANADHMAQIEGLMDDVDFKAKVTRVEFEELCADLFERVPGPVQQALQSAEMSLDEIEQVILVGGATRVPRVQEVLLKAVGKEELGKNINADEAAAMGAVYQAAALSKAFKVKPFVVRDAVVYPILVEFTREVEEEPGIHSLKHNKRVLFSRMGPYPQRKVITFNRYSHDFNFHINYGDLGFLGPEDLRVFGSQNLTTVKLKGVGDSFKKYPDYESKGIKAHFNLDESGVLSLDRVESVFETLVEDSAEEESTLTKLGNTISSLFGGGTTPDAKENGTDTVQEEEESPAEGSKDEPGEQVELKEEAEAPVEDGSQPPPPEPKGDATPEGEKATEKENGDKSEAQKPSEKAEAGPEGVAPAPEGEKKQKPARKRRMVEEIGVELVVLDLPDLPEDKLAQSVQKLQDLTLRDLEKQEREKAANSLEAFIFETQDKLYQPEYQEVSTEEQREEISGKLSAASTWLEDEGVGATTVMLKEKLAELRKLCQGLFFRVEERKKWPERLSALDNLLNHSSMFLKGARLIPEMDQIFTEVEMTTLEKVINETWAWKNATLAEQAKLPATEKPVLLSKDIEAKMMALDREVQYLLNKAKFTKPRPRPKDKNGTRAEPPLNASASDQGEKVIPPAGQTEDAEPISEPEKVETGSEPGDTEPLELGGPGAEPEQKEQSTGQKRPLKNDEL

SEQ ID NO: 34977 - protein, 966 aa, Homo sapiens
VGGAAGLVGTFVPRLSQSWGRRSGGKRGTMADKVRRQRPRRRVCWALVAVLLADLLALSDTLAVMSVDLGSESMKVAIVKPGVPMEIVLNKESRRKTPVIVTLKENERFFGDSAASMAIKNPKATLRYFQHLLGKQADNPHVALYQARFPEHELTFDPQRQTVHFQISSQLQFSPEEVLGMVLNYSRSLAEDFAEQPIKDAVITVPVFFNQAERRAVLQAARMAGLKVLQLINDNTATALSYGVFRRKDINTTAQNIMFYDMGSGSTVCTIVTYQMVKTKEAGMQPQLQIRGVGFDRTLGGLEMELRLRERLAGLFNEQRKGQRAKDVRENPRAMAKLLREANRLKTVLSANADHMAQIEGLMDDVDFKAKVTRVEFEELCADLFERVPGPVQQALQSAEMSLDEIEQVILVGGATRVPRVQEVLLKAVGKEELGKNINADEAAAMGAVYQAAALSKAFKVKPFVVRDAVVYPILVEFTREVEEEPGIHSLKHNKRVLFSRMGPYPQRKVITFNRYSHDFNFHINYGDLGFLGPEDLRVFGSQNLTTVKLKGVGDSFKKYPDYESKGIKAHFNLDESGVLSLDRVESVFETLVEDSAEEESTLTKLGNTISSLFGGGTTPDAKENGTDTVQKPSEKAEAGPEGVAPAPEGEKKQKPARKRRMVEEIGVELVVLDLPDLPEDKLAQSVQKLQDLTLRDLEKQEREKAANSLEAFIFETQDKLYQPEYQEVSTEEQREEISGKLSAASTWLEDEGVGATTVMLKEKLAELRKLCQGLFFRVEERKKWPERLSALDNLLNHSSMFLKGARLIPEMDQIFTEVEMTTLEKVINETWAWKNATLAEQAKLPATEKPVLLSKDIEAKMMALDREVQYLLNKAKFTKPRPRPKDKNGTRAEPPLNASASDQGEKVIPPAGQTEDAEPISEPEKVETGSEPGDTEPLELGGPGAEPEQKEQSTGQKRPLKNDEL

SEQ ID NO: 34978 - protein, 169 aa, Homo sapiens
VGGAAGLVGTFVPRLSQSWGRRSGGKRGTMADKVRRQRPRRRVCWALVAVLLADLLALSDTLAVMSVDLGSESMKVAIVKPGVPMEIVLNKESRRKTPVIVTLKENERFFGDSAASMAIKNPKATLRYFQHLLGKQADNPHVALYQARFPEHELTFDPQRQTVHFQISS

SEQ ID NO: 34979 - protein, 67 aa, Homo sapiens
VGGAAGLVGTFVPRLSQSWGRRSGGKRGTMADKVRRQRPRRRVCWALVAVLLADLLALSGNLGGKHR

SEQ ID NO: 34980 - protein, 91 aa, Homo sapiens
VGGAAGLVGTFVPRLSQSWGRRSGGKRGTMADKVRRQRPRRRVCWALVAVLLADLLALSDTLAVMSVDLGSESMKVAIVKPGVPMEIVLNK

SEQ ID NO: 34981 - protein, 49 aa, Homo sapiens
VGGAAGLVGTFVPRLSQSWGRRSGGKRDVAKPRTHALSLGPLCGRCWDD

SEQ ID NO: 34982 - protein, 30 aa, Homo sapiens
VGGAAGLVGTFVPRLSQSWGRRSGGKSFSV

SEQ ID NO: 34983 - protein, 27 aa, Homo sapiens
VGGAAGLVGTFVPRLSQSWGRRSGGKR

SEQ ID NO: 34984 - protein, 210 aa, Homo sapiens
MRVIRVGTRKSQLARIQTDSVVATLKASYPGLQFEIIAMSTTGDKILDTALSKIGEKSLFTKELEHALEKNEVDLVVHSLKDLPTVLPPGFTIGAICKRENPHDAVVFHPKFVGKTLETLPEKSVVGTSSLRRAAQLQRKFPHLEFRSIRGNLNTRLRKLDEQQEFSAIILATAGLQRMGWHNRVGQVGPAPILSPAHLHLLSALQSSPI

SEQ ID NO: 34985 - protein, 56 aa, Homo sapiens
LFFFLLVFSKGLFSEFPPVSGRPERATWWGQQESVRIPEEKVTLRRQSQGRLVSSL

SEQ ID NO: 34986 - protein, 41 aa, Homo sapiens
VSVCHRYLPAFKVLDHFMRIFPLTGCCEDTPGSVPEIARQD

SEQ ID NO: 34987 - protein, 560 aa, Homo sapiens
LHSSLGNKSETLSEKKKKKIISSAEKPWSKWWCMVYIVRQFLLYNVSGSVYLDQLIVLLTAKFSILRIAGSRVHHSPFSGHLDGCSFLSLQHSLHTSLDMSRHENVFLGLTLSSKSAGLKGFQLAFVPGLLQGTGGYLDGPLPTPVDNPRVGLEVGLRLSLPPLPPCPGVHIQSSQTVESSGLYTLQSILKAQLVKEDKDAQFYCELNYRLPSGNHMKESREVTVPVFYPTEKVWLEVEPVGMLKEGDRVEIRCLADGNPPPHFSISKQNPSTREAEEETTNDNGVLVLEPARKEHSGRYECQGLDLDTMISLLSEPQELLVNYVSDVRVSPAAPERQEGSSLTLTCEAESSQDLEFQWLREETGQVLERGPVLQLHDLKREAGGGYRCVASVPSIPGLNRTQLVNVAIFGPPWMAFKERKVWVKENMVLNLSCEASGHPRPTISWNVNGTASEQDQDPQRVLSTLNVLVTPELLETGVECTASNDLGKNTSILFLELVNLTTLTPDSNTTTGLSTSTASPHTRANSTSTGKPGLAREQGCARASFLPCPSPESPVQKGE

SEQ ID NO: 34988 - protein, 543 aa, Homo sapiens
LALALRPGSMGLPRLVCAFLLAACCCCPRVAGVPGEAEQPAPELVEVEVGSTALLKCGLSQSQGNLSHVDWFSVHKEKRTLIFRVRQGQGQSEPGEYEQRLSLQDRGATLALTQVTPQDERIFLCQGKRPRSQEYRIQLRVYKAPEEPNIQVNPLGIPVNSKEPEEVATCVGRNGYPIPQVIWYKNGRPLKEEKNRVHIQSSQTVESSGLYTLQSILKAQLVKEDKDAQFYCELNYRLPSGNHMKESREVTVPVFYPTEKVWLEVEPVGMLKEGDRVEIRCLADGNPPPHFSISKQNPSTREAEEETTNDNGVLVLEPARKEHSGRYECQGLDLDTMISLLSEPQELLVNYVSDVRVSPAAPERQEGSSLTLTCEAESSQDLEFQWLREETGQVLERGPVLQLHDLKREAGGGYRCVASVPSIPGLNRTQLVNVAIFGPPWMAFKERKVWVKENMVLNLSCEASGHPRPTISWNVNGTASEQDQDPQRVLSTLNVLVTPELLETGVECTASNDLGKNTSILFLELGEGCIPAGDGRGRPRHGQ

SEQ ID NO: 34989 - protein, 68 aa, Homo sapiens
LALALRPGSMGLPRLVCAFLLAACCCCPRVAASAGAVRCSVSAQSLLGSKDLGSPGRGEGWPRCARRG

SEQ ID NO: 34990 - protein, 37 aa, Homo sapiens
LALALRPGSMGLPRLVCAFLLAACCCCPRVAGYCLPG

SEQ ID NO: 34991 - protein, 33 aa, Homo sapiens
LVGPMEETGSLKFQCRDPTSLSQLTPSPQSLKP

SEQ ID NO: 34992 - protein, 74 aa, Homo sapiens
LQVRPPQTQYVCPQWTHSHLQHTHAQACVHACTHACMHSQMATQHRCGRGNGLILLKAIKEKRISQCPGCKRAL

SEQ ID NO: 34993 - protein, 363 aa, Homo sapiens
VQNTGSQRWSPGPRSRAGAAPSPPRGRRGRPAERYPRASAPPRGRPRGQGPRRSGSRAPRTSPQLWAKFACASPRPHAARRGRGRQRPPGMRLPGVPLARPALLLLLPLLAPLLGTGAPAELRVRVRLPDGQVTEESLQADSDADSISLELRKPDGTLVSFTADFKKDVKVFRALILGELEKGQSQFQALCFVTQLQHNEIIPSEAMAKLRQKNPRAVRQAEEVRGLEHLHMDVAVNFSQGALLSPHLHNVCAEAVDAIYTRQEDVRFWLEQGVDSSVFEALPKASEQAELPRCRQVGDHGKPCVCRYGLSLAWYPCMLKYCHSRDRPTPYKCGIRSCQKSYSFDFYVPQRQLCLWDEDPYPG

SEQ ID NO: 34994 - protein, 238 aa, Homo sapiens
LARPALLLLLPLLAPLLGTGAPAELRVRVRLPDGQVTEESLQADSDADSISLELRKPDGTLVSFTADFKKLQHNEIIPSEAMAKLRQKNPRAVRQAEEVRGLEHLHMDVAVNFSQGALLSPHLHNVCAEAVDAIYTRQEDVRFWLEQGVDSSVFEALPKASEQAELPRCRQVGDHGKPCVCRYGLSLAWYPCMLKYCHSRDRPTPYKCGIRSCQKSYSFDFYVPQRQLCLWDEDPYPG

SEQ ID NO: 34995 - protein, 18 aa, Homo sapiens
VPRVGLVLHSVAAALICL

SEQ ID NO: 34996 - protein, 765 aa, Homo sapiens
MPRVSAPLVLLPAWLVMVACSPHSLRIAAILDDPMECSRGERLSITLAKNRINRAPERLGKAKVEVDIFELLRDSEYETAETMCQILPKGVVAVLGPSSSPASSSIISNICGEKEVPHFKVAPEEFVKFQFQRFTTLNLHPSNTDISVAVAGILNFFNCTTACLICAKAECLLNLEKLLRQFLISKDTLSVRMLDDTRDPTPLLKEIRDDKTATIIIHANASMSHTILLKAAELGMVSAYYTYIFTNLEFSLQRMDSLVDDRVNILGFSIFNQSHAFFQEFAQSLNQSWQENCDHVPFTGPALSSALLFDAVYAVVTAVQELNRSQEIGVKPLSCGSAQIWQHGTSLMNYLRMVELEGLTGHIEFNSKGQRSNYALKILQFTRNGFRQIGQWHVAEGLSMDSHLYASNISDTLFNTTLVVTTILENPYLMLKGNHQEMEGNDRYEGFCVDMLKELAEILRFNYKIRLVGDGVYGVPEANGTWTGMVGELIARKADLAVAGLTITAEREKVIDFSKPFMTLGISILYRVHMGRKPGYFSFLDPFSPGVWLFMLLAYLAVSCVLFLVARLTPYEWYSPHPCAQGRCNLLVNQYSLGNSLWFPVGGFMQQGSTIAPRALSTRCVSGVWWAFTLIIISSYTANLAAFLTVQRMDVPIESVDDLADQTAIEYGTIHGGSSMTFFQNSRYQTYQRMWNYMYSKQPSVFVKSTEEGIARVLNSNYAFLLESTMNEYYRQRNCNLTQIGGLLDTKGYGIGMPVGMRERNSLFG

SEQ ID NO: 34997 - protein, 55 aa, Homo sapiens
LSQSALPSFLRSTQCWKAMSAKEKGKSADRAKVEKTCYEREMKPVSLLKGRQKKS

SEQ ID NO: 34998 - protein, 41 aa, Homo sapiens
LPGTTMNDTRASLKRKQRNKRKTRNRILHRKGTRMGRPPSP

SEQ ID NO: 34999 - protein, 41 aa, Homo sapiens
LLRNGARNAFLCVSCLFVFQLREESIRQMECTCEDEETENK

SEQ ID NO: 35000 - protein, 14 aa, Homo sapiens
LSDFNLLMALAVLF

SEQ ID NO: 35001 - protein, 7 aa, Homo sapiens
MKLKQRK

SEQ ID NO: 35002 - protein, 392 aa, Homo sapiens
MSKGPAVGIDLGTTYSCVGVFQHGKVEIIANDQGNRTTPSYVAFTDTERLIGDAAKNQVAMNPTNTVFDAKRLIGRRFDDAVVQSDMKHWPFMVVNDAGRPKVQVEYKGETKSFYPEEVSSMVLTKMKEIAEAYLGKTVTNAVVTVPAYFNDSQRQATKDAGTIAGLNVLRIINEPTAAAIAYGLDKKVGAERNVLIFDLGGGTFDVSILTIEDGIFEVKSTAGDTHLGGEDFDNRMVNHFIAEFKRKHKKDISENKRAVRRLRTACERAKRTLSSSTQASIEIDSLYEGIDFYTSITRARFEELNADLFRGTLDPVEKALRDAKLDKSQIHDIVLVGGSTRIPKIQKLLQDFFNGKELNKSINPDEAVAYGAGNNGISINPKGRQAQGDSL

SEQ ID NO: 35003 - protein, 236 aa, Homo sapiens
LRPTLPFPGAVRRAGASLKVPERCATMSKGPAVGIDLGTTYSCVGVFQHGKVEIIANDQGNRTTPSYVAFTDTERLIGDAAKNQVAMNPTNTVFDAKRLIGRRFDDAVVQSDMKHWPFMVVNDAGRPKVQVEYKGETKSFYPEEVSSMVLTKMKEIAEAYLGKTVTNAVVTVPAYFNDSQRQATKDAGTIAGLNVLRIINEPTAAAIAYGLDKKVCTICDASSDYFKINLIHRKFK

SEQ ID NO: 35004 - protein, 216 aa, Homo sapiens
LKVASPVVLLSLIESELAKTESTYLAEMHRQSPKEKASKTTTVRRRKRPHAHLRVPHLEEVMSPVTTPTDEDVGHRIKHVAGSTQTRHIPEDTPNGFHLQSVSKLLLVISCVLVLLVILNMMLFYKLWMLEYTTQTLTAWQGLRLQERLPQSQTEWAQLLESQQKYHDTELQKWREIIKSSVMLLDQMKDSLINLQNGIRSRDYTSESEEKRNRYH

SEQ ID NO: 35005 - protein, 20 aa, Homo sapiens
LGFCCEFLVLLKFCNFLTTC

SEQ ID NO: 35006 - protein, 149 aa, Homo sapiens
VRGPGAAVVAGAVVGTLVGLGLLAGLVLLYHRRGKALEEPANDIKEDAIAPRTLPWPKSSDTISKNGTLSSVTSARALRPPHGPPRPGALTPTPSLSSQALPSPRLPTTDGAHPQPISPIPGGVSSSGLSRMGAVPVMVPAQSQAGSLV

SEQ ID NO: 35007 - protein, 205 aa, Homo sapiens
LLSPLLPLPRNSVSPMPRAPSPPTTYGYISVPTASEFTDMGRTGGGVGPKGGVLLCPPRPCLTPTPSEGSLANGWGSASEDNAASARASLVSSSDGSFLADAHFARALAVAVDSFGFGLEPREADCVFIDASSPPSPRDEIFLTPNLSLPLWEWRPDWLEDMEVSHTQRLGRGMPPWPPDSQISSQRSQLHCRMPKAGASPVDYS

SEQ ID NO: 35008 - protein, 1011 aa, Homo sapiens
LRVAMGSGGDSLLGGRGSLPLLLLLIMGGMAQDSPPQILVHPQDQLFQGPGPARMSCQASGQPPPTIRWLLNGQPLSMVPPDPHHLLPDGTLLLLQPPARGHAHDGQALSTDLGVYTCEASNRLGTAVSRGARLSVAVLREDFQIQPRDMVAVVGEQFTLECGPPWGHPEPTVSWWKDGKPLALQPGRHTVSGGSLLMARAEKSDEGTYMCVATNSAGHRESRAARVSIQEPQDYTEPVELLAVRIQLENVTLLNPDPAEGPKPRPAVWLSWKVSGPAAPAQSYTALFRTQTAPGGQGAPWAEELLAGWQSAELGGLHWGQDYEFKVRPSSGRARGPDSNVLLLRLPEKVPSAPPQEVTLKPGNGTVFVSWVPPPAENHNGIIRGYQVWSLGNTSLPPANWTVVGEQTQLEIATHMPGSYCVQVAAVTGAGAGEPSRPVCLLLEQAMERATQEPSEHGPWTLEQLRATLKRPEVIATCGVALWLLLLGTAVCIHRRRRARVHLGPGLYRYTSEDAILKHRMDHSDSQWLADTWRSTSGSRDLSSSSSLSSRLGADARDPLDCRRSLLSWDSRSPGVPLLPDTSTFYGSLIAELPSSTPARPSPQVPAVRRLPPQLAQLSSPCSSSDSLCSRRGLSSPRLSLAPAEAWKAKKKQELQHANSSPLLRGSHSLELRACELGNRGSKNLSQSPGAVPQALVAWRALGPKLLSSSNELVTRHLPPAPLFPHETPPTQSQQTQPPVAPQAPSSILLPAAPIPILSPCSPPSPQASSLSGPSPASSRLSSSSLSSLGEDQDSVLTPEEVALCLELSEGEETPRNSVSPMPRAPSPPTTYGYISVPTASEFTDMGRTGGGVGPKGGVLLCPPRPCLTPTPSEGSLANGWGSASEDNAASARASLVSSSDGSFLADAHFARALAVAVDSFGFGLEPREADCVFIDASSPPSPRDEIFLTPNLSLPLWEWRPDWLEDMEVSHTQRLGRGMPPWPPDSQISSQRSQLHCRMPKAGASPVDYS

SEQ ID NO: 35009 - protein, 208 aa, Homo sapiens
LLPLNRKSWPKRFSLLPVSPGLTPSLHCPRMDHSDSQWLADTWRSTSGSRDLSSSSSLSSRLGADARDPLDCRRSLLSWDSRSPGVPLLPDTSTFYGSLIAELPSSTPARPSPQVPAVRRLPPQLAQLSSPCSSSDSLCSRRGLSSPRLSLAPAEAWKAKKKQELQHANSSPLLRGSHSLELRACELGNRGSKNLSQSPGERGSLKGK

SEQ ID NO: 35010 - protein, 163 aa, Homo sapiens
LRVAMGSGGDSLLGGRGSLPLLLLLIMGGMAQDSPPQILVHPQDQLFQGPGPARMSCQASGQPPPTIRWLLNGQPLSMVPPDPHHLLPDGTLLLLQPPARGHAHDGQALSTDLGVYTCEASNRLGTAVSRGARLSVAGEAWEGSFRVGQTWVETSELNVQGNI

SEQ ID NO: 35011 - protein, 121 aa, Homo sapiens
LVVVDVVVASAGQWLRLHSAGGLMVGRPSPAGRPEQEPRANKEAANELAGAVDLGWMANVRRNPRDMVTSTHLGTHFHLRKTPPRGEKVRAGRHTTQEARRAPVLPCPALPWKRGAGGWTA

SEQ ID NO: 35012 - protein, 35 aa, Homo sapiens
VGTFCLVIHCLVLCHFFILRCCDHHISSVAFPASW

SEQ ID NO: 35013 - protein, 148 aa, Homo sapiens
LEKKRPQVRAWGHYFMTIKDLRAHIFANSVDNACVVLQIDNARLAADDFRVKYKTELVMCLSVESNVRGLHKVTDDTNVTRLQLETEMEALKEELLFMKKNQEKEVKGLQALIASSELTMEVNAPKSQDLSNIMADLPAQYDELAQKN

SEQ ID NO: 35014 - protein, 32 aa, Homo sapiens
LHFLPSLLRAALPFFAGALALADRKKFWPSWK

SEQ ID NO: 35015 - protein, 313 aa, Homo sapiens
MANSYLLLFSLHGPVSSVFLSLSLSLSLSLSLSLSPPSPSLPPCPSSLLPSPKPHLHSLRGWHGLRGKGDLPRALGMSRERGWQPSLPSLWQQVPSRCPHRLLMLIFSPRALKVNLDLTSLLDNEDKKSKNKRGVLPKHATNIMRSWLFQHLMHPYPTEDEKRQIAAQTNLTLLQVNNWFINARRRILQPMLDASNPDPAPKAKKIKSQHRPTQRFWPNSIAAGVLQQQGGAPGTNPDGSINLDNLQSLSSDSATMAMQQAMMAAHDDSLDGTEEEDEDEMEEEEEEELEEEVDELQTTNVSDLGLEHSDSLE

SEQ ID NO: 35016 - protein, 12 aa, Homo sapiens
MLGYVHIRKHLN

SEQ ID NO: 35017 - protein, 347 aa, Homo sapiens
MADSVKTFLQDLARGIKDSIWGICTISKLDARIQQKREEQRRRRASSVLAQRRAQSIERKQESEPRIVSRIFQCCAWNGGVFWFSLLLFYRVFIPVLQSVTARIIGDPSLHGDVWSWLEFFLTSIFSALWVLPLFVLSKVVNAIWFQDIADLAFEVSGRKPHPFPSVSKIIADMLFNLLLQALFLIQGMFVSLFPIHLVGQLVSLLHMSLLYSLYCFEYRWFNKVAAFSLSSFLYSLSAPMKQRPWQSISLPVAPLLLGGLLKQQTLPQDSLPAVGPEQLYFCREVPFTASVACQTEGYCRSLSCLPSKGDGRDWKKLWQLFSLFTSRLPGKAGPALPRALCVFPSL

SEQ ID NO: 35018 - protein, 50 aa, Homo sapiens [sequence omitted]

SEQ ID NO: 35019 - protein, 719 aa, Homo sapiens
LQTDRRVLPPIHVKMTKFGFLRLSYEKQDTLLKLLILSMAAVLSFSTRLFAVLRFESVIHEFDPYFNYRTTRFLAEEGFYKFHNWFDDRAWYPLGRIIGGTIYPGLMITSAAIYHVLHFFHITIDIRNVCVFLAPLFSSFTTIVTYHLTKELKDAGAGLLAAAMIAVVPGYISRSVAGSYDNEGIAIFCMLLTYYMWIKAVKTGSICWAAKCALAYFYMVSSWGGYVFLINLIPLHVLVLMLTGRFSHRIYVAYCTVYCLGTILSMQISFVGFQPVLSSEHMAAFGVFGLCQIHAFVDYLRSKLNPQQFEVLFRSVISLVGFVLLTVGALLMLTGKISPWTGRFYSLLDPSYAKNNIPIIASVSEHQPTTWSSYYFDLQLLVFMFPVGLYYCFSNLSDARIFIIMYGVTSMYFSAVMVRLMLVLAPVMCILSGIGVSQVLSTYMKNLDISRPDKKSKKQQDSTYPIKNEVASGMILVMAFFLITYTFHSTWVTSEAYSSPSIVLSARGGDGSRIIFDDFREAYYWLRHNTPEDAKVMSWWDYGYQITAMANRTILVDNNTWNNTHISRVGQAMASTEEKAYEIMRELDVSYVLVIFGGLTGYSSDDINKFLWMVRIGGSTDTGKHIKENDYYTPTGEFRVDREGSPVLLNCLMYKMCYYRFGQVYTEAKRPPGFDRVRNAEIGNKDFELDVLEEAYTTEHWLVRIYKVKDLDNRGLSRT

SEQ ID NO: 35020 - protein, 34 aa, Homo sapiens
MIFIILNRLPNEMSWLYFGQLKGGIFLKNVPYLF

SEQ ID NO: 35021 - protein, 41 aa, Homo sapiens
MLAGELPWDQPSDSCQEYSDWKEKKTYLNPWKKIDSAPLGN

SEQ ID NO: 35022 - protein, 212 aa, Homo sapiens
LYLFSFLGAKRPRVTSGGVSESPSGFSKHIQSNLDFSPVNSASSEENVKYSSSQPEPRTGLSLWDTSPSYIDKLVQGISFSQPTCPDHMLLNSQLLGTPGSSQNPWQRLVKRMTRFFTKLDADKSYQCLKETCEKLGYQWKKSCMNQVTISTTDRRNNKLIFKVNLLEMDDKILVDFRLSKGDGLEFKRHFLKIKGKLIDIVSSQKIWLPAT

SEQ ID NO: 35023 - protein, 450 aa, Homo sapiens
MHPDLGPLCTLLYVTLTILCSSVSSDLAPYFTSEPLSAVQKLGGPVVLHCSAQPVTTRISWLHNGKTLDGNLEHVKIHQGTLTILSLNSSLLGYYQCLANNSIGAIVSGPATVSVAVLGDFGSSTKHVITAEEKSAGFIGCRVPESNPKAEVRYKIRGKWLEHSTENYLILPSGNLQILNVSLEDKGSYKCAAYNPVTHQLKVEPIGRKLLVSRPSSDDVHILHPTHSQALAVLSRSPVTLECVVSGVPAPQVYWLKDGQDIAPGSNWRRLYSHLATDSVDPADSGNYSCMAGNKSGDVKYVTYMVNVLEHASISKGLQDQIVSLGATVHFTCDVHGNPAPNCTWFHNAQPIHPSARHLTAGNGLKISGVTVEDVGMYQCVADNGIGFMHSTGRLEIENGRLLGRASHKNFYFTDGLLLWSKMKLFLLKENNPSTVQERCSFSMVLASDR

SEQ ID NO: 35024 - protein, 122 aa, Homo sapiens
MLDFFTIFSKGGLVLWCFQGVSDSCTGPVNALIRSVLLQERGGNNSFTHEALTLKYKLDNQFELVFVVGFQKILTLTYVDKLIDDVHRLFRDKYRTEIQQQSALSLLNGTFDFQNDFLRLLR

SEQ ID NO: 35025 - protein, 411 aa, Homo sapiens
LRAGRHHNGAKGSNSVERRALGQVSGLRHARHASRRSGCQSRVGRELAAQPGRWTRARGGASAGGAGAHRLRGSMADAAPQLGKRKRELDVEEAHAASTEEKEAGVGNGTCAPVRLPFSGFRLQKVLRESARDKIIFLHGKVNEASGDGDGEDAVVILEKTPFQVEQVAQLLTGSPELQLQFSNDIYSTYHLFPPRQLNDVKTTVVYPATEKHLQKYLRQDLRLIRETGDDYRNITLPHLESQSLSIQWVYNILDKKAEADRIVFENPDPSDGFVLIPDLKWNQQQLDDLYLIAICHRRGIRSLRDLTPEHLPLLRNILHQGQEAILQRYRMKGDHLRVYLHYLPSYYHLHVHFTALGFEAPGSGVERAHLLAEVIENLECDPRHYQQRTLTFALRADDPLLKLLQEAQQS

SEQ ID NO: 35026 - protein, 367 aa, Homo sapiens
LRGPPVCRSRKVAEQDPKVARGSRDDSSPQESCCLLRNMVSKSRWKLLAMLALVLVVMVWYSISREDSFYFPIPEKKEPCLQGEAESKASKLFGNYSRDQPIFLRLEDYFWVKTPSAYELPYGTKGSEDLLLRVLAITSSSIPKNIQSLRCRRCVVVGNGHRLRNSSLGDAINKYDVVIRLNNAPVAGYEGDVGSKTTMRLFYPESAHFDPKVENNPDTLLVLVAFKAMDFHWIETILSDKKRVRKGFWKQPPLIWDVNPKQIRILNPFFMEIAADKLLSLPMQQPRKIKQKPTTGLLAITLALHLCDLVHIAGFGYPDAYNKKQTIHYYEQITLKSMAGSGHNVSQEALAIKRMLEMGAIKNLTSF

SEQ ID NO: 35027 - protein, 371 aa, Homo sapiens
LRGPPVCRSRKVAEQDPKVARGSRDDSSPQESCCLLRNMVSKSRWKLLAMLALVLVVMVWYSISREDRYIELFYFPIPEKKEPCLQGEAESKASKLFGNYSRDQPIFLRLEDYFWVKTPSAYELPYGTKGSEDLLLRVLAITSSSIPKNIQSLRCRRCVVVGNGHRLRNSSLGDAINKYDVVIRLNNAPVAGYEGDVGSKTTMRLFYPESAHFDPKVENNPDTLLVLVAFKAMDFHWIETILSDKKRVRKGFWKQPPLIWDVNPKQIRILNPFFMEIAADKLLSLPMQQPRKIKQKPTTGLLAITLALHLCDLVHIAGFGYPDAYNKKQTIHYYEQITLKSMAGSGHNVSQEALAIKRMLEMGAIKNLTSF

SEQ ID NO: 35028 - protein, 59 aa, Homo sapiens
MKPFQLDLLFVCFFLFSQELGLQKRGCCLVLGYMAKDKFRRMNEETEFRSCCPGWNAMA

SEQ ID NO: 35029 - protein, 45 aa, Homo sapiens [sequence omitted]

SEQ ID NO: 35030 - protein, 170 aa, Homo sapiens
LGLCCVVVLRIWILSFGAPHSSDVAQAVSDLGSGVGEQDGGLIGAEEKVINSKNKVDENMVIDETLDVKEMIFNAERVGGLEEERESVGPLREDFSLSSSALIGLLVIAVAIATVIVISLVMLRKRQYGTISHGIVEVDPMLTPEERHLNKMQNHGYENPTYKYLEQMQI

SEQ ID NO: 35031 - protein, 235 aa, Homo sapiens
LIPLFLERAAGPRSGRQHLPAPGGLLPSPARSHRRSPHAPRPRRPPVASAPAAAAAAAAAGPRRPGPARSRGAGLGAGGAHAVARQRGRARAPPVRLRQGLRAAPGARRQLPSARVQDRAPRGLRPGDRGRAGAARLLLLRHREWGARVAGGGQPVPRAERLLPAGRRGVHHPAAGRGGLPGSAAPPAALGSRRSPPPPARTRVGGGDGRGSEAGERRPPGGQRGGEPRRGGRRR

SEQ ID NO: 35032 - protein, 122 aa, Homo sapiens
MVLLCLFLASLAATPRAGVTGAWPTSGLSILAQLQPSCELRWTQLSRSSWRDLVMTTSLWSLAYFQHFSQETTTQEQLDEMEEIPRESQCGRQDFHALSCPTASPRDRVLLCCPGWRAMVPS

SEQ ID NO: 35033 - protein, 28 aa, Homo sapiens
MHVYFPVPFVMLGLLLVSRSCFLWEKKL

SEQ ID NO: 35034 - protein, 87 aa, Homo sapiens
MAIQPRTSNACQTFRIPKLNEDTFSSREQQNGNKEHMKRKCFQGPKEFIYKYGISSMEVSDKALAYPHRRCRENTVQWDEASPALRS

SEQ ID NO: 35035 - protein, 452 aa, Homo sapiens
LRRAHTFHLPRASPSSATFPAEAARREPPLAVLRGTGFPRLAKAEAGFGGGILDSEESARFSPPRASRSPRVHRSVPALAPHPTHFLCSPGGRVPCGCRSSGKLWLSRMGVCGYLFLPWKCLVVVSLRLLFLVPTGVPVRSGDATFPKAMDNVTVRQGESATLRCTIDNRVTRVAWLNRSTILYAGNDKWCLDPRVVLLSNTQTQYSIEIQNVDVYDEGPYTCSVQTDNHPKTSRVHLIVQVSPKIVEISSDISINEGNNISLTCIATGRPEPTVTWRHISPKAVGFVSEDEYLEIQGITREQSGDYECSASNDVAAPVVRRVKVTVNYPPYISEAKGTGVPVGQKGTLQCEASAVPSAEFQWYKDDKRLIEGKKGVKVENRPFLSKLIFFNVSEHDYGNYTCVASNKLGHTNASIMLFGPGAVSEVSNGTSRRAGCVWLLPLLVLHLLLKF

SEQ ID NO: 35036 - protein, 105 aa, Homo sapiens
LEIQGITREQSGDYECSASNDVAAPVVRRVKVTVNYPPYISEAKGTGVPVGQKGTLQCEASAVPSAEFQWYKDDKRKRNGMLYLRKATHPTGALTNEKSTALVRN

SEQ ID NO: 35037 - protein, 386 aa, Homo sapiens
LLLANSAPSLLPAPLPEPAGARGGGPGLCGCRSPGKLWLSRMGVCGYLFLPWKCLVVVSLRLLFLVPTGVPVRSGDATFPKAMDNVTVRQGESATLRCTIDDRVTRVAWLNRSTILYAGNDKWSIDPRVIILVNTPTQYSIMIQNVDVYDEGPYTCSVQTDNHPKTSRVHLIVQVPPQIMNISSDITVNEGSSVTLLCLAIGRPEPTVTWRHLSVKEGQGFVSEDEYLEISDIKRDQSGEYECSALNDVAAPDVRKVKITVNYPPYISKAKNTGVSVGQKGILSCEASAVPMAEFQWFKEETRLATGLDGMRIENKGRMSTLTFFNVSEKDYGNYTCVATNKLGNTNASITLYGPGAVIDGVNSASRALACLWLSGTLLAHFFIKF

SEQ ID NO: 35038 - protein, 317 aa, Homo sapiens
LRAPQRRDVPSCLLGRLLGDNCPALHPRCTIDDRVTRVAWLNRSTILYAGNDKWSIDPRVIILVNTPTQYSIMIQNVDVYDEGPYTCSVQTDNHPKTSRVHLIVQVPPQIMNISSDITVNEGSSVTLLCLAIGRPEPTVTWRHLSVKEGQGFVSEDEYLEISDIKRDQSGEYECSALNDVAAPDVRKVKITVNYPPYISKAKNTGVSVGQKGILSCEASAVPMAEFQWFKEETRLATGLDGMRIENKGRMSTLTFFNVSEKDYGNYTCVATNKLGNTNASITLYGPGAVIDGVNSASRALACLWLSGTLLAHFFIKF

SEQ ID NO: 35039 - protein, 355 aa, Homo sapiens
MVPARLGPAVAMVTGAGRRVLAGWAHARGDYKPRRAAAGPSATLDMALRRPPRLRLCARLPDFFLLLLFRGCLIGAVNLKSSNRTPVVQEFESVELSCIITDSQTSDPRIEWKKIQDEQTTYVFFDNKIQGDLAGRAEILGKTSLKIWNVTRRDSALYRCEVVARNDRKEIDEIVIELTVQVKPVTPVCRVPKAVPVGKMATLHCQESEGHPRPHYSWYRNDVPLPTDSRANPRFRNSSFHLNSETGTLVFTAVHKDDSGQYYCIASNDAGSARCEEQEMEVYDLNIGGIIGGVLVVLAVLALITLGICCAYRRGYFINNKQDGESYKNPGKPDGVNYIRTDEEGDFRHKSSFVI

SEQ ID NO: 35040 - protein, 234 aa, Homo sapiens
LRRPPRLRLCARLPDFFLLLLFRGCLIGAVNLKSSNRTPVVQEFESVELSCIITDSQTSDPRIEWKKIQDEQTTYVFFDNKIQGDLAGRAEILGKTSLKIWNVTRRDSALYRCEVVARNDRKEIDEIVIELTVQVKPVTPVCRVPKAVPVGKMATLHCQESEGHPRPHYSWYRNDVPLPTDSRANPRFRNSSFHLNSETGTLVRSLLRGEDGDVFVGARDAYCEKKIRRDTETS

SEQ ID NO: 35041 - protein, 693 aa, Homo sapiens
MRAYEEGKNCLQELLTQVCGDVLSTCEHRLSNIVLKENGTGNMDEDLLVKYIFTLGDIAQLCPARVEKRIFLLIQSVLASSADADHSPSSQGSSEAPASQPPPQVRGSVMPSVIRAHAIITLGKLCLQHEDLAKKSIPALVRELEVCEDVAVRNNVIIVMCDLCIRYTIMVDKYIPNISMCLKDSDPFIRKQTLILLTNLLQEEFVKWKGSLFFRFVSTLIDSHPDIASFGEFCLAHLLLKRNPVMFFQHFIECIFHFNNYEKHEKYNKFPQSEREKRLFSLKGKSNKERRMKIYKFLLEHFTDEQRFNITSKICLSILACFADGILPLDLDASELLSDTFEVLSSKEIKLLAMRSKPDKDLLMEEDDMALANVVMQEAQKKLISQVQKRNFIENIIPIIISLKTVLEKNKIPALRELMHYLREVMQDYRDELKDFFAVDKQLASELEYDMKKYQEQLVQEQELAKHADVAGTAGGAEVAPVAQVALCLETVPVPAGQENPAMSPAVSQPCTPRASAGHVAVSSPTPETGPLQRLLPKARPMSLSTIAILNSVKKAVESKSRHRSRSLGVLPFTLNSGSPEKTCSQVSSYSLEQESNGEIEHVTKRAISTPEKSISDVTFGAGVSYIGTPRTPSSAKEKIEGRSQGNDILCLSLPDKPPPQPQQWNVRSPARNKDTPACSRRSLRKTPLKTAN

SEQ ID NO: 35042 - protein, 274 aa, Homo sapiens
LCFAKVGDVLGCLSLPPSRSARVLEDISILSCISVDSRIVRTKVPCSVTMSRPRKRLAGTSGSDKGLSGKRTKTENSGEALAKVEDSNPQKTSATKNCLKNLSSHWLMKSEPESRLEKGVDVKFSIEDLKAQPKQTTCWDGVRNYQARNFLRAMKLGEEAFFYHSNCKEPGIAGLMKIVKEAYPDHTQFEKNNPHYDPSSKEDNPKWSMVDVQFVRMMKRFIPLAELKSYHQAHKATGGPLKNMVLFTRQRLSIQPLTQEEFDFVLSLEEKEPS

SEQ ID NO: 35043 - protein, 255 aa, Homo sapiens
LHSLRRSGGGPQSSLQSVGIVRTKVPCSVTMSRPRKRLAGTSGSDKGLSGKRTKTENSGEALAKVEDSNPQKTSATKNCLKNLSSHWLMKSEPESRLEKGVDVKFSIEDLKAQPKQTTCWDGVRNYQARNFLRAMKLGEEAFFYHSNCKEPGIAGLMKIVKEAYPDHTQFEKNNPHYDPSSKEDNPKWSMVDVQFVRMMKRFIPLAELKSYHQAHKATGGPLKNMVLFTRQRLSIQPLTQEEFDFVLSLEEKEPS

SEQ ID NO: 35044 - protein, 325 aa, Homo sapiens
LAGWVASRSESRAVAGALLPHRRSPDSADEGSDPRRETPPGADPREYCTSDRDIVEVVRTEYVYTRPPPWSDTLPTIHVVTPTYSRPVQKAELTRMANTLLHVPNLHWLVVEDAPRRTPLTARLLRDTGLNYTHLHVETPRNYKLRGDARDPRIPRGTMQRNLALRWLRETFPRNSSQPGVVYFADDDNTYSLELFEEMRSTRRVSVWPVAFVGGLRYEAPRVNGAGKVVGWKTVFDPHRPFAIDMAGFAVNLRLILQRSQAYFKLRGVKGGYQESSLLRELVTLNDLEPKAANCTKILVWHTRTEKPVLVNEGKKGFTDPSVEI

SEQ ID NO: 35045 - protein, 651 aa, Homo sapiens
LPEVTQQVRDPAPRLIVLALALVILPTQRGFPTHHTAMDGKVAVQECGPPAVSWVPEEGEKLDQEDEDQVKDRGQWTNKMEFVLSVAGEIIGLGNVWRFPYLCYKNGGGAFFIPYFIFFFVCGIPVFFLEVALGQYTSQGSVTAWRKICPLFQGIGLASVVIESYLNVYYIIILAWALFYLFSSFTSELPWTTCNNFWNTEHCTDFLNHSGAGTVTPFENFTSPVMEFWERRVLGITSGIHDLGSLRWELALCLLLAWVICYFCIWKGVKSTGKVVYFTATFPYLMLVILLIRGVTLPGAYQGIIYYLKPDLFRLKDPQVWMDAGTQIFFSFAICQGCLTALGSYNKYHNNCYKDCIALCFLNSATSFVAGFVVFSILGFMSQEQGVPISEVAESGPGLAFIAFPKAVTMMPLSQLWSCLFFIMLIFLGLDSQFVCVECLVTASIDMFPRQLRKSGRRELLILTIAVMCYLIGLFLVTEGGMYIFQLFDYYASSGICLLFLSLFEVVCISWVYGADRFYDNIEDMIGYRPWPLVKISWLFLTPGLCLATFLFSLSKYTPLKYNNVYVYPPWGYSIGWFLALSSMVCVPLFVVITLLKTRGPFRKRLRQLITPDSSLPQPKQHPCLDGSAGRNFGPSPTREGLIAGEKETHL

SEQ ID NO: 35046 - protein, 114 aa, Homo sapiens
LPEVTQQVRDPAPRLIVLALALVILPTQRGFPTHHTAMDGKVAVQECGPPAVSWVPEEGEKLDQEDEDQVKDRGQWTNKMEFVLSVAGEIIGLGNVWRFPYLCYKNGGGEFTLR

SEQ ID NO: 35047 - protein, 205 aa, Homo sapiens
VSVGLWTLYLELVASAQVGGNPLNRRYGSWRELAKALASRNIPAVDPHLQFYHPQRLSLEDHDIDQGVSSNSSYLKWNKPVPWLSEFRGRANLHVFEDWCGSSIQQLRRNLHFPLYPHIRTTLRKLAVSPKWTNYGLRIFGYLHPFTDGKIQFAIAADDNAEFWLSLDDQVSGLQLLASVGKTGKEWTAPGEFGKFRSQISKPVR

SEQ ID NO: 35048 - protein, 32 aa, Homo sapiens
LSAGTMVFIAASALAEVPRAGSQGARVSQEHH

SEQ ID NO: 35049 - protein, 460 aa, Homo sapiens
VPAPAAAGPSGPPVPRCGLSVLSEASSGSARTRPAAVPCRPLRGRLGPSRPFRSRIRARSPLSSEPTMSGGAAEKQSSTPGSLFLSPPAPAPKNGSSSDSSVGEKLGAAAADAVTGRTEEYRRRRHTMDKDSRGAAATTTTTEHRFFRRSVICDSNATALELPGLPLSLPQPSIPAAVPQSAPPEPHREETVTATATSQVAQQPPAAAAPGEQAVAGPAPSTVPSSTSKDRPVSQPSLVGSKEEPPPARSGSGGGSAKEPQEERSQQQDDIEELETKAVGMSNDGRFLKFDIEIGRGSFKTVYKGLDTETTVEVAWCELQDRKLTKSERQRFKEEAEMLKGLQHPNIVRFYDSWESTVKGKKCIVLVTELMTSGTLKTYLKRFKVMKIKVLRSWCRQILKGLQFLHTRTPPIIHRDLKCDNIFITGPTGSVKIGDLGLATLKRASFAKSVIGMFQVYLGA

SEQ ID NO: 35050 - protein, 2201 aa, Homo sapiens
VPAPAAAGPSGPPVPRCGLSVLSEASSGSARTRPAAVPCRPLRGRLGPSRPFRSRIRARSPLSSEPTMSGGAAEKQSSTPGSLFLSPPAPAPKNGSSSDSSVGEKLGAAAADAVTGRTEEYRRRRHTMDKDSRGAAATTTTTEHRFFRRSVICDSNATALELPGLPLSLPQPSIPAAVPQSAPPEPHREETVTATATSQVAQQPPAAAAPGEQAVAGPAPSTVPSSTSKDRPVSQPSLVGSKEEPPPARSGSGGGSAKEPQEERSQQQDDIEELETKAVGMSNDGRFLKFDIEIGRGSFKTVYKGLDTETTVEVAWCELQDRKLTKSERQRFKEEAEMLKGLQHPNIVRFYDSWESTVKGKKCIVLVTELMTSGTLKTYLKRFKVMKIKVLRSWCRQILKGLQFLHTRTPPIIHRDLKCDNIFITGPTGSVKIGDLGLATLKRASFAKSVIGTPEFMAPEMYEEKYDESVDVYAFGMCMLEMATSEYPYSECQNAAQIYRRVTSGVKPASFDKVAIPEVKEIIEGCIRQNKDERYSIKDLLNHAFFQEETGVRVELAEEDDGEKIAIKLWLRIEDIKKLKGKYKDNEAIEFSFDLERDVPEDVAQEMVESGYVCEGDHKTMAKAIKDRVSLIKRKREQRQLVREEQEKKKQEESSLKQQVEQSSASQTGIKQLPSASTGIPTASTTSASVSTQVEPEEPEADQHQQLQYQQPSISVLSDGTVDSGQGSSVFTESRVSSQQTVSYGSQHEQAHSTGTVPGHIPSTVQAQSQPHGVYPPSSVAQGQSQGQPSSSSLTGVSSSQPIQHPQQQGIQQTAPPQQTVQYSLSQTSTSSEATTAQPVSQPQAPQVLPQVSAGKQSTQGVSQVAPAEPVAVAQTQATQPTTLASSVDSAHSDVASGMSDGNENVPSSSGRHEGRTTKRHYRKSVRSRSRHEKTSRPKLRILNVSNKGDRVVECQLETHNRKMVTFKFDLDGDNPEEIATIMVNNDFILAIERESFVDQVREIIEKADEMLSEDVSVEPEGDQGLESLQGKDDYGFSGSQKLEGEFKQPIPASSMPQQIGIPTSSLTQVVHSAGRRFIVSPVPESRLRESKVFPSEITDTVAASTAQSPGMNLSHSASSLSLQQAFSELRRAQMTEGPNTAPPNFSHTGPTFPVVPPFLSSIAGVPTTAAATAPVPATSSPPNDISTSVIQSEVTVPTEEGIAGVATSTGVVTSGGLPIPPVSESPVLSSVVSSITIPAVVSISTTSPSLQVPTSTSEIVVSSTALYPSVTVSATSASAGGSTATPGPKPPAVVSQQAAGSTTVGATLTSVSTTTSFPSTASQLCIQLSSSTSTPTLAETVVVSAHSLDKTSHSSTTGLAFSLSAPSSSSSPGAGVSSYISQPGGLHPLVIPSVIASTPILPQAAGPTSTPLLPQVPSIPPLVQPVANVPAVQQTLIHSQPQPALLPNQPHTHCPEVDSDTQPKAPGIDDIKTLEEKLRSLFSEHSSSGAQHASVSLETSLVIESTVTPGIPTTAVAPSKLLTSTTSTCLPPTNLPLGTVALPVTPVVTPGQVSTPVSTTTSGVKPGTAPSKPPLTKAPVLPVGTELPAGTLPSEQLPPFPGPSLTQSQQPLEDLDAQLRRTLSPEMITVTSAVGPVSMAAPTAITEAGTQPQKVSQVKEGPVLATSSGAGVFKMGRFQVSVAADGAQKEGKNKSEDAKSVHFESSTSESSVLSSSSPESTLVKPEPNGITIPGISSDVPESAHKTTASEAKSDTGQPTKVGRFQVTTTANKVGRFSVSKTEDKITDTKKEGPVASPPFMDLEQAVLPAVIPKKEKPELSEPSHLNGPSSDPEAAFLSRDVDDGSGSPHSPHQLSSKSLPSQNLSQSLSNSFNSSYMSSDNESDIEDEDLKLELRRLRDKHLKEIQDLQSRQKHEIESLYTKLGKVPPAVIIPPAAPLSGRRRRPTKSKGSKSSRSSSLGNKSPQLSGNLSGQSAASVLHPQQTLHPPGNIPESGQNQLLQPLKPSPSSDNLYSAFTSDGAISVPSLSAPGQGTSSTNTVGATVNSQAAQAQPPAMTSSRKGTFTDDLHKLVDNWARDAMNLSGRRGSKGHMNYEGPGMARKFSAPGQLCISMTSNLGGSAPISAASATSLGHFTKSMCPPQQYGFPATPFGAQWSGTGGPAPQPLGQFQPVGTASLQNFNISNLQKSISNPPGSNLRTT

SEQ ID NO: 35051 - protein, 2900 aa, Homo sapiens
VPAPAAAGPSGPPVPRCGLSVLSEASSGSARTRPAAVPCRPLRGRLGPSRPFRSRIRARSPLSSEPTMSGGAAEKQSSTPGSLFLSPPAPAPKNGSSSDSSVGEKLGAAAADAVTGRTEEYRRRRHTMDKDSRGAAATTTTTEHRFFRRSVICDSNATALELPGLPLSLPQPSIPAAVPQSAPPEPHREETVTATATSQVAQQPPAAAAPGEQAVAGPAPSTVPSSTSKDRPVSQPSLVGSKEEPPPARSGSGGGSAKEPQEERSQQQDDIEELETKAVGMSNDGRFLKFDIEIGRGSFKTVYKGLDTETTVEVAWCELQDRKLTKSERQRFKEEAEMLKGLQHPNIVRFYDSWESTVKGKKCIVLVTELMTSGTLKTYLKRFKVMKIKVLRSWCRQILKGLQFLHTRTPPIIHRDLKCDNIFITGPTGSVKIGDLGLATLKRASFAKSVIGTPEFMAPEMYEEKYDESVDVYAFGMCMLEMATSEYPYSECQNAAQIYRRVTSGVKPASFDKVAIPEVKEIIEGCIRQNKDERYSIKDLLNHAFFQEETGVRVELAEEDDGEKIAIKLWLRIEDIKKLKGKYKDNEAIEFSFDLERDVPEDVAQEMVESGYVCEGDHKTMAKAIKDRVSLIKRKREQRQLVREEQEKKKQEESSLKQQVEQSSASQTGIKQLPSASTGIPTASTTSASVSTQVEPEEPEADQHQQLQYQQPSISVLSDGTVDSGQGSSVFTESRVSSQQTVSYGSQHEQAHSTGTVPGHIPSTVQAQSQPHGVYPPSSVPQSMAHPCGGTPTYPESQIFFPTIHERPVSFSPPPTCPPKVAISQRRKSTSFLEAQTHHFQPLLRTVGQSLLPPGGSPTNWTPEAVVMLGTTASRVTGESCEIQVHPMFEPSQVYSDYRPGLVLPEEAHYFIPQEAVYVAGVHYQARVAEQYEGIPYNSSVLSSPMKQIPEQKPVQGGPTSSSVFEFPSGQAFLVGHLQNLRLDSGLGPGSPLSSISAPISTDATRLKFHPVFVPHSAPAVLTHNNESRSNCVFEFHVHTPSSSSGEGGGILPQRVYRNRQVAVDLNQEELPPQSVGLHGYLQPVTEEKHNYHAPELTVSVVEPIGQNWPIGSPEYSSDSSQITSSDPSDFQSPPPTGGAAAPFGSDVSMPFIHLPQTVLQESPLFFCFPQGTTSQQVLTASFSSGGSALHPQAQGQSQGQPSSSSLTGVSSSQPIQHPQQQQGIQQTAPPQQTVQYSLSQTSTSSEATTAQPVSQPQAPQVLPQVSAGKQLPVSQPVPTIQGEPQIPVATQPSVVPVHSGAHFLPVGQPLPTPLLPQYPVSQIPISTPHVSTAQTGFSSLPITMAAGITQPLLTLASSATTAAIPGVSTVVPSQLPTLLQPVTQLPSQVHPQLLQPAVQSMGIPANLGQAAEVPLSSGDVLYQGFPPRLPPQYPGDSNIAPSSNVASVCIHSTVLSPPMPTEVLATPGYFPTVVQPYVESNLLVPMGGVGGQVQVSQPGGSLAQAPTTSSQQAVLESTQGVSQVAPAEPVAVAQTQATQPTTLASSVDSAHSDVASGMSDGNENVPSSSGRHEGRTTKRHYRKSVRSRSRHEKTSRPKLRILNVSNKGDRVVECQLETHNRKMVTFKFDLDGDNPEEIATIMVNNDFILAIERESFVDQVREIIEKADEMLSEDVSVEPEGDQGLESLQGKDDYGFSGSQKLEGEFKQPIPASSMPQQIGIPTSSLTQVVHSAGRRFIVSPVPESRLRESKVFPSEITDTVAASTAQSPGMNLSHSASSLSLQQAFSELRRAQMTEGPNTAPPNFSHTGPTFPVVPPFLSSIAGVPTTAAATAPVPATSSPPNDISTSVIQSEVTVPTEEGIAGVATSTGVVTSGGLPIPPVSESPVLSSVVSSITIPAVVSISTTSPSLQVPTSTSEIVVSSTALYPSVTVSATSASAGGSTATPGPKPPAVVSQQAAGSTTVGATLTSVSTTTSFPSTASQLCIQLSSSTSTPTLAETVVVSAHSLDKTSHSSTTGLAFSLSAPSSSSSPGAGVSSYISQPGGLHPLVIPSVIASTPILPQAAGPTSTPLLPQVPSIPPLVQPVANVPAVQQTLIHSQPQPALLPNQPHTHCPEVDSDTQPKAPGIDDIKTLEEKLRSLFSEHSSSGAQHASVSLETSLVIESTVTPGIPTTAVAPSKLLTSTTSTCLPPTNLPLGTVALPVTPVVTPGQVSTPVSTTTSGVKPGTAPSKPPLTKAPVLPVGTELPAGTLPSEQLPPFPGPSLTQSQQPLEDLDAQLRRTLSPEMITVTSAVGPVSMAAPTAITEAGTQPQKGVSQVKEGPVLATSSGAGVFKMGRFQVSVAADGAQKEGKNKSEDAKSVHFESSTSESSVLSSSSPESTLVKPEPNGITIPGISSDVPESAHKTTASEAKSDTGQPTKVGRFQVTTTANKVGRFSVSKTEDKITDTKKEGPVASPPFMDLEQAVLPAVIPKKEKPELSEPSHLNGPSSDPEAAFLSRDVDDGSGSPHSPHQLSSKSLPSQNLSQSLSNSFNSSYMSSDNESDIEDEDLKLELRRLRDKHLKEIQDLQSRQKHEIESLYTKLGKVPPAVIIPPAAPLSGRRRRPTKSKGSKSSRSSSLGNKSPQLSGNLSGQSAASVLHPQQTLHPPGNIPESGQNQLLQPLKPSPSSDNLYSAFTSDGAISVPSLSAPGQGCAKFNCASEQVTFKPGGRRTRFLRKMVKKVCPCNQLCRTSSTNTVGATVNSQAAQAQPPAMTSSRKGTFTDDLHKLVDNWARDAMNLSGRRGSKGHMNYEGPGMARKFSAPGQLCISMTSNLGGSAPISAASATSLGHFTKSMCPPQQYGFPATPFGAQWSGTGGPAPQPLGQFQPVGTASLQNFNISNLQKSISNPPGSNLRTT

SEQ ID NO: 35052 - protein, 2449 aa, Homo sapiens
VPAPAAAGPSGPPVPRCGLSVLSEASSGSARTRPAAVPCRPLRGRLGPSRPFRSRIRARSPLSSEPTMSGGAAEKQSSTPGSLFLSPPAPAPKNGSSSDSSVGEKLGAAAADAVTGRTEEYRRRRHTMDKDSRGAAATTTTTEHRFFRRSVICDSNATALELPGLPLSLPQPSIPAAVPQSAPPEPHREETVTATATSQVAQQPPAAAAPGEQAVAGPAPSTVPSSTSKDRPVSQPSLVGSKEEPPPARSGSGGGSAKEPQEERSQQQDDIEELETKAVGMSNDGRFLKFDIEIGRGSFKTVYKGLDTETTVEVAWCELQDRKLTKSERQRFKEEAEMLKGLQHPNIVRFYDSWESTVKGKKCIVLVTELMTSGTLKTYLKRFKVMKIKVLRSWCRQILKGLQFLHTRTPPIIHRDLKCDNIFITGPTGSVKIGDLGLATLKRASFAKSVIGTPEFMAPEMYEEKYDESVDVYAFGMCMLEMATSEYPYSECQNAAQIYRRVTSGVKPASFDKVAIPEVKEIIEGCIRQNKDERYSIKDLLNHAFFQEETGVRVELAEEDDGEKIAIKLWLRIEDIKKLKGKYKDNEAIEFSFDLERDVPEDVAQEMVESGYVCEGDHKTMAKAIKDRVSLIKRKREQRQLVREEQEKKKQEESSLKQQVEQSSASQTGIKQLPSASTGIPTASTTSASVSTQVEPEEPEADQHQQLQYQQPSISVLSDGTVDSGQGSSVFTESRVSSQQTVSYGSQHEQAHSTGTVPGHIPSTVQAQSQPHGVYPPSSVAQGQSQGQPSSSSLTGVSSSQPIQHPQQQQGIQQTAPPQQTVQYSLSQTSTSSEATTAQPVSQPQAPQVLPQVSAGKQLPVSQPVPTIQGEPQIPVATQPSVVPVHSGAHFLPVGQPLPTPLLPQYPVSQIPISTPHVSTAQTGFSSLPITMAAGITQPLLTLASSATTAAIPGVSTVVPSQLPTLLQPVTQLPSQVHPQLLQPAVQSMGIPANLGQAAEVPLSSGDVLYQGFPPRLPPQYPGDSNIAPSSNVASVCIHSTVLSPPMPTEVLATPGYFPTVVQPYVESNLLVPMGGVGGQVQVSQPGGSLAQAPTTSSQQAVLESTQGVSQVAPAEPVAVAQTQATQPTTLASSVDSAHSDVASGMSDGNENVPSSSGRHEGRTTKRHYRKSVRSRSRHEKTSRPKLRILNVSNKGDRVVECQLETHNRKMVTFKFDLDGDNPEEIATIMVNNDFILAIERESFVDQVREIIEKADEMLSEDVSVEPEGDQGLESLQGKDDYGFSGSQKLEGEFKQPIPASSMPQQIGIPTSSLTQVVHSAGRRFIVSPVPESRLRESKVFPSEITDTVAASTAQSPGMNLSHSASSLSLQQAFSELRRAQMTEGPNTAPPNFSHTGPTFPVVPPFLSSIAGVPTTAAATAPVPATSSPPNDISTSVIQSEVTVPTEEGIAGVATSTGVVTSGGLPIPPVSESPVLSSVVSSITIPAVVSISTTSPSLQVPTSTSEIVVSSTALYPSVTVSATSASAGGSTATPGPKPPAVVSQQAAGSTTVGATLTSVSTTTSFPSTASQLCIQLSSSTSTPTLAETVVVSAHSLDKTSHSSTTGLAFSLSAPSSSSSPGAGVSSYISQPGGLHPLVIPSVIASTPILPQAAGPTSTPLLPQVPSIPPLVQPVANVPAVQQTLIHSQPQPALLPNQPHTHCPEVDSDTQPKAPGIDDIKTLEEKLRSLFSEHSSSGAQHASVSLETSLVIESTVTPGIPTTAVAPSKLLTSTTSTCLPPTNLPLGTVALPVTPVVTPGQVSTPVSTTTSGVKPGTAPSKPPLTKAPVLPVGTELPAGTLPSEQLPPFPGPSLTQSQQPLEDLDAQLRRTLSPEMITVTSAVGPVSMAAPTAITEAGTQPQKGVSQVKEGPVLATSSGAGVFKMGRFQVSVAADGAQKEGKNKSEDAKSVHFESSTSESSVLSSSSPESTLVKPEPNGITIPGISSDVPESAHKTTASEAKSDTGQPTKVGRFQVTTTANKVGRFSVSKTEDKITDTKKEGPVASPPFMDLEQAVLPAVIPKKEKPELSEPSHLNGPSSDPEAAFLSRDVDDGSGSPHSPHQLSSKSLPSQNLSQSLSNSFNSSYMSSDNESDIEDEDLKLELRRLRDKHLKEIQDLQSRQKHEIESLYTKLGKVPPAVIIPPAAPLSGRRRRPTKSKGSKSSRSSSLGNKSPQLSGNLSGQSAASVLHPQQTLHPPGNIPESGQNQLLQPLKPSPSSDNLYSAFTSDGAISVPSLSAPGQGTSSTNTVGATVNSQAAQAQPPAMTSSRKGTFTDDLHKLVDNWARDAMNLSGRRGSKGHMNYEGPGMARKFSAPGQLCISMTSNLGGSAPISAASATSLGHFTKSMCPPQQYGFPATPFGAQWSGTGGPAPQPLGQFQPVGTASLQNFNISNLQKSISNPPGSNLRTT

SEQ ID NO: 35053 - protein, 2701 aa, Homo sapiens
VPAPAAAGPSGPPVPRCGLSVLSEASSGSARTRPAAVPCRPLRGRLGPSRPFRSRIRARSPLSSEPTMSGGAAEKQSSTPGSLFLSPPAPAPKNGSSSDSSVGEKLGAAAADAVTGRTEEYRRRRHTMDKDSRGAAATTTTTEHRFFRRSVICDSNATALELPGLPLSLPQPSIPAAVPQSAPPEPHREETVTATATSQVAQQPPAAAAPGEQAVAGPAPSTVPSSTSKDRPVSQPSLVGSKEEPPPARSGSGGGSAKEPQEERSQQQDDIEELETKAVGMSNDGRFLKFDIEIGRGSFKTVYKGLDTETTVEVAWCELQDRKLTKSERQRFKEEAEMLKGLQHPNIVRFYDSWESTVKGKKCIVLVTELMTSGTLKTYLKRFKVMKIKVLRSWCRQILKGLQFLHTRTPPIIHRDLKCDNIFITGPTGSVKIGDLGLATLKRASFAKSVIGTPEFMAPEMYEEKYDESVDVYAFGMCMLEMATSEYPYSECQNAAQIYRRVTSGVKPASFDKVAIPEVKEIIEGCIRQNKDERYSIKDLLNHAFFQEETGVRVELAEEDDGEKIAIKLWLRIEDIKKLKGKYKDNEAIEFSFDLERDVPEDVAQEMVESGYVCEGDHKTMAKAIKDRVSLIKRKREQRQLVREEQEKKKQEESSLKQQVEQSSASQTGIKQLPSASTGIPTASTTSASVSTQVEPEEPEADQHQQLQYQQPSISVLSDGTVDSGQGSSVFTESRVSSQQTVSYGSQHEQAHSTGTVPGHIPSTVQAQSQPHGVYPPSSVPRRGRSMSVCVPIFLLLPLCPASLPVLFHPTASTVCTSFSFPPPDCPEETFAEKLSKALESVLPMHSASQRKHRRSSLPSLFVSTPQSMAHPCGGTPTYPESQIFFPTIHERPVSFSPPPTCPPKVAISQRRKSTSFLEAQTHHFQPLLRTVGQSLLPPGGSPTNWTPEAVVMLGTTASRVTGESCEIQVHPMFEPSQVYSDYRPGLVLPEEAHYFIPQEAVYVAGVHYQARVAEQYEGIPYNSSVLSSPMKQIPEQKPVQGGPTSSSVFEFPSGQAFLVGHLQNLRLDSGLGPGSPLSSISAPISTDATRLKFHPVFVPHSAPAVLTHNNESRSNCVFEFHVHTPSSSSGEGGGILPQRVYRNRQVAVDLNQEELPPQSVGLHGYLQPVTEEKHNYHAPELTVSVVEPIGQNWPIGSPEYSSDSSQITSSDPSDFQSPPPTGGAAAPFGSDVSMPFIHLPQTVLQESPLFFCFPQGTTSQQVLTASFSSGGSALHPQAQGQSQGQPSSSSLTGVSSSQPIQHPQQQQGIQQTAPPQQTVQYSLSQTSTSSEATTAQPVSQPQAPQVLPQVSAGKQSTQGVSQVAPAEPVAVAQTQATQPTTLASSVDSAHSDVASGMSDGNENVPSSSGRHEGRTTKRHYRKSVRSRSRHEKTSRPKLRILNVSNKGDRVVECQLETHNRKMVTFKFDLDGDNPEEIATIMVNNDFILAIERESFVDQVREIIEKADEMLSEDVSVEPEGDQGLESLQGKDDYGFSGSQKLEGEFKQPIPASSMPQQIGIPTSSLTQVVHSAGRRFIVSPVPESRLRESKVFPSEITDTVAASTAQSPGMNLSHSASSLSLQQAFSELRRAQMTEGPNTAPPNFSHTGPTFPVVPPFLSSIAGVPTTAAATAPVPATSSPPNDISTSVIQSEVTVPTEEGIAGVATSTGVVTSGGLPIPPVSESPVLSSVVSSITIPAVVSISTTSPSLQVPTSTSEIVVSSTALYPSVTVSATSASAGGSTATPGPKPPAVVSQQAAGSTTVGATLTSVSTTTSFPSTASQLCIQLSSSTSTPTLAETVVVSAHSLDKTSHSSTTGLAFSLSAPSSSSSPGAGVSSYISQPGGLHPLVIPSVIASTPILPQAAGPTSTPLLPQVPSIPPLVQPVANVPAVQQTLIHSQPQPALLPNQPHTHCPEVDSDTQPKAPGIDDIKTLEEKLRSLFSEHSSSGAQHASVSLETSLVIESTVTPGIPTTAVAPSKLLTSTTSTCLPPTNLPLGTVALPVTPVVTPGQVSTPVSTTTSGVKPGTAPSKPPLTKAPVLPVGTELPAGTLPSEQLPPFPGPSLTQSQQPLEDLDAQLRRTLSPEMITVTSAVGPVSMAAPTAITEAGTQPQKGVSQVKEGPVLATSSGAGVFKMGRFQVSVAADGAQKEGKNKSEDAKSVHFESSTSESSVLSSSSPESTLVKPEPNGITIPGISSDVPESAHKTTASEAKSDTGQPTKVGRFQVTTTANKVGRFSVSKTEDKITDTKKEGPVASPPFMDLEQAVLPAVIPKKEKPELSEPSHLNGPSSDPEAAFLSRDVDDGSGSPHSPHQLSSKSLPSQNLSQSLSNSFNSSYMSSDNESDIEDEDLKLELRRLRDKHLKEIQDLQSRQKHEIESLYTKLGKVPPAVIIPPAAPLSGRRRRPTKSKGSKSSRSSSLGNKSPQLSGNLSGQSAASVLHPQQTLHPPGNIPESGQNQLLQPLKPSPSSDNLYSAFTSDGAISVPSLSAPGQGTSSTNTVGATVNSQAAQAQPPAMTSSRKGTFTDDLHKLVDNWARDAMNLSGRRGSKGHMNYEGPGMARKFSAPGQLCISMTSNLGGSAPISAASATSLGHFTKSMCPPQQYGFPATPFGAQWSGTGGPAPQPLGQFQPVGTASLQNFNISNLQKSISNPPGSNLRTT

SEQ ID NO: 35054 - protein, 2709 aa, Homo sapiens
VPAPAAAGPSGPPVPRCGLSVLSEASSGSARTRPAAVPCRPLRGRLGPSRPFRSRIRARSPLSSEPTMSGGAAEKQSSTPGSLFLSPPAPAPKNGSSSDSSVGEKLGAAAADAVTGRTEEYRRRRHTMDKDSRGAAATTTTTEHRFFRRSVICDSNATALELPGLPLSLPQPSIPAAVPQSAPPEPHREETVTATATSQVAQQPPAAAAPGEQAVAGPAPSTVPSSTSKDRPVSQPSLVGSKEEPPPARSGSGGGSAKEPQEERSQQQDDIEELETKAVGMSNDGRFLKFDIEIGRGSFKTVYKGLDTETTVEVAWCELQDRKLTKSERQRFKEEAEMLKGLQHPNIVRFYDSWESTVKGKKCIVLVTELMTSGTLKTYLKRFKVMKIKVLRSWCRQILKGLQFLHTRTPPIIHRDLKCDNIFITGPTGSVKIGDLGLATLKRASFAKSVIGTPEFMAPEMYEEKYDESVDVYAFGMCMLEMATSEYPYSECQNAAQIYRRVTSGVKPASFDKVAIPEVKEIIEGCIRQNKDERYSIKDLLNHAFFQEETGVRVELAEEDDGEKIAIKLWLRIEDIKKLKGKYKDNEAIEFSFDLERDVPEDVAQEMVESGYVCEGDHKTMAKAIKDRVSLIKRKREQRQLVREEQEKKKQEESSLKQQVEQSSASQTGIKQLPSASTGIPTASTTSASVSTQVEPEEPEADQHQQLQYQQPSISVLSDGTVDSGQGSSVFTESRVSSQQTVSYGSQHEQAHSTGTVPGHIPSTVQAQSQPHGVYPPSSVPQSMAHPCGGTPTYPESQIFFPTIHERPVSFSPPPTCPPKVAISQRRKSTSFLEAQTHHFQPLLRTVGQSLLPPGGSPTNWTPEAVVMLGTTASRVTGESCEIQVHPMFEPSQVYSDYRPGLVLPEEAHYFIPQEAVYVAGVHYQARVAEQYEGIPYNSSVLSSPMKQIPEQKPVQGGPTSSSVFEFPSGQAFLVGHLQNLRLDSGLGPGSPLSSISAPISTDATRLKFHPVFVPHSAPAVLTHNNESRSNCVFEFHVHTPSSSSGEGGGILPQRVYRNRQVAVDLNQEELPPQSVGLHGYLQPVTEEKHNYHAPELTVSVVEPIGQNWPIGSPEYSSDSSQITSSDPSDFQSPPPTGGAAAPFGSDVSMPFIHLPQTVLQESPLFFCFPQGTTSQQVLTASFSSGGSALHPQAQGQSQGQPSSSSLTGVSSSQPIQHPQQQQGIQQTAPPQQTVQYSLSQTSTSSEATTAQPVSQPQAPQVLPQVSAGKQGFPPRLPPQYPGDSNIAPSSNVASVCIHSTVLSPPMPTEVLATPGYFPTVVQPYVESNLLVPMGGVGGQVQVSQPGGSLAQAPTTSSQQAVLESTQGVSQVAPAEPVAVAQTQATQPTTLASSVDSAHSDVASGMSDGNENVPSSSGRHEGRTTKRHYRKSVRSRSRHEKTSRPKLRILNVSNKGDRVVECQLETHNRKMVTFKFDLDGDNPEEIATIMVNNDFILAIERESFVDQVREIIEKADEMLSEDVSVEPEGDQGLESLQGKDDYGFSGSQKLEGEFKQPIPASSMPQQIGIPTSSLTQVVHSAGRRFIVSPVPESRLRESKVFPSEITDTVAASTAQSPGMNLSHSASSLSLQQAFSELRRAQMTEGPNTAPPNFSHTGPTFPVVPPFLSSIAGVPTTAAATAPVPATSSPPNDISTSVIQSEVTVPTEEGIAGVATSTGVVTSGGLPIPPVSESPVLSSVVSSITIPAVVSISTTSPSLQVPTSTSEIVVSSTALYPSVTVSATSASAGGSTATPGPKPPAVVSQQAAGSTTVGATLTSVSTTTSFPSTASQLCIQLSSSTSTPTLAETVVVSAHSLDKTSHSSTTGLAFSLSAPSSSSSPGAGVSSYISQPGGLHPLVIPSVIASTPILPQAAGPTSTPLLPQVPSIPPLVQPVANVPAVQQTLIHSQPQPALLPNQPHTHCPEVDSDTQPKAPGIDDIKTLEEKLRSLFSEHSSSGAQHASVSLETSLVIESTVTPGIPTTAVAPSKLLTSTTSTCLPPTNLPLGTVALPVTPVVTPGQVSTPVSTTTSGVKPGTAPSKPPLTKAPVLPVGTELPAGTLPSEQLPPFPGPSLTQSQQPLEDLDAQLRRTLSPEMITVTSAVGPVSMAAPTAITEAGTQPQKGVSQVKEGPVLATSSGAGVFKMGRFQVSVAADGAQKEGKNKSEDAKSVHFESSTSESSVLSSSSPESTLVKPEPNGITIPGISSDVPESAHKTTASEAKSDTGQPTKVGRFQVTTTANKVGRFSVSKTEDKITDTKKEGPVASPPFMDLEQAVLPAVIPKKEKPELSEPSHLNGPSSDPEAAFLSRDVDDGSGSPHSPHQLSSKSLPSQNLSQSLSNSFNSSYMSSDNESDIEDEDLKLELRRLRDKHLKEIQDLQSRQKHEIESLYTKLGKVPPAVIIPPAAPLSGRRRRPTKSKGSKSSRSSSLGNKSPQLSGNLSGQSAASVLHPQQTLHPPGNIPESGQNQLLQPLKPSPSSDNLYSAFTSDGAISVPSLSAPGQGTSSTNTVGATVNSQAAQAQPPAMTSSRKGTFTDDLHKLVDNWARDAMNLSGRRGSKGHMNYEGPGMARKFSAPGQLCISMTSNLGGSAPISAASATSLGHFTKSMCPPQQYGFPATPFGAQWSGTGGPAPQPLGQFQPVGTASLQNFNISNLQKSISNPPGSNLRTT

SEQ ID NO: 35055 - protein, 116 aa, Homo sapiens
VLSVRILHYLLMTHFSLTSVETLEDNSEKWAVTPDAGDGVVKPSSRADPAQTSDTLALNNQMVTQNRTPHSVCHQKPQAKSGSWDLQTYSADQRTTGNWESHRKSQDMKKRKYDPS

SEQ ID NO: 35056 - protein, 496 aa, Homo sapiens
MHRRFENAPDSAKTKALQTVIEMKDSKISSMERGLRDLEEEIQMLKSNGALSTEEREEEMKQMEVYRSHSKFMKNKVEQLKEELSSKEAQWEELKKKAAGLQAEVFAIGQVKQELSRKDTELLALQTKLETLTNQFSDSKQHIEVLKESLTAKEQRAAILQTEVDALRLRLEEKETMLNKKTKQIQDMAEEKGTQAGEIHDLKDMLDVKERKVNVLQKKIENLQEQLRDKEKQMSSLKERVKSLQADTTNTDTALTTLEEALAEKERTIERLKEQRDRDEREKQEEIDNYKKDLKDLKEKVSLLQGDLSEKEASLLDLKEHASSLASSGLKKDSRLKTLEIALEQKKEECLKMESQLKKAHEAALEARASPEMSDRIQHLEREITRYKDESSKAQAEVDRLLEILKEVENEKNDKDKKIAELERQVKDQNKKVANLKHKEQVEKKKSAQMLEEARRREDNLNDSSQQLQTGSCSMTQAGVQWCDLSSLQPPSTGFK

SEQ ID NO: 35057 - protein, 387 aa, Homo sapiens
LEPDGRVTEGTLLWKLSVPGHWGGLRPTMPSLLLLFTAALLSSWAQLLTDANSWWSLALNPVQRPEMFIIGAQPVCSQLPGLSPGQRKLCQLYQEHMAYIGEGAKTGIKECQHQFRQRRWNCSTADNASVFGRVMQIGSRETAFTHAVSAAGVVNAISRACREGELSTCGCSRTARPKDLPRDWLWGGCGDNVEYGYRFAKEFVDAREREKNFAKGSEEQGRVLMNLQNNEAGRRAVYKMADVACKCHGVSGSCSLKTCWLQLAEFRKVGDRLKEKYDSAAAMRVTRKGRLELVNSRFTQPTPEDLVYVDPSPDYCLRNESTGSLGTQGRLCNKTSEGMDGCELMCCGRGYNQFKSVQVERCHCKFHWCCFVRCKKCTEIVDQYICK

SEQ ID NO: 35058 - protein, 66 aa, Homo sapiens
LTRLLLHVIYFSSFPPVETLLLERELQHGTETGRKKQRGLGDAPTEQPLAHSSSRGHEHQAGGQER

SEQ ID NO: 35059 - protein, 234 aa, Homo sapiens
LDKRPEPSILENITDDKYATVSSPSKSKKLECPSPAEQKPAEHVSLSNPAPLLVSPEVHLTPAVPSLPATVPAWPSEPTTFGPTGVPAPIPGRSVTQTLTPGPDSAVSQTHLTPSPVPVSIQAVNQPLMPLPQTLSLYQDPLYPGFPCNEKGDRAIVPPSSLCQTGEDLPKDKNILRFFFNLGVKAYSCPVWAPHSYLYPLHQAYLAACRMYPKVPVPVYLHNPWFKEAPAAQN

SEQ ID NO: 35060 - protein, 23 aa, Homo sapiens
LGRKVYPSQKIRHLARYSVAMLL

SEQ ID NO: 35061 - protein, 167 aa, Homo sapiens
LAGVPTPKSHLQLLGAVCMFLASKLKETSPLTAEKLCIYTDNSIKPQELLEWELVVLGKLKWNLAAVTPHDFIEHILRKLPQQREKLSLIRKHAQTFIALCATAQQVGQGKGKGCNQEMPQERLRGVSKSQRPAPDSISASFRVARRLLLLRHVCHVQHSSQTHSLD

SEQ ID NO: 35062 - protein, 14 aa, Homo sapiens
LVSSSFWLFLFFVF

SEQ ID NO: 35063 - protein, 80 aa, Homo sapiens [sequence omitted]

SEQ ID NO: 35064 - protein, 58 aa, Homo sapiens
MLSLLKKKKISKVFTLYLLSASTACSGDSIPAPMEEGSTFPKHHLLEEEAEAQQGKVT

SEQ ID NO: 35065 - protein, 32 aa, Homo sapiens
MFLSTGLWLVLAQCLENTDHVMKRECHAAGHQ

SEQ ID NO: 35066 - protein, 2817 aa, Homo sapiens
LQGKMIPARFAGVLLALALILPGTLCAEGTRGRSSTARCSLFGSDFVNTFDGSMYSFAGYCSYLLAGGCQKRSFSIIGDFQNGKRVSLSVYLGEFFDIHLFVNGTVTQGDQRVSMPYASKGLYLETEAGYYKLSGEAYGFVARIDGSGNFQVLLSDRYFNKTCGLCGNFNIFAEDDFMTQEGTLTSDPYDFANSWALSSGEQWCERASPPSSSCNISSGEMQKGLWEQCQLLKSTSVFARCHPLVDPEPFVALCEKTLCECAGGLECACPALLEYARTCAQEGMVLYGWTDHSACSPVCPAGMEYRQCVSPCARTCQSLHINEMCQERCVDGCSCPEGQLLDEGLCVESTECPCVHSGKRYPPGTSLSRDCNTCICRNSQWICSNEECPGECLVTGQSHFKSFDNRYFTFSGICQYLLARDCQDHSFSIVIETVQCADDRDAVCTRSVTVRLPGLHNSLVKLKHGAGVAMDGQDVQLPLLKGDLRIQHTVTASVRLSYGEDLQMDWDGRGRLLVKLSPVYAGKTCGLCGNYNGNQGDDFLTPSGLAEPRVEDFGNAWKLHGDCQDLQKQHSDPCALNPRMTRFSEEACAVLTSPTFEACHRAVSPLPYLRNCRYDVCSCSDGRECLCGALASYAAACAGRGVRVAWREPGRCELNCPKGQVYLQCGTPCNLTCRSLSYPDEECNEACLEGCFCPPGLYMDERGDCVPKAQCPCYYDGEIFQPEDIFSDHHTMCYCEDGFMHCTMSGVPGSLLPDAVLSSPLSHRSKRSLSCRPPMVKLVCPADNLRAEGLECTKTCQNYDLECMSMGCVSGCLCPPGMVRHENRCVALERCPCFHQGKEYAPGETVKIGCNTCVCQDRKWNCTDHVCDATCSTIGMAHYLTFDGLKYLFPGECQYVLVQDYCGSNPGTFRILVGNKGCSHPSVKCKKRVTILVEGGEIELFDGEVNVKRPMKDETHFEVVESGRYIILLLGKALSVVWDRHLSISVVLKQTYQEKVCGLCGNFDGIQNNDLTSSNLQVEEDPVDFGNSWKVSSQCADTRKVPLDSSPATCHNNIMKQTMVDSSCRILTSDVFQDCNKLVDPEPYLDVCIYDTCSCESIGDCACFCDTIAAYAHVCAQHGKVVTWRTATLCPQSCEERNLRENGYECEWRYNSCAPACQVTCQHPEPLACPVQCVEGCHAHCPPGKILDELLQTCVDPEDCPVCEVAGRRFASGKKVTLNPSDPEHCQICHCDVVNLTCEACQEPGGLVVPPTDAPVSPTTLYVEDISEPPLHDFYCSRLLDLVFLLDGSSRLSEAEFEVLKAFVVDMMERLRISQKWVRVAVVEYHDGSHAYIGLKDRKRPSELRRIASQVKYAGSQVASTSEVLKYTLFQIFSKIDRPEASRITLLLMASQEPQRMSRNFVRYVQGLKKKKVIVIPVGIGPHANLKQIRLIEKQAPENKAFVLSSVDELEQQRDEIVSYLCDLAPEAPPPTLPPDMAQVTVGPGLLGVSTLGPKRNSMVLDVAFVLEGSDKIGEADFNRSKEFMEEVIQRMDVGQDSIHVTVLQYSYMVTVEYPFSEAQSKGDILQRVREIRYQGGNRTNTGLALRYLSDHSFLVSQGDREQAPNLVYMVTGNPASDEIKRLPGDIQVVPIGVGPNANVQELERIGWPNAPILIQDFETLPREAPDLVLQRCCSGEGLQIPTLSPAPDCSQPLDVILLLDGSSSFPASYFDEMKSFAKAFISKANIGPRLTQVSVLQYGSITTIDVPWNVVPEKAHLLSLVDVMQREGGPSQIGDALGFAVRYLTSEMHGARPGASKAVVILVTDVSVDSVDAAADAARSNRVTVFPIGIGDRYDAAQLRILAGPAGDSNVVKLQRIEDLPTMVTLGNSFLHKLCSGFVRICMDEDGNEKRPGDVWTLPDQCHTVTCQPDGQTLLKSHRVNCDRGLRPSCPNSQSPVKVEETCGCRWTCPCVCTGSSTRHIVTFDGQNFKLTGSCSYVLFQNKEQDLEVILHNGACSPGARQGCMKSIEVKHSALSVELHSDMEVTVNGRLVSVPYVGGNMEVNVYGAIMHEVRFNHLGHIFTFTPQNNEFQLQLSPKTFASKTYGLCGICDENGANDFMLRDGTVTTDWKTLVQEWTVQRPGQTCQPILEEQCLVPDSSHCQVLLLPLFAECHKVLAPATFYAICQQDSCHQEQVCEVIASYAHLCRTNGVCVDWRTPDFCAMSCPPSLVYNHCEHGCPRHCDGNVSSCGDHPSEGCFCPPDKVMLEGSCVPEEACTQCIGEDGVQHQFLEAWVPDHQPCQICTCLSGRKVNCTTQPCPTAKAPTCGLCEVARLRQNADQCCPEYECVCDPVSCDLPPVPHCERGLQPTLTNPGECRPNFTCACRKEECKRVSPPSCPPHRLPTLRKTQCCDEYECACNCVNSTVSCPLGYLASTATNDCGCTTTTCLPDKVCVHRSTIYPVGQFWEEGCDVCTCTDMEDAVMGLRVAQCSQKPCEDSCRSGFTYVLHEGECCGRCLPSACEVVTGSPRGDSQSSWKSVGSQWASPENPCLINECVRVKEEVFIQQRNVSCPQLEVPVCPSGFQLSCKTSACCPSCRCERMEACMLNGTVIGPGKTVMIDVCTTCRCMVQVGVISGFKLECRKTTCNPCPLGYKEENNTGECCGRCLPTACTIQLRGGQIMTLKRDETLQDGCDTHFCKVNERGEYFWEKRVTGCPPFDEHKCLAEGGKIMKIPGTCCDTCEEPECNDITARLQYVKVGSCKSEVEVDIHYCQGKCASKAMYSIDINDVQDQCSCCSPTRTEPMQVALHCTNGSVVYHEVLNAMECKCSPRKCSK

SEQ ID NO: 35067 - protein, 296 aa, Homo sapiens
VPANAISCWGIKKHKGGTELSYIMGAQDEEEGIQDLDGLLVFDKIVEVTLLNLPWYNEETEGQRGEMTAPKSPRAKIRGTLCAEGTRGRSSTARCSLFGSDFVNTFDGSMYSFAGYCSYLLAGGCQKRSFSIIGDFQNGKRVSLSVYLGEFFDIHLFVNGTVTQGDQRVSMPYASKGLYLETEAGYYKLSGEAYGFVARIDGSGNFQVLLSDRYFNKTCGLCGNFNIFAEDDFMTQEGTLTSDPYDFANSWALSSGEQWCERASPPSSSCNISSGEMQKVGVDWPGCTWMVCDFWI

SEQ ID NO: 35068 - protein, 76 aa, Homo sapiens [sequence omitted]

SEQ ID NO: 35069 - protein, 458 aa, Homo sapiens
LSGMGLSTVPDLLLPLVLLELLVGIYPSGVIGLVPHLGDREKRDSVCPQGKYIHPQNNSICCTKCHKGTYLYNDCPGPGQDTDCRECESGSFTASENHLRHCLSCSKCRKEMGQVEISSCTVDRDTVCGCRKNQYRHYWSENLFQCFNCSLCLNGTVHLSCQEKQNTVCTCHAGFFLRENECVSCSNCKKSLECTKLCLPQIENVKGTEDSGTTVLLPLVIFFGLCLLSLLFIGLMYRYQRWKSKLYSIVCGKSTPEKEGELEGTTTKPLAPNPSFSPTPGFTPTLGFSPVPSSTFTSSSTYTPGDCPNFAAPRREVAPPYQGADPILATALASDPIPNPLQKWEDSAHKPQSLDTDDPATLYAVVENVPPLRWKEFVRRLGLSDHEIDRLELQNGRCLREAQYSMLATWRRRTPRREATLELLGRVLRDMDLLGCLEDIEEALCGPAALPPAPSLLR

SEQ ID NO: 35070 - protein, 415 aa, Homo sapiens
LSGMGLSTVPDLLLPLVLLELLVGIYPSGVIGLVPHLGDREKRDSVCPQGKYIHPQNNSICCTKCHKEMGQVEISSCTVDRDTVCGCRKNQYRHYWSENLFQCFNCSLCLNGTVHLSCQEKQNTVCTCHAGFFLRENECVSCSNCKKSLECTKLCLPQIENVKGTEDSGTTVLLPLVIFFGLCLLSLLFIGLMYRYQRWKSKLYSIVCGKSTPEKEGELEGTTTKPLAPNPSFSPTPGFTPTLGFSPVPSSTFTSSSTYTPGDCPNFAAPRREVAPPYQGADPILATALASDPIPNPLQKWEDSAHKPQSLDTDDPATLYAVVENVPPLRWKEFVRRLGLSDHEIDRLELQNGRCLREAQYSMLATWRRRTPRREATLELLGRVLRDMDLLGCLEDIEEALCGPAALPPAPSLLR

SEQ ID NO: 35071 - protein, 221 aa, Homo sapiens
LSGMGLSTVPDLLLPLVLLELLVGIYPSGVIGLVPHLGDREKRDSVCPQGKYIHPQNNSICCTKCHKGTYLYNDCPGPGQDTDCRECESGSFTASENHLRHCLSCSKCRKEMGQVEISSCTVDRDTVCGCRKNQYRHYWSENLFQCFNCSLCLNGTVHLSCQEKQNTVCTCHAGFFLRENECVSCSKVLLCRPGWNAVARSRLTATSASQIQAILLLQPPK

SEQ ID NO: 35072 - protein, 75 aa, Homo sapiens
LSGMGLSTVPDLLLPLVLLELLVGIYPSGVIGLVPHLGDREKRDSVCPQGKYIHPQNNSICCTKCHKEPVPALLE

SEQ ID NO: 35073 - protein, 74 aa, Homo sapiens
LSGMGLSTVPDLLLPLVLLELLVGIYPSGVIGLVPHLGDREKRDSVCPQGKYIHPQNNSICCTKCHKGTYLYND

SEQ ID NO: 35074 - protein, 68 aa, Homo sapiens
LSGMGLSTVPDLLLPLVLLELLVGIYPSGVIGLVPHLGDREKRDSVCPQGKYIHPQNNSICCTKCHKA

SEQ ID NO: 35075 - protein, 74 aa, Homo sapiens
LSGMGLSTVPDLLLPLVLLELLVGIYPSGVIGLVPHLGDREKRDSVCPQGKYIHPQNNSICCTKCHKGRGKWKR

SEQ ID NO: 35076 - protein, 90 aa, Homo sapiens
MGTQEGWCLLLCLALSGAAETSESGSRGELAGRRATEAPGCHPPRDSRRAKGPGMTPSPSKPNRGKAQRLAKEGTNSVCGGRVGTPQGKC

SEQ ID NO: 35077 - protein, 394 aa, Homo sapiens
LGWDWLSLAGGGVRVTACRRAPGFYKLSPQPPASLSAPPVRQSAASSFASPAEPHRSDTMGKVKVGVNGFGRIGRLVTRAAFNSGKVDIVAINDPFIDLNYMVYMFQYDSTHGKFHGTVKAENGKLVINGNPITIFQERDPSKIKWGDAGAEYVVESTGVFTTMEKAGAHLQGGAKRVIISAPSADAPMFVMGVNHEKYDNSLKIISNASCTTNCLAPLAKVIHDNFGIVEGLMTTVHAITATQKTVDGPSGKLWRDGRGALQNIIPASTGAAKAVGKVIPELNGKLTGMAFRVPTANVSVVDLTCRLEKPAKYDDIKKVVKQASEGPLKGILGYTEHQVVSSDFNSDTHSSTFDAGAGIALNDHFVKLISWYDNEFGYSNRVVDLMAHMASKE

SEQ ID NO: 35078 - protein, 345 aa, Homo sapiens
LRAEPHRSDTMGKVKVGVNGFGRIGRLVTRAAFNSGKVDIVAINDPFIDLNYMVYMFQYDSTHGKFHGTVKAENGKLVINGNPITIFQERDPSKIKWGDAGAEYVVESTGVFTTMEKAGAHLQGGAKRVIISAPSADAPMFVMGVNHEKYDNSLKIISNASCTTNCLAPLAKVIHDNFGIVEGLMTTVHAITATQKTVDGPSGKLWRDGRGALQNIIPASTGAAKAVGKVIPELNGKLTGMAFRVPTANVSVVDLTCRLEKPAKYDDIKKVVKQASEGPLKGILGYTEHQVVSSDFNSDTHSSTFDAGAGIALNDHFVKLISWYDNEFGYSNRVVDLMAHMASKE

SEQ ID NO: 35079 - protein, 264 aa, Homo sapiens
VEDRMEEMRDPSKIKWGDAGAEYVVESTGVFTTMEKAGAHLQGGAKRVIISAPSADAPMFVMGVNHEKYDNSLKIISNASCTTNCLAPLAKVIHDNFGIVEGLMTTVHAITATQKTVDGPSGKLWRDGRGALQNIIPASTGAAKAVGKVIPELNGKLTGMAFRVPTANVSVVDLTCRLEKPAKYDDIKKVVKQASEGPLKGILGYTEHQVVSSDFNSDTHSSTFDAGAGIALNDHFVKLISWYDNEFGYSNRVVDLMAHMASKE

SEQ ID NO: 35080 - protein, 298 aa, Homo sapiens
VEDRMEEMCFGEATRMVWLPWVYGNLVSLNMVLSPSPPHPHRRDPSKIKWGDAGAEYVVESTGVFTTMEKAGAHLQGGAKRVIISAPSADAPMFVMGVNHEKYDNSLKIISNASCTTNCLAPLAKVIHDNFGIVEGLMTTVHAITATQKTVDGPSGKLWRDGRGALQNIIPASTGAAKAVGKVIPELNGKLTGMAFRVPTANVSVVDLTCRLEKPAKYDDIKKVVKQASEGPLKGILGYTEHQVVSSDFNSDTHSSTFDAGAGIALNDHFVKLISWYDNEFGYSNRVVDLMAHMASKE

SEQ ID NO: 35081 - protein, 235 aa, Homo sapiens
MTTLVSWKDSWYESWGMGLRLPPFSSKTGSSLPGLRATLGLGVLGTGFPIISFQGGEGGRGVMWGVRCRASLLLQTTVHAITATQKTVDGPSGKLWRDGRGALQNIIPASTGAAKAVGKVIPELNGKLTGMAFRVPTANVSVVDLTCRLEKPAKYDDIKKVVKQASEGPLKGILGYTEHQVVSSDFNSDTHSSTFDAGAGIALNDHFVKLISWYDNEFGYSNRVVDLMAHMASKE

SEQ ID NO: 35082 - protein, 328 aa, Homo sapiens
VGGRLCSEKEECATGAHGPRLWPGRFYPLSRKALPPQSAFYPTLLPSYPQYGWVLHCQVQEIFQFYPSVPDRRCLALSLRLDCSGAISAHCNLHLPGSSDSCASDSQVARITGNSETATPTNVDLPQVIPKSENSSQPAKKAKGAAKTKQQLQKQQHPKKASFQKLNGISKGADSELSTVPSVTKTQASSSFQDSSQPAGKAEGIREPKVTGKLKQRSPKLQSSKKVAFLRQNAPPKGTDTQTPAVLSPSKTQATLKPKDHHQPLGRAKGVEKQQLPEQPFEKAAFQKQNDTPKGPQPPTVSPIRSSRPPPAKRKKSQSRGNSQLLLS

SEQ ID NO: 35083 - protein, 33 aa, Homo sapiens
LQRNTELMVSSSSLPSQAKLLKLGVGAQGKDLL

SEQ ID NO: 35084 - protein, 644 aa, Homo sapiens
VEELGFAGARAAAPLPGECKGRAARRGGHPLPRAPALRVSRARSVRVSVWVCLAPEVRARALRLALFPLPRPFLVLPPSSAPSFPSKRRPSRALAQALAPPQPSPPESSGALERRRNKTAGGREREGRMEESHFNSNPYFWPSIPTVSGQIENTMFINKMKDQLLPEKGCGLAPPHYPTLLTVPASVSLPSGISMDTESKSDQLTPHSQASVTQNITVVPVPSTGLMTAGVSCSQRWRREGSQSRGPGLVITSPSGSLVTTASSAQTFPISAPMIVSALPPGSQALQVVPDLSKKVASTLTEEGGGGGGGGGSVAPKPPRGRKKKRMLESGLPEMNDPYVLSPEDDDDHQKDGKTYRCRMCSLTFYSKSEMQIHSKSHTETKPHKCPHCSKTFANSSYLAQHIRIHSGAKPYSCNFCEKSFRQLSHLQQHTRIHTGDRPYKCAHPGCEKAFTQLSNLQSHRRQHNKDKPFKCHNCHRAYTDAASLEVHLSTHTVKHAKVYTCTICSRAYTSETYLMKHMRKHNPPDLQQQVQAAAAAAAVAQAQAQAQAQAQAQAQAQAQAQASQASQQQQQQQQQQQQQQQQPPPHFQSPGAAPQGGGGGDSNPNPPPQCSFDLTPYKTAEHHKDICLTVTTSTIQVEHLASS

SEQ ID NO: 35085 - protein, 27 aa, Homo sapiens
VDTMRHPFLLCILCLGVQWGARDGAWG

SEQ ID NO: 35086 - protein, 20 aa, Homo sapiens
VDTMRHPFLLCILCLGLWTS

SEQ ID NO: 35087 - protein, 40 aa, Homo sapiens
MFLLVLSVFCDFMCSIAPRCHALSLVSLRAQHLSLFITCH

SEQ ID NO: 35088 - protein, 175 aa, Homo sapiens
LRVSAPDPPPPHPARLCRLFQRPSLPSGRRCRCRRRRRHRARFRPRPPSAVQGPSVSAPGPRLPASPGPGPGTMSEKSVEAAAELSAKDLKEKKEKVEEKASRKERKKEVVEEEENGAEEEEEETAEDGEEEDEGEEEDEEEEEEDDEGPALKRAAEEEDEADPKRQKTENGASA

SEQ ID NO: 35089 - protein, 83 aa, Homo sapiens
LLCLLSATALLCSLGHPRPHLLRLPDLPSFPAFLWIPASGHPSPPSLQGPLLVSLLLEPLPPPPSLQNFSFTPHPPPLPPFLF

SEQ ID NO: 35090 - protein, 554 aa, Homo sapiens
LRSLALWILLIPFLGSPSTPKASLGREETETQVLPAPCFSLGKHPGSFSTPASRLTPPPLGLSFAHLVKPLQPGAEVPVVWAQEGAPAQLPCSPTIPLQDLSLLRRAGVTWQHQPDSGPPAAAPGHPLAPGPHPAAPSSWGPRPRRYTVLSVGPGGLRSGRLPLQPRVQLDERGRQRGDFSLWLRPARRADAGEYRAAVHLRDRALSCRLRLRLGQASMTASPPGSLRASDWVILNCSFSRPDRPASVHWFRNRGQGRVPVRESPHHHLAESFLFLPQVSPMDSGPWGCILTYRDGFNVSIMYNLTVLGLEPPTPLTVYAGAGSRVGLPCRLPAGVGTRSFLTAKWTPPGGGPDLLVTGDNGDFTLRLEDVSQAQAGTYTCHIHLQEQQLNATVTLAIITVTPKSFGSPGSLGKLLCEVTPVSGQERFVWSSLDTPSQRSFSGPWLEAQEAQLLSQPWQCQLYQGERLLGAAVYFTELSSPGAQRSGRAPGALPAGHLLLFLILGVLSLLLLVTGAFGFHLWRRQVSQGHGNPAPQQLPLFHPQSADGTPSSGR

SEQ ID NO: 35091 - protein, 536 aa, Homo sapiens
VWRSLAIGLPVSLHLSTTLQKEQSTLPTGLLVAELQVLTQIRLFEKQRARKTQAQRPCHFCGLRSLLAQAPASLGKATMNRGVPFRHLLLVLQLALLPAATQGKKVVLGKKGDTVELTCTASQKKSIQFHWKNSNQIKILGNQGSFLTKGPSKLNDRADSRRSLWDQGNFPLIIKNLKIEDSDTYICEVEDQKEEVQLLVFGLTANSDTHLLQGQSLTLTLESPPGSSPSVQCRSPRGKNIQGGKTLSVSQLELQDSGTWTCTVLQNQKKVEFKIDIVVLAFQKASSIVYKKEGEQVEFSFPLAFTVEKLTGSGELWWQAERASSSKSWITFDLKNKEVSVKRVTQDPKLQMGKKLPLHLTLPQALPQYAGSGNLTLALEAKTGKLHQEVNLVVMRATQLQKNLTCEVWGPTSPKLMLSLKLENKEAKVSKREKAVWVLNPEAGMWQCLLSDSGQVLLESNIKVLPTWSTPVQPMALIVLGGVAGLLLFIGLGIFFCVRCRHRRRQAERMSQIKRLLSEKKTCQCPHRFQKTCSPI

SEQ ID NO: 35092 - protein, 208 aa, Homo sapiens
LQKEQSTLPTGLLVAELQVLTQIRLFEKQRARKTQAQRPCHFCGLRSLLAQAPASLGKATMNRGVPFRHLLLVLQLGPSKLNDRADSRRSLWDQGNFPLIIKNLKIEDSDTYICEVEDQKEEVQLLVFGLTANSDTHLLQGQSLTLTLESPPGSSPSVQCRSPRGKNIQGGKTLSVSQLELQDSGTWTCTVLQNQKKVEFKIDIVVLG

SEQ ID NO: 35093 - protein, 166 aa, Homo sapiens
MLRLLRPLLLLLLLPPPGSPEPPGLTQLSPGAPPQAPDLLYADGLRAYAAGAWAPAVALLREALRSQAALGRVRLDCGASCAADPGAALPAVLLGAPEPDSGPGPTQGSWERQLLRAALRRADCLTQCAARRLGPGGAARFAWGARSGTPSAVGSPTTTCRGPITS

SEQ ID NO: 35094 - protein, 684 aa, Homo sapiens
LGAGRGAAAGGAAEPGGAGPGAAGLRGELRGRSGRRAPRRASRGPGARLRAGTHAGVLGATASPCSAPPRRLPDPVRSTEAGPRGRGALRVGSALRDAFRRREPYNYLQRAYYQLKKLDLAAAAAHTFFVANPMHLQMREDMAKYRRMSGVRPQSFRDLETPPHWAAYDTGLELLGRQEAGLALPRLEEALQGSLAQMESCRADCEGPEEQQGAEEEEDGAASQGGLYEAIAGHWIQVLQCRQRCVGETATRPGRSFPVPDFLPNQLRRLHEAHAQVGNLSQAIENVLSVLLFYPEDEAAKRALNQYQAQLGEPRPGLGPREDIQRFILRSLGEKRQLYYAMEHLGTSFKDPDPWTPAALIPEALREKLREDQEKRPWDHEPVKPKPLTYWKDVLLLEGVTLTQDSRQLNGSERAVLDGLLTPAECGVLLQLAKDAAGAGARSGYRGRRSPHTPHERFEGLTVLKAAQLARAGTVGSQGAKLLLEVSERVRTLTQAYFSPERPLHLSFTHLVCRSAIEGEQEQRMDLSHPVHADNCVLDPDTGECWREPPAYTYRDYSGLLYLNDDFQGGDLFFTEPNALTVTARVRPRCGRLVAFSSGVENPHGVWAVTRGRRCALALWHTWAPEHREQEWIEAKELLQESQEEEEEEEEEMPSKDPSPEPPSRRHQRVQDKTGRAPRVREEL

SEQ ID NO: 35095 - protein, 95 aa, Homo sapiens
LRMWPLDLWKAILMPGHTGSPCVTSGAEQQALCPCTPTILGTYKGLDSEDSAQASLELTRPGELGRGPAAGPAALDRWGTLCLPEQKWQGRRLML

SEQ ID NO: 35096 - protein, 129 aa, Homo sapiens
LGSALLGWGAGRAQAGWGWTQRTSNLEGLAGERVQPPSRFPVSWSLVWARRAEAQPGGGFLNTDPMFLAGARVTPRPVSHGGDGATASGSGAAQEADCSNSRALPLGPQKTAGDMRSVAQGEGAGFALE

SEQ ID NO: 35097 - protein, 874 aa, Homo sapiens
LGTVGAAVCGEAAAGVMAELSEEALLSVLPTIRVPKAGDRVHKDECAFSFDTPESEGGLYICMNTFLGFGKQYVERHFNKTGQRVYLHLRRTRRPKEEDPATGTGDPPRKKPTRLAIGVEGGFDLSEEKFELDEDVKIVILPDYLEIARDGLGGLPDIVRDRVTSAVEALLSADSASRKQEVQAWDGEVRQVSKHAFSLKQLDNPARIPPCGWKCSKCDMRENLWLNLTDGSILCGRRYFDGSGGNNHAVEHYRETGYPLAVKLGTITPDGADVYSYDEDDMVLDPSLAEHLSHFGIDMLKMQKTDKTMTELEIDMNQRIGEWELIQESGVPLKPLFGPGYTGIRNLGNSCYLNSVVQVLFSIPDFQRKYVDKLEKIFQNAPTDPTQDFSTQVAKLGHGLLSGEYSKPVPESGDGERVPEQKEVQDGIAPRMFKALIGKGHPEFSTNRQQDAQEFFLHLINMVERNCRSSENPNEVFRFLVEEKIKCLATEKVKYTQRVDYIMQLPVPMDAALNKEELLEYEEKKRQAEEEKMALPELVRAQVPFSSCLEAYGAPEQVDDFWSTALQAKSVAVKTTRFASFPDYLVIQIKKFTFGLDWVPKKLDVSIEMPEELDISQLRGTGLQPGEEELPDIAPPLVTPDEPKGSLGFYGNEDEDSFCSPHFSSPTSPMLDESVIIQLVEMGFPMDACRKAVYYTGNSGAEAAMNWVMSHMDDPDFANPLILPGSSGPGSTSAAADPPPEDCVTTIVSMGFSRDQALKALRATNNSLERAVDWIFSHIDDLDAEAAMDISEGRSAADSISESVPVGPKVRDGPGKYQLFAFISHMGTSTMCGHYVCHIKKEGRWVIYNDQKVCASEKPPKDLGYIYFYQRVAS

SEQ ID NO: 35098 - protein, 187 aa, Homo sapiens
MIQVGWGGEQGGAGPPSSPKHINPFTSTDFANPLILPGSSGPGSTSAAADPPPEDCVTTIVSMGFSRDQALKALRATNNSLERAVDWIFSHIDDLDAEAAMDISEGRSAADSISESVPVGPKVRDGPGKYQLFAFISHMGTSTMCGHYVCHIKKEGRWVIYNDQKVCASEKPPKDLGYIYFYQRVAS

SEQ ID NO: 35099 - protein, 341 aa, Homo sapiens
LSRKPRNRGGGDRAPDSPRTLPQEGGTSEQCIIGRRPGRRQEGGRGAGLRGTGRAMAEDGEEAEFHFAALYISGQWPRLRADTDLQRLGSSAMAPSRKFFVGGNWKMNGRKQSLGELIGTLNAAKVPADTEVVCAPPTAYIDFARQKLDPKIAVAAQNCYKVTNGAFTGEISPGMIKDCGATWVVLGHSERRHVFGESDELIGQKVAHALAEGLGVIACIGEKLDEREAGITEKVVFEQTKVIADNVKDWSKVVLAYEPVWAIGTGKTATPQQAQEVHEKLRGWLKSNVSDAVAQSTRIIYGGSVTGATCKELASQPDVDGFLVGGASLKPEFVDIINAKQ

SEQ ID NO: 35100 - protein, 277 aa, Homo sapiens
LSQLGLCHPRAKDALLHPPSSLHRNRRAAGLIQRGIPFSFIPQRPQYKPQELAPLLLLQILALQRGEVVCAPPTAYIDFARQKLDPKIAVAAQNCYKVTNGAFTGEISPGMIKDCGATWVVLGHSERRHVFGESDELIGQKVAHALAEGLGVIACIGEKLDEREAGITEKVVFEQTKVIADNVKDWSKVVLAYEPVWAIGTGKTATPQQAQEVHEKLRGWLKSNVSDAVAQSTRIIYGGSVTGATCKELASQPDVDGFLVGGASLKPEFVDIINAKQ

SEQ ID NO: 35101 - protein, 125 aa, Homo sapiens [sequence omitted]

SEQ ID NO: 35102 - protein, 21 aa, Homo sapiens
MASASTQPAALSAEQAKASIH

SEQ ID NO: 35103 - protein, 84 aa, Homo sapiens
LITERFFLTWLGPLCTAVPLAQPRPLRPSAVASPSLQRDAVPWLHLLIPCAPFLSGSPQDGEVVSPRPQWAGCRDPAQGPRCPR

SEQ ID NO: 35104 - protein, 307 aa, Homo sapiens
VPPASRSDMAQNLKDLAGRLPAGPRGMGTALKLLLGAGAVAYGVRESVFTVEGGHRAIFFNRIGGVQQDTILAEGLHFRIPWFQYPIIYDIRARPRKISSPTGSKDLQMVNISLRVLSRPNAQELPSMYQRLGLDYEERVLPSIVNEVLKSVVAKFNASQLITQRAQVSLLIRRELTERAKDFSLILDDVAITELSFSREYTAAVEAKQVAQQEAQRAQFLVEKAKQEQRQKIVQAEGEAEAAKMLGEALSKNPGYIKLRKIRAAQNISKTIATSQNRIYLTADNLVLNLQDESFTRGSDSLIKGKK

SEQ ID NO: 35105 - protein, 120 aa, Homo sapiens
VPPASRSDMAQNLKDLAGRLPAGPRGMGTALKLLLGAGAVAYGVRESVFTVEGGHRAIFFNRIGGVQQDTILAEGLHFRIPWFQYPIIYDIRARPRKISSPTDGEYLPASVVSTQCSGAS

SEQ ID NO: 35106 - protein, 336 aa, Homo sapiens
VDKSPEMWCIVLFSLLAWVYAEPTMYGEILSPNYPQAYPSEVEKSWDIEVPEGYGIHLYFTHLDIELSENCAYDSVQIISGDTEEGRLCGQRSSNNPHSPIVEEFQVPYNKLQVIFKSDFSNEERFTGFAAYYVATDINECTDFVDVPCSHFCNNFIGGYFCSCPPEYFLHDDMKNCGVNCSGDVFTALIGEIASPNYPKPYPENSRCEYQIRLEKGFQVVVTLRREDFDVEAADSAGNCLDSLVFVAGDRQFGPYCGHGFPGPLNIETKSNALDIIFQTDLTGQKKGWKLRYHGDPMPCPKEDTPNSVWEPAKAKYVFRDVVQITCLDGFEVVEK

SEQ ID NO: 35107 - protein, 127 aa, Homo sapiens
LVFVLDLSLFLLFVDINECTDFVDVPCSHFCNNFIGGYFCSCPPEYFLHDDMKNCGVNCSGDVFTALIGEIASPNYPKPYPENSRCEYQIRLEKGFQVVVTLRREDFDVEAADSAGNCLDSLVVRDG

SEQ ID NO: 35108 - protein, 367 aa, Homo sapiens
VVMFIILQGRVGATSFYSTCQSNGKWSNSKLKCQPVDCGIPESIENGKVEDPESTLFGSVIRYTCEEPYYYMENGGGGEYHCAGNGSWVNEVLGPELPKCVPVCGVPREPFEEKQRIIGGSDADIKNFPWQVFFDNPWAGGALINEYWVLTAAHVVEGNREPTMYVGSTSVQTSRLAKSKMLTPEHVFIHPGWKLLEVPEGRTNFDNDIALVRLKDPVKMGPTVSPICLPGTSSDYNLMDGDLGLISGWGRTEKRDRAVRLKAARLPVAPLRKCKEVKVEKPTADAEAYVFTPNMICAGGEKGMDSCKGDSGGAFAVQDPNDKTKFYAAGLVSWGPQCGTYGLYTRVKNYVDWIMKTMQENSTPRED

SEQ ID NO: 35109 - protein, 16 aa, Homo sapiens
MHYLLFLMIFSLFHHD

SEQ ID NO: 35110 - protein, 654 aa, Homo sapiens
MWLLYLLVPALFCRAGGSIPIPQKLFGEVTSPLFPKPYPNNFETTTVITVPTGYRVKLVFQQFDLEPSEGCFYDYVKISADKKSLGRFCGQLGSPLGNPPGKKEFMSQGNKMLLTFHTDFSNEENGTIMFYKGFLAYYQAVDLDECASRSKSGEEDPQPQCQHLCHNYVGGYFCSCRPGYELQEDRHSCQAECSSELYTEASGYISSLEYPRSYPPDLRCNYSIRVERGLTLHLKFLEPFDIDDHQQVHCPYDQLQIYANGKNIGEFCGKQRPPDLDTSSNAVDLLFFTDESGDSRGWKLRYTTEIIKCPQPKTLDEFTIIQNLQPQYQFRDYFIATCKQGYQLIEGIQVVAGVVDVSAGRVSWSTSSQTCCTRVYTCTAQGIWKNEQKGEKIPRCLPVCGKPVNPVEQRQRIIGGQKAKMGNFPWQVFTNIHGRGGGALLGDRWILTAAHTLYPKEHEAQSNASLDVFLGHTNVEELMKLGNHPIRRVSVHPDYRQDESYNFEGDIALLELENSVTLGPNLLPICLPDNDTFYDLGLMGYVSGFGVMEEKIAHDLRFVRLPVANPQACENWLRGKNRMDVFSQNMFCAGHPSLKQDACQGDSGGVFAVRDPNTDRWVATGIVSWGIGCSRGYGFYTKVLNYVDWIKKEMEEED

SEQ ID NO: 35111 - protein, 97 aa, Homo sapiens
LGETRRTITEPPRAPLRNRSSSYPLSFFHQISADKKSLGRFCGQLGSPLGNPPGKKEFMSQGNKMLLTFHTDFSNEENGTIMFYKGFLAYYQAVGLW

SEQ ID NO: 35112 - protein, 143 aa, Homo sapiens
MWLLYLLVPALFCRAGGSIPIPQKLFGEVTSPLFPKPYPNNFETTTVITVPTGYRVKLVFQQFDLEPSEGCFYDYVKISADKKSLGRFCGQLGSPLGNPPGKKEFMSQGNKMLLTFHTDFSNEENGTIMFYKGFLAYYQAVGE

SEQ ID NO: 35113 - protein, 112 aa, Homo sapiens
MWLLYLLVPALFCRAGGSIPIPQKLFGEVTSPLFPKPYPNNFETTTVITVPTGYRVKLVFQQFDLEPSEGCFYDYVKVGAGWAGRGETKLGPLGSGICMACTPPDTAQPHKS

SEQ ID NO: 35114 - protein, 20 aa, Homo sapiens
VVADLGLVGILLLLGGSRSP

SEQ ID NO: 35115 - protein, 1032 aa, Homo sapiens
LGETGSRCKSTASATQIGICPGPLYGLVWAAGSFPSLPCCTPLLGDPLYPSRKVESAGWRLPGEANAWPCPAPRRTMTLLLLPLLLASLLASCSCNKANKHKPWIEAEYQGIVMENDNTVLLNPPLFALDKDAPLRYAGEICGFRLHGSGVPFEAVILDKATGEGLIRAKEPVDCEAQKEHTFTIQAYDCGEGPDGANTKKSHKATVHVRVNDVNEFAPVFVERLYRAAVTEGKLYDRILRVEAIDGDCSPQYSQICYYEILTPNTPFLIDNDGNIENTEKLQYSGERLYKFTVTAYDCGKKRAADDAEVEIQVKPTCKPSWQGWNKRIEYAPGAGSLALFPGIRLETCDEPLWNIQATIELQTSHVAKGCDRDNYSERALRKLCGAATGEVDLLPMPGPNANWTAGLSVHYSQDSSLIYWFNGTQAVQVPLGGPSGLGSGPQDSLSDHFTLSFWMKHGVTPNKGKKEEETIVCNTVQNEDGFSHYSLTVHGCRIAFLYWPLLESARPVKFLWKLEQVCDDEWHHYALNLEFPTVTLYTDGISFDPALIHDNGLIHPPRREPALMIGACWTEEKNKEKEKGDNSTDTTQGDPLSIHHYFHGYLAGFSVRSGRLESREVIECLYACREGLDYRDFESLGKGMKVHVNPSQSLLTLEGDDVETFNHALQHVAYMNTLRFATPGVRPLRLTTAVKCFSEESCVSIPEVEGYVVVLQPDAPQILLSGTAHFARPAVDFEGTNGVPLFPDLQITCSISHQVEAKKDESWQGTVTDTRMSDEIVHNLDGCEISLVGDDLDPERESLLLDTTSLQQRGLELTNTSAYLTIAGVESITVYEEILRQARYRLRHGAALYTRKFRLSCSEMNGRYSSNEFIVEVNVLHSMNRVAHPSHVLSSQQFLHRGHQPPPEMAGHSLASSHRNSMIPSAATLIIVVCVGFLVLMVVLGLVRIHSLHRRVSGAGGPPGASSDPKDPDLFWDDSALTIIVNPMESYQNRQSCVTGAVGGQQEDEDSSDSEVADSPSSDERRIIETPPHRY

SEQ ID NO: 35116 - protein, 233 aa, Homo sapiens [sequence omitted]

SEQ ID NO: 35117 - protein, 100 aa, Homo sapiens
LARSIAKEGFKKISKGANPVEIRKGVMLAVDAVIAELRKQSKFVTTPEEIAQVATTSANGDKEIGNIISNAMKKVGRKGVITVKDGKTLNDELEIIGHEV

SEQ ID NO: 35118 - protein, 82 aa, Homo sapiens
LEWKYYLLIGVLDFGLLYSKKSFSYLSGELFAQAPVEQYPGIAVETVTDSSRYFVIRIQDGTGKRTGILSGTKLGKQVNAQP

SEQ ID NO: 35119 - protein, 90 aa, Homo sapiens
LEWKYYLLIGVLDFGLLYSKKSFSYLSGELFAQAPVEQYPGIAVETVTDSSRYFVIRIQDGTGRSAFIGIGFTDRGDAFDFNVSLQDHFK

SEQ ID NO: 35120 - protein, 237 aa, Homo sapiens
LEWKYYLLIGVLDFGLLYSKKSFSYLSGELFAQAPVEQYPGIAVETVTDSSRYFVIRIQDGTGRSAFIGIGFTDRGDAFDFNVSLQDHFKWVKQESEISKESQEMDARPKLDLGFKEGQTIKLCIGNITNKKGGASKPRTARGGGLSLLPPPPGGKVTIPPPSSSVAISNHVTPPPIPKSNHGGSDADILLDLDSPAPVTTPAPTPVSVSNDLWGDFSTASSSVPNQAPQPSNWVQF

SEQ ID NO: 35121 - protein, 74 aa, Homo sapiens
VSHRARPFQDFDYVFLFSFLTLCLDILLDLDSPAPVTTPAPTPVSVSNDLWGDFSTASSSVPNQAPQPSNWVQF

SEQ ID NO: 35122 - protein, 24 aa, Homo sapiens
LWFLVLMRPLLRICAYLVPLLSTS

SEQ ID NO: 35123 - protein, 208 aa, Homo sapiens
MDGPGFYTTRCLAPMMSEVIRILQEGVDLEKLDSLTTSFGFPVGAATLVDEVGVDVAKHMAEDLRKALGERFGGGNPELLTQMVSKGFLGRKFGKGFYIYQEGVKSKNLNSDVDSILVSLKMPPKSEVSPGEDIQFRLVTRFVNEAVMCLREGILATPAEGDIAAVFGLGFPPCFGGPFCFVALYGPQKIVARLKKYEAAYGKQFTPC

SEQ ID NO: 35124 - protein, 112 aa, Homo sapiens
MSLLGPKVLLFLAAFIITSDWIPLGVNSQRGDDVTQATPETFTEDPNLVNDPATDETVLAVLADIAPSTDDLASLSEKNTTAECWDEKFTCTRLYSVHRPVKQCIHQLCFTR

SEQ ID NO: 35125 - protein, 75 aa, Homo sapiens
MSLLGPKVLLFLAAFIITSDWIPLGVNSQRGDDVTQATPETFTEDPNLVNDPATDETVLAVLADIAPSTDDLGPK

SEQ ID NO: 35126 - protein, 86 aa, Homo sapiens
MSLLGPKVLLFLAAFIITSDWIPLGVNSQRGDDVTQATPETFTEDPNLVNDPATDETVLAVLADIAPSTDDLGEFRSGTPRSSGPF

SEQ ID NO: 35127 - protein, 468 aa, Homo sapiens
VCEDARPACGSRSRRRRKEAAPGIPTPSPSSPSPTSSRPAARASSKAPARLSRPRAREEPPDPGRRYIQEEIIQARKHKLIKMCSSVAAKLWFLTDRRIREDYPQKEILRALKAKCCEEELDFRAVVMDEVVLTIEQGNLGLRINGELITAYPQVVVVRVPTPWVQSDSDITVLRHLEKMGCRLMNRPQAILNCVNKFWTFQELAGHGVPLPDTFSYGGHENFAKMIDEAEVLEFPMVVKNTRGHRGKAVFLARDKHHLADLSHLIRHEAPYLFQKYVKESHGRDVRVIVVGGRVVGTMLRCSTDGRMQSNCSLGGVGMMCSLSEQGKQLAIQVSNILGMDVCGIDLLMKDDGSFCVCEANANVGFIAFDKACNLDVAGIIADYAASLLPSGRLTRRMSLLSVVSTASETSEPELGPPASTAVDNMSASSSSVDSDPESTERELLTKLPGGLFNMNQLLANEIKLLVD

SEQ ID NO: 35128 - protein, 1467 aa, Homo sapiens
LPLTLEKSVSPTKMWAQLLLGMLALSPAIAEELPNYLVTLPARLNFPSVQKVCLDLSPGYSDVKFTVTLETKDKTQKLLEYSGLKKRHLHCISFLVPPPAGGTEEVATIRVSGVGNNISFEEKKKVLIQRQGNGTFVQTDKPLYTPGQQVYFRIVTMDSNFVPVNDKYSMVELQDPNSNRIAQWLEVVPEQGIVDLSFQLAPEAMLGTYTVAVAEGKTFGTFSVEEYVLPKFKVEVVEPKELSTVQESFLVKICCRYTYGKPMLGAVQVSVCQKANTYWYREVEREQLPDKCRNLSGQTDKTGCFSAPVDMATFDLIGYAYSHQINIVATVVEEGTGVEANATQNIYISPQMGSMTFEDTSNFYHPNFPFSGKIRVRGHDDSFLKNHLVFLVIYGTNGTFNQTLVTDNNGLAPFTLETSGWNGTDVSLEGKFQMEDLVYNPEQVPRYYQNAYLHLRPFYSTTRSFLGIHRLNGPLKCGQPQEVLVDYYIDPADASPDQEISFSYYLIGKGSLVMEGQKHLNSKKKGLKASFSLSLTFTSRLAPDPSLVIYAIFPSGGVVADKIQFSVEMCFDNQVSLGFSPSQQLPGAEVELQLQAAPGSLCALRAVDESVLLLRPDRELSNRSVYGMFPFWYGHYPYQVAEYDQCPVSGPWDFPQPLIDPMPQGHSSQRSIIWRPSFSEGTDLFSFFRDVGLKILSNAKIKKPVDCSHRSPEYSTAMGAGGGHPEAFESSTPLHQAEDSQVRQYFPETWLWDLFPIGNSGKEAVHVTVPDAITEWKAMSFCTSQSRGFGLSPTVGLTAFKPFFVDLTLPYSVVRGESFRLTATIFNYLKDCIRVQTDLAKSHEYQLESWADSQTSSCLCADDAKTHHWNITAVKLGHINFTISTKILDSNEPCGGQKGFVPQKGRSDTLIKPVLVKPEGVLVEKTHSSLLCPKGKVASESVSLELPVDIVPDSTKAYVTVLGDIMGTALQNLDGLVQMPSGCGEQNMVLFAPIIYVLQYLEKAGLLTEEIRSRAVGFLEIGYQKELMYKHSNGSYSAFGERDGNGNTWLTAFVTKCFGQAQKFIFIDPKNIQDALKWMAGNQLPSGCYANVGNLLHTAMKGGVDDEVSLTAYVTAALLEMGKDVDDPMVSQGLRCLKNSATSTTNLYTQALLAYIFSLAGEMDIRNILLKQLDQQAIISGESIYWSQKPTPSSNASPWSEPAAVDVELTAYALLAQLTKPSLTQKEIAKATSIVAWLAKQHNAYGGFSSTQDTVVALQALAKYATTAYMPSEEINLVVKSTENFQRTFNIQSVNRLVFQQDTLPNVPGMYTLEASGQGCVYVQTVLRYNILPPTNMKTFSLSVEIGKARCEQPTSPRSLTLTIHTSYVGSRSSSNMAIVEVKMLSGFSPMEGTNQLLLQQPLVKKVEFGTDTLNIYLDELIKNTQTYTFTISQSVLVTNLKPATIKVYDYYLPDEQATIQYSDPCE

SEQ ID NO: 35129 - protein, 142 aa, Homo sapiens
LATPVSHDTMFPFYSCWRTGLLLLLLAVAVRESWQTEEKTCDLVGEKGKESEKELALVKRLKPLFNKSFESTVGQGSDTYIYIFRVCREAGNHTSGAGLVQINKSNGKETVVGRLNETHIFNGSLHHWLLFMLLGGSYTSDW

SEQ ID NO: 35130 - protein, 133 aa, Homo sapiens
LATPVSHDTMFPFYSCWRTGLLLLLLAVAVRESWQTEEKTCDLVGEKGKESEKELALVKRLKPLFNKSFESTVGQGSDTYIYIFRVCREAGNHTSGAGLVQINKSNGKETVVGRLNETHIFNGSKKTPLPTID

SEQ ID NO: 35131 - protein, 28 aa, Homo sapiens
LGLLTAVLLSVLLYQWILCQEPAPSFPQ

SEQ ID NO: 35132 - protein, 59 aa, Homo sapiens
LTFAFQVSNQTLSLFFTVLQDVPVRDLKPAIVKVYDYYETDEFAIAEYNAPCSKDLGNA

SEQ ID NO: 35133 - protein, 97 aa, Homo sapiens
LTFAFQVSNQTLSLFFTVLQDVPVRDLKPAIVKVYDYYETDEFAIAEYNAPCSKGKPLTLLQKAVRAPSACPPNLLLHKTLGKYLSKTSNYSHCTLL

SEQ ID NO: 35134 - protein, 154 aa, Homo sapiens
LFSFPLYSLSYVWFQVSVQLEASPAFLAVPVEKEQAPHCICANGRQTVSWAVTPKSLGNVNFTVSAEALESQELCGTEVPSVPEHGRKDTVIKPLLVEPEGLEKETTFNSLLCPSGGEVSEELSLKLPPNVVEESARASVSVLGESPAPSGSGH

SEQ ID NO: 35135 - protein, 175 aa, Homo sapiens
MSHELPCGHTQTVQAHYILNGGTLLGLKKLSFYYLIMAKGGIVRTGTHGLLVKQEDMKGHFSISIPVKSDIAPVARLLIYAVLPTGDVIGDSAKYDVENCLANKVDLSFSPSQSLPASHAHLRVTAAPQSVCALRAVDQSVLLMKPDAELSASSVSSWQPQESRRAVPGAQSKEK

SEQ ID NO: 35136 - protein, 91 aa, Homo sapiens
MGKNKLLHPSLVLLLLVLLPTDASVSGKPQYMVLVPSLLHTETTEKGCVLLSYLNETVTVSASLESVRGNRSLFTDLEAENDVLHCVAFAK

SEQ ID NO: 35137 - protein, 53 aa, Homo sapiens
MGKNKLLHPSLVLLLLVLLPTDASVSGKPVHFLFYKNKDNSLPQPNMEQCPGV

SEQ ID NO: 35138 - protein, 55 aa, Homo sapiens
LNSCCLPKWTKNQEQLQATHHHWDCCDLPALPLGLKSPNSMAHTGLTLLTLQPCK

SEQ ID NO: 35139 - protein, 15 aa, Homo sapiens
LGLILKKIKLCKDNV

SEQ ID NO: 35140 - protein, 151 aa, Homo sapiens
LGFGILIFKHSRMTFFLSLLLLLVCEAIWRSNSGSNTLENGYFLSRNKENHSQPTQSSLEDSVTPTKAVKTTGVLSSPCPPNWIIYEKSCYLFSMSLNSWDGSKRQCWQLGSNLLKIDSSNELSLTLLPKLECSEAATSQAQVILPPQLPE

SEQ ID NO: 35141 - protein, 28 aa, Homo sapiens
LSKKLILLTTLLSYLPYIAGFKAVEFKG

SEQ ID NO: 35142 - protein, 142 aa, Homo sapiens
VGFCRLLVVIGALLLLCGLTSLCFRCCCLSRQQNGEDGGPPPCEVTVIAFDHDSTLQSTITSLQSVFGPAARRILAVAHSHSSLGQLPSSLDTLPGYEEALHMSRFTVAMCGQKAPDLPPVPEEKQLPPTEKESTRIVDSWN

SEQ ID NO: 35143 - protein, 19 aa, Homo sapiens
MVILIALFNQEVQIPLTGK

SEQ ID NO: 35144 - protein, 93 aa, Homo sapiens
LNIILQRVLSGWLVEIEEYAAFDYLSFPVSTSFHDTISSYHFGQEVGQKILSYSIIRREFISAFHVIAPKGSRTRKASFSLILKSVFSTCTTA

SEQ ID NO: 35145 - protein, 344 aa, Homo sapiens
LRREIRPGLPESEPRPPRPPAALTADQPPPRRLSESRGGGGMSEAGEATTTTTTTLPQAPTEAAAAAPQDPAPKSPVGSGAPQAAAPAPAAHVAGNPGGDAAPAATGTAAAASLATAAGSEDAEKKVLATKVLGTVKWFNVRNGYGFINRNDTKEDVFVHQTAIKKNNPRKYLRSVGDGETVEFDVVEGEKGAEAANVTGPDGVPVEGSRYAADRRRYRRGYYGRRRGPPRNAGEIGEMKDGVPEGAQLQGPVHRNPTYRPRYRSRGPPRPRPAPAVGEAEDKENQQATSGPNQPSVRRGYRRPYNYRRRPRPPNAPSQDGKEAKAGEAPTENPAPPTQQSSAE

SEQ ID NO: 35146 - protein, 27 aa, Homo sapiens
VIEKLFMHGIKCMYLEQINALSSPGDK

SEQ ID NO: 35147 - protein, 48 aa, Homo sapiens
MLLVLLSVVLLALSSAQSTDNERPGCAVKDAVENARLIQGSPAMKMLQ

SEQ ID NO: 35148 - protein, 166 aa, Homo sapiens
MLLILLSVALLAFSSAQDLNEDVSQEDVPLVISDGGDSEQFLDEERQGPPLGGQQSQPSAGDGNQDDGPQQGPPQQGGQQQQGPPPPQGKPQGPPQQGGHPPPPQGRPQGPPQQGGHPRPPRGRPQGPPQQGGHQQGPPPPPPGKPQGPPPQGGRPQGPPQGQSPQ

SEQ ID NO: 35149 - protein, 72 aa, Homo sapiens
MLAPEAVSLVMALNMYLQSDVEDHRARDVEVREVHAQLPGQLEEGEQGAGEPLAEDAVRGSPAFGSRPQGHM

SEQ ID NO: 35150 - protein, 72 aa, Homo sapiens [sequence omitted]

SEQ ID NO: 35151 - protein, 50 aa, Homo sapiens
VERDSGIEISLLPPDLKQKKSQTASRPGTPLPKLETTRIQGLKPAWEFLV

SEQ ID NO: 35152 - protein, 59 aa, Homo sapiens
VERDSGIEISLLPPDLKQKKSQTASRPAATHREGSEISPQQVSPQSENRATVRLPIPGM

SEQ ID NO: 35153 - protein, 43 aa, Homo sapiens
VERDSGIEISLLPPDLKQKKSQTASRPGPTCVAPVGVTWKKSP

SEQ ID NO: 35154 - protein, 382 aa, Homo sapiens
VKFFLLALLFRKSHFKIMLMKPFIAGDKACNLMIFDTRKTARQPNCYLFFCPNEEACPLKPAKGLMSYRIITDFPSLTRNLPSQELPQEDSLLHGQFSQAVTPLAHHHTDYSKPTDISWRDTLSQKFGSSDHLEKLFKMDEASAQLLAYKEKGHSQSSQFSSDQEIAHLLPENVSALPATVAVASPHTTSATPKPATLLPTNASVTPSGTSQPQLATTAPPVTTVTSQPPTTLISTVFTRAAATLQAMATTAVLTTTFQAPTDSKGSLETIPFTEISNLTLNTGNVYNPTALSMSNVESSTMNKTASWEGREASPGSSSQGSVPENQYGLPFEKWLLIGSLLFGVLFLVIGLVLLGRILSESLRRKRYSRLDYLINGIYVDI

SEQ ID NO: 35155 - protein, 517 aa, Homo sapiens
MLPLSLQTVFSLYFWVNWRRASTLFTCLQELMQQNGIGYVLNASNTCPKPDFIPESHFLRVPVNDSFCEKILPWLDKSVDFIEKAKASNGCVLVHCLAGISRSATIAIAYIMKRMDMSLDEAYRFVKEKRPTISPNFNFLGQLLDYEKKIKNQTGASGPKSKLKLLHLEKPNEPVPAVSEGGQKSETPLSPPCADSATSEAAGQRPVHPASVPSVPSVQPSLLEDSPLVQALSGLHLSADRLEDSNKLKRSFSLDIKSVSYSASMAASLHGFSSSEDALEYYKPSTTLDGTNKLCQFSPVQELSEQTPETSPDKEEASIPKKLQTARPSDSQSKRLHSVRTSSSGTAQRSLLSPLHRSGSVEDNYHTSFLFGLSTSQQHLTKSAGLGLKGWHSDILAPQTSTPSLTSSWYFATESSHFYSASAIYGGSASYSAYSCSQLPTCGDQVYSVRRRQKPSDRADSRRSWHEESPFEKQFKRRSCQMEFGESIMSENRSREELGKVGSQSSFSGSMEIIEVS

SEQ ID NO: 35156 - protein, 218 aa, Homo sapiens
LFGFVFLRVRERRSCRPGRKMSNVRVSNGSPSLERMDARQAEHPKPSACRNLFGPVDHEELTRDLEKHCRDMEEASQRKWNFDFQNHKPLEGKYEWQEVEKGSLPEFYYRPPRPPKGACKVPAQESQDVSGSRPAAPLIGAPANSEDTHLVDPKTDPSDSQTGLAEQCAGIRKRPATDDSSTQNKRANRTEENVSDGSPNAGSVEQTPKKPGLRRRQT

SEQ ID NO: 35157 - protein, 60 aa, Homo sapiens
LCSSHIVLLSLTMHAMFFLFFEMEFRSCCPGWSAVARSPLTAAATSASRVQAILLPQPSE

SEQ ID NO: 35158 - protein, 175 aa, Homo sapiens
LPPCRPAALPPCRPAAGGRCPWCSVAPATSRPPVRRERLGYNMLGMIKNSLFGSVETWPWQVLSKGDKEEVAYEERACEGGKFATVEVTDKPVDEALREAMPKVAKYAGGTNDKGIGMGMTVPISFAVFPNEDGSLQKKLKVWFRIPNQFQSDPPAPSDKSVKIEEREGITVYSM

SEQ ID NO: 35159 - protein, 13 aa, Homo sapiens
VHIAAILITLLCN

SEQ ID NO: 35160 - protein, 32 aa, Homo sapiens
LQYYLISLGLLRFLFSMLHCCGKSGTLNGGTG

SEQ ID NO: 35161 - protein, 61 aa, Homo sapiens
MRIWLLGGLLPFLLLLSGLQRPTEGSEVAIKIDFDFAPGSFDDQYQGCSKQLPARNASLIL

SEQ ID NO: 35162 - protein, 269 aa, Homo sapiens
MRIWLLGGLLPFLLLLSGLQRPTEGSEVAIKIDFDFAPGSFDDQYQGCSKQVMEKLTQGDYFTKDIEAQKNYFRMWQKAHLAWLNQGKVLPQNMTTTHAVAILFYTLNSNVHSDFTRAMASVARTPQQYERSFHFKYLHYYLTSAIQLLRKDSIMENGTLCYEVHYRTKDVHFNAYTGATIRFGQFLSTSLLKEEAQEFGNQTLFTIFTCLGAPVQYFSLKKEVLIPPYELFKVINMSYHPRGDWLQLRSTGNLSTYNCQLLKGILYLN

SEQ ID NO: 35163 - protein, 108 aa, Homo sapiens
LQDETMKSLILLAILAALAVVTLCYESHESMESYELNPFINRRNANTFISPQQRWRAKVQERIRERSKPVHELNREACDDYRLCERYAMVYGYNAAYNRYFRKRRGTK

SEQ ID NO: 35164 - protein, 38 aa, Homo sapiens
LQDETMKSLILLAILAALAVVTLCYESHESMESYELSK

SEQ ID NO: 35165 - protein, 15 aa, Homo sapiens
LLLHKTLRLTCRTKP

SEQ ID NO: 35166 - protein, 16 aa, Homo sapiens
LIIFWHFILILGVKMV

SEQ ID NO: 35167 - protein, 11 aa, Homo sapiens
LFLALFQHALF

SEQ ID NO: 35168 - protein, 344 aa, Homo sapiens
LAGRRKGRARRRGGRLPAGSSGAARAMSAHNRGTELDLSWISKIQVNHPAVLRRAEQIQARRTVKKEWQAAWLLKAVTFIDLTTLSGDDTSSNIQRLCYKAKYPIREDLLKALNMHDKGITTAAVCVYPARVCDAVKALKAAGCNIPVASVAAGFPAGQTHLKTRLEEIRLAVEDGATEIDVVINRSLVLTGQWEALYDEIRQFRKACGEAHLKTILATGELGTLTNVYKASMIAMMAGSDFIKTSTGKETVNATFPVAIVMLRAIRDFFWKTGNKIGFKPAGGIRSAKDSLAWLSLVKEELGDEWLKPELFRIGASTLLSDIERQIYHHVTGRYAAYHDLPMS

SEQ ID NO: 35169 - protein, 214 aa, Homo sapiens
LLTFFLPSFPLSSFPFLTLLVAAGFPAGQTHLKTRLEEIRLAVEDGATEIDVVINRSLVLTGQWEALYDEIRQFRKACGEAHLKTILATGELGTLTNVYKASMIAMMAGSDFIKTSTGKETVNATFPVAIVMLRAIRDFFWKTGNKIGFKPAGGIRSAKDSLAWLSLVKEELGDEWLKPELFRIGASTLLSDIERQIYHHVTGRYAAYHDLPMS

SEQ ID NO: 35170 - protein, 28 aa, Homo sapiens
MEDLGGSLPAGSAWLHLAAKLSFSIDRF

SEQ ID NO: 35171 - protein, 68 aa, Homo sapiens [sequence omitted]

SEQ ID NO: 35172 - protein, 202 aa, Homo sapiens
VGKKKKKTKGPDAASKLPLVTPHTQCQLKLLKLERIKDYLLMEEEFIRNQEQMKPLEEKQEGKRSKVDDLRGTPMSVGILEEIIDDNHAIVSTSVGSEHYISILSFADKDLLEPGCSVRLNHKVHTMIGVLMDDMDPLVTVMKVEKAPQETYADTGGLDNQIREIKESVELPLTHPEYYEEMGIKPPRGSFSVVHLAQVKPC

SEQ ID NO: 35173 - protein, 76 aa, Homo sapiens
MCEVKKIYLQDEFRILKKKSFTFPRDHKSVTADTEMWPVYVELTNEKIYGCDFIVSATGVTPNVEPFLHGNSVSLI

SEQ ID NO: 35174 - protein, 388 aa, Homo sapiens
LSIRPRALTLPLSLGRRGGRALAEEQKAEGSSCGSAERLVAFAAKTRPYLSLCKMATLKEKLIAPVAEEEATVPNNKITVVGVGQVGMACAISILGKSLADELALVDVLEDKLKGEMMDLQHGSLFLQTPKIVADKDYSVTANSKIVVVTAGVRQQEGESRLNLVQRNVNVFKFIIPQIVKYSPDCIIIVVSNPVDILTYVTWKLSGLPKHRVIGSGCNLDSARFRYLMAEKLGIHPSSCHGWILGEHGDSSVAVWSGVNVAGVSLQELNPEMGTDNDSENWKEVHKMVVESAYEVIKLKGYTNWAIGLSVADLIESMLKNLSRIHPVSTMVKGMYGIENEVFLSLPCILNARGLTSVINQKLKDDEVAQLKKSADTLWDIQKDLKDL

SEQ ID NO: 35175 - protein, 74 aa, Homo sapiens
LPSFLLLSRGVCPGPEQSVQFRNSIGGSSWSPTTLKIIRSGALRASPRGGKLSSESSASGFEIYILRQCRKSVF

SEQ ID NO: 35176 - protein, 754 aa, Homo sapiens
LSTQFLLRLCGLLQWSLTLNGSQSKKGTLSSQTGFSGQRSGSKKKKVTKAERLKLLQEEEERRLKEEEEARLKYEKEEMERLEIQRIEKEKWHRLEAKDLERRNEELEELYLLERCFPEAEKLKQETKLLSQWKHYIQCDGSPDPSVAQEMNTFISLWKEKTNETFEEVIEKSKVVLNLIEKLKFILLETPPCDLQDKNIIQYQESILQLQELLHLKFGVATEILLKQASTLADLDSGNMEKVIKDENVTLYVWANLKKNPRHRSVRFSETQIGFEIPRILATSDIAVRLLHTHYDHVSALHPVSTPSKEYTSAVTELVKDDVKNVEKAISKEVEEESKQQERGSHLIQEEEIKVEEEQGDIEVKMSSAEEESEAIKCEREMKVLSETVSAAQLLLVENSSEKPDFFEDNVVDLCQFTTLGGVYHLDILELPPQCKPVKGWMIVEILKEGLQKYTYPPETTEEFETENAFPPIEVTLEVHENVIFFEDPVVVRWDAEGKHWRTDGISNVSYKPKERLVTFSLDTFGPVTLIQDAHINMPYQSWELRPLDVNKVLLTVTTVFTEIQIQIKENLCMLSSIKLKDKKHISILEGTWMTPIPFIIALKEAGLNIFPTRHSHFYVIINNKVPLVEVKAYRQMALLSSAFAFGWSKWNLLCNSTKVVFKVREHLTEACTENPNWALLMFSGDRAQRLKIKEESEAFSEALKEETEFHSTLYHMVKDFASEEAMEKVRSSNCQFVNSVCHMLLSTRLLSYS

SEQ ID NO: 35177 - protein, 118 aa, Homo sapiens
VDTEWGAEREGGGGGAKVLERKLQKGTGNLPGRRRRLRLLWAPGLRSSRGVRSCGLAPVWLPRRARTAEPRRSVARAVPSAAALGRCSPAIRSASAAAAPWREGGEGAGKKRDVHCGT

SEQ ID NO: 35178 - protein, 22 aa, Homo sapiens
MMRMTFPPKTLKLTSFTRVCWS

SEQ ID NO: 35179 - protein, 13 aa, Homo sapiens
MAVGWDHNTSMTI

SEQ ID NO: 35180 - protein, 845 aa, Homo sapiens
VFNEINIFIKVVKMESLTLKGYALPLQLVNNQTMTTWMEIFRTIIDRTVPPETLHIDEDDRPELVWWKCKKWALHIVARLFERYGSPGNVTKEYFEFSEFFLKTYAVGIQQVLLKILDQYRQKEYVAPRVLQQAFNYLNQGVVHSITWKQMKPHIQNISEDVIFSVMCYKDEDEELWQEDPYEYIRMKFDIFEDYASPTTAAQTLLYTAAKKRKEVLPKMMAFCYQILTDPNFDPRKKDGALHVIGSLAEILLKKSLFKDQMELFLQNHVFPLLLSNLGYLRARSCWVLHAFSSLKFHNELNLRNAVELAKKSLIEDKEMPVKVEAALALQSLISNQIQAKEYMKPHVRPIMQELLHIVRETENDDVTNVIQKMICEYSQEVASIAVDMTQHLAEIFGKVLQSDEYEEVEDKTVMAMGILHTIDTILTVVEDHKEITQQLENICLRIIDLVLQKHVIEFYEEILSLAYSLTCHSISPQMWQLLGILYEVFQQDCFEYFTDMMPLLHNYVTIDTDTLLSNAKHLEILFTMCRKVLCGDAGEDAECHAAKLLEVIILQCKGRGIDQCIPLFVQLVLERLTRGVKTSELRTMCLQVAIAALYYNPDLLLHTLERIQLPHNPGPITVQFINQWMNDTDCFLGHHDRKMCIIGLSILLELQNRPPAVDAVVGQIVPSILFLFLGLKQVCATRQLVNREDRSKAEKADMEENEEISSDEEETNVTAQAMQSNNGRGEDEEEEDDDWDEEVLEETALEGFSTPLDLDNSVDEYQFFTQALITVQSRDAAWYQLLMAPLSEDQRTALQEVYTLAEHRRTVAEAKKKIEQQGGFTFENKGVLSAFNFGTVPSNN

SEQ ID NO: 35181 - protein, 62 aa, Homo sapiens
MANAGPITNSSQFFICTAKTQWLHGKDVVFGKVKEGMNIVEAMKRFGSSGKTSKKITIADCG

SEQ ID NO: 35182 - protein, 1050 aa, Homo sapiens
MRMVHILTSVVGSKCEVQVKNGGIYEGVFKTYSPKCDLVLDAAHEKSTESSSGPKREEIMESILFKCSDFVVVQFKDMDSSYAKRDAFTDSAISAKVNGEHKEKDLEPWDAGELTANEELEALENDVSNGWDPNDMFRYNEENYGVVSTYDSSLSSYTVPLERDNSEEFLKREARANQLAEEIESSAQYKARVALENDDRSEEEKYTAVQRNSSEREGHSINTRENKYIPPGQRNREVISWGSGRQNSPRMGQPGSGSMPSRSTSHTSDFNPNSGSDQRVVNGGVPWPSPCPSPSSRPPSRYQSGPNSLPPRAATPTRPPSRPPSRPSRPPSHPSAHGSPAPVSTMPKRMSSEGPPRMSPKAQRHPRNHRVSAGRGSISSGLEFVSHNPPSEAATPPVARTSPSGGTWSSVVSGVPRLSPKTHRPRSPRQNSIGNTPSGPVLASPQAGIIPTEAVAMPIPAASPTPASPASNRAVTPSSEAKDSRLQDQRQNSPAGNKENIKPNETSPSFSKAENKGISPVVSEHRKQIDDLKKFKNDFRLQPSSTSESMDQLLNKNREGEKSRDLIKDKIEPSAKDSFIENSSSNCTSGSSKPNSPSISPSILSNTEHKRGPEVTSQGVQTSSPACKQEKDDKEEKKDAAEQVRKSTLNPNAKEFNPRSFSQPKPSTTPTSPRPQAQPSPSMVGHQQPTPVYTQPVCFAPNMMYPVPVSPGVQPLYPIPMTPMPVNQAKTYRAGKVPNMPQQRQDQHHQSAMMHPASAAGPPIAATPPAYSTQYVAYSPQQFPNQPLVQHVPHYQSQHPHVYSPVIQGNARMMAPPTHAQPGLVSSSATQYGAHEQTHAMYACPKLPYNKETSPSFYFAISTGSLAQQYAHPNATLHPHTPHPQPSATPTGQQQSQHGGSHPAPSPVQHHQHQAAQALHLASPQQQSAIYHAGLAPTPPSMTPASNTQSPQNSFPAAQQTVFTIHPSHVQPAYTNPPHMAHVPQAHVQSGMVPSHPTAHAPMMLMTTQPPGGPQAALAQSALQPIPVSTTAHFPYMTHPSVQAHHQQQL

SEQ ID NO: 35183 - protein, 26 aa, Homo sapiens
MQGRLGLGAFLVCILLQPLNAARWSA

SEQ ID NO: 35184 - protein, 168 aa, Homo sapiens
LTLCPVLHVAFLVSFSGGVAAAATRAGGASRCSFIRPHFLFRFHPSLPISFSLSPPASHPSPPPRNPLLPPSTGAMAAEEVLQTVDHYKTEIERLTKELTETTHEKIQAAEYGLVVLEEKLTLKQQYDELEAEYDSLKQELEQLKEVSCLSPLPFLALTPPTRKAHSS

SEQ ID NO: 35185 - protein, 154 aa, Homo sapiens
LTLCPVLHVAFLVSFSGGVAAAATRAGGASRCSFIRPHFLFRFHPSLPISFSLSPPASHPSPPPRNPLLPPSTGAMAAEEVLQTVDHYKTEIERLTKELTETTHEKIQAAEYGLVVLEEKLTLKQQYDELEAEYDSLKQELEQLKEGPLLVRED

SEQ ID NO: 35186 - protein, 170 aa, Homo sapiens
MACREGAGSRRARSNGCRLPRRGRRRGGRRRTVGPGPIHCRGRRALGPRVFRVMEALIPVINKLQDVFNTVGADIIQLPQIVVVGTQSSGKSSVLESLVGRDLLPRGTGIVTRRPLILQLVHVSQEDKRKTTGEENDPATWKNSRHLSKGVEAEEWGKFLHTKNKEPARY

SEQ ID NO: 35187 - protein, 763 aa, Homo sapiens
MACREGAGSRRARSNGCRLPRRGRRRGGRRRTVGPGPIHCRGRRALGPRVFRVMEALIPVINKLQDVFNTVGADIIQLPQIVVVGTQSSGKSSVLESLVGRDLLPRGTGIVTRRPLILQLVHVSQEDKRKTTGEENGVEAEEWGKFLHTKNKLYTDFDEIRQEIENETERISGNNKGVSPEPIHLKIFSPNVVNLTLVDLPGMTKVPVGDQPKDIELQIRELILRFISNPNSIILAVTAANTDMATSEALKISREVDPDGRRTLAVITKLDLMDAGTDAMDVLMGRVIPVKLGIIGVVNRSQLDINNKKSVTDSIRDEYAFLQKKYPSLANRNGTKYLARTLNRLLMHHIRDCLPELKTRINVLAAQYQSLLNSYGEPVDDKSATLLQLITKFATEYCNTIEGTAKYIETSELCGGARICYIFHETFGRTLESVDPLGGLNTIDILTAIRNATGPRPALFVPEVSFELLVKRQIKRLEEPSLRCVELVHEEMQRIIQHCSNYSTQELLRFPKLHDAIVEVVTCLLRKRLPVTNEMVHNLVAIELAYINTKHPDFADACGLMNNNIEEQRRNRLARELPSAVSRDKLIQDSRRETKNVASGGGGVGDGVQEPTTGNWRGMLKTSKAEELLAEEKSKPIPIMPASPQKGHAVNLLDVPVPVARKLSAREQRDCEVIERLIKSYFLIVRKNIQDSVPKAVMHFLVNHVKDTLQSELVGQLYKSSLLDDLLTESEDMAQRRKEAADMLKALQGASQIIAEIRETHLW

SEQ ID NO: 35188 - protein, 202 aa, Homo sapiens
VGPGPIHCRGRRALGPRVFRVMEALIPVINKLQDVFNTVGADIIQLPQIVVVGTQSSGKSSVLESLVGRDLLPRGTGIVTRRPLILQLVHVSQEDKRKTTGEENGVEAEEWGKFLHTKNKLYTDFDEIRQEIENETERISGNNKGVSPEPIHLKIFSPNVVNLTLVDLPGMTKDTTLYRFISSLTGHSFSVSFAVSSHLPNV

SEQ ID NO: 35189 - protein, 216 aa, Homo sapiens
LTTCLARVVKRGVNALKNLQVKGAQIEAKFYEEVHDLERKYAVLYQPLFDKQSEITNTIYEPTEEECEWKPDEEDEISEELKEKAKTEDEKNDEEKEDPKGIPEFWLPVFKNVDLLSDMLQKHDEPILKHVKDTKVKFSDAGLPMSFVLEFQFEPSKYFTNEVLTKTYRMRLEPEPDDSDHFSFDGQEIMGCTGGQIDWKKGKNVILKTIKQQQKH

SEQ ID NO: 35190 - protein, 58 aa, Homo sapiens
LLTQNLLVTAYLSRILFMNSCVLQWYESAHVETGYKLKSVFQIAEHITHLIQIINGCF

SEQ ID NO: 35191 - protein, 129 aa, Homo sapiens
LALLVVSLFVFWKLCWPCWKSKPVTSNITTLPQSISSAPTEVFETEEKKEIKENEKPAVKAIEPAIKISHTSPDIPAEVQTALKEHLIKHARVQRQITEPTSSTRGWGKKKKKRILSTCNFVTMPRHPS

SEQ ID NO: 35192 - protein, 61 aa, Homo sapiens
LTHFLGWGTGSGMGTLLISKIREEYPDRIINKFSVLPLPKVSDIVVEPYSALSPPAHRKCP

SEQ ID NO: 35193 - protein, 108 aa, Homo sapiens
VISDEHTIDSTGTYHGISDLQLERINVYYNKSRGGRYLPRAVLVDLELGAMDSVRSGPLGQNFRPDNFIFGQCGAGNNWAKGHYTKCAELMESVIDIVRKESESCDCL

SEQ ID NO: 35194 - protein, 20 aa, Homo sapiens
LLIFFFFSSAVHIFCDGKHC

SEQ ID NO: 35195 - protein, 47 aa, Homo sapiens
MTPAVKSDTVNQEHVYLTILTMRLVLHSMTPATPVSPTPAKTRALLQ

SEQ ID NO: 35196 - protein, 685 aa, Homo sapiens
VGRCAPRCLQRKWETCRVWSSCAAPRRAGAGNRCLKLSNCHRAKFFFGKLNRTSTEYKMKMWLLVSHLVIISITTCLAEFTWYRRYGHGVSEEDKGFGPIFEEQPINTIYPEESLEGKVSLNCRARASPFPVYKWRMNNGDVDLTSDRYSMVGGNLVINNPDKQKDAGIYYCLASNNYGMVRSTEATLSFGYLDPFPPEERPEVRVKEGKGMVLLCDPPYHFPDDLSYRWLLNEFPVFITMDKRRFVSQTNGNLYIANVEASDKGNYSCFVSSPSITKSVFSKFIPLIPIPERTTKPYPADIVVQFKDVYALMGQNVTLECFALGNPVPDIRWRKVLEPMPSTAEISTSGAVLKIFNIQLEDEGIYECEAENIRGKDKHQARIYVQAFPEWVEHINDTEVDIGSDLYWPCVATGKPIPTIRWLKNGYAYHKGELRLYDVTFENAGMYQCIAENTYGAIYANAELKILALAPTFEMNPMKKKILAAKGGRVIIECKPKAAPKPKFSWSKGTEWLVNSSRILIWEDGSLEINNITRNDGGIYTCFAENNRGKANSTGTLVITDPTRIILAPINADITVGENATMQCAASFDPALDLTFVWSFNGYVIDFNKENIHYQRNFMLDSNGELLIRNAQLKHAGRYTCTAQTIVDNSSASADLVVRGKNRKGGEKNMVDSFLPVCASLPPTW

SEQ ID NO: 35197 - protein, 1016 aa, Homo sapiens
LNRTSTEYKMKMWLLVSHLVIISITTCLAVSEEDKGFGPIFEEQPINTIYPEESLEGKVSLNCRARASPFPVYKWRMNNGDVDLTSDRYSMVGGNLVINNPDKQKDAGIYYCLASNNYGMVRSTEATLSFGYLDPFPPEERPEVRVKEGKGMVLLCDPPYHFPDDLSYRWLLNEFPVFITMDKRRFVSQTNGNLYIANVEASDKGNYSCFVSSPSITKSVFSKFIPLIPIPERTTKPYPADIVVQFKDVYALMGQNVTLECFALGNPVPDIRWRKVLEPMPSTAEISTSGAVLKIFNIQLEDEGIYECEAENIRGKDKHQARIYVQAFPEWVEHINDTEVDIGSDLYWPCVATGKPIPTIRWLKNGYAYHKGELRLYDVTFENAGMYQCIAENTYGAIYANAELKILALAPTFEMNPMKKKILAAKGGRVIIECKPKAAPKPKFSWSKGTEWLVNSSRILIWEDGSLEINNITRNDGGIYTCFAENNRGKANSTGTLVITDPTRIILAPINADITVGENATMQCAASFDPALDLTFVWSFNGYVIDFNKENIHYQRNFMLDSNGELLIRNAQLKHAGRYTCTAQTIVDNSSASADLVVRGPPGPPGGLRIEDIRATSVALTWSRGSDNHSPISKYTIQTKTILSDDWKDAKTDPPIIEGNMEAARAVDLIPWMEYEFRVVATNTLGRGEPSIPSNRIKTDGAAPNVAPSDVGGGGGRNRELTITWAPLSREYHYGNNFGYIVAFKPFDGEEWKKVTVTNPDTGRYVHKDETMSPSTAFQVKVKAFNNKGDGPYSLVAVINSAQDAPSEAPTEVGVKVLSSSEISVHWEHVLEKIVESYQIRYWAAHDKEEAANRVQVTSQEYSARLENLLPDTQYFIEVGACNSAGCGPPSDMIEAFTKKAPPSQPPRIISSVRSGSRYIITWDHVVALSNESTVTGYKVLYRPDGQHDGKLYSTHKHSIEVPIPRDGEYVVEVRAHSDGGDGVVSQVKISGAPTLSPSLLGLLLPAFGILVYLEF

SEQ ID NO: 35198 - protein, 33 aa, Homo sapiens
VAAIICSPRLTPPRTRDAKAAASGYEESGLSPS

SEQ ID NO: 35199 - protein, 14 aa, Homo sapiens
VMPRPLRAATKSRG

SEQ ID NO: 35200 - protein, 441 aa, Homo sapiens
MAYRRDEMWSEGRYEYERIPRERAPPRSHPSDESGYRWTRDDHSASRQPEYRDMRDGFRRKSFYSSHYARERSPYKRDNTFFRESPVGRKDSPHSRSGSSVSSRSYSPERSKSYSFHQSQHRKSVRPGASYKRQNEGNPERDKERPVQSLKTSRDTSPSSGSAVSSSKVLDKPSRLTEKELAEAASKWAAEKLEKSDESNLPEISEYEAGSTAPLFTDQPEEPESNTTHGIELFEDSQLTTRSKAIASKTKEIEQVYRQDCETFGMVVKMLIEKDPSLEKSIQFALRQNLHEIESAGQTWQQVPPVRNTEMDHDGTPENEGEETAQSALFGFQHDASNHTIVGLGPNQVPEMKETTLQAPQPPQAPQPLQPRKKRVRRTTQLRRTTGAPDITWGMLKKTTQEAERILLRTQTPFTPENLFLAMLSVVHCNSRKDVKPENKQ

SEQ ID NO: 35201 - protein, 137 aa, Homo sapiens [sequence omitted]

SEQ ID NO: 35202 - protein, 77 aa, Homo sapiens [sequence omitted]

SEQ ID NO: 35203 - protein, 119 aa, Homo sapiens
VIILNHPGQISAGCAPVLDCHMAHIACKFAKLKKKTGSTSGKKLEDGPTFLKSGDAAIVDMVPGKPMCVESFSVYPPLSRFAVCDMRQTVAVGVIEAMDKKAAGAGKVTKSTQKAQKAK

SEQ ID NO: 35204 - protein, 384 aa, Homo sapiens
MTRRGRRRSSHFLGPPAGAAGCTQRRSRELAAAAMSHQTGIQASEDVKEIFARARNGKYRLLKISIENEQLVIGSYSQPSDSWDKDYDSFVLPLLEDKQPCYILFRLDSQNAQGYEWIFIAWSPDHSHVRQKMLYAATRATLKKEFGGGHIKDEVFGTVKEDVSLHGYKKYLLSQSSPAPLTAAEEELRQIKINEVQTDVGVDTKHQTLQGVAFPISREAFQALEKLNNRQLNYVQLEIDIKNEIIILANTTNTELKDLPKRIPKDSARYHFFLYKHSHEGDYLESIVFIYSMPGYTCSIRERMLYSSCKSRLLEIVERQLQMDVIRKIEIDNGDELTADFLYEEVHPKQHAHKQSFAKPKGPAGKRGIRRLIRGPAETEATTD

SEQ ID NO: 35205 - protein, 493 aa, Homo sapiens
LIRTMESRVLLRTFCLIFGLGAVWGLGVDPSLQIDVLTELELGESTTGVRQVPGLHNGTKAFLFQDTPRSIKASTATAEQFFQKLRNKHEFTILVTLKQTHLNSGVILSIHHLDHRYLELESSGHRNEVRLHYRSGSHRPHTEVFPYILADDKWHKLSLAISASHLILHIDCNKIYERVVEKPSTDLPLGTTFWLGQRNNAHGYFKGIMQDVQLLVMPQGFIAQCPDLNRTCPTCNDFHGLVQKIMELQDILAKTSAKLSRAEQRMNRLDQCYCERTCTMKGTTYREFESWIDGCKNCTCLNGTIQCETLICPNPDCPLKSALAYVDGKCCKECKSICQFQGRTYFEGERNTVYSSSGVCVLYECKDQTMKLVESSGCPALDCPESHQITLSHSCCKVCKGYDFCSERHNCMENSICRNLNDRAVCSCRDGFRALREDNAYCEDIDECAEGRHYCRENTMCVNTPGSFMCICKTGYIRIDDYSCTGKRWLFVK

SEQ ID NO: 35206 - protein, 116 aa, Homo sapiens
LIRTMESRVLLRTFCLIFGLGAVWGLGVDPSLQIDVLTELELGESTTGVRQVPGLHNGTKAFLFQDTPRSIKASTATAEQFFQKLRNKHEFTILVTLKQTHLNSGVILSIHHLDHR

SEQ ID NO: 35207 - protein, 91 aa, Homo sapiens
LIRTMESRVLLRTFCLIFGLGAVWGLGVDPSLQIDVLTELELGESTTGVRQVPGLHNGTKAFLFQGMPGVLHPHCDFSSDNPGRSCSCRLS

SEQ ID NO: 35208 - protein, 18 aa, Homo sapiens
VASEAAALGKLMGVAVDL

SEQ ID NO: 35209 - protein, 21 aa, Homo sapiens
LLRGLGAAPWWLWLLFHAPGS

SEQ ID NO: 35210 - protein, 13 aa, Homo sapiens
LMEIHGDKCCHAC

SEQ ID NO: 35211 - protein, 58 aa, Homo sapiens
LANLHELLERVADFVSKTCQGIPRVVSTDFFFFFCMGEDTVATRKEWKKNSFLYSKLM

SEQ ID NO: 35212 - protein, 45 aa, Homo sapiens
VNFFVLFCFFKKLICMLEMDMNNKTTSLGLREVTILFHSREWTNS

SEQ ID NO: 35213 - protein, 32 aa, Homo sapiens
VPPAGSRRERKSEGARVTDTDRRTRRPSEGTA

SEQ ID NO: 35214 - protein, 31 aa, Homo sapiens
LPKMVELSSNRTRNYGATKIPAYLRAKTFQF

SEQ ID NO: 35215 - protein, 39 aa, Homo sapiens [sequence omitted]

SEQ ID NO: 35216 - protein, 87 aa, Homo sapiens
MATTLGIAFILNASLMVQGEQAFLCFLNVPPHFACHHVRCVFAPPLPSTMIVRPPQPCGTAGNDGMEMLHHVVPSLEEEWYESCPSL

SEQ ID NO: 35217 - protein, 34 aa, Homo sapiens
LPSTMIVRPPQPCGTVSGVCQDQQALRETDPEDY

SEQ ID NO: 35218 - protein, 938 aa, Homo sapiens
LAQFTVPGLTHWKRNMKVGWPGESCWQVGLAVEDSPALGAPRVGALPDVVPEGTLLNMVLRRMHRPRSCSYQLLLEHQRPSCIQGLRWTPLTNSEESLDFSESLEQASTERVLRAGRQLHRHLLATCPNLIRDRKYHLRLYRQCCSGRELVDGILALGLGVHSRSQVVGICQVLLDEGALCHVKHDWAFQDRDAQFYRFPGPEPEPVRTHEMEEELAEAVALLSQRGPDALLTVALRKPPGQRTDEELDLIFEELLHIKAVAHLSNSVKRELAAVLLFEPHSKAGTVLFSQGDKGTSWYIIWKGSVNVVTHGKGLVTTLHEGDDFGQLALVNDAPRAATIILREDNCHFLRVDKQDFNRIIKDVEAKTMRLEEHGKVVLVLERASQGAGPSRPPTPGRNRYTVMSGTPEKILELLLEAMGPDSSAHDPTETFLSDFLLTHRVFMPSAQLCAALLHHFHVEPAGGSEQERSTYVCNKRQQILRLVSQWVALYGSMLHTDPVATSFLQKLSDLVGRDTRLSNLLREQWPERRRCHRLENGCGNASPQMKARNLPVWLPNQDEPLPGSSCAIQVGDKVPYDICRPDHSVLTLQLPVTASVREVMAALAQEDGWTKGQVLVKVNSAGDAIGLQPDARGVATSLGLNERLFVVNPQEVHELIPHPDQLGPTVGSAEGLDLVSAKDLAGQLTDHDWSLFNSIHQVELIHYVLGPQHLRDVTTANLERFMRRFNELQYWVATELCLCPVPGPRAQLLRKFIKLAAHLKEQKNLNSFFAVMFGLSNSAISRLAHTWERLPHKVRKLYSALERLLDPSWNHRVYRLALAKLSPPVIPFMPLLLKDMTFIHEGNHTLVENLINFEKMRMMARAARMLHHCRSHNPVPLSPLRSRVSHLHEDSQVARISTCSEQSLSTRSPASTWAYVQQLKVIDNQRELSRLSRELEP

SEQ ID NO: 35219 - protein, 12 aa, Homo sapiens
MLLLISLARGQL

SEQ ID NO: 35220 - protein, 46 aa, Homo sapiens
VVGGAAGEELPGVRALQDMTPVAYHGHGVSAFRCCSPLLLQAKARR

SEQ ID NO: 35221 - protein, 507 aa, Homo sapiens
LSLCWSLQLVVKRLGYDTRVTVLGHVQRGGTPSAFDRILGSRMGVEAVMALLEGTPDTPACVVSLSGNQAVRLPLMECVQVTKDVTKAMDEKKFDEALKLRGRSFMNNWEVYKLLAHVRPPVSKSGSHTVAVMNVGAPAAGMNAAVRSTVRIGLIQGNRVLVVHDGFEGLAKGQIEEAGWSYVGGWTGQGGSKLGTKRTLPKKSFEQISANITKFNIQGLVIIGGFEAYTGGLELMEGRKQFDELCIPFVVIPATVSNNVPGSDFSVGADTALNTICTTCDRIKQSAAGTKRRVFIIETMGGYCGYLATMAGLAAGADAAYIFEEPFTIRDLQANVEHLVQKMKTTVKRGLVLRNEKCNENYTTDFIFNLYSEEGKGIFDSRKNVLGHMQQGGSPTPFDRNFATKMGAKAMNWMSGKIKESYRNGRIFANTPDSGCVLGMRKRALVFQPVAELKDQTDFEHRIPKEQWWLKLRPILKILAKYEIDLDTSDHAHLEHITRKRSGEAAV

SEQ ID NO: 35222 - protein, 224 aa, Homo sapiens
VMAGELADKKDRDASPSKEERKRSRTPDRERDRDRDRKSSPSKDRKRHRSRDRRRGGSRSRSRSRSKSAERERRHKERERDKERDRNKKDRDRDKDGHRRDKDRKRSSLSPGRGKDFKSRKDRDSKKDEEDEHGDKKPKAQPLSLEELLAKKKAEEEAEAKPKFLSKAEREAEALKRRQQEVEERQRMLEEERKKRKQFQDLGRKMLGALPGWHQKAAPNETSQ

SEQ ID NO: 35223 - protein, 229 aa, Homo sapiens
LGAAGTLSWLPPPEQPVLVPRLPAPRPVMTLRPSLLPLHLLLLLLLSAAVCRAEAGLETESPVRTLQVETLVEPPEPCAEPAAFGDTLHIHYTGSLVDGRIIDTSLTRDPLVIELGQKQVIPGLEQSLLDMCVGEKRRAIIPSHLAYGKRGFPPSVPADAVVQYDVELIALIRANYWLKLVKGILPLVGMAMVPALLGLIGYHLYRKANRPKVSKKKLKEEKRNKSKKK

SEQ ID NO: 35224 - protein, 204 aa, Homo sapiens
LSWLPPPEQPVLVPRLPAPRPVMTLRPSLLPLHLLLLLLLSAAVCRAEAGLETESPVRTLQVETLVEPPEPCAEPAAFGDTLHIHYTGSLVDGRIIDTSLTRDPLVIELGQKQVIPGLEQSLLDMCVGEKRRAIIPSHLAYGKRGFPPSVPDGVSLLLPRLECNSAIFTHHNLRHPGSSNSPVSASRVAGITGMRHHDRLILYF

SEQ ID NO: 35225 - protein, 174 aa, Homo sapiens
LGAAGTLSWLPPPEQPVLVPRLPAPRPVMTLRPSLLPLHLLLLLLLSAAVCRAEAGLETESPVRTLQVETLVEPPEPCAEPAAFGDTLHIHYTGSLVDGRIIDTSLTRDPLVIELGQKQVIPGLEQSLLDMCVGEKRRAIIPSHLAYGKRGFPPSVPGTKDNLMRPPGMTSSSQ

SEQ ID NO: 35226 - protein, 128 aa, Homo sapiens
LSWLPPPEQPVLVPRLPAPRPVMTLRPSLLPLHLLLLLLLSAAVCRAEAGLETESPVRTLQVETLVEPPEPCAEPAAFGDTLHIHYTGSLVDGRIIDTSLTRDPLVIELGQKQVIPGLEQSLLDMCVG

SEQ ID NO: 35227 - protein, 74 aa, Homo sapiens
LGAAGTLSWLPPPEQPVLVPRLPAPRPVMTLRPSLLPLHLLLLLLLSAAVCRAEAGLETESPVRTLQVETLVRR

SEQ ID NO: 35228 - protein, 11 aa, Homo sapiens
LFWAIPIAMFT

SEQ ID NO: 35229 - protein, 159 aa, Homo sapiens
LCSLWPSTSWSCSSMRLPCPEACRYQAALPPYLMVSSVVGFYSSPLFRSLRPRWHDTAMTQIIGNCVCLLVLSSALPVFSRTLGLTRFDLLGDFGRFNWLGNFYIVFLYNAAFAGLTTLCLVKTFTAAVRAELIRAFGLDRLPLPVSGFPQASRKTQHQ

SEQ ID NO: 35230 - protein, 167 aa, Homo sapiens
LLLLVCTPLGLARMFSVTGKLLVKPRLLEDLEEQLYCSAFEEAALTRRICNPTSCWLPLDMELLHRQVLALQTQRVLLEKRRKASAWQRNLGYPLAMLCLLVLTGLSVLIVAIHILELLIDEAAMPRGMQVVLILYPSGNPSLPLFSKPVSWDSRPSTSWTLSPLGL

SEQ ID NO: 35231 - protein, 133 aa, Homo sapiens
MRECISIHVGQAGVQIGNACWELYCLEHGIQPDGQMPSDKTIGGGDDSFNTFFSETGAGKHVPRAVFVDLEPTVIDEVRTGTYRQLFHPEQLITGKEDAANNYARGHYTIGKEIIDLVLDRIRKLVCFFSRIK

SEQ ID NO: 35232 - protein, 12 aa, Homo sapiens
VFGGQKRAMDIQ

SEQ ID NO: 35233 - protein, 148 aa, Homo sapiens
LLPSLRLLHRRRPLQVLVMRECISIHVGQAGVQIGNACWELYCLEHGIQPDGQMPSDKTIGGGDDSFNTFFSETGAGKHVPRAVFVDLEPTVIDEVRTGTYRQLFHPEQLITGKEDAANNYARGHYTIGKEIIDLVLDRIRKLVSIVL

SEQ ID NO: 35234 - protein, 467 aa, Homo sapiens
LLPSLRLLHRRRPLQVLVMRECISIHVGQAGVQIGNACWELYCLEHGIQPDGQMPSDKTIGGGDDSFNTFFSETGAGKHVPRAVFVDLEPTVIDEVRTGTYRQLFHPEQLITGKEDAANNYARGHYTIGKEIIDLVLDRIRKLADQCTGLQGFLVFHSFGGGTGSGFTSLLMERLSVDYGKKSKLEFSIYPAPQVSTAVVEPYNSILTTHTTLEHSDCAFMVDNEAIYDICRRNLDIERPTYTNLNRLISQIVSSITASLRFDGALNVDLTEFQTNLVPYPRIHFPLATYAPVISAEKAYHEQLTVAEITNACFEPANQMVKCDPRHGKYMACCLLYRGDVVPKDVNAAIATIKTKRTIQFVDWCPTGFKVGINYQPPTVVPGGDLAKVQRAVCMLSNTTAVAEAWARLDHKFDLMYAKRAFVHWYVGEGMEEGEFSEAREDMAALEKDYEEVGADSADGEDEGEEY

SEQ ID NO: 35235 - protein, 39 aa, Homo sapiens
VKSINLCAVLLHSFVLELSYFCSVNVYCRKLLIKLKFPF

SEQ ID NO: 35236 - protein, 47 aa, Homo sapiens
LGFCTHSCCLLLTVIVLVPAPGKLFALRRSPFPPAKCHLARCHGLYL

SEQ ID NO: 35237 - protein, 20 aa, Homo sapiens
LPLCITVLMYIFLLDHELLW

SEQ ID NO: 35238 - protein, 12 aa, Homo sapiens
VLEALVGLGEAG

SEQ ID NO: 35239 - protein, 311 aa, Homo sapiens
VSGPEPRLEVGPGGRVMSHSSVTREAPQLLSQRQRREVRGVWGWGCLPGPRGGPALFGLVTFGQSGDCCTDSGTMNIFDRKINFDALLKFSHITPSTQQHLKKVYASFALCMFVAAAGAYVHMVTHFIQAGLLSALGSLILMIWLMATPHSHETEQKRLGLLAGFAFLTGVGLGPALEFCIAVNPSILPTAFMGTAMIFTCFTLSALYARRRSYLFLGGILMSALSLLLLSSLGNVFFGSIWLFQANLYVGLVVMCGFVLFDTQLIIEKAEHGDQDYIWHCIDLFLDFITVFRKLMMILAMNEKDKKKEKK

SEQ ID NO: 35240 - protein, 59 aa, Homo sapiens
LYVGLVVMCGFVLFDTQLIIEKAEHGDQDYIWHCIDLFLDFITVFRKLMMILAMNEKVS

SEQ ID NO: 35241 - protein, 19 aa, Homo sapiens
LSGPTKKMESLFWWMLCSL

SEQ ID NO: 35242 - protein, 44 aa, Homo sapiens
LEVLSEALPGECKGGGPCPLRAQDLAGRKKIHTGQDTQVHAGEA

SEQ ID NO: 35243 - protein, 263 aa, Homo sapiens
MAARAGFQSVAPSGGAGASGGAGAAAALGPGGTPGPPVRMGPAPGQGLYRSPMPGAAYPRPGMLPGSRMTPQGPSMGPPGYGGNPSVRPGLAQSGMDQSRKRPAPQQIQQVQQQAVQNRNHNAKKKKMADKILPQRIRELVPESQAYMDLLAFERKLDQTIMRKRLDIQEALKRPIKQKRKLRIFISNTFNPAKSDAEDGEGTVASWELRVEGRLLEDSALSKYDATKQKRKFSSFFKSLVIELDKDLYGPDNHLVEVSSSAF

SEQ ID NO: 35244 - protein, 359 aa, Homo sapiens
LSRLRQRRGTMASKKVCIVGSGNWGSAIAKIVGGNAAQLAQFDPRVTMWVFEEDIGGKKLTEIINTQHENVKYLPGHKLPPNVVAVPDVVQAAEDADILIFVVPHQFIGKICDQLKGHLKANATGISLIKGVDEGPNGLKLISEVIGERLGIPMSVLMGANIASEVADEKFCETTIGCKDPAQGQLLKELMQTPNFRITVVQEVDTVEICGALKNVVAVGAGFCDGLGFGDNTKAAVIRLGLMEMIAFAKLFCSGPVSSATFLESCGVADLITTCYGGRNRKVAEAFARTGKSIEQLEKELLNGQKLQGPETARELYSILQHKGLVDKFPLFMAVYKVCYEGQPVGEFIHCLQNHPEHM

SEQ ID NO: 35245 - protein, 336 aa, Homo sapiens
LSRLRQRRGTMASKKVCIVGSGNWGSAIAKIVGGNAAQLAQFDPRVTMWVFEEDIGGKKLTEIINTQHENVKYLPGHKLPPNVFIGKICDQLKGHLKANATGISLIKGVDEGPNGLKLISEVIGERLGIPMSVLMGANIASEVADEKFCETTIGCKDPAQGQLLKELMQTPNFRITVVQEVDTVEICGALKNVVAVGAGFCDGLGFGDNTKAAVIRLGLMEMIAFAKLFCSGPVSSATFLESCGVADLITTCYGGRNRKVAEAFARTGKSIEQLEKELLNGQKLQGPETARELYSILQHKGLVDKFPLFMAVYKVCYEGQPVGEFIHCLQNHPEHM

SEQ ID NO: 35246 - protein, 328 aa, Homo sapiens
MGLKEGYEETGVLTLVIHSQYPDKKRLEGLSKQLDWNVRKIQCWFRHRRNQDKPPTLTKFCESMWRFTFYLCIFCYGIRFLWSSPWFWDIRQCWHNYPFQPLSSGLYHYYIMELAFYWSLMFSQFTDIKRKDFLIMFVHHLVTIGLISFSYINNMVRVGTLIMCLHDVSDFLLEAAKLANYAKYQRLCDTLFVIFSAVFMVTRLGIYPFWILNTTLFESWEIIGPYASWWLLNGLLLTLQLLHVIWSYLIARIALKALIRGKVRMKDGFFLLGMEDRDYSTDVLSPSNLVSPIYSSRPSKKPRAPKSSPLRYRRMIAVMWRAAQRKKM

SEQ ID NO: 35247 - protein, 99 aa, Homo sapiens [sequence omitted]

SEQ ID NO: 35248 - protein, 16 aa, Homo sapiens
LWRQLTLVAAVASGWA

SEQ ID NO: 35249 - protein, 31 aa, Homo sapiens
MMLGLKFMLVLASHCPLSKCDAHKQVSQHEM

SEQ ID NO: 35250 - protein, 18 aa, Homo sapiens
MFECFSRQVITGIYFLFF

SEQ ID NO: 35251 - protein, 22 aa, Homo sapiens
LLLVFFFFLAGESLEPRRRRLQ

SEQ ID NO: 35252 - protein, 46 aa, Homo sapiens
LWGGVLITIADTFVFLFLDKYGKESGNGRVKGAALCHVADGEVYLL

SEQ ID NO: 35253 - protein, 84 aa, Homo sapiens [sequence omitted]

SEQ ID NO: 35254 - protein, 82 aa, Homo sapiens
LQMLWADAKKARRIKTNMWKHNIKFHQLPYREMEHLRQVWARGRYPEVHGEVITFNQDLKVFSFICCSPLIKLLPFAVRTKY

SEQ ID NO: 35255 - protein, 13 aa, Homo sapiens
LFVDFHFLGIIIL

SEQ ID NO: 35256 - protein, 597 aa, Homo sapiens
MRGMPGARTSSSGASENHRARGQGGGPQGVGRMAEGKAGGAAGLFAKQVQKKFSRAQEKVLQKLGKAVETKDERFEQSASNFYQQQAEGHKLYKDLKNFLSAVKVMHESSKRVSETLQEIYSSEWDGHEELKAIVWNNDLLWEDYEEKLADQAVRTMEIYVAQFSEIKERIAKRGRKLVDYDSARHHLEAVQNAKKKDEAKTAKAEEEFNKAQTVFEDLNQELLEELPILYNSRIGCYVTIFQNISNLRDVFYREMSKLNHNLYEVMSKLEKQHSNKVFVVKGLSSSSRRSLVISPPVRTATVSSPLTSPTSPSTLSLKSESESVSATEDLAPDAAQGEDNSEIKELLEEEEIEKEGSEASSSEEDEPLPACNGPAQAQPSPTTERAKSQEEVLPSSTTPSPGGALSPSGQPSSSATEVVLRTRTASEGSEQPKKRASIQRTSAPPSRPPPPRATASPRPSSGNIPSSPTASGGGSPTSPRASLGTGTASPRTSLEVSPNPEPPEKPVRTPEAKENENIHNQNPEELCTSPTLMTSQVASEPGEAKKMEDKEKDNKLISANSSEGQDQLQVSMVPENNNLTAPEPQEEVSTSENPQL

SEQ ID NO: 35257 - protein, 111 aa, Homo sapiens
LCPAGWLSFRSLGGWFWLKSYFVFQTKNSFPMPYSYVFVVLLPNSRIGCYVTIFQNISNLRDVFYREMSKLNHNLYEVMSKLEKQHSNKVFVVKGLSSSNSYSLQSSYLTY

SEQ ID NO: 35258 - protein, 41 aa, Homo sapiens
MPAPSALKGTSLILLLTGLRPQLVATTTYQAISRVGLRTQS

SEQ ID NO: 35259 - protein, 143 aa, Homo sapiens
VRGPIGGARVRGRLRRGVPGAGLLRADGRRAAPAAPGRAPAAPTASGVRALSAAVQLSRRGLRSAARLWRAPAAPRPTPGPLPDPGPARAHAPARAGTAHRLWLPHGRAGCRIRAVAEAQGRRRGARGPLPQVRVRARQGPRG

SEQ ID NO: 35260 - protein, 479 aa, Homo sapiens
VVTMAESAGASSFFPLVVLLLAGSGGSGPRGVQALLCACTSCLQANYTCETDGACMVSIFNLDGMEHHVRTCIPKVELVPAGKPFYCLSSEDLRNTHCCYTDYCNRIDLRVPSGHLKEPEHPSMWGPVELVGIIAGPVFLLFLIIIIVFLVINYHQRVYHNRQRLDMEDPSCEMCLSKDKTLQDLVYDLSTSGSGSGLPLFVQRTVARTIVLQEIIGKGRFGEVWRGRWRGGDVAVKIFSSREERSWFREAEIYQTVMLRHENILGFIAADNKDNGTWTQLWLVSDYHEHGSLFDYLNRYTVTIEGMIKLALSAASGLAHLHMEIVGTQGKPGIAHRDLKSKNILVKKNGMCAIADLGLAVRHDAVTDTIDIAPNQRVGTKRYMAPEVLDETINMKHFDSFKCADIYALGLVYWEIARRCNSGGVHEEYQLPYYDLVPSDPSIEEMRKVVCDQKLRPNIPNWWQSYEVRSWPPAAFPSA

SEQ ID NO: 35261 - protein, 508 aa, Homo sapiens
VVTMAESAGASSFFPLVVLLLAGSGGSGPRGVQALLCACTSCLQANYTCETDGACMVSIFNLDGMEHHVRTCIPKVELVPAGKPFYCLSSEDLRNTHCCYTDYCNRIDLRVPSGHLKEPEHPSMWGPVELVGIIAGPVFLLFLIIIIVFLVINYHQRVYHNRQRLDMEDPSCEMCLSKDKTLQDLVYDLSTSGSGSGLPLFVQRTVARTIVLQEIIGKGRFGEVWRGRWRGGDVAVKIFSSREERSWFREAEIYQTVMLRHENILGFIAADNKDNGTWTQLWLVSDYHEHGSLFDYLNRYTVTIEGMIKLALSAASGLAHLHMEIVGTQGKPGIAHRDLKSKNILVKKNGMCAIADLGLAVRHDAVTDTIDIAPNQRVGTKRYMAPEVLDETINMKHFDSFKCADIYALGLVYWEIARRCNSGGVHEEYQLPYYDLVPSDPSIEEMRKVVCDQKLRPNIPNWWQSYEALRVMGKMMRECWYANGAARLTALRIKKTLSQLSVQEDVKI

SEQ ID NO: 35262 - protein, 549 aa, Homo sapiens
VVTMAESAGASSFFPLVVLLLAGSGGSGPRGVQALLCACTSCLQANYTCETDGACMVSIFNLDGMEHHVRTCIPKVELVPAGKPFYCLSSEDLRNTHCCYTDYCNRIDLRVPSGHLKEPEHPSMWGPVELVGIIAGPVFLLFLIIIIVFLVINYHQRVYHNRQRLDMEDPSCEMCLSKDKTLQDLVYDLSTSGSGSGLPLFVQRTVARTIVLQEIIGKGRFGEVWRGRWRGGDVAVKIFSSREERSWFREAEIYQTVMLRHENILGFIAADNKADCSFLTLPWEVVMVSAAPKLRSLRLQYKGGRGRARFLFPLNNGTWTQLWLVSDYHEHGSLFDYLNRYTVTIEGMIKLALSAASGLAHLHMEIVGTQGKPGIAHRDLKSKNILVKKNGMCAIADLGLAVRHDAVTDTIDIAPNQRVGTKRYMAPEVLDETINMKHFDSFKCADIYALGLVYWEIARRCNSGGVHEEYQLPYYDLVPSDPSIEEMRKVVCDQKLRPNIPNWWQSYEALRVMGKMMRECWYANGAARLTALRIKKTLSQLSVQEDVKI

SEQ ID NO: 35263 - protein, 99 aa, Homo sapiens
LQEREEEVAAAAELAGVPSRRPGPPASRHGRPCGAEQLRAGWCATPESGGGEASGARGARPPPWTEARPCPSQAAWLLLLGPEGRRDNVVGQGLLVHPE

SEQ ID NO: 35264 - protein, 102 aa, Homo sapiens
LQEREEEVAAAAELAGVPSRRPGPPASRHGRPCGAEQLRAGWCATPESGGGEASGARGARPPPWTEARPCPSQAAWLLLLGPEGRRDNVVGQGLLVHPEWAP

SEQ ID NO: 35265 - protein, 26 aa, Homo sapiens
LMAPRPWLLGIALLGLWALEPALGHW

SEQ ID NO: 35266 - protein, 111 aa, Homo sapiens
LDLDGIIAEVKAQYEEMAKCSRAEAEAWYQTKFETLQAQAGKHGDDLRNTRNEISEMNRAIQRLQAEIDNIKNQGGSRPIARCLPPLRGVMGSYKGSPEAAGMALALGAPV

SEQ ID NO: 35267 - protein, 101 aa, Homo sapiens
LQELSQMQTHISDTSVVLSMDNNRNLDLDSIIAEVKAQYEEIAQRSRAEAESWYQTKYEELQVTAGRHGDDLRNTKQEIAEINRMIQRLRSEIDHVKKQVQ

SEQ ID NO: 35268 - protein, 601 aa, Homo sapiens
LVLLLHQEQATMSRQSSVSFRSGGSRSFSTASAITPSVSRTSFTSVSRSGGGGGGGFGRVSLAGACGVGGYGSRSLYNLGGSKRISISTSGGSFRNRFGAGAGGGYGFGGGAGSGFGFGGGAGGGFGLGGGAGFGGGFGGPGFPVCPPGGIQEVTVNQSLLTPLNLQIDPSIQRVRTEEREQIKTLNNKFASFIDKVRFLEQQNKVLDTKWTLLQEQGTKTVRQNLEPLFEQYINNLRRQLDSIVGERGRLDSELRNMQDLVEDFKNKYEDEINKRTTAENEFVMLKKDVDAAYMNKVELEAKVDALMDEINFMKMFFDAELSQMQTHVSDTSVVLSMDNNRNLDLDSIIAEVKAQYEEIANRSRTEAESWYQTKYEELQQTAGRHGDDLRNTKHEISEMNRMIQRLRAEIDNVKKQCANLQNAIADAEQRGELALKDARNKLAELEEALQKAKQDMARLLREYQELMNTKLALDVEIATYRKLLEGEECRLSGEGVGPVNISVVTSSVSSGYGSGSGYGGGLGGGLGGGLGGGLAGGSSGSYYSSSSGGVGLGGGLSVGGSGFSASSGRGLGVGFGSGGGSSSSVKFVSTTSSSRKSFKS

SEQ ID NO: 35269 - protein, 491 aa, Homo sapiens
LVLLLHQEQATMSRQSSVSFRSGGSRSFSTASAITPSVSRTSFTSVSRSGGGGGGGFGRVSLAGACGVGGYGSRSLYNLGGSKRISISTSGGSFRNRFGAGAGGGYGFGGGAGSGFGFGGGAGGGFGLGGGAGFGGGFGGPGFPVCPPGGIQEVTVNQSLLTPLNLQIDPSIQRVRTEEREQIKTLNNKFASFIDKVRFLEQQNKVLDTKWTLLQEQGTKTVRQNLEPLFEQYINNLRRQLDSIVGERGRLDSELRNMQDLVEDFKNKYEDEINKRTTAENEFVMLKKDVDAAYMNKVELEAKVDALMDEINFMKMFFDAELSQMQTHVSDTSVVLSMDNNRNLDLDSIIAEVKAQYEEIANRSRTEAESWYQTKYEELQQTAGRHGDDLRNTKHEISEMNRMIQRLRAEIDNVKKQCANLQNAIADAEQRGELALKDARNKLAELEEALQKAKQDMARLLREYQELMNTKLALDVEIATYRKLLEGEECR

SEQ ID NO: 35270 - protein, 594 aa, Homo sapiens
MTSVGVFSDMLNGCGKDGLVPRAKPRDVSDFSLYAPATKPCCSRTYKRRRLRAPALTGLGPVTSLIAPSSLSAAMIARQQCVRGGPRGFSCGSAIVGGGKRGAFSSVSMSGGAGRCSSGGFGSRSLYNLRGNKSISMSVAGSRQGACFGGAGGFGTGGFGGGFGGSFSGKGGPGFPVCPAGGIQEVTINQSLLTPLHVEIDPEIQKVRTEEREQIKLLNNKFASFIDKVQFLEQQNKVLETKWNLLQQQTTTTSSKNLEPLFETYLSVLRKQLDTLGNDKGRLQSELKTMQDSVEDFKTKYEEEINKRTAAENDFVVLKKDVDAAYLNKVELEAKVDSLNDEINFLKVLYDAELSQMQTHVSDTSVVLSMDNNRNLDLDSIIAEVRAQYEEIAQRSKAEAEALYQTKVQQLQISVDQHGDNLKNTKSEIAELNRMIQRLRAEIENIKKQCQTLQVSVADAEQRGENALKDAHSKRVELEAALQQAKEELARMLREYQELMSVKLALDIEIATYRKLLEGEEYRMSGECQSAVSISVVSGSTSTGGISGGLGSGSGFGLSSGFGSGSGSGFGFGGSVSGSSSSKIISTTTLNKRR

SEQ ID NO: 35271 - protein, 306 aa, Homo sapiens [sequence omitted]

SEQ ID NO: 35272 - protein, 543 aa, Homo sapiens
LPSGPSAAMRSSVSRQTYSTKGGFSSNSASGGSGSQARTSFSSVTVSRSSGSGGGAHCGPGTGGFGSRSLYNLGGHKSISVSVAGGALLGRALGGFGFGSRAFMGQGAGRQTFGPACPPGGIQEVTVNQSLLTPLHVEIDPEIQRVRTQEREQIKTLNNKFASFIDKVRFLEQQNKVLETKWALLQEQGQNLGVTRNNLEPLFEAYLGSMRSTLDRLQSERGRLDSELRNVQDLVEDFKNKYEDEINKHTAAENEFVVLKKDVDAAYMGRMDLHGKVGTLTQEIDFLQQLYEMELSQVQTHVSNTNVVLSMDNNRNLDLDSIIAEVKAQYELIAQRSRAEAEAWYQTKYEELQVTAGKHGDNLRDTKNEIAELTRTIQRLQGEADAAKKQCQQLQTAIAEAEQRGELALKDAQKKLGDLDVALHQAKEDLTRLLRDYQELMNVKLALDVEIATYRKLLESEESRMSGECPSAVSISVTGNSTTVCGGGAASFGGGISLGGSGGATKGGFSTNVGYSTVKGGPVSAGTSILRKTTTVKTSSQRY

SEQ ID NO: 35273 - protein, 330 aa, Homo sapiens
LGWKINPQSGQLESPVTRPLGGPWEPLGWGWVWKPSSGSPLLIPQDVDEAYMNKVELESRLEGLTDEINFLRQLYEEEIRELQSQISDTSVVLSMDNSRSLDMDSIIAEVKAQYEDIANRSRAEAESMYQIKYEELQSLAGKHGDDLRRTKTEISEMNRNISRLQAEIEGLKGQRASLEAAIADAEQRGELAIKDANAKLSELEAALQRAKQDMARQLREYQELMNVKLALDIEIATYRKLLEGEESRLESGMQNMSIHTKTTSGYAGGLSSAYGGLTSPGLSYSLGSSFGSGAGSSSFSRTSSSRAVVVKKIETRDGKLVSESSDVLPK

SEQ ID NO: 35274 - protein, 226 aa, Homo sapiens
MSIRVTQKSYKVSTSGPRAFSSRSYTSGPGSRISSSSFSRVGSSNFRGGLGGGYGGASGMGGITAVTVNQSLLSPLVLEVDPNIQAVRTQEKEQIKTLNNKFASFIDKVRFLEQQNKMLETKWSLLQQQKTARSNMDNMFESYINNLRRQLETLGQEKLKLEAELGNMQGLVEDFKNKYEDEINKRTEMENEFVLIKKVRESPFSYLDTGGWGSETQTKKLSGFCP

SEQ ID NO: 35275 - protein, 259 aa, Homo sapiens
LLVCNGHRTSLSRWHELRRFWIRDRGPSDHLHSYRYETELAMRQSVENDIHGLRKVIDDTNITRLQLETEIEALKEELLFMKKNHEEEVKGLQAQIASSGLTVEVDAPKSQDLAKIMADIRAQYDELARKNREELDKYWSQQIEESTTVVTTQSAEVGAAETTLTELRRTVQSLEIDLDSMRNLKASLENSLREVEARYALQMEQLNGILLHLESELAQTRAEGQRQAQEYEALLNIKVKLEAEIATYRRLLEDGEDFK

SEQ ID NO: 35276 - protein, 1437 aa, Homo sapiens
LTPRTGSWPCSQEGGRRPMDGGGVCVGRGDLLSSPQALGQLLRKESRPRRAMKPRKAEPHSFREKVFRKKPPVCAVCKVTIDGTGVSCRVCKVATHRKCEAKVTSACQALPPVELRRNTAPVRRIEHLGSTKSLNHSKQRSTLPRSFSLDPLMERRWDLDLTYVTERILAAAFPARPDEQRHRGHLRELAHVLQSKHRDKYLLFNLSEKRHDLTRLNPKVQDFGWPELHAPPLDKLCSICKAMETWLSADPQHVVVLYCKGNKGKLGVIVSAYMHYSKISAGADQALATLTMRKFCEDKVATELQPSQRRYISYFSGLLSGSIRMNSSPLFLHYVLIPMLPAFEPGTGFQPFLKIYQSMQLVYTSGVYHIAGPGPQQLCISLEPALLLKGDVMVTCYHKGGRGTDRTLVFRVQFHTCTIHGPQLTFPKDQLDEAWTDERFPFQASVEFVFSSSPEKIKGSTPRNDPSVSVDYNTTEPAVRWDSYENFNQHHEDSVDGSLTHTRGPLDGSPYAQVQRPPRQTPPAPSPEPPPPPMLSVSSDSGHSSTLTTEPAAESPGRPPPTAAERQELDRLLGGCGVASGGRGAGRETAILDDEEQPTVGGGPHLGVYPGHRPGLSRHCSCRQGYREPCGVPNGGYYRPEGTLERRRLAYGGYEGSPQGYAEASMEKRRLCRSLSEGLYPYPPEMGKPATGDFGYRAPGYREVVILEDPGLPALYPCPACEEKLALPTAALYGLRLEREAGEGWASEAGKPLLHPVRPGHPLPLLLPACGHHHAPMPDYSCLKPPKAGEEGHEGCSYTMCPEGRYGHPGYPALVTYSYGGAVPSYCPAYGRVPHSCGSPGEGRGYPSPGAHSPRAGSISPGSPPYPQSRKLSYEIPTEEGGDRYPLPGHLASAGPLASAESLEPVSWREGPSGHSTLPRSPRDAPCSASSELSGPSTPLHTSSPVQGKESTRRQDTRSPTSAPTQRLSPGEALPPVSQAGTGKAPELPSGSGPEPLAPSPVSPTFPPSSPSDWPQERSPGGHSDGASPRSPVPTTLPGLRHAPWQGPRGPPDSPDGSPLTPVPSQMPWLVASPEPPQSSPTPAFPLAASYDTNGLSQPPLPEKRHLPGPGQQPGPWGPEQASSPARGISHHVTFAPLLSDNVPQTPEPPTQESQSNVKFVQDTSKFWYKPHLSRDQAIALLKDKDPGAFLIRDSHSFQGAYGLALKVATPPPSAQPWKGDPVEQLVRHFLIETGPKGVKIKGCPSEPYFGSLSALVSQHSISPISLPCCLRIPSKDPLEETPEAPVPTNMSTAADLLRQGAACSVLYLTSVETESLTGPQAVARASSAALSCSPRPTPAVVHFKVSAQGITLTDNQRKLFFRRHYPVNSITFSSTDPQDRRWTNPDGTTSKIFGFVAKKPGSPWENVCHLFAELDPDQPAGAIVTFITKVLLGQRK

SEQ ID NO: 35277 - protein, 237 aa, Homo sapiens
LRWVSPGQPMRAGEPHTVGDEELGPQPRFSKSHEQDDHGVVAGRLLCLASDCRSSRVMESAFLTSHLCDCKACDSSSWGMCKSWWGWLGDGHSLPDPLPAPVACSVLYLTSVETESLTGPQAVARASSAALSCSPRPTPAVVHFKVSAQGITLTDNQRKLFFRRHYPVNSITFSSTDPQDRRWTNPDGTTSKIFGFVAKKPGSPWENVCHLFAELDPDQPAGAIVTFITKVLLGQRK

SEQ ID NO: 35278 - protein, 35 aa, Homo sapiens
MDPKNGVGMWVVPLALVSGLLGPPFPHRPCVGGEA

SEQ ID NO: 35279 - protein, 147 aa, Homo sapiens
LEGEDGAQTLTMTPHRLLPPLLLLLALLLAASPGGALARCPGCGQGVQAGCPGGCVEEEDGGSPAEGCAEAEGCLRREGQECGVYTPNCAPGLQCHPPKDDEAPLRALLLGRGRCLPARAPAVLSSPRTLRKLSPEPGATCSCRGES

SEQ ID NO: 35280 - protein, 249 aa, Homo sapiens
LEGEDGAQTLTMTPHRLLPPLLLLLALLLAASPGGALARCPGCGQGVQAGCPGGCVEEEDGGSPAEGCAEAEGCLRREGQECGVYTPNCAPGLQCHPPKDDEAPLRALLLGRGRCLPARAPAEENPKESKPQAGTARPQDVNRRDQQRNPGTSTTPSQPNSAGVQDTEMGPCRRHLDSVLQQLQTEVYRGAQTLYVPNCDHRGFYRKRQCRSSQGQRRGPCWCVDRMGKSLPGSPDGNGSSSCPTGSSG

SEQ ID NO: 35281 - protein, 238 aa, Homo sapiens
MSLNEHSMQALSWRKLYLSRAKLKASSRTSALLSGFAMVAMVEVQLDADHDYPPGLLIAFSACTTVLVAVHLFALMISTCILPNIEAVSNVHNLNSVKESPHERMHRHIELAWAFSTVIGTLLFLAEVVLLCWVKFLPLKKQPGQPRPTSKPPASGAAANVSTSGITPGQAAAIASTTIMVPFGLIFIVFAVHFYRSLVSHKTDRQFQELNELAEFARLQDQLDHRGDHPLTPGSHYA

SEQ ID NO: 35282 - protein, 806 aa, Homo sapiens
LQQHQNLGMVALPMVLVLLLVLSRGESELDAKIPSTGDATEWRNPHLSMLGSCQPAPSCQKCILSHPSCAWCKQLNFTASGEAEARRCARREELLARGCPLEELEEPRGQQEVLQDQPLSQGARGEGATQLAPQRVRVTLRPGEPQQLQVRFLRAEGYPVDLYYLMDLSYSMKDDLERVRQLGHALLVRLQEVTHSVRIGFGSFVDKTVLPFVSTVPSKLRHPCPTRLERCQSPFSFHHVLSLTGDAQAFEREVGRQSVSGNLDSPEGGFDAILQAALCQEQIGWRNVSRLLVFTSDDTFHTAGDGKLGGIFMPSDGHCHLDSNGLYSRSTEFDYPSVGQVAQALSAANIQPIFAVTSAALPVYQELSKLIPKSAVGELSEDSSNVVQLIMDAYNSLSSTVTLEHSSLPPGVHISYESQCEGPEKREGKAEDRGQCNHVRINQTVTFWVSLQATHCLPEPHLLRLRALGFSEELIVELHTLCDCNCSDTQPQAPHCSDGQGHLQCGVCSCAPGRLGRLCECSVAELSSPDLESGCRAPNGTGPLCSGKGHCQCGRCSCSGQSSGHLCECDDASCERHEGILCGGFGRCQCGVCHCHANRTGRACECSGDMDSCISPEGGLCSGHGRCKCNRCQCLDGYYGALCDQCPGCKTPCERHRDCAECGAFRTGPLATNCSTACAHTNVTLALAPILDDGWCKERTLDNQLFFFLVEDDARGTVVLRVRPQEKGADHTQAIVLGCVGGIVAVGLGLVLAYRLSVEIYDRREYSRFEKEQQQLNWKQDSNPLYKSAITTTINPRFQEADSPTL

SEQ ID NO: 35283 - protein, 476 aa, Homo sapiens
LHAPGMVALPMVLVLLLVLSRGESELDAKIPSTGDATEWRNPHLSMLGSCQPAPSCQKCILSHPSCAWCKQLNFTASGEAEARRCARREELLARGCPLEELEEPRGQQEVLQDQPLSQGARGEGATQLAPQRVRVTLRPGEPQQLQVRFLRAEGYPVDLYYLMDLSYSMKDDLERVRQLGHALLVRLQEVTHSVRIGFGSFVDKTVLPFVSTVPSKLRHPCPTRLERCQSPFSFHHVLSLTGDAQAFEREVGRQSVSGNLDSPEGGFDAILQAALCQEQIGWRNVSRLLVFTSDDTFHTAGDGKLGGIFMPSDGHCHLDSNGLYSRSTEFDYPSVGQVAQALSAANIQPIFAVTSAALPVYQELSKLIPKSAVGELSEDSSNVVQLIMDAYNSLSSTVTLEHSSLPPGVHISYESQCEGPEKREGKAEDRGQCNHVRINQTGLCRVWGLQDWPTGHQLQYSLCPYQCDPGLGPYLG

SEQ ID NO: 35284 - protein, 41 aa, Homo sapiens
LCQLSSIQISFLCLMLLPYPIPGPSSAFWKFPFAQEVVSSS

SEQ ID NO: 35285 - protein, 233 aa, Homo sapiens
LHAPGMVALPMVLVLLLVLSRGESELDAKIPSTGDATEWRNPHLSMLGSCQPAPSCQKCILSHPSCAWCKQLNFTASGEAEARRCARREELLARGCPLEELEEPRGQQEVLQDQPLSQGARGEGATQLAPQRVRVTLRPGEPQQLQVRFLRAEGYPVDLYYLMDLSYSMKDDLERVRQLGHALLVRLQEVTHSVRIGEPSAASRPVSPCLFNHCPSLCQHPGLTRAPTCPPSC

SEQ ID NO: 35286 - protein, 602 aa, Homo sapiens
VSPPAESVCGLGENVSDILGRSRGRAGSERPRDSPSLEPCPPRSPPVRRAPDIATLHPRDCPTPGPRGSAASLPPPTPAATAQFPQPDPVCRSQSLQAASGTFGGPVGRPGRAGTEPPRLGQWAWAGAVAEDLARPLQTPGDSHTAAAMATNKERLFAAGALGPGSGYPGAGFPFAFPGALRGSPPFEMLSPSFRGLGQPDLPKEMASLSVETQSTSSEEMVPSSPSPPPPPRVYKPCFVCNDKSSGYHYGVSSCEGCKGFFRRSIQKNMVYTCHRDKNCIINKVTRNRCQYCRLQKCFEVGMSKEAVRNDRNKKKKEVKEEGSPDSYELSPQLEELITKVSKAHQETFPSLCQLGKYTTNSSADHRVQLDLGLWDKFSELATKCIIKIVEFAKRLPGFTGLSIADQITLLKAACLDILMLRICTRYTPEQDTMTFSDGLTLNRTQMHNAGFGPLTDLVFAFAGQLLPLEMDDTETGLLSAICLICGDRMDLEEPEKVDKLQEPLLEALRLYARRRRPSQPYMFPRMLMKITDLRGISTKGAERAITLKMEIPGPMPPLIREMLENPEMFEDDSSQPGPHPNASSEDEVPGGQGKGGLKSPA

SEQ ID NO: 35287 - protein, 565 aa, Homo sapiens
LDHTGFSCMEVTAVGEEANQGDLLGFGQRCCSLGSSNPWLYRTAGIFPEHCTEEKKIGTYFRVAPQASKSQRSRCHGMAASEARPGEATAASYGRPFPTHPRRQEFRARVVRGPTMLVTAYLAFVGLLASCLGLELSRCRAKPPGRACSNPSFLRFQLDFYQVYFLALAADWLQAPYLYKLYQHYYFLEGQIAILYVCGLASTVLFGLVASSLVDWLGRKNSCVLFSLTYSLCCLTKLSQDYFVLLVGRALGGLSTALLFSAFEAWYIHEHVERHDFPAEWIPATFARAAFWNHVLAVVAGVAAEAVASWIGLGPVAPFVAAIPLLALAGALALRNWGENYDRQRAFSRTCAGGLRCLLSDRRVLLLGTIQALFESVIFIFVFLWTPVLDPHGAPLGIIFSSFMAASLLGSSLYRIATSKRYHLQPMHLLSLAVLIVVFSLFMLTFSTSPGQESPVESFIAFLLIELACGLYFPSMSFLRRKVIPETEQAGVLNWFRVPLHSLACLGLLVLHDSDRKTGTRNMFSICSAVMVMALLAVVGLFTVVRHDAELRVPSPTEEPYAPEL

SEQ ID NO: 35288 - protein, 33 aa, Homo sapiens
LWFLLPLLCVWEDMMGVMDWKEGAKSSLCVTPI

SEQ ID NO: 35289 - protein, 2135 aa, Homo sapiens
LYLGKRASSGALSGVMRSFKRVNFGTLLSSQKEAEELLPALKEFLSNPPAGFPSSRSDAERRQACDAILRACNQQLTAKLACPRHLGSLLELAELACDGYLVSTPQRPPLYLERILFVLLRNAAAQGSPEATLRLAQPLHACLVQCSREAAPQDYEAVARGSFSLLWKGAEALLERRAAFAARLKALSFLVLLEDESTPCEVPHFASPTACRAVAAHQLFDASGHGLNEADADFLDDLLSRHVIRALVGERGSSSGLLSPQRALCLLELTLEHCRRFCWSRHHDKAISAVEKAHSYLRNTNLAPSLQLCQLGVKLLQVGEEGPQAVAKLLIKASAVLSKSMEAPSPPLRALYESCQFFLSGLERGTKRRYRLDAILSLFAFLGGYCSLLQQLRDDGVYGGSSKQQQSFLQMYFQGLHLYTVVVYDFAQGCQIVDLADLTQLVDSCKSTVVWMLEALEGLSGQELTDHMGMTASYTSNLAYSFYSHKLYAEACAISEPLCQHLGLVKPGTYPEVPPEKLHRCFRLQVESLKKLGKQAQGCKMVILWLAALQPCSPEHMAEPVTFWVRVKMDAARAGDKELQLKTLRDSLSGWDPETLALLLREELQAYKAVRADTGQERFNIICDLLELSPEETPAGAWARATHLVELAQVLCYHDFTQQTNCSALDAIREALQLLDSVRPEAQARDQLLDDKAQALLWLYICTLEAKMQEGIERDRRAQAPGNLEEFEVNDLNYEDKLQEDRFLYSNIAFNLAADAAQSKCLDQALALWKELLTKGQAPAVRCLQQTAASLQILAALYQLVAKPMQALEVLLLLRIVSERLKDHSKAAGSSCHITQLLLTLGCPSYAQLHLEEAASSLKHLDQTTDTYLLLSLTCDLLRSQLYWTHQKVTKGVSLLLSVLRDPALQKSSKAWYLLRVQVLQLVAAYLSLPSNNLSHSLWEQLCAQGWQTPEIALIDSHKLLRSIILLLMGSDILSTQKAAVETSFLDYGENLVQKWQVLSEVLSCSEKLVCHLGRLGSVSEAKAFCLEALKLTTKLQIPRQCALFLVLKGELELARNDIDLCQSDLQQVLFLLESCTEFGGVTQHLDSVKKVHLQKGKQQAQVPCPPQLPEEELFLRGPALELVATVAKEPGPIAPSTNSSPVLKTKPQPIPNFLSHSPTCDCSLCASPVLTAVCLRWVLVTAGVRLAMGHQAQGLDLLQVVLKGCPEAAERLTQALQASLNHKTPPSLVPSLLDEILAQAYTLLALEGLNQPSNESLQKVLQSGLKFVAARIPHLEPWRASLLLIWALTKLGGLSCCTTQLFASSWGWQPPLIKSVPGSEPSKTQGQKRSGRGRQKLASAPLRLNNTSQKGLEGRGLPCTPKPPDRIRQAGPHVPFTVFEEVCPTESKPEVPQAPRVQQRVQTRLKVNFSDDSDLEDPVSAEAWLAEEPKRRGTASRGRGRARKGLSLKTDAVVAPGSAPGNPGLNGRSRRAKKVASRHCEERRPQRASDQARPGPEIMRTIPEEELTDNWRKMSFEILRGSDGEDSASGGKTPAPGPEAASGEWELLRLDSSKKKLPSPCPDKESDKDLGPRLRLPSAPVATGLSTLDSICDSLSVAFRGISHCPPSGLYAHLCRFLALCLGHRDPYATAFLVTESVSITCRHQLLTHLHRQLSKAQKHRGSLEIADQLQGLSLQEMPGDVPLARIQRLFSFRALESGHFPQPEKESFQERLALIPSGVTVCVLALATLQPGTVGNTLLLTRLEKDSPPVSVQIPTGQNKLHLRSVLNEFDAIQKAQKENSSCTDKREWWTGRLALDHRMEVLIASLEKSVLGCWKGLLLPSSEEPGPAQEASRLQELLQDCGWKYPDRTLLKIMLSGAGALTPQDIQALAYGLCPTQPERAQELLNEAVGRLQGLTVPSNSHLVLVLDKDLQKLPWESMPSLQALPVTRLPSFRFLLSYSIIKEYGASPVLSQGVDPRSTFYVLNPHNNLSSTEEQFRANFSSEAGWRGVVGEVPRPEQVQEALTKHDLYIYAGHGAGARFLDGQAVLRLSCRAVALLFGCSSAALAVRGNLEGAGIVLKYIMAGCPLFLGNLWDVTDRDIDRYTEALLQGWLGAGPGAPLLYYVNQARQAPRLKYLIGAAPIAYGLPVSLR

SEQ ID NO: 35290 - protein, 54 aa, Homo sapiens
LAESWLMLGWLVFPLILASQMYVPGKLHDVEHVLIDVGTGYYVEKVSESMWMPL

SEQ ID NO: 35291 - protein, 105 aa, Homo sapiens
LAESWLMLGWLVFPLILASQMYVPGKLHDVEHVLIDVGTGYYVEKTAEDAKDFFKRKIDFLTKQMEKIQPALQEKHAMKQAVMEMMSQKIQQLTALGAAQATAKA

SEQ ID NO: 35292 - protein, 384 aa, Homo sapiens
LPPCRELLMGHQFLRGLLTLLLPPPPLYTRHRMLGPESVPPPKRSRSKLMAPPRIGTHNGTFHCDEALACALLRLLPEYRDAEIVRTRDPEKLASCDIVVDVGGEYDPRRHRYDHHQRSFTETMSSLSPGKPWQTKLSSAGLIYLHFGHKLLAQLLGTSEEDSMVGTLYDKMYENFVEEVDAVDNGISQWAEGEPRYALTTTLSARVARLNPTWNHPDQDTEAGFKRAMDLVQEEFLQRLDFYQHSWLPARALVEEALAQRFQVDPSGEIVELAKGACPWKEHLYHLESGLSPPVAIFFVIYTDQAGQWRIQCVPKEPHSFQSRLPLPEPWRGLRDEALDQVSGIPGCIFVHASGFTGGHHTREGALSMARATLAQRSYLPQIS

SEQ ID NO: 35293 - protein, 309 aa, Homo sapiens
LCTSQDAEIVRTRDPEKLASCDIVVDVGGEYDPRRHRYDHHQRSFTETMSSLSPGKPWQTKLSSAGLIYLHFGHKLLAQLLGTSEEDSMVGTLYDKMYENFVEEVDAVDNGISQWAEGEPRYALTTTLSARVARLNPTWNHPDQDTEAGFKRAMDLVQEEFLQRLDFYQHSWLPARALVEEALAQRFQVDPSGEIVELAKGACPWKEHLYHLESGLSPPVAIFFVIYTDQAGQWRIQCVPKEPHSFQSRLPLPEPWRGLRDEALDQVSGIPGCIFVHASGFTGGHHTREGALSMARATLAQRSYLPQIS

SEQ ID NO: 35294 - protein, 77 aa, Homo sapiens
VETAWPRQEARRWINLPVLQLTKDPLKTPGRLDHGTRTAFIHHREQVWKRCINIWRDVGLFGVLNEIANSEEEEGTW

SEQ ID NO: 35295 - protein, 11 aa, Homo sapiens
LGNNNLVVFLL

SEQ ID NO: 35296 - protein, 304 aa, Homo sapiens
LLDMDTGVIEGGLNVTLTIRLLMHGKEVGSIIGKKGESVKKMREESGARINISEGNCPERIITLAGPTNAIFKAFAMIIDKLEEDISSSMTNSTAASRPPVTLRLVVPASQCGSLIGKGGCKIKEIRESTGAQVQVAGDMLPNSTERAITIAGIPQSIIECVKQICVVMLESPPKGVTIPYRPKPSSSPVIFAGGQDRYSTGSDSASFPHTTPSMCLNPDLEGPPLEAYTIQGQYAIPQPDLTKLHQLAMQQSHFPMTHGNTGFSGMDTSVFISVRCSARERPVPRSQLDICLKQTSLSSILLV

SEQ ID NO: 35297 - protein, 369 aa, Homo sapiens
LLDMDTGVIEGGLNVTLTIRLLMHGKEVGSIIGKKGESVKKMREESGARINISEGNCPERIITLAGPTNAIFKAFAMIIDKLEEDISSSMTNSTAASRPPVTLRLVVPASQCGSLIGKGGCKIKEIRESTGAQVQVAGDMLPNSTERAITIAGIPQSIIECVKQICVVMLETLSQSPPKGVTIPYRPKPSSSPVIFAGGQDRYSTGSDSASFPHTTPSMCLNPDLEGPPLEAYTIQGQYAIPQPDLTKLHQLAMQQSHFPMTHGNTGFSGIESSSPEVKGYWAGLDASAQTTSHELTIPNDLIGCIIGRQGAKINEIRQMSGAQIKIANPVEGSTDRQVTITGSAASISLAQYLINVRLSSETGGMGSS

SEQ ID NO: 35298 - protein, 97 aa, Homo sapiens
LNLLALFCLLAGLDASAQTTSHELTIPNDLIGCIIGRQGAKINEIRQMSGAQIKIANPVEGSTDRQVTITGSAASISLAQYLINVRLSSETGGMGSS

SEQ ID NO: 35299 - protein, 258 aa, Homo sapiens [sequence omitted]

SEQ ID NO: 35300 - protein, 77 aa, Homo sapiens [sequence omitted]

SEQ ID NO: 35301 - protein, 112 aa, Homo sapiens
LGRVEAAVTVAPAGTEEGMSEEEQGSGTTTGCGLPSLLQEYGTRIGKTPVYDLLKAEGQAHQPNFTFRVTVGDTSCTGQGPSKKAAKHKAAEVALKHLKGGSMLEPALEDSR

SEQ ID NO: 35302 - protein, 207 aa, Homo sapiens
LCLPSKELVVQKGWRLPEYTVTQESGPAHRKEFTMTCRVERFIEIGSGTSKKLAKRNAAAKMLLRVHTVPLDARDGNEVEPDDDHFSIGVGSRLDGLRNRGPGCTWDSLRNSVGEKILSLRSCSLGSLGALGPACCRVLSELSEEQAFHVSYLDIEELSLSGLCQCLVELSTQPATVCHGSATTREAARGEAARRALQYLKIMAGSK

SEQ ID NO: 35303 - protein, 204 aa, Homo sapiens
LAGGAVMPELILYVAITLSVAERLVGPGHACAEPSFRSSRCSAPLCLLCSGSSSPATAPHPLKMFACSKFVSTPSLVKSTSQLLSRPLSAVVLKRPEILTDESLSSLAVSCPLTSLVSSRSFQTSAISRDIDTAAKFIGAGAATVGVAGSGAGIGTVFGSLIIGYARNPSLKQQLFSYAILGFALSEAMGLFCLMVAFLILFAM

SEQ ID NO: 35304 - protein, 541 aa, Homo sapiens
MEESPLSRAPSRGGVNFLNVARTYIPNTKVECHYTLPPGTMPSASDWIGIFKVEAACVRDYHTFVWSSVPESTTDGSPIHTSVQFQGAQLYQFRYVNRQGQVCGQSPPFQFREPRPMDELVTLEEADGGSDILLVVPKATVLQNQLDESQQERNDLMQLKLQLEGQVTELRSRVQELERALATARQEHTELMEQYKGISRSHGEITEERDILSRQQGDHVARILELEDDIQTISEKVLTKEVELDRLRDTVKALTREQEKLLGQLKEVQADKEQSEAELQVAQQENHHLNLDLKEAKSWQEEQSAQAQRLKDKVAQMKDTLGQAQQRVAELEPLKEQLRGAQELAASSQQKATLLGEELASAAAARDRTIAELHRSRLEVAEVNGRLAELGLHLKEEKCQWSKERAGLLQSVEAEKDKILKLSAEILRLEKAVQEERTQNQVFKTELAREKDSSLVQLSESKRELTELRSALRVLQKEKEQLQEEKQELLEYMRKLEARLEKVADEKWNEDATTEDEEAAVGLSPCSPNLVTPLPHSTSRC

SEQ ID NO: 35305 - protein, 108 aa, Homo sapiens
VGGLRLLLGAVHLTVPAIGESPVLVAFDGDEGVVTRLRVPADPGHHRHVQVLNAECSCAASAQTMATEQRLAQPDLLHPSSGEQMDRSAETPSGHLPPLCGEKVVFDG

SEQ ID NO: 35306 - protein, 35 aa, Homo sapiens
VERGSPELQTAARGPKESDVYKTRNATAASWQRKG

SEQ ID NO: 35307 - protein, 254 aa, Homo sapiens
LETEINIKEIIDRPGKGKGMNSYFTNPSLSCHLAGGQDVLPNVALNSTAYDPVRHFSTYGAAVAQNRIYSTPFYSPQENVVFSSSRGPYDYGSNSFYQEKDMLSNCRQNTLGHNTQTSIAQDFSSEQGRTAPQDQKASIQIYPWMQRMNSHSGVGYGADRRRGRQIYSRYQTLELEKEFHFNRYLTRRRRIEIANALCLTERQIKIWFQNRRMKWKKESNLTSTLSGGGGGATADSLGGKEEKREETEEEKQKE

SEQ ID NO: 35308 - protein, 165 aa, Homo sapiens
LDPLPHRTTLFHHAPPPPRSLASSFSACLQALFPVQALGARTLNSDSTDCPPSEDLAPPLLRRPHPRPPCREPAPGPAGASAPGPQGPAWQPGRAGGPRRARLGPTPTPRASPQSLPSPSAPANAQPRQIVFKESWGSLWHFTNCDRFCVKIFSCICGLCIYIYV

SEQ ID NO: 35309 - protein, 48 aa, Homo sapiens
MLTHPFLLTQQNTSFWFLLVLLLRNLSDHILLPLSPKKCPTLSFSFCS

SEQ ID NO: 35310 - protein, 23 aa, Homo sapiens
LGDFVTMMLNFGFLLWFLEHVAD

SEQ ID NO: 35311 - protein, 230 aa, Homo sapiens
VVACGAASPYRNRADVSVSDHSQSRGPGGLSLSGGTVCDMGKKTKRTADSSSSEDEEEYVVEKVLDRRVVKGQVEYLLKWKGFSEEHNTWEPEKNLDCPELISEFMKKYKKMKEGENNKPREKSESNKRKSNFSNSADDIKSKKKREQSNDIARGFERGLEPEKIIGATDSCGDLMFLMKWKDTDEADLVLAKEANVKCPQIVIAFYEERLTWHAYPEDAENKEKETAKS

SEQ ID NO: 35312 - protein, 14 aa, Homo sapiens
LAYLSVLFSHCLLF

SEQ ID NO: 35313 - protein, 349 aa, Homo sapiens
LADTFVSLLLSARGRRRRSIVKVSLHPAVMSKSESPKEPEQLRKLFIGGLSFETTDESLRSHFEQWGTLTDCVVMRDPNTKRSRGFGFVTYATVEEVDAAMNARPHKVDGRVVEPKRAVSREDSQRPGAHLTVKKIFVGGIKEDTEEHHLRDYFEQYGKIEVIEIMTDRGSGKKRGFAFVTFDDHDSVDKIVIQKYHTVNGHNCEVRKALSKQEMASASSSQRGRSGSGNFGGGRGGGFGGNDNFGRGGNFSGRGGFGGSRGGGGYGGSGDGYNGFGNDGSNFGGGGSYNDFGNYNNQSSNFGPMKGGNFGGRSSGPYGGGGQYFAKPRNQGGYGGSSSSSSYGSGRRF

SEQ ID NO: 35314 - protein, 111 aa, Homo sapiens
LRGKMEALILEPSLYTVKAILILDNDGDRLFAKYYDDTYPSVKEQKAFEKNIFNKTHRTDSEIALLEGLTVVYKSSIDLYFYVIGSSYENEEKCRKASTAGEHGGAVLGCG

SEQ ID NO: 35315 - protein, 136 aa, Homo sapiens
LRGKMEALILEPSLYTVKAILILDNDGDRLFAKYYDDTYPSVKEQKAFEKNIFNKTHRTDSEIALLEGLTVVYKSSIDLYFYVIGSSYENELMLMAVLNCLFDSLSQMLRKNVEKRALLENMEGLFLAVDEIVDGG

SEQ ID NO: 35316 - protein, 167 aa, Homo sapiens
LRGKMEALILEPSLYTVKAILILDNDGDRLFAKYYDDTYPSVKEQKAFEKNIFNKTHRTDSEIALLEGLTVVYKSSIDLYFYVIGSSYENELMLMAVLNCLFDSLSQMLRKNVEKRALLENMEGLFLAVDEIVDGGVILESDPQQVVHRVALRGEDVPLTEQTVSQV

SEQ ID NO: 35317 - protein, 181 aa, Homo sapiens
LRGKMEALILEPSLYTVKAILILDNDGDRLFAKYYDDTYPSVKEQKAFEKNIFNKTHRTDSEIALLEGLTVVYKSSIDLYFYVIGSSYENELMLMAVLNCLFDSLSQMLRKNVEKRALLENMEGLFLAVDEIVDGGVILESDPQQVVHRVALRGEDVPLTEQTVSQVLQSAKEQIKWSLLR

SEQ ID NO: 35318 - protein, 202 aa, Homo sapiens
LRGKMEALILEPSLYTVKAILILDNDGDRLFAKYYDDTYPSVKEQKAFEKNIFNKTHRTDSEIALLEGLTVVYKSSIDLYFYVIGSSYENELMLMAVLNCLFDSLSQMLRTGSTQAGGLHESSSRQAWATQKNVEKRALLENMEGLFLAVDEIVDGGVILESDPQQVVHRVALRGEDVPLTEQTVSQVLQSAKEQIKWSLLR

SEQ ID NO: 35319 - protein, 164 aa, Homo sapiens
LRGKMEALILEPSLYTVKAILILDNDGDRLFAKYYDDTYPSVKEQKAFEKNIFNKTHRTDSEIALLEGLTVVYKSSIDLYFYVIGSSYENELMLMAVLNCLFDSLSQMLRKNVEKRALLENMEGLFLAVDEIVDGGVILESDPQQVVHRVLQSAKEQIKWSLLR

SEQ ID NO: 35320 - protein, 200 aa, Homo sapiens
LGVQDQWAYLFISQVTILNGSDIRSLYNFSGEQMASYFGYAVAATDVNGDGLDDLLVGAPLLMDRTPDGRPQEVGRVYVYLQHPAGIEPTPTLTLTGHDEFGRFGSSLTPLGDLDQDGYNDVAIGAPFGGETQQGVVFVFPGGPGGLGSKPSQVLQPLWAASHTPDFFGSALRGGRDLDGNGYPGELCLRPLFTLKFPGH

SEQ ID NO: 35321 - protein, 1138 aa, Homo sapiens
LLSGAPLSVAIMSLTSAYQHKLAEKLTILNDRGQGVLIRMYNIKKTCSDPKSKPPFLLEKSMEPSLKYINKKFPNIDVRNSTQHLGPVHREKAEIIRFLTNYYQSFVDVMEFRDHVYELLNTIDACQCHFDINLNFDFTRSYLDLIVTYTSVILLLSRIEDRRILIGMYNCAHEMLHGHGDPSFARLGQMVLEYDHPLKKLTEEFGPHTKAVSGALLSLHFLFVRRNQGAEQWRSAQLLSLISNPPAMINPANSDTMACEYLSVEVMERWIIIGFLLCHGCLNSNSQCQKLWKLCLQGSLYITLIREDVLQVHKVTEDLFSSLKGYGKRVADIKESKEHVIANSGQFHCQRRQFLRMAVKELETVLADEPGLLGPKALFAFMALSFIRDEVTWLVRHTENVTKTKTPEDYADSSIAELLFLLEGIRSLVRRHIKVIQQYHLQYLARFDALVLSDIIQNLSVCPEEESIIMSSFVSILSSLNLKQVDNGEKFEFSGLRLDWFRLQAYTSVAKAPLHLHENPDLAKVMNLIVFHSRMLDSVEKLLVETSDLSTFCFHLRIFEKMFAMTLEESAMLRYAIAFPLICAHFVHCTHEMCPEEYPHLKNHGLHHCNSFLEELAKQTSNCVLEICAEQRNLSEQLLPKHCATTISKAKNKKTRKQRQTPRKGEPERDKPGAESHRKNRSIVTNMDKLHLNLTELALTMNHVYSFSVFEHTIFPSEYLSSHLEARLNRAIVWLAGYNATTQEIVRPSELLAGVKAYIGFIQSLAQFLGADASRVIRNALLQQTQPLDSCGEQTITTLYTNWYLESLLRQASSGTIILSPAMQAFVSLPREGEQNFSAEEFSDISEMRALAELLGPYGMKFLSENLMWHVTSQIVELKKLVVENMDILVQIRSNFSKPDLMASLLPQLTGAENVLKRMTIIGVILSFRAMAQEGLREVFSSHCPFLMGPIECLKEFVTPDTDIKVTLSIFELASAAGVGCDIDPALVAAIANLKADTSSPEEEYKVACLLLIFLAVSLPLLATDPSSFYSIEKDGYNNNIHCLTKAIIQVSAALFTLYNKNIETHLKEFLVVASVSLLQLGQETDKLKTRNRESISLLMRLVVEESSFLTLDMLESCFPYVLLRNAYREVSRAFHLN

SEQ ID NO: 35322 - protein, 459 aa, Homo sapiens
LSGAPLSVAIMSLTSAYQHKLAEKLTILNDRGQGVLIRMYNIKKTCSDPKSKPPFLLEKSMEPSLKYINKKFPNIDVRNSTQHLGPVHREKAEIIRFLTNYYQSFVDVMEFRDHVYELLNTIDACQCHFDINLNFDFTRSYLDLIVTYTSVILLLSRIEDRRILIGMYNCAHEMLHGHGDPSFARLGQMVLEYDHPLKKLTEEFGPHTKAVSGALLSLHFLFVRRNQGAEQWRSAQLLSLISNPPAMINPANSDTMACEYLSVEVMERWIIIGFLLCHGCLNSNSQCQKLWKLCLQGSLYITLIREDVLQVHKVTEDLFSSLKGYGKRVADIKESKEHVIANSGQFHCQRRQFLRMAVKELETVLADEPGLLGPKALFAFMALSFIRDEVTWLVRHTENVTKTKTPEDYADSSIAELLFLLEGIRSLVRRHIKVIQQYHLQYLARFDALVLSDIIQFLS

SEQ ID NO: 35323 - protein, 1183 aa, Homo sapiens
LAGRTSGRRLKDQRDFGDQRRAWGDLGLGACEISLAFAGSSRRDRPMAGARSRDPWGASGICYLFGSLLVELLFSRAVAFNLDVMGALRKEGEPGSLFGFSVALHRQLQPRPQSWLLVGAPQALALPGQQANRTGGLFACPLSLEETDCYRVDIDQGADMQKESKENQWLGVSVRSQGPGGKIVTCAHRYEARQRVDQILETRDMIGRCFVLSQDLAIRDELDGGEWKFCEGRPQGHEQFGFCQQGTAAAFSPDSHYLLFGAPGTYNWKGLLFVTNIDSSDPDQLVYKTLDPADRLPGPAGDLALNSYLGFSIDSGKGLVRAEELSFVAGAPRANHKGAVVILRKDSASRLVPEVMLSGERLTSGFGYSLAVADLNSDGWPDLIVGAPYFFERQEELGGAVYVYLNQGGHWAGISPLRLCGSPDSMFGISLAVLGDLNQDGFPDIAVGAPFDGDGKVFIYHGSSLGVVAKPSQVLEGEAVGIKSFGYSLSGSLDMDGNQYPDLLVGSLADTAVLFRARPILHVSHEVSIAPRSIDLEQPNCAGGHSVCVDLRVCFSYIAVPSSYSPTVALDYVLDADTDRRLRGQVPRVTFLSRNLEEPKHQASGTVWLKHQHDRVCGDAMFQLQENVKDKLRAIVVTLSYSLQTPRLRRQAPGQGLPPVAPILNAHQPSTQRAEIHFLKQGCGEDKICQSNLQLVRARFCTRVSDTEFQPLPMDVDGTTALFALSGQPVIGLELMVTNLPSDPAQPQADGDDAHEAQLLVMLPDSLHYSGVRALDPAEKPLCLSNENASHVECELGNPMKRGAQVTFYLILSTSGISIETTELEVELLLATISEQELHPVSARARVFIELPLSIAGMAIPQQLFFSGVVRGERAMQSERDVGSKVKYEVTVSNQGQSLRTLGSAFLNIMWPHEIANGKWLLYPMQVELEGGQGPGQKGLCSPRPNILHLDVDSRDRRRRELEPPEQQEPGERQEPSMSWWPVSSAEKKKNITLDCARGTANCVVFSCPLYSFDRAAVLHVWGRLWNSTFLEEYSAVKSLEVIVRANITVKSSIKNLMLRDASTVIPVMVYLDPMAVVAEGVPWWVILLAVLAGLLVLALLVLLLWKMGFFKRAKHPEATVPQYHAVKIPREDRQQFKEEKTGTILRNNWGSPRREGPDAHPILAADGHPELGPDGHPGPGTA

SEQ ID NO: 35324 - protein, 1177 aa, Homo sapiens
LAGRTSGRRLKDQRDFGDQRRAWGDLGLGACEISLAFAGSSRRDRPMAGARSRDPWGASGICYLFGSLLVELLFSRAVAFNLDVMGALRKEGEPGSLFGFSVALHRQLQPRPQSWLLVGAPQALALPGQQANRTGGLFACPLSLEETDCYRVDIDQGADMQKESKENQWLGVSVRSQGPGGKIVTCAHRYEARQRVDQILETRDMIGRCFVLSQDLAIRDELDGGEWKFCEGRPQGHEQFGFCQQGTAAAFSPDSHYLLFGAPGTYNWKGLLFVTNIDSSDPDQLVYKTLDPADRLPGPAGDLALNSYLGFSIDSGKGLVRAEELSFVAGAPRANHKGAVVILRKDSASRLVPEVMLSGERLTSGFGYSLAVADLNSDGWPDLIVGAPYFFERQEELGGAVYVYLNQGGHWAGISPLRLCGSPDSMFGISLAVLGDLNQDGFPDIAVGAPFDGDGKVFIYHGSSLGVVAKPSQVLEGEAVGIKSFGYSLSGSLDMDGNQYPDLLVGSLADTAVLFRARPILHVSHEVSIAPRSIDLEQPNCAGGHSVCVDLRVCFSYIAVPSSYSPTVDADTDRRLRGQVPRVTFLSRNLEEPKHQASGTVWLKHQHDRVCGDAMFQLQENVKDKLRAIVVTLSYSLQTPRLRRQAPGQGLPPVAPILNAHQPSTQRAEIHFLKQGCGEDKICQSNLQLVRARFCTRVSDTEFQPLPMDVDGTTALFALSGQPVIGLELMVTNLPSDPAQPQADGDDAHEAQLLVMLPDSLHYSGVRALDPAEKPLCLSNENASHVECELGNPMKRGAQVTFYLILSTSGISIETTELEVELLLATISEQELHPVSARARVFIELPLSIAGMAIPQQLFFSGVVRGERAMQSERDVGSKVKYEVTVSNQGQSLRTLGSAFLNIMWPHEIANGKWLLYPMQVELEGGQGPGQKGLCSPRPNILHLDVDSRDRRRRELEPPEQQEPGERQEPSMSWWPVSSAEKKKNITLDCARGTANCVVFSCPLYSFDRAAVLHVWGRLWNSTFLEEYSAVKSLEVIVRANITVKSSIKNLMLRDASTVIPVMVYLDPMAVVAEGVPWWVILLAVLAGLLVLALLVLLLWKMGFFKRAKHPEATVPQYHAVKIPREDRQQFKEEKTGTILRNNWGSPRREGPDAHPILAADGHPELGPDGHPGPGTA

SEQ ID NO: 35325 - protein, 190 aa, Homo sapiens
MWLPLLLGALLWAVLWLLRDRQSLPASNAFVFITGCDSGFGRLLALQLDQRGFRVLASCLTPSGAEDLQRVASSRLHTTLLDITDPQSVQQAAKWVEMHVKEAGLFGLVNNAGVAGIIGPTPWLTRDDFQRVLNVNTMGPIGVTLALLPLLQQARGRVINITSVLGRLAANGGGYCVSKFGLEAFSDSLR

SEQ ID NO: 35326 - protein, 157 aa, Homo sapiens
LLLQFAIFLSLIMLVEVAAAIAGYVFRDKVMSEFNNNFRQQMENYPKNNHTASILDRMQADFKCCGAANYTDWEKIPSMSKNRVPDSCCINVTVGCGINFNEKAIHKEGCVEKIGGWLRKNVLVVAAAALGIAFVEVLGIVFACCLVKSIRSGYEVM

SEQ ID NO: 35327 - protein, 159 aa, Homo sapiens
LVRAQEVAIFLSLIMLVEVAAAIAGYVFRDKVMSEFNNNFRQQMENYPKNNHTASILDRMQADFKCCGAANYTDWEKIPSMSKNRVPDSCCINVTVGCGINFNEKAIHKEGCVEKIGGWLRKNVLVVAAAALGIAFVEVLGIVFACCLVKSIRSGYEVM

SEQ ID NO: 35328 - protein, 230 aa, Homo sapiens
MCEVLALRPPAGLLRLCSGTDCRGCRGTACPESDHNPGGYPWLSVASGHHRSGCLPLPGGFCGLLRGLQGELLSYDHVAIFLSLIMLVEVAAAIAGYVFRDKVMSEFNNNFRQQMENYPKNNHTASILDRMQADFKCCGAANYTDWEKIPSMSKNRVPDSCCINVTVGCGINFNEKAIHKEGCVEKIGGWLRKNVLVVAAAALGIAFVEVLGIVFACCLVKSIRSGYEVM

SEQ ID NO: 35329 - protein, 262 aa, Homo sapiens
LNQSDPGCAPPRSPTPSWHGGPAAMAVEGGMKCVKFLLYVLLLAFCACAVGLIAVGVGAQLVLSQTIIQGATPGSLLPVVIIAVGVFLFLVAFVGCCGACKENYCLMITFAIFLSLIMLVEVAAAIAGYVFRDKVMSEFNNNFRQQMENYPKNNHTASILDRMQADFKCCGAANYTDWEKIPSMSKNRVPDSCCINVTVGCGINFNEKAIHKEGCVEKIGGWLRKNVLVVAAAALGIAFVEVLGIVFACCLVKSIRSGYEVM

SEQ ID NO: 35330 - protein, 215 aa, Homo sapiens
VRGNKMATETVELHKLKLAELKQECLARGLETKGIKQDLIHRLQAYLEEHAEEEANEEDVLGDETEEEETKPIELPVKEEEPPEKTVDVAAEKKVVKITSEIPQTERMQKRAERFNVPVSLESKKAARAARFGISSVPTKGLSSDNKPMVNLDKLKERAQRFGLNVSSISRKSEDDEKLKKRKERFGIVTSSAGTGTTEDTEAKKRKRAERFGIA

SEQ ID NO: 35331 - protein, 167 aa, Homo sapiens
VRGNKMATETVELHKLKLAELKQECLARGLETKGIKQDLIHRLQAYLEEHAEEEANEEDVLGDETEEEETKPIELPVKEEEPPEKTVDVAAEKKVVKITSEIPQTERMQKRAERFNVPVSLESKKAARAARFGISSVPTKGKSTEILLRKLPFYSFFSGITGFISPK

SEQ ID NO: 35332 - protein, 72 aa, Homo sapiens
VTFLSGQLSGALVSFLLCHKVRVLETQLSLEMRVGIAVVIMTPLRRGHHLGLTGDLASLGGPWSPGPVEARA

SEQ ID NO: 35333 - protein, 42 aa, Homo sapiens
MFTSACLTVGLFLVSQMHKGRHIPPLGSKATMGGRENMGACE

SEQ ID NO: 35334 - protein, 519 aa, Homo sapiens
LGVRAPLPSTAPPRLPEISGQRHGQPLELSSGGTMNCQQLWLGFLLPMTVSGRVLGLAEVAPVDYLSQYGYLQKPLEGSNNFKPEDITEALRAFQEASELPVSGQLDDATRARMRQPRCGLEDPFNQKTLKYLLLARAALRQAFQDWSNVAPLTFQEVQAGAADIRLSFHGRQSSYCSNTFDGPGRVLAHADIPELGSVHFDEDEFWTEGTYRGVNLRIIAAHEVGHALGLGHSRYSQALMAPVYEGYRPHFKLHPDDVAGIQALYGKKSPVIRDEEEEETELPTVPPVPTEPSPMPDPCSSELDAMMLGPRGKTYAFKGDYVWTVSDSGPGPLFRVSALWEGLPGNLDAAVYSPRTQWIHFFKGDKVWRYINFKMSPGFPKKLNRVEPNLDAALYWPLNQKVFLFKGSGYWQWDELARTDFSSYPKPIKGLFTGVPNQPSAAMSWQDGRVYFFKGKVYWRLNQQLRVEKGYPRNISHNWMHCRPRTIDTTPSGGNTTPSGTGITLDTTLSATETTFEY

SEQ ID NO: 35335 - protein, 339 aa, Homo sapiens
LGVRAPLPSTAPPRLPEISGQRHGQPLELSSGGTMNCQQLWLGFLLPMTVSGRVLGLAEVAPVDYLSQYGYLQKPLEGSNNFKPEDITEALRAFQEASELPVSGQLDDATRARMRQPRCGLEDPFNQKTLKYLLLGRWRKKHLTFRILNLPSTLPPHTARAALRQAFQDWSNVAPLTFQEVQAGAADIRLSFHGRQSSYCSNTFDGPGKKSPVIRDEEEEETELPTVPPVPTEPSPMPDPCSSELDAMMLGEAPPLQAVGRRWGQPADPEAWTNGSDMGLQHEQWRAPWEDLCFQGGLCVDCIRFRTGPLVPSVCPLGGAPRKPGCCCLLASNTMDSLL

SEQ ID NO: 35336 - protein, 26 aa, Homo sapiens
LFVIFLTRMYTLRRQEPCLLYSLLYS

SEQ ID NO: 35337 - protein, 302 aa, Homo sapiens
LRPRALSSKVETPRAPQRPTLPHRKRTGAYPLKRSKQRKYYYEAAFLAILEKNRQMAKERGLISPSDFAQLQKYMEYSTKKVSDVLKLFEDGEMAKYVQGDAIGYEGFQQFLKIYLEVDNVPRHLSLALFQSFETGHCLNETNVTKDVVCLNDVSCYFSLLEGGRPEDKLEFTFKLYDTDRNGILDSSEVDKIILQMMRVAEYLDWDVSELRPILQEMMKEIDYDGSGSVSQAEWVRAGATTVPLLVLLGLEMTLKDDGQHMWRPKRFPRPVYCNLCESSIGLGKQGLSCNRPITCVGARRL

SEQ ID NO: 35338 - protein, 790 aa, Homo sapiens
LRPRALSSKVETPRAPQRPTLPHRKRTGAYPLKRSKQRKYYYEAAFLAILEKNRQMAKERGLISPSDFAQLQKYMEYSTKKVSDVLKLFEDGEMAKYVQGDAIGYEGFQQFLKIYLEVDNVPRHLSLALFQSFETGHCLNETNVTKDVVCLNDVSCYFSLLEGGRPEDKLEFTFKLYDTDRNGILDSSEVDKIILQMMRVAEYLDWDVSELRPILQEMMKEIDYDGSGSVSQAEWVRAGATTVPLLVLLGLEMTLKDDGQHMWRPKRFPRPVYCNLCESSIGLGKQGLSCNLCKYTVHDQCAMKALPCEVSTYAKSRKDIGVQSHVWVRGGCESGRCDRCQKKIRIYHSLTGLHCVWCHLEIHDDCLQAVGHECDCGLLRDHILPPSSIYPSVLASGPDRKNSKTSQKTMDDLNLSTSEALRIDPVPNTHPLLVFVNPKSGGKQGQRVLWKFQYILNPRQVFNLLKDGPEIGLRLFKDVPDSRILVCGGDGTVGWILETIDKANLPVLPPVAVLPLGTGNDLARCLRWGGGYEGQNLAKILKDLEMSKVVHMDRWSVEVIPQQTEEKSDPVPFQIINNYFSIGVDASIAHRFHIMREKYPEKFNSRMKNKLWYFEFATSESIFSTCKKLEESLTVEICGKPLDLSNLSLEGIAVLNIPSMHGGSNLWGDTRRPHGDIYGINQALGATAKVITDPDILKTCVPDLSDKRLEVVGLEGAIEMGQIYTKLKNAGRRLAKCSEITFHTTKTLPMQIDGEPWMQTPCTIKITHKNQMPMLMGPPPRSTNFFGFLS

SEQ ID NO: 35339 - protein, 330 aa, Homo sapiens
VGPENEPISCVLPDYLYLIPFTIVTPVPMSCAFPCRRPRMSLGYGLCIVSPDTFTEGRVHACFPFLFVSLSVPSQALGFSPKSSLPVSLFPPYSGMNSLGISHKLTLAPLKHPTVTFKLYDTDRNGILDSSVSWGPCMLGKGICVNLSAPSCPNSSRVLRNRRGWGERLSPLGLNLKVSPKLLTPQRECWIHELGLPYKHTNTFIYLADIPENERCESGVEPRNTDFWKRVWMVVVKGIWLWLLPFLLQEVDKIILQMMRVAEYLDWDVSELRPVRQLFLHVPSCTFFPGESCICLTSSLTGNLVPLARMAGLDILRGSGEVLGLKTHSY

SEQ ID NO: 35340 - protein, 315 aa, Homo sapiens
MSLGYGLCIVSPDTFTEGRVHACFPFLFVSLSVPSQALGFSPKSSLPVSLFPPYSGMNSLGISHKLTLAPLKHPTVTFKLYDTDRNGILDSSVSWGPCMLGKGICVNLSAPSCPNSSRVLRNRRGWGERLSPLGLNLKVSPKLLTPQRECWIHELGLPYKHTNTFIYLADIPENERCESGVEPRNTDFWKRVWMVVVKGIWLWLLPFLLQEVDKIILQMMRVAEYLDWDVSELRPILQEMMKEIDYDGSGSVSQAEWVRAGATTVPLLVLLGLEMTLKDDGQHMWRPKRFPRPVYCNLCESSIGLGKQGLSCNRE

SEQ ID NO: 35341 - protein, 188 aa, Homo sapiens
MKNKLWYFEFATSESIFSTCKKLEESLTVEICGKPLDLSNLSLEGIAVLNIPSMHGGSNLWGDTRRPHGDIYGINQALGATAKVITDPDILKTCVPDLSDKRLEVVGLEGAIEMGQIYTKLKNAGRRLAKCSEITFHTTKTLPMQIDGEPWMQTPCTVSIDDPSQKLNPWAPWILNPHSTASLHPSDA

SEQ ID NO: 35342 - protein, 174 aa, Homo sapiens
VRICTLPNWDCAPSSQICGKPLDLSNLSLEGIAVLNIPSMHGGSNLWGDTRRPHGDIYGINQALGATAKVITDPDILKTCVPDLSDKRLEVVGLEGAIEMGQIYTKLKNAGRRLAKCSEITFHTTKTLPMQIDGEPWMQTPCTVSIDDPSQKLNPWAPWILNPHSTASLHPSDA

SEQ ID NO: 35343 - protein, 585 aa, Homo sapiens
VPLVAGGKNTMDLVLKRCLLHLAVIGALLAVGATKGSQVWGGQPVYPQETDDACIFPDGGPCPSGSWSQKRSFVYVWKTWGQYWQVLGGPVSGLSIGTGRAMLGTHTMEVTVYHRRGSRSYVPLAHSSSAFTITDQVPFSVSVSQLRALDGGNKHFLRNQPLTFALQLHDPSGYLAEADLSYTWDFGDSSGTLISRALVVTHTYLEPGPVTAQVVLQAAIPLTSCGSSPVPGTTDGHRPTAEAPNTTAGQVPTTEVVGTTPGQAPTAEPSGTTSVQVPTTEVISTAPVQMPTAESTGMTPEKVPVSEVMGTTLAEMSTPEATGMTPAEVSIVVLSGTTAAQVTTTEWVETTARELPIPEPEGPDASSIMSTESITGSLGPLLDGTATLRLVKRQVPLDCVLYRYGSFSVTLDIVQGIESAEILQAVPSGEGDAFELTVSCQGGLPKEACMEISSPGCQPPAQRLCQPVLPSPACQLVLHQILKGGSGTYCLNVSLADTNSLAVVSTQLIMPGQEAGLGQVPLIVGILLVLMAVVLASLIYRRRLMKQDFSVPQLPHSSSHWLRLPRIFCSCPIGENSPLLSGQQV

SEQ ID NO: 35344 - protein, 718 aa, Homo sapiens
LPLPHSIPRHCLCFGMQGSVSVFLRSSWFNSLSHDKLLCLGPIPVPPVPLVAGGKNTMDLVLKRCLLHLAVIGALLAVGATKVPRNQDWLGVSRQLRTKAWNRQLYPEWTEAQRLDCWRGGQVSLKVSNDGPTLIGANASFSIALNFPGSQKVLPDGQVIWVNNTIINGSQVWGGQPVYPQETDDACIFPDGGPCPSGSWSQKRSFVYVWKTWGQYWQVLGGPVSGLSIGTGRAMLGTHTMEVTVYHRRGSRSYVPLAHSSSAFTITDQVPFSVSVSQLRALDGGNKHFLRNQPLTFALQLHDPSGYLAEADLSYTWDFGDSSGTLISRALVVTHTYLEPGPVTAQVVLQAAIPLTSCGSSPVPGTTDGHRPTAEAPNTTAGQVPTTEVVGTTPGQAPTAEPSGTTSVQVPTTEVISTAPVQMPTAESTGMTPEKVPVSEVMGTTLAEMSTPEATGMTPAEVSIVVLSGTTAAQVTTTEWVETTARELPIPEPEGPDASSIMSTESITGSLGPLLDGTATLRLVKRQVPLDCVLYRYGSFSVTLDIVQGIESAEILQAVPSGEGDAFELTVSCQGGLPKEACMEISSPGCQPPAQRLCQPVLPSPACQLVLHQILKGGSGTYCLNVSLADTNSLAVVSTQLIMPGQEAGLGQVPLIVGILLVLMAVVLASLIYRRRLMKQDFSVPQLPHSSSHWLRLPRIFCSCPIGENSPLLSGQQV

SEQ ID NO: 35345 - protein, 202 aa, Homo sapiens
VPLVAGGKNTMDLVLKRCLLHLAVIGALLAVGATKVPRNQDWLGVSRQLRTKAWNRQLYPEWTEAQRLDCWRGGQVSLKVSNDGPTLIGANASFSIALNFPGSQKVLPDGQVIWVNNTIINGSQVWGGQPVYPQETDDACIFPDGGPCPSGSWSQKRSFVYVWKTWGEGLPSQPIIHTCVYFFLPDHLSFGRPFHLNFCDFL

SEQ ID NO: 35346 - protein, 122 aa, Homo sapiens
MDLVLKRCLLHLAVIGALLAVGATKVPRNQDWLGVSRQLRTKAWNRQLYPEWTEAQRLDCWRGGQVSLKVSNDGPTLIGANASFSIALNFPGSQKVLPDGQVIWVNNTIINGEYFSILGPYS

SEQ ID NO: 35347 - protein, 95 aa, Homo sapiens
LAKLTRARGILRSIPTRGHGTGPCFPLLGPREPGSAFCRVPRPPLQGRADPTRWRFMENFQKVEKIGEGTYGVVYKARNKLTGEVVALKKIRLDT

SEQ ID NO: 35348 - protein, 402 aa, Homo sapiens
LAKLTRARGILRSIPTRGHGTGPCFPLLGPREPGSAFCRVPRPPLQGRADPTRWRFMENFQKVEKIGEGTYGVVYKARNKLTGEVVALKKIRLDTETEGVPSTAIREISLLKELNHPNIVKLLDVIHTENKLYLVFEFLHQDLKKFMDASALTGIPLPLIKSYLFQLLQGLAFCHSHRVLHRDLKPQNLLINTEGAIKLADFGLARAFGVPVRTYTHEVVTLWYRAPEILLGCKYYSTAVDIWSLGCIFAEMHLVGTQHHARCCGEHRRNGRQSLCPLCSYLEVAASQGWGMTAVSTPYPVTRRALFPGDSEIDQLFRIFRTLGTPDEVVWPGVTSMPDYKPSFPKWARQDFSKVVPPLDEDGRSLLSQMLHYDPNKRISAKAALAHPFFQDVTKPVPHLRL

SEQ ID NO: 35349 - protein, 294 aa, Homo sapiens
LAKLTRARGILRSIPTRGHGTGPCFPLLGPREPGSAFCRVPRPPLQGRADPTRWRFMENFQKVEKIGEGTYGVVYKARNKLTGEVVALKKIRLDTLLDVIHTENKLYLVFEFLHQDLKKFMDASALTGIPLPLIKSYLFQLLQGLAFCHSHRVLHRDLKPQNLLINTEGAIKLADFGLARAFGVPVRTYTHEVTRRALFPGDSEIDQLFRIFRTLGTPDEVVWPGVTSMPDYKPSFPKWARQDFSKVVPPLDEDGRSLLSQMLHYDPNKRISAKAALAHPFFQDVTKPVPHLRL

SEQ ID NO: 35350 - protein, 320 aa, Homo sapiens
LAKLTRARGILRSIPTRGHGTGPCFPLLGPREPGSAFCRVPRPPLQGRADPTRWRFMENFQKVEKIGEGTYGVVYKARNKLTGEVVALKKIRLDTETEGVPSTAIREISLLKELNHPNIVKLLDVIHTENKLYLVFEFLHQDLKKFMDASALTGIPLPLIKSYLFQLLQGLAFCHSHRVLHRDLKPQNLLINTEGAIKLADFGLARAFGVPVRTYTHEVTRRALFPGDSEIDQLFRIFRTLGTPDEVVWPGVTSMPDYKPSFPKWARQDFSKVVPPLDEDGRSLLSQMLHYDPNKRISAKAALAHPFFQDVTKPVPHLRL

SEQ ID NO: 35351 - protein, 588 aa, Homo sapiens
LPRKLLADLLCVFLSPIPLGLPNIPSQGLPILIPESSFYRSATMLLLHRAVVLRLQQACRLKSIPSRICIQACSTNDSFQPQRPSLTFSGDNSSTQGWRVMGTLLGLGAVLAYQDHRCRAAQESTHIYTKEEVSSHTSPETGIWVTLGSEVFDVTEFVDLHPGGPSKLMLAAGGPLEPFWALYAVHNQSHVRELLAQYKIGELNPEDKVAPTVETSDPYADDPVRHPALKVNSQRPFNAEPPPELLTENYITPNPIFFTRNHLPVPNLDPDTYRLHVVGAPGGQSLSLSLDDLHNFPRYEITVTLQCAGNRRSEMTQVKEVKGLEWRTGAISTARWAGARLCDVLAQAGHQLCETEAHVCFEGLDSDPTGTAYGASIPLARAMDPEAEVLLAYEMNGQPLPRDHGFPVRVVVPGVVGARHVKWLGRVSVQPEESYSHWQRRDYKGFSPSVDWETVDFDSAPSIQELPVQSAITEPRDGETVESGEVTIKGYAWSGGGRAVIRVDVSLDGGLTWQVAKLDGEEQRPRKAWAWRLWQLKAPVPAGQKELNIVCKAVDDGYNVQPDTVAPIWNLRGVLSNAWHRVHVYVSP

SEQ ID NO: 35352 - protein, 15 aa, Homo sapiens
MLNVKEYLSKVSCRS

SEQ ID NO: 35353 - protein, 41 aa, Homo sapiens [sequence omitted]

SEQ ID NO: 35354 - protein, 186 aa, Homo sapiens [sequence omitted]

SEQ ID NO: 35355 - protein, 482 aa, Homo sapiens
LGIVVRRPSRAARVWRPRGLVVPACPAPQPARSQLLALACLPAPLLARAFARPLLEDRGDSDHSLWLGRETEAAAAQGKRGCSGGSRKMSGEDEQQEQTIAEDLVVTKYKMGGDIANRVLRSLVEASSSGVSVLSLCEKGDAMIMEETGKIFKKEKEMKKGIAFPTSISVNNCVCHFSPLKSDQDYILKEGDLVKIDLGVHVDGFIANVAHTFVVDVAQGTQVTGRKADVIKAAHLCAEAALRLVKPGNQNTQVTEAWNKVAHSFNCTPIEGMLSHQLKQHVIDGEKTIIQNPTDQQKKDHEKAEFEVHEVYAVDVLVSSGEGKAKDAGQRTTIYKRDPSKQYGLKMKTSRAFFSEVERRFDAMPFTLRAFEDEKKARMGVVECAKHELLQPFNVLYEKEGEFVAQFKFTVLLMPNGPMRITSGPFEPDLYKSEMEVQDAELKALLQSSASRKTQKKKKKKASKTAENATSGETLEENEAGD

SEQ ID NO: 35356 - protein, 332 aa, Homo sapiens
LPAPLLARAFARPLLEDRGDSDHSLWLGRETEAAAAQGKRGCSGGSRKMSGEDEQQEQTIAEDLVVTKYKMGGDIANRVLRSLVEASSSGVSVLSLCEKGDAMIMEETGKIFKKEKEMKKGIAFPTSISVNNCVCHFSPLKSDQDYILKEGDLVKIDLGVHVDGFIANVAHTFVVDVAQGTQVTGRKADVIKAAHLCAEAALRLVKPGNQNTQVTEAWNKVAHSFNCTPIEGMLSHQLKQHVIDGEKTIIQNPTDQQKKDHEKAEFEVHEVYAVDVLVSSGEGKAKDAGQRTTIYKRDPSKQYGLKMKTSRAFFSEVERRFDAMFLNTLKMT

SEQ ID NO: 35357 - protein, 16 aa, Homo sapiens
LKLWTWIGLLGVCRER

SEQ ID NO: 35358 - protein, 1115 aa, Homo sapiens
LGRADPPRGGTMERSPGEGPSPSPMDQPSAPSDPTDQPPAAHAKPDPGSGGQPAGPGAAGEALAVLTSFGRRLLVLIPVYLAGAVGLSVGFVLFGLALYLGWRRVRDEKERSLRAARQLLDDEEQLTAKTLYMSHRELPAWVSFPDVEKAEWLNKIVAQVWPFLGQYMEKLLAETVAPAVRGSNPHLQTFTFTRVELGEKPLRIIGVKVHPGQRKEQILLDLNISYVGDVQIDVEVKKYFCKAGVKGMQLHGVLRVILEPLIGDLPFVGAVSMFFIRRPTLDINWTGMTNLLDIPGLSSLSDTMIMDSIAAFLVLPNRLLVPLVPDLQDVAQLRSPLPRGIIRIHLLAARGLSSKDKYVKGLIEGKSDPYALVRLGTQTFCSRVIDEELNPQWGETYEVMVHEVPGQEIEVEVFDKDPDKDDFLGRMKLDVGKVLQASVLDDWFPLQGGQGQVHLRLEWLSLLSDAEKLEQVLQWNWGVSSRPDPPSAAILVVYLDRAQDLPLKKGNKEPNPMVQLSIQDVTQESKAVYSTNCPVWEEAFRFFLQDPQSQELDVQVKDDSRALTLGALTLPLARLLTAPELILDQWFQLSSSGPNSRLYMKLVMRILYLDSSEICFPTVPGCPGAWDVDSENPQRGSSVDAPPRPCHTTPDSQFGTEHVLRIHVLEAQDLIAKDRFLGGLVKGKSDPYVKLKLAGRSFRSHVVREDLNPRWNEVFEVIVTSVPGQELEVEVFDKDLDKDDFLGRCKVRLTTVLNSGFLDEWLTLEDVPSGRLHLRLERLTPRPTAAELEEVLQVNSLIQTQKSAELAAALLSIYMERAEDLPLRKGTKHLSPYATLTVGDSSHKTKTISQTSAPVWDESASFLIRKPHTESLELQVRGEGTGVLGSLSLPLSELLVADQLCLDRWFTLSSGQGQVLLRAQLGILVSQHSGVEAHSHSYSHSSSSLSEEPELSGGPPHITSSAPELRQRLTHVDSPLEAPAGPLGQVKLTLWYYSEERKLVSIVHGCRSLRQNGRDPPDPYVSLLLLPDKNRGTKRRTSQKKRTLSPEFNERFEWELPLDEAQRRKLDVSVKSNSSFMSRERELLGKVQLDLAETDLSQGVARWYDLMDNKDKGSS

SEQ ID NO: 35359 - protein, 1125 aa, Homo sapiens
LGRADPPRGGTMERSPGEGPSPSPMDQPSAPSDPTDQPPAAHAKPDPGSGGQPAGPGAAGEALAVLTSFGRRLLVLIPVYLAGAVGLSVGFVLFGLALYLGWRRVRDEKERSLRAARQLLDDEEQLTAKTLYMSHRELPAWVSFPDVEKAEWLNKIVAQVWPFLGQYMEKLLAETVAPAVRGSNPHLQTFTFTRVELGEKPLRIIGVKVHPGQRKEQILLDLNISYVGDVQIDVEVKKYFCKAGVKGMQLHGVLRVILEPLIGDLPFVGAVSMFFIRRPTLDINWTGMTNLLDIPGLSSLSDTMIMDSIAAFLVLPNRLLVPLVPDLQDVAQLRSPLPRGIIRIHLLAARGLSSKDKYVKGLIEGKSDPYALVRLGTQTFCSRVIDEELNPQWGETYEVMVHEVPGQEIEVEVFDKDPDKDDFLGRMKLDVGKVLQASVLDDWFPLQGGQGQVHLRLEWLSLLSDAEKLEQVLQWNWGVSSRPDPPSAAILVVYLDRAQDLPMVTSELYPPQLKKGNKEPNPMVQLSIQDVTQESKAVYSTNCPVWEEAFRFFLQDPQSQELDVQVKDDSRALTLGALTLPLARLLTAPELILDQWFQLSSSGPNSRLYMKLVMRILYLDSSEICFPTVPGCPGAWDVDSENPQRGSSVDAPPRPCHTTPDSQFGTEHVLRIHVLEAQDLIAKDRFLGGLVKGKSDPYVKLKLAGRSFRSHVVREDLNPRWNEVFEVIVTSVPGQELEVEVFDKDLDKDDFLGRCKVRLTTVLNSGFLDEWLTLEDVPSGRLHLRLERLTPRPTAAELEEVLQVNSLIQTQKSAELAAALLSIYMERAEDLPLRKGTKHLSPYATLTVGDSSHKTKTISQTSAPVWDESASFLIRKPHTESLELQVRGEGTGVLGSLSLPLSELLVADQLCLDRWFTLSSGQGQVLLRAQLGILVSQHSGVEAHSHSYSHSSSSLSEEPELSGGPPHITSSAPELRQRLTHVDSPLEAPAGPLGQVKLTLWYYSEERKLVSIVHGCRSLRQNGRDPPDPYVSLLLLPDKNRGTKRRTSQKKRTLSPEFNERFEWELPLDEAQRRKLDVSVKSNSSFMSRERELLGKVQLDLAETDLSQGVARWYDLMDNKDKGSS

SEQ ID NO: 35360 - protein, 242 aa, Homo sapiens
LGAALCPAPSPAPDTDPAGDGCPHPHTVLWPPDIMPPKKDVPVKKPAGPSISKPAAKPAAAGAPPAKTKAEPAVPQAPQKTQEPPVDLSKVVIEFNKDQLEEFKEAFELFDRVGDGKILYSQCGDVMRALGQNPTNAEVLKVLGNPKSDELKSRRVDFETFLPMLQAVAKNRGQGTYEDYLEGFRVFDKEGNGKVMGAELRHVLTTLGEKMTEEEVETVLAGHEDSNGCINYEAFLKHILSV

SEQ ID NO: 35361 - protein, 86 aa, Homo sapiens
LLPLTPPFKKTKAAGSPALPHHPHLSATGKHPILTLEVNYLILGSLWLPPLPLKETLFFSGQPLGIRGQREEDLGAGVLNHRRPGE

SEQ ID NO: 35362 - protein, 23 aa, Homo sapiens
MGAPIRTLSFGHRTSCLPRRMFP

SEQ ID NO: 35363 - protein, 33 aa, Homo sapiens
MCDFTEDQTAEFKEAFQLFDRTDSGQEQGPGHL

SEQ ID NO: 35364 - protein, 119 aa, Homo sapiens
MRVHAFLEQWGLINYQVDAESRPTPMGPPPTSHFHVLADTPSGLVPLQPKTPQQTSASQQMLNFPDKGKEKPTDMQNFGLRTDMYTKKNVPSKSKAAASATREWTEQETLLLLERSSPK

SEQ ID NO: 35365 - protein, 38 aa, Homo sapiens
VGSNKGQMCPDACIPRVPRAAGKSGDLGAFAPPLPSLG

SEQ ID NO: 35366 - protein, 185 aa, Homo sapiens
VVSGQRYELGAYSKEEPDPAGSSLACDSSSPRYSMQEMYEVVSNVQEYREFVPWCKKSLVVSSRKGHLKAQLEVGFPPVMERYTSAVSMVKPHMVKAVCTDGKLFNHLETIWRFSPGIPAYPRTCTVDFSISFEFRSLLHSQLATMFFDEVVKQNVAAFERRAATKFGPETAIPRELMFHEVHQT

SEQ ID NO: 35367 - protein, 547 aa, Homo sapiens
LGAAAGSSTLSFSRLLSTLSTRRRGLWCSGGGSCSCRSSLPFLPPHQIPEIARHGFTYCGRPALGNQGTQWQVLAEHLGDACLTWLLLLLLLGKRNASCLVLAARHASASSTNLKDILADLIPKEQARIKTFRQQHGKTVVGQITVDMMYGGMRGMKGLVYETSVLDPDEGIRFRGFSIPECQKLLPKAKGGEEPLPEGLFWLLVTGHIPTEEQVSWLSKEWAKRAALPSHVVTMLDNFPTNLHPMSQLSAAVTALNSESNFARAYAQGISRTKYWELIYEDSMDLIAKLPCVAAKIYRNLYREGSGIGAIDSNLDWSHNFTNMLGYTDHQFTELTRLYLTIHSDHEGGNVSAHTSHLVGSALSDPYLSFAAAMNGLAGPLHGLANQEVLVWLTQLQKEVGKDVSDEKLRDYIWNTLNSGRVVPGYGHAVLRKTDPRYTCQREFALKHLPNDPMFKLVAQLYKIVPNVLLEQGKAKNPWPNVDAHSGVLLQYYGMTEMNYYTVLFGVSRALGVLAQLIWSRALGFPLERPKSMSTEGLMKFVDSKSG

SEQ ID NO: 35368 - protein, 529 aa, Homo sapiens
VGGASLRTPGWAPPPVRLLFPSAASFQPCQPVGAASGAAAAAPVPAAALSLSYLPTRSRRSPAMALLTAAARLLGTKNASCLVLAARHASASSTNLKDILADLIPKEQARIKTFRQQHGKTVVGQITVDMMYGGMRGMKGLVYETSVLDPDEGIRFRGFSIPECQKLLPKAKGGEEPLPEGLFWLLVTGHIPTEEQVSWLSKEWAKRAALPSHVVTMLDNFPTNLHPMSQLSAAVTALNSESNFARAYAQGISRTKYWELIYEDSMDLIAKLPCVAAKIYRNLYREGSGIGAIDSNLDWSHNFTNMLGYTDHQFTELTRLYLTIHSDHEGGNVSAHTSHLVGSALSDPYLSFAAAMNGLAGPLHGLANQEVLVWLTQLQKEVGKDVSDEKLRDYIWNTLNSGRVVPGYGHAVLRKTDPRYTCQREFALKHLPNDPMFKLVAQLYKIVPNVLLEQGKAKNPWPNVDAHSGVLLQYYGMTEMNYYTVLFGVSRALGVLAQLIWSRALGFPLERPKSMSTEGLMKFVDSKSG

SEQ ID NO: 35369 - protein, 163 aa, Homo sapiens
LIISSLSSRACTSPSTAAMNGLAGPLHGLANQEVLVWLTQLQKEVGKDVSDEKLRDYIWNTLNSGRVVPGYGHAVLRKTDPRYTCQREFALKHLPNDPMFKLVAQLYKIVPNVLLEQGKAKNPWPNVDAHSGVLLQVSPPFPLFPLICTKPYCYLPCTKSINS

SEQ ID NO: 35370 - protein, 22 aa, Homo sapiens
MRQSQIFFLSLFSSFLLNQGPF

SEQ ID NO: 35371 - protein, 402 aa, Homo sapiens
LVPHPPYPQLPVLCPHSPPFPILKLSLAAWVPPSQWGPARAEEEHGVYVYDLMATVVHILDSRTGGSLVAHIKVGETYHQRKEGVTHQQWYLFNDFLIEPIDKHEAVQFDMNWKVPAILYYVKRNLNSRYNLNIKNPIEASVLLAEASLARKQRKTHTTFIPLMLNEMPQIGDLVGLDAEFVTLNEEEAELRSDGTKSTIKPSQMSVARITCVRGQGPNEGIPFIDDYISTQEQVVDYLTQYSGIKPGDLDAKISSKHLTTLKSTYLKLRFLIDIGVKFVGHGLQKDFRVINLMVPKDQVLDTVYLFHMPRKRMISLRFLAWYFLDLKIQGETHDSIEDARTALQLYRKYLELSKNGTEPESFHKVLKGLYEKGRKMDWKVPEPEGQTSPKNAAVFSSVLAL

SEQ ID NO: 35372 - protein, 49 aa, Homo sapiens
MPQTPHRPLILKTGSKFTVRTRLLVRLQEGNESLTVEVSIDRNPPQLQG

SEQ ID NO: 35373 - protein, 55 aa, Homo sapiens [sequence omitted]

SEQ ID NO: 35374 - protein, 448 aa, Homo sapiens
MLRLPTVFRQMRLVSRVLAPHLTGAYAKDVKFGADARALMLQGIDLLADAVALTMGPKGRRTVIIEQSWGSPKVTKDGVTVAKSIDLKDKYKNIGAKLVQDVANNTNEETGDGPTTATVLARSIAKEGIEKISKGANPVEIRRGVMLVVDAVIAELKKQSKPVTTPEEIAQVATISANGDKEIGNISDAMKKVGRKGVITVKDGKTLNDELEIIEGIKFDRGYISPYFINTSKGQKCEFQDAYVLLSEKKISSVQSVVPALEIANAHRKPLVIIAEDVDGEALSTLVLNRLKVGLQDVAIKAPGFGDNRKNQLKDMAIATGGAVFGEEGLTLNLEDVQPHDLGNVGEVIVTKDDATLLKEKGDKAQIEKRIQEIIEQLDVTTSEYEKEKLNERLAKLSDVVAVLKVGGTSDVEVNEKKDRVRMPLMLQELLLKKALYWEGVVPCFDAF

SEQ ID NO: 35375 - protein, 22 aa, Homo sapiens
LAVPHILLFLHPFLPSLLLLLK

SEQ ID NO: 35376 - protein, 24 aa, Homo sapiens
LLVPSSQFGRIQHQPLREVEAQGQ

SEQ ID NO: 35377 - protein, 83 aa, Homo sapiens
MPWKCKAGRPDWFWRWPSIWPFQVAEVFTGHMGKLVPLKETIKGFQQILAGEYDHLPEQAFYMVGPIEEAVAKADKLAEEHSS

SEQ ID NO: 35378 - protein, 222 aa, Homo sapiens
LGFLSVGTSSPPPNSSLLKTREVAKTQPLPWQRGGVTIEQVVPHVSTLERYGHFLCFMFYLRQPASAKWYDRRDYVFIEFCVEDSKDVNVNFEKSKLTFSCLGGSDNFKHLNEIDLFHCIDPNDSKHKRTDRSILCCLRKGESGQSWPRLTKERAKLNWLSVDFNNWKDWEDDSDEDMSNFDRFSEMMNNMGGDEDVDLPEVDGADDVSLKILFSVYFHTIK

SEQ ID NO: 35379 - protein, 38 aa, Homo sapiens
LISIKGLGMHYVIVLSLFVVLEKKNKMGSDGCLRKNGS

SEQ ID NO: 35380 - protein, 300 aa, Homo sapiens
LLLASAHTMLTPPLLLLLPLLSALVAAAIDAPKTCSPKQFACRDQITCISKGWRCDGERDCPDGSDEAPEICPQSKAQRCQPNEHNCLGTELCVPMSRLCNGVQDCMDGSDEGPHCRELQGNCSRLGCQHHCVPTLDGPTCYCNSSFQLQADGKTCKDFDECSVYGTCSQLCTNTDGSFICGCVEGYLLQPDNRSCKAKNEPVDRPPVLLIANSQNILATYLSGAQVSTITPTSTRQTTAMDFSYANETVCWVHVGDSAAQTQLKCARMPGLKGFVDEHTINISLSLHLCVFSKSQQEMG

SEQ ID NO: 35381 - protein, 304 aa, Homo sapiens
LLLASAHTMLTPPLLLLLPLLSALVAAAIDAPKTCSPKQFACRDQITCISKGWRCDGERDCPDGSDEAPEICPQSKAQRCQPNEHNCLGTELCVPMSRLCNGVQDCMDGSDEGPHCRELQGNCSRLGCQHHCVPTLDGPTCYCNSSFQLQADGKTCKDFDECSVYGTCSQLCTNTDGSFICGCVEGYLLQPDNRSCKAKNEPVDRPPVLLIANSQNILATYLSGAQVSTITPTSTRQTTAMDFSYANETVCWVHVGDSAAQTQLKCARMPGLKGFVDEHTINISLSLHRRSRKRAQENEVTQHG

SEQ ID NO: 35382 - protein, 447 aa, Homo sapiens
LLLASAHTMLTPPLLLLLPLLSALVAAAIDAPKTCSPKQFACRDQITCISKGWRCDGERDCPDGSDEAPEICPQSKAQRCQPNEHNCLGTELCVPMSRLCNGVQDCMDGSDEGPHCRELQGNCSRLGCQHHCVPTLDGPTCYCNSSFQLQADGKTCKDFDECSVYGTCSQLCTNTDGSFICGCVEGYLLQPDNRSCKAKNEPVDRPPVLLIANSQNILATYLSGAQVSTITPTSTRQTTAMDFSYANETVCWVHVGDSAAQTQLKCARMPGLKGFVDEHTINISLSLHHVEQMAIDWLTGNFYFVDDIDDRIFVCNRNGDTCVTLLDLELYNPKGIALDPAMGKVFFTDYGQIPKVERCDMDGQNRTKLVDSKIVFPHGITLDLVSRLVYWADAYLDYIEVVDYEGKGRQTIIQGILVRELLSEVLWGNHDPGPSGEGGSLCRGTVL

SEQ ID NO: 35383 - protein, 4552 aa, Homo sapiens
LLLASAHTMLTPPLLLLLPLLSALVAAAIDAPKTCSPKQFACRDQITCISKGWRCDGERDCPDGSDEAPEICPQSKAQRCQPNEHNCLGTELCVPMSRLCNGVQDCMDGSDEGPHCRELQGNCSRLGCQHHCVPTLDGPTCYCNSSFQLQADGKTCKDFDECSVYGTCSQLCTNTDGSFICGCVEGYLLQPDNRSCKAKNEPVDRPPVLLIANSQNILATYLSGAQVSTITPTSTRQTTAMDFSYANETVCWVHVGDSAAQTQLKCARMPGLKGFVDEHTINISLSLHHVEQMAIDWLTGNFYFVDDIDDRIFVCNRNGDTCVTLLDLELYNPKGIALDPAMGKVFFTDYGQIPKVERCDMDGQNRTKLVDSKIVFPHGITLDLVSRLVYWADAYLDYIEVVDYEGKGRQTIIQGILIEHLYGLTVFENYLYATNSDNANAQQKTSVIRVNRFNSTEYQVVTRVDKGGALHIYHQRRQPRVRSHACENDQYGKPGGCSDICLLANSHKARTCRCRSGFSLGSDGKSCKKPEHELFLVYGKGRPGIIRGMDMGAKVPDEHMIPIENLMNPRALDFHAETGFIYFADTTSYLIGRQKIDGTERETILKDGIHNVEGVAVDWMGDNLYWTDDGPKKTISVARLEKAAQTRKTLIEGKMTHPRAIVVDPLNGWMYWTDWEEDPKDSRRGRLERAWMDGSHRDIFVTSKTVLWPNGLSLDIPAGRLYWVDAFYDRIETILLNGTDRKIVYEGPELNHAFGLCHHGNYLFWTEYRSGSVYRLERGVGGAPPTVTLLRSERPPIFEIRMYDAQQQQVGTNKCRVNNGGCSSLCLATPGSRQCACAEDQVLDADGVTCLANPSYVPPPQCQPGEFACANSRCIQERWKCDGDNDCLDNSDEAPALCHQHTCPSDRFKCENNRCIPNRWLCDGDNDCGNSEDESNATCSARTCPPNQFSCASGRCIPISWTCDLDDDCGDRSDESASCAYPTCFPLTQFTCNNGRCININWRCDNDNDCGDNSDEAGCSHSCSSTQFKCNSGRCIPEHWTCDGDNDCGDYSDETHANCTNQATRPPGGCHTDEFQCRLDGLCIPLRWRCDGDTDCMDSSDEKSCEGVTHVCDPSVKFGCKDSARCISKAWVCDGDNDCEDNSDEENCESLACRPPSHPCANNTSVCLPPDKLCDGNDDCGDGSDEGELCDQCSLNNGGCSHNCSVAPGEGIVCSCPLGMELGPDNHTCQIQSYCAKHLKCSQKCDQNKFSVKCSCYEGWVLEPDGESCRSLDPFKPFIIFSNRHEIRRIDLHKGDYSVLVPGLRNTIALDFHLSQSALYWTDVVEDKIYRGKLLDNGALTSFEVVIQYGLATPEGLAVDWIAGNIYWVESNLDQIEVAKLDGTLRTTLLAGDIEHPRAIALDPRDGILFWTDWDASLPRIEAASMSGAGRRTVHRETGSGGWPNGLTVDYLEKRILWIDARSDAIYSARYDGSGHMEVLRGHEFLSHPFAVTLYGGEVYWTDWRTNTLAKANKWTGHNVTVVQRTNTQPFDLQVYHPSRQPMAPNPCEANGGQGPCSHLCLINYNRTVSCACPHLMKLHKDNTTCYEFKKFLLYARQMEIRGVDLDAPYYNYIISFTVPDIDNVTVLDYDAREQRVYWSDVRTQAIKRAFINGTGVETVVSADLPNAHGLAVDWVSRNLFWTSYDTNKKQINVARLDGSFKNAVVQGLEQPHGLVVHPLRGKLYWTDGDNISMANMDGSNRTLLFSGQKGPVGLAIDFPESKLYWISSGNHTINRCNLDGSGLEVIDAMRSQLGKATALAIMGDKLWWADQVSEKMGTCSKADGSGSVVLRNSTTLVMHMKVYDESIQLDHKGTNPCSVNNGDCSQLCLPTSETTRSCMCTAGYSLRSGQQACEGVGSFLLYSVHEGIRGIPLDPNDKSDALVPVSGTSLAVGIDFHAENDTIYWVDMGLSTISRAKRDQTWREDVVTNGIGRVEGIAVDWIAGNIYWTDQGFDVIEVARLNGSFRYVVISQGLDKPRAITVHPEKGYLFWTEWGQYPRIERSRLDGTERVVLVNVSISWPNGISVDYQDGKLYWCDARTDKIERIDLETGENREVVLSSNNMDMFSVSVFEDFIYWSDRTHANGSIKRGSKDNATDSVPLRTGIGVQLKDIKVFNRDRQKGTNVCAVANGGCQQLCLYRGRGQRACACAHGMLAEDGASCREYAGYLLYSERTILKSIHLSDERNLNAPVQPFEDPEHMKNVIALAFDYRAGTSPGTPNRIFFSDIHFGNIQQINDDGSRRITIVENVGSVEGLAYHRGWDTLYWTSYTTSTITRHTVDQTRPGAFERETVITMSGDDHPRAFVLDECQNLMFWTNWNEQHPSIMRAALSGANVLTLIEKDIRTPNGLAIDHRAEKLYFSDATLDKIERCEYDGSHRYVILKSEPVHPFGLAVYGEHIFWTDWVRRAVQRANKHVGSNMKLLRVDIPQQPMGIIAVANDTNSCELSPCRINNGGCQDLCLLTHQGHVNCSCRGGRILQDDLTCRAVNSSCRAQDEFECANGECINFSLTCDGVPHCKDKSDEKPSYCNSRRCKKTFRQCSNGRCVSNMLWCNGADDCGDGSDEIPCNKTACGVGEFRCRDGTCIGNSSRCNQFVDCEDASDEMNCSATDCSSYFRLGVKGVLFQPCERTSLCYAPSWVCDGANDCGDYSDERDCPGVKRPRCPLNYFACPSGRCIPMSWTCDKEDDCEHGEDETHCNKFCSEAQFECQNHRCISKQWLCDGSDDCGDGSDEAAHCEGKTCGPSSFSCPGTHVCVPERWLCDGDKDCADGADESIAAGCLYNSTCDDREFMCQNRQCIPKHFVCDHDRDCADGSDESPECEYPTCGPSEFRCANGRCLSSRQWECDGENDCHDQSDEAPKNPHCTSQEHKCNASSQFLCSSGRCVAEALLCNGQDDCGDSSDERGCHINECLSRKLSGCSQDCEDLKIGFKCRCRPGFRLKDDGRTCADVDECSTTFPCSQRCINTHGSYKCLCVEGYAPRGGDPHSCKAVTDEEPFLIFANRYYLRKLNLDGSNYTLLKQGLNNAVALDFDYREQMIYWTDVTTQGSMIRRMHLNGSNVQVLHRTGLSNPDGLAVDWVGGNLYWCDKGRDTIEVSKLNGAYRTVLVSSGLREPRALVVDVQNGYLYWTDWGDHSLIGRIGMDGSSRSVIVDTKITWPNGLTLDYVTERIYWADAREDYIEFASLDGSNRHVVLSQDIPHIFALTLFEDYVYWTDWETKSINRAHKTTGTNKTLLISTLHRPMDLHVFHALRQPDVPNHPCKVNNGGCSNLCLLSPGGGHKCACPTNFYLGSDGRTCVSNCTASQFVCKNDKCIPFWWKCDTEDDCGDHSDEPPDCPEFKCRPGQFQCSTGICTNPAFICDGDNDCQDNSDEANCDIHVCLPSQFKCTNTNRCIPGIFRCNGQDNCGDGEDERDCPEVTCAPNQFQCSITKRCIPRVWVCDRDNDCVDGSDEPANCTQMTCGVDEFRCKDSGRCIPARWKCDGEDDCGDGSDEPKEECDERTCEPYQFRCKNNRCVPGRWQCDYDNDCGDNSDEESCTPRPCSESEFSCANGRCIAGRWKCDGDHDCADGSDEKDCTPRCDMDQFQCKSGHCIPLRWRCDADADCMDGSDEEACGTGVRTCPLDEFQCNNTLCKPLAWKCDGEDDCGDNSDENPEECARFVCPPNRPFRCKNDRVCLWIGRQCDGTDNCGDGTDEEDCEPPTAHTTHCKDKKEFLCRNQRCLSSSLRCNMFDDCGDGSDEEDCSIDPKLTSCATNASICGDEARCVRTEKAAYCACRSGFHTVPGQPGCQDINECLRFGTCSQLCNNTKGGHLCSCARNFMKTHNTCKAEGSEYQVLYIADDNEIRSLFPGHPHSAYEQAFQGDESVRIDAMDVHVKAGRVYWTNWHTGTISYRSLPPAAPPTTSNRHRRQIDRGVTHLNISGLKMPRGIAIDWVAGNVYWTDSGRDVIEVAQMKGENRKTLISGMIDEPHAIVVDPLRGTMYWSDWGNHPKIETAAMDGTLRETLVQDNIQWPTGLAVDYHNERLYWADAKLSVIGSIRLNGTDPIVAADSKRGLSHPFSIDVFEDYIYGVTYINNRVFKIHKFGHSPLVNLTGGLSHASDVVLYHQHKQPEVTNPCDRKKCEWLCLLSPSGPVCTCPNGKRLDNGTCVPVPSPTPPPDAPRPGTCNLQCFNGGSCFLNARRQPKCRCQPRYTGDKCELDQCWEHCRNGGTCAASPSGMPTCRCPTGFTGPKCTQQVCAGYCANNSTCTVNQGNQPQCRCLPGFLGDRCQYRQCSGYCENFGTCQMAADGSRQCRCTAYFEGSRCEVNKCSRCLEGACVVNKQSGDVTCNCTDGRVAPSCLTCVGHCSNGGSCTMNSKMMPECQCPPHMTGPRCEEHVFSQQQPGHIASILIPLLLLLLLVLVAGVVFWYKRRVQGAKGFQHQRMTNGAMNVEIGNPTYKMYEGGEPDDVGGLLDADFALDPDKPTNFTNPVYATLYMGGHGSRHSLASTDEKRELLGRGPEDEIGDPLA

SEQ ID NO: 35384 - protein, 453 aa, Homo sapiens
LEVGLGTQMFDLLPLQALSLRNWEPLLSMGLPWEEEAGENTQGLKPLPSSEPPTAHTTHCKDKKEFLCRNQRCLSSSLRCNMFDDCGDGSDEEDCSIDPKLTSCATNASICGDEARCVRTEKAAYCACRSGFHTVPGQPGCQDINECLRFGTCSQLCNNTKGGHLCSCARNFMKTHNTCKAEGSEYQVLYIADDNEIRSLFPGHPHSAYEQAFQGDESVRIDAMDVHVKAGRVYWTNWHTGTISYRSLPPAAPPTTSNRHRRQIDRGVTHLNISGLKMPRGIAIDWVAGNVYWTDSGRDVIEVAQMKGENRKTLISGMIDEPHAIVVDPLRGWARALGGGLWAGGRKPPGQGWGLHPHACPSLPGQPEDRVLFSPLGLLGHPCLALPMLPLPRAPSWACLGRDLTSAWPAVMHSHTLPWGTALPASVALNEHTVVLEEKPLNLLRSRLPPASL

SEQ ID NO: 35385 - protein, 323 aa, Homo sapiens
LPETRPACPAQPPEKMRLLPEWFLLLFGPWLLRKAVSAQIPESGRPQYLGLRPAAAGAGAPGQQLPEPRSSDGLGVGRAWSWAWPTNHTGALARAGAAGALPAQRTKRKPSIKAARAKKIFGWGDFYFRVHTLKFSLLVTGKIVDHVNGTFSVYFRHNSSSLGNLSVSIVPPSKRVEFGGVWLPGPVPHPLQSTLALEGVLPGLGPPLGMAAAAAGPGLGGSLGGALAGPLGGALGVPGAKESRAFNCHVEYEKTNRARKHRPCLYDPSQVCFTEHTQSQAAWLCAKPFKVICIFVSFLSFDYKLVQKVCPDYNFQSEHPYFG

SEQ ID NO: 35386 - protein, 20 aa, Homo sapiens
MLYFSLFWAARILWGSRGGG

SEQ ID NO: 35387 - protein, 213 aa, Homo sapiens [sequence omitted]

SEQ ID NO: 35388 - protein, 224 aa, Homo sapiens
LPLPPLTGVSVYGALQEDPLVPPLQRCGQLVRMAIRAQHSNAAQTQTGEANRGWTGQESLSDSDPEMWELLQREKDRQCRGLELIASENFCSRAALEALGSCLNNKYSEGYPGKRYYGGAEVVDEIELLCQRRALEAFDLDPAQWGVNVQPYSGSPANLAVYTALLQPHDRIMGLDLPDGGHLTHGYMSDVKRISATSIFFESMPYKLNGFSCLCVCPAQNWPH

SEQ ID NO: 35389 - protein, 236 aa, Homo sapiens
LVLSEWSFLQGVLPLSALALAGRDCGSPGEGAQYLLTLPPTTPELLQPSCAGGPGVLSEQQVLGGLSWQEVRAGGQCQGWCSQWGNPPVPSQCSLRSELPSPLLMVESPFSVPSLPLSHGRYYGGAEVVDEIELLCQRRALEAFDLDPAQWGVNVQPYSGSPANLAVYTALLQPHDRIMGLDLPDGGHLTHGYMSDVKRISATSIFFESMPYKLNVSALGCGEGLLALVVVLPWRS

SEQ ID NO: 35390 - protein, 54 aa, Homo sapiens
LGPRIPAAQSSPDPKPFRPRLQELEKNAYLLGGARDWGGGRGRGRANCRMLRIY

SEQ ID NO: 35391 - protein, 113 aa, Homo sapiens
VTGLAVNIAALLSVMLQPYMPTVSATIQAQLQLPPPACSILLTNFLCTLPAGHQIGTVSPLFQKLENDQIESLRQRFGGGQAKTSPKPAVVETVTTAKPQQIQALMDEVTKQV

SEQ ID NO: 35392 - protein, 27 aa, Homo sapiens
LDRWTWLKQLLWMHFAVWDELKVSEFC

SEQ ID NO: 35393 - protein, 11 aa, Homo sapiens
MEVTLMALLSV

SEQ ID NO: 35394 - protein, 521 aa, Homo sapiens
LGTLSLELGQGPPGPVSGLRRWLDHSKHCLSVETEADSGQAGPYENWMLEPALATGEELPELTLLTTLLEGPGDKTQPPEEETLSQAPESEEEQKKKALERSMYVLSELVETEKMYVDDLGQIVEGYMATMAAQGVPESLRGRDRIVFGNIQQIYEWHRDYFLQELQRCLKDPDWLAQLFIKHERRLHMYVVYCQNKPKSEHVVSEFGDSYFEELRQQLGHRLQLNDLLIKPVQRIMKYQLLLKDFLKYYNRAGMDTADLEQAVEVMCFVPKRCNDMMTLGRLRGFEGKLTAQGKLLGQDTFWVTEPEAGGLLSSRGRERRVFLFEQIIIFSEALGGGVRGGTQPGYVYKNSIKVSCLGLEGNLQGDPCRFALTSRGPEGGIQRYVLQAADPAISQAWIKHVAQILESQRDFLNALQSPIEYQRRESQTNSLGRPRGPGVGSPGRIQLGDQAQGSTHTPINGSLPSLLLSPKGEVARALLPLDKQALGDIPQAPHDSPPVSPTPKTPPCQARLAKLDEDEL

SEQ ID NO: 35395 - protein, 172 aa, Homo sapiens
LTPSGPLSQARLEATSLSLQVGGAVREISGFATTYRQLLSVEPGAPGLGNCLRQRRGFHHELVGFPGCVVTDGVVNFFLARTDKVREVGFDPRLSRVAHLEFFLDGLGSLRVGSCSDVVVDHASKLKLPWTSRDAGAETYARYRYPGSLDESQMAKHRLLFFKHRLQCMTSQ

SEQ ID NO: 35396 - protein, 449 aa, Homo sapiens
MWLGRRALCALVLLLACASLGLLYASTRDAPGLRLPLAPWAPPQSPRRPELPDLAPEPRYAHIPVRIKEQVVGLLAWNNCSCESSGGGLPLPFQKQVRAIDLTKAFDPAELRAASATREQEFQAFLSRSQSPADQLLIAPANSPLQYPLQGVEVQPLRSILVPGLSLQAASGQEVYQVNLTASLGTWDVAGEVTGVTLTGEGQADLTLVSPGLDQLNRQLQLVTYSSRSYQTNTADTVRFSTEGHEAAFTIRIRHPPNPRLYPPGSLPQGAQYNISALVTIATKTFLRYDRLRALITSIRRFYPTVTVVIADDSDKPERVSGPYVEHYLMPFGKGWFAGRNLAVSQVTTKYVLWVDDDFVFTARTRLERLVDVLERTPLDLVGQGLQDVGVEKGLEQAKATAGALRPGTASPRTKREPRSGAWELSGSCRGEAEEDGAGVPPKAPERRP

SEQ ID NO: 35397 - protein, 136 aa, Homo sapiens
MAAETLLSSLLGLLLLGLLLPASLTGGVGSLNLEELSEMRYGIEILPLPVMGGQSQSSDVVIVSSKYKQRYECRLPAGAIHFQREREEETPAYQGPGIPELLSPMRDAPCLLKVKGTGLDRMRAWKLAVHPRTGVH

SEQ ID NO: 35398 - protein, 142 aa, Homo sapiens
MAAETLLSSLLGLLLLGLLLPASLTGGVGSLNLEELSEMRYGIEILPLPVMGGQSQSSDVVIVSSKYKQRYECRLPAGAIHFQREREEETPAYQGPGIPELLSPMRDAPCLLKTKDWWTYEFCYGRHIQQYHMEGNSLLYFP

SEQ ID NO: 35399 - protein, 64 aa, Homo sapiens
LVKELLEREGLTAAGGPWRAAGPSAVGRASCRKWRGWDQWGRGPALRLPTILSSHCILLLSREN

SEQ ID NO: 35400 - protein, 19 aa, Homo sapiens
LNSHSILFLSSVAFPVIVP

SEQ ID NO: 35401 - protein, 35 aa, Homo sapiens
LILISLPLFLQILGVWLAMRFRNQKDPRANPSAFL

SEQ ID NO: 35402 - protein, 211 aa, Homo sapiens
MRTLSSTLQGRRRMAKAPQSPGPAPPPASSGRPLRRNPEQRSLRPCAASEAPAGTWHGAARPGSGRGGGILQVRTGRHRRGSARLALGLPGGSSATRHGDLHPRCGLGVCVHAVDHGDAPLAAPPCAWALGPPLPRLGPDVCICSEARGAARGRGSHEERRTAREGPGVWGAPDPLPVPGRVACPVHPGKCDRVAIGGSGHGVQHALLGSV

SEQ ID NO: 35403 - protein, 347 aa, Homo sapiens
MMLRRSAFFREHPEPDHDPDPQVRLQSVPSRPLGARVGRLPRLPRVPLSTPELGRHPRPLYAQLSGRTFLQGGAVEATRAAGAGRRALRAGVASQLWDSAHRVRGCPCTRRGAAATGGTPARALQLLALDGAPPLPPAGLRTAHCGRRRMAKAPQSPGPAPPPASSGRPLRRNPEQRSLRPCAASEAPAGTWHGAARPGSGRGGGILQVRTGRHRRGSARLALGLPGGSSATRHGDLHPRCGLGVCVHAVDHGDAPLAAPPCAWALGPPLPRLGPDVCICSEARGAARGRGSHEERRTAREGPGVWGAPDPLPVPGRVACPVHPGKCDRVAIGGSGHGVQHALLGSV

SEQ ID NO: 35404 - protein, 242 aa, Homo sapiens
MRTLSSTLQGRRRMAKAPQSPGPAPPPASSGRPLRRNPEQRSLRPCAASEAPAGTWHGAARPGSGRGGGILQVRTGRHRRGSARLALGLPGGSSATRHGDLHPRCGLGVCVHAVDHGDAPLAAPPCAWALGPPLPRLGPDVCICSEARGAARGRGSHEERRTAREGPGVWGAPDPLPVPGRVACPVHPGKCDRVAIGGSGHGEVLPPCCEPVPGLSLRRLRLHFSVAGDPLWPRRPAWLSTL

SEQ ID NO: 35405 - protein, 9 aa, Homo sapiens
LISVLLTVF

SEQ ID NO: 35406 - protein, 163 aa, Homo sapiens
VVCCVVGTSLVWVVIIYHTRRRNEDCSITNTDETNLPADIPSYLSSQGTLADRQDGYVSSESGSHHQFVTSSGAGFFLPQHDSSGTCHIDNSSEADVEAATDLFLCPFLGSTGPMYLKGNVYGSDPFETYHTGRWFSCLSTVLFLRETSRCANCNLLLLLPPY

SEQ ID NO: 35407 - protein, 77 aa, Homo sapiens [sequence omitted]

SEQ ID NO: 35408 - protein, 245 aa, Homo sapiens
LFVPLGNWLGPWRIMSGTSSPEAVKKLLENMQSDLRALSLECKKKFPPVKEAIVLCFRLHFTKDNITNNTAAATVRQVVTVVFERMVAEDERHRDIIEQPVLVQGNSNRRSVSTLKPCAKDAYMLFQDLCQLVNADAPYWLVGMTEMTRTFGLELLESVLNDFPQVFLQHQEFSFLLKERVCPLVIKLFSPNIKFRQGSSTSSSPAPVEKPYFPICMRLLRVVSVLIKQFYSLLVSANFLMYLCI

SEQ ID NO: 35409 - protein, 590 aa, Homo sapiens
LIAFMIIVFFSLPNIGDFSRAWDVLLDHIQSAALSKNNEVSLAALKSFQEILQIVSPVRDSDKPETPPVVNVPVPVLIGPISGMSRPFVRTDSIGEKLGRYSSSEPPIVTDELEDLNLWWAAWNTWYRIGSESTKPPITFDKLTFIPSQPFLTALIQIFPALYQHIKTGFNMDDLQKLGVILHSAISVPISSDASPFILPSYTEAVLTSLQEAVLTALDVLQKAICVGPENMQIMYPAIFDQLLAFVEFSCKPPQYGQLETKHIANAKYNQAEWVALNYVPFAERSLEVVVDLYQKTACHKAVVNEKVLQNIIKTLRVPLSLKYSCPSESTWKLAVSSLLRVLSIGLPVARQHASSGKFDSMWPELANTFEDFLFTKSIPPDNLSIQEFQRNENIDVEVVQLISNEILPYANFIPKEFVGQIMTMLNKGSIHSQSSSFTEAEIDIRLREEFSKMCFETLLQFSFSNKVTTPQEGYISRMALSVLLKRSQDVLHRYIEDERLSGKCPLPRQQVTEIIFVLKAVSTLIDSLKKTQPENVDGNTWAQVIALYPTLVECITCSSSEVCSALKEALVPFKDFMQPPASRVQNGES

SEQ ID NO: 35410 - protein, 53 aa, Homo sapiens
LLQNSLRMTRSNDCRANWRESNRKFLSAASSPNQHSSHCVYMEAHTQVSKARP

SEQ ID NO: 35411 - protein, 495 aa, Homo sapiens
VSGAGLYRALGGGALAGDCLETGWACLGRRRCRGFSFRPLHGGGCLTGSPSGMRLTRKRLCSFLIALYCLFSLYAAYHVFFGRRRQAPAGSPRGLRKGAAPARERRGREQSTLESEEWNPWEGDEKNEQQHRFKTSLQILDKSTKGKTDLSVQIWGKAAIGLYLWEHIFEGLLDPSDVTAQWREGKSIVGRTQYSFITGPAVIPGYFSVDVNNVVLILNGREKAKIFYATQWLLYAQNLVQIQKLQHLAVVLLGNEHCDNEWINPFLKRNGGFVELLFIIYDSPWINDVDVFQWPLGVATYRNFPVVEASWSMLHDERPYLCNFLGTIYENSSRQALMNILKKDGNDKLCWVSAREHWQPQETNESLKNYQDALLQSDLTLCPVGVNTECYRIYEACSYGSIPVVEDVMTAGNCGNTSVHHGAPLQLLKSMGAPFIFIKNWKELPAVLEKEKTIILQEKIERRKMLLQWYQHFKTELKMKFTNILESSFLMNNKS

SEQ ID NO: 35412 - protein, 7 aa, Homo sapiens
MESLGRR

SEQ ID NO: 35413 - protein, 1079 aa, Homo sapiens
LGRRPRPLACLLACLPACLPGATQEKVPGDAERLEARGPGQHRLWRCSCGRGGGLRRQGRGPLSQLSACRAAPLRWLTIWSAGWEAGWSDREDVYKFFCGIRGHAYYNQKTTSITARMDEQALLGLNPNADSDFRQRALAYFEQLKISPDAWQVCAEALAQRTYSDDHVKFFCFQVLEHQVKYKYSELTTVQQQLIRETLISWLQAQMLNPQPEKTFIRNKAAQVFALLFVTEYLTKWPKFFFDILSVVDLNPRGVDLYLRILMAIDSELVDRDVVHTSEEARRNTLIKDTMREQCIPNLVESWYQILQNYQFTNSEVTCQCLEVVGAYVSWIDLSLIANDRFINMLLGHMSIEVLREEACDCLFEVVNKGMDPVDKMKLVESLCQVLQSAGFFSIDQEEDVDFLARFSKLVNGMGQSLIVSWSKLIKNGDIKNAQEALQAIETKVALMLQLLIHEDDDISSNIIGFCYDYLHILKQLTVLSDQQKANVEAIMLAVMKKLTYDEEYNFENEGEDEAMFVEYRKQLKLLLDRLAQVSPELLLASVRRVFSSTLQNWQTTRFMEVEVAIRLLYMLAEALPVSHGAHFSGDVSKASALQDMMRTLVTSGVSSYQHTSVTLEFFETVVRYEKFFTVEPQHIPCVLMAFLDHRGLRHSSAKVRSRTAYLFSRFVKSLNKQMNPFIEDILNRIQDLLELSPPENGHQSLLSSDDQLFIYETAGVLIVNSEYPAERKQALMRNLLTPLMEKFKILLEKLMLAQDEERQASLADCLNHAVGFASRTSKAFSNKQTVKQCGCSEVYLDCLQTFLPALSCPLQKDILRSGVRTFLHRMIICLEEEVLPFIPSASEHMLKDCEAKDLQEFIPLINQITAKFKIQVSPFLQQMFMPLLHAIFEVLLRPAEENDQSAALEKQMLRRSYFAFLQTVTGSGMSEVIANQGAENVERVLVTVIQGAVEYPDPIAQKTCFIILSKLVELWGGKDGPVGFADFVYKHIVPACFLAPLKQTFDLADAQTVLALSECAVTLKTIHLKRGPECVQYLQQEYLPSLQVAPEIIQEFCQALQQPDAKVFKNYLKVFFQRAKP

SEQ ID NO: 35414 - protein, 611 aa, Homo sapiens
LVGLSPFSYLCVPPSRPVPGSPRSLSAMRLLPLAPGRLRRGSPRHLPSCSPALLLLVLGGCLGVFGVAAGTRRPNVVLLLTDDQDEVLGGMAFSEYSTTNCQTGLQGEELGQEHLRTYLEPSRTPLKKTKALIGEMGMTFSSAYVPSALCCPSRASILTGKYPHNHHVVNNTLEGNCSSKSWQKIQEPNTFPAILRSMCGYQTFFAGKYLNEYGAPDAGGLEHVPLGWSYWYALEKNSKYYNYTLSINGKARKHGENYSVDYLTDVLANVSLDFLDYKSNFEPFFMMIATPAPHSPWTAAPQYQKAFQNVFAPRNKNFNIHGTNKHWLIRQAKTPMTNSSIQFLDNAFRKRWQTLLSVDDLVEKLVKRLEFTGELNNTYIFYTSDNGYHTGQFSLPIDKRQLYEFDIKVPLLVRGPGIKPNQTSKMLVANIDLGPTILDIAGYDLNKTQMDGMSLLPILRGASNLTWRSDVLVEYQGEGRNVTDPTCPSLSPGVSQCFPDCVCEDAYNNTYACVRTMSALWNLQYCEFDDQEVFVEVYNLTADPDQITNIAKTIDPELLGKMNYRLMMLQSCSGPTCRTPGVFDPGYRFDPRLMFSNRGSVRTRRFSKHLL

SEQ ID NO: 35415 - protein, 583 aa, Homo sapiens
VIAPREKTSDSSHRPSRHGFLFLRLVGLSPFSYLCVPPSRPVPGSPRSLSAMRLLPLAPGRLRRGSPRHLPSCSPALLLLVLGGCLGVFGVAAGTRRPNVVLLLTDDQDEVLGGMYVPSALCCPSRASILTGKYPHNHHVVNNTLEGNCSSKSWQKIQEPNTFPAILRSMCGYQTFFAGKYLNEYGAPDAGGLEHVPLGWSYWYALEKNSKYYNYTLSINGKARKHGENYSVDYLTDVLANVSLDFLDYKSNFEPFFMMIATPAPHSPWTAAPQYQKAFQNVFAPRNKNFNIHGTNKHWLIRQAKTPMTNSSIQFLDNAFRKRWQTLLSVDDLVEKLVKRLEFTGELNNTYIFYTSDNGYHTGQFSLPIDKRQLYEFDIKVPLLVRGPGIKPNQTSKMLVANIDLGPTILDIAGYDLNKTQMDGMSLLPILRGASNLTWRSDVLVEYQGEGRNVTDPTCPSLSPGVSQCFPDCVCEDAYNNTYACVRTMSALWNLQYCEFDDQEVFVEVYNLTADPDQITNIAKTIDPELLGKMNYRLMMLQSCSGPTCRTPGVFDPGYRFDPRLMFSNRGSVRTRRFSKHLL

SEQ ID NO: 35416 - protein, 608 aa, Homo sapiens
LSLAHVIAPREKTSDSSHRPSRHGFLFLRLVGLSPFSYLCVPPSRPVPGSPRSLSAMRLLPLAPGRLRRGSPRHLPSCSPALLLLVLGGCLGVFGVAAGTRRPNVVLLLTDDQDEVLGGMTPLKKTKALIGEMGMTFSSAYVPSALCCPSRASILTGKYPHNHHVVNNTLEGNCSSKSWQKIQEPNTFPAILRSMCGYQTFFAGKYLNEYGAPDAGGLEHVPLGWSYWYALEKNSKYYNYTLSINGKARKHGENYSVDYLTDVLANVSLDFLDYKSNFEPFFMMIATPAPHSPWTAAPQYQKAFQNVFAPRNKNFNIHGTNKHWLIRQAKTPMTNSSIQFLDNAFRKRWQTLLSVDDLVEKLVKRLEFTGELNNTYIFYTSDNGYHTGQFSLPIDKRQLYEFDIKVPLLVRGPGIKPNQTSKMLVANIDLGPTILDIAGYDLNKTQMDGMSLLPILRGASNLTWRSDVLVEYQGEGRNVTDPTCPSLSPGVSQCFPDCVCEDAYNNTYACVRTMSALWNLQYCEFDDQEVFVEVYNLTADPDQITNIAKTIDPELLGKMNYRLMMLQSCSGPTCRTPGVFDPGYRFDPRLMFSNRGSVRTRRFSKHLL

SEQ ID NO: 35417 - protein, 43 aa, Homo sapiens
MFDPVMEIGDQWHLAIQEAILEKCSDNDGIVHIAVDKNSREVK

SEQ ID NO: 35418 - protein, 38 aa, Homo sapiens
LPGLSMSPRRTLPRPLSLCLSLCLCLCLAAALGSAQSE

SEQ ID NO: 35419 - protein, 165 aa, Homo sapiens
LPGLSMSPRRTLPRPLSLCLSLCLCLCLAAALGSAQSGSCRDKKNCKVVFSQQELRKRLTPLQYHVTQEKGTESAFEGEYTHHKDPGIYKCVVCGTPLFKSETKFDSGSGWPSFHDVINSEAITFTDDFSYGMHRVETSCSQVSSSFLKTQYIAFRTPGCAKYSN

SEQ ID NO: 35420 - protein, 197 aa, Homo sapiens
LPGLSMSPRRTLPRPLSLCLSLCLCLCLAAALGSAQSGSCRDKKNCKVVFSQQELRKRLTPLQYHVTQEKGTESAFEGEYTHHKDPGIYKCVVCGTPLFKSETKFDSGSGWPSFHDVINSEAITFTDDFSYGMHRVETSCSQCGAHLGHIFDDGPRPTGKRYCINSAALSFTPADSSGTAEGGSGVASPAQADKAEL

SEQ ID NO: 35421 - protein, 170 aa, Homo sapiens
LPGLSMSPRRTLPRPLSLCLSLCLCLCLAAALGSAQSGSCRDKKNCKVVFSQQELRKRLTPLQYHVTQEKGTESAFEGEYTHHKDPGIYKCVVCGTPLFKSETKFDSGSGWPSFHDVINSEAITFTDDFSYGMHRVETSCSQQEGPHQMLPLNLGFPGLQNCEPINFYSF

SEQ ID NO: 35422 - protein, 54 aa, Homo sapiens
LLGLYFILFSIESIGGPVQWLTPVIPALWEAKAGGSRGQEMETILANMVKPRLY

SEQ ID NO: 35423 - protein, 22 aa, Homo sapiens
LSAFWILAVLIGAMNVSCSYLG

SEQ ID NO: 35424 - protein, 42 aa, Homo sapiens [sequence omitted]

SEQ ID NO: 35425 - protein, 131 aa, Homo sapiens
LYVYKFLHFSYSSAKNPDGCFFQKVLNGFTKFFCKEQYCKLLKLYFYRLFALLWILCLSGFLKFFFYSEIMELVLAAAGALLFCGFIIYDTHSLMHKLSPEEYVLAAISLYLDIINLFLHLLRFLEAVNKK

SEQ ID NO: 35426 - protein, 34 aa, Homo sapiens
LDCGKCLLIVIFVFIHLASQFITRLGCCQGYKSC

SEQ ID NO: 35427 - protein, 40 aa, Homo sapiens
MPFAWNDLTSLLFYLAGCFSSCRLGQGLQEVFPGQVMKRA

SEQ ID NO: 35428 - protein, 69 aa, Homo sapiens
LPRIYRLVSKTFTMFLWFMLYPPQGDSPLRPSFSLHAPGPCTGVACPASVFHKLIWVLGVVGGERSESK

SEQ ID NO: 35429 - protein, 56 aa, Homo sapiens
VILNKSHKIWWVYQGFLLLLLPQFLLLPPCKKDLLPPTMILSPPQPRGTISGGFFK

SEQ ID NO: 35430 - protein, 146 aa, Homo sapiens
LYTLGQEKLKLEVELDNMQGLVEDFKNKYEDDIKKHTEMENEFVLIKKDMDEAYKNKVELESHLEGLTEEISFLRQLYEEEIRELQSQISDTSVVLSIDNSRSLDMNSIIAEVKAPYEEIANHNQAEAESMRSNMRSCRRWLGSMG

SEQ ID NO: 35431 - protein, 315 aa, Homo sapiens
VRTGVTLKVGVIKRTLYKSFRKRNLHLHIWFLDHLPHLEGEQLVRQDLDAGVSEHSGDWLDQDSVSDQFSVEFEVESLDSEDYSLSEEGQELSDEDDEVYQVTVYQAGESDTDSFEEDPEISLADYWKCTSCNEMNPPLPSHCNRCWALRENWLPEDKGKDKGEISEKAKLENSTQAEEGFDVPDCKKTIVNDSRESCVEENDDKITQASQSQESEDYSQPSTSSSIIYSSQEDVKEFEREETQDKEESVESSLPLNAIEPCVICQGRPKNGCIVHGKTGHLMACFTCAKKLKKRNKPCPVCRQPIQMIVLTYFP

SEQ ID NO: 35432 - protein, 237 aa, Homo sapiens
VRTGVTLKVGVIKRTLYKSFRKRNLHLHIWFLDHLPHLEGEQLVRQDYWKCTSCNEMNPPLPSHCNRCWALRENWLPEDKGKDKGEISEKAKLENSTQAEEGFDVPDCKKTIVNDSRESCVEENDDKITQASQSQESEDYSQPSTSSSIIYSSQEDVKEFEREETQDKEESVESSLPLNAIEPCVICQGRPKNGCIVHGKTGHLMACFTCAKKLKKRNKPCPVCRQPIQMIVLTYFP

SEQ ID NO: 35433 - protein, 27 aa, Homo sapiens
LTSSEVTRLGLPKCWDCRCEPPCPAKN

SEQ ID NO: 35434 - protein, 450 aa, Homo sapiens
VRAWDLNMDFPCLWLGLLLPLVAALDFNYHRQEGMEAFLKTVAQNYSSVTHLHSIGKSVKGRNLWVLVVGRFPKEHRIGIPEFKYVANMHGDETVGRELLLHLIDYLVTSDGKDPEITNLINSTRIHIMPSMNPDGFEAVKKPDCYYSIGRENYNQYDLNRNFPDAFEYNNVSRQPETVAVMKWLKTETFVLSANLHGGALVASYPFDNGVQATGALYSRSLTPDDDVFQYLAHTYASRNPNMKKGDECKNKMNFPNGVTNGYSWYPLQGGMQDYNYIWAQCFEITLELSCCKYPREEKLPSFWNNNKASLIEYIKQVHLGVKGQVFDQNGNPLPNVIVEVQDRKHICPYRTNKYGEYYLLLLPGSYIINVTVPGHDPHITKVIIPEKSQNFSALKKDILLPFQGQLDSIPVSNPSCPMIPLYRNLPDHSAATKPSLFLFLVSLLHIFFK

SEQ ID NO: 35435 - protein, 456 aa, Homo sapiens
LEWGSYDLQSNKNMDFPCLWLGLLLPLVAALDFNYHRQEGMEAFLKTVAQNYSSVTHLHSIGKSVKGRNLWVLVVGRFPKEHRIGIPEFKYVANMHGDETVGRELLLHLIDYLVTSDGKDPEITNLINSTRIHIMPSMNPDGFEAVKKPDCYYSIGRENYNQYDLNRNFPDAFEYNNVSRQPETVAVMKWLKTETFVLSANLHGGALVASYPFDNGVQATGALYSRSLTPDDDVFQYLAHTYASRNPNMKKGDECKNKMNFPNGVTNGYSWYPLQGGMQDYNYIWAQCFEITLELSCCKYPREEKLPSFWNNNKASLIEYIKQVHLGVKGQVFDQNGNPLPNVIVEVQDRKHICPYRTNKYGEYYLLLLPGSYIINVTVPGHDPHITKVIIPEKSQNFSALKKDILLPFQGQLDSIPVSNPSCPMIPLYRNLPDHSAATKPSLFLFLVSLLHIFFK

SEQ ID NO: 35436 - protein, 153 aa, Homo sapiens
VGRGARLGPEHGLPVPLARAVAAFGSCAGFQLPPPGRDGSVFEDCCPKLQFCHSLTQYWEICERNLWVLVVGRFPKEHRIGIPEFKYVANMHGDETVGRELLLHLIDYLVTSDGKDPEITNLINSTRIHIMPSMNPDGFEAVKKPDCYYSIGR

SEQ ID NO: 35437 - protein, 71 aa, Homo sapiens
VRAWDLNMDFPCLWLGLLLPLVAALDFNYHRQEGMEAFLKTVAQNYSSVTHLHSIGKSVKDCWAGAAAPSD

SEQ ID NO: 35438 - protein, 554 aa, Homo sapiens
LVPSTSCEGIHLCAELLGTMASLSLAPVNIFKAGADEERAETARLTSFIGAIAIGDLVKSTLGPKGMDKILLSSGRDASLMVTNDGATILKNIGVDNPAAKVLVDMSRVQDDEVGDGTTSVTVLAAELLREAESLIAKKIHPQTIIAGWREATKAAREALLSSAVDHGSDEVKFRQDLMNIAGTTLSSKLLTHHKDHFTKLAVEAVLRLKGSGNLEAIHIIKKLGGSLADSYLDEGFLLDKKIGVNQPKRIENAKILIANTGMDTDKIKIFGSRVRVDSTAKVAEIEHAEKEKMKEKVERILKHGINCFINRQLIYNYPEQLFGAAGVMAIEHADFAGVERLALVTGGEIASTFDHPELVKLGSCKLIEEVMIGEDKLIHFSGVALGEACTIVLRGATQQILDEAERSLHDALCVLAQTVKDSRTVYGGGCSEMLMAHAVTQLANRTPGKEAVAMESYAKALRMLPTIIADNAGYDSADLVAQLRAAHSEGNTTAGLDMREGTIGDMAILGITESFQVKRQVLLSAAEAAEVILRVDNIIKAAPRKRVPDHHPC

SEQ ID NO: 35439 - protein, 93 aa, Homo sapiens
MEELPTIIADNAGYDSADLVAQLRAAHSEGNTTAGLDMREGTIGDMAILGITESFQVKRQVLLSAAEAAEVILRVDNIIKAAPRKRVPDHHPC

SEQ ID NO: 35440 - protein, 24 aa, Homo sapiens
VGSSGYLMMRLLLWLMIPWKASMK

SEQ ID NO: 35441 - protein, 381 aa, Homo sapiens
VEVAACEELPVVMGLKKMKGLSYDEAFAMANDPLEGFHEVNLASPTSPDLLGVYESGTQEQTTSPSVIYRPHPSALSSVPIQANALDVSELPTQPVYSSPRRLNCAEISSISFHVTDPAPCSTSGVTAGLTKLTTRKDNYNAEREFLQGATITEACDGSDDIFGLSTDSLSRLRSPSVLEVREKGYERLKEELAKAQRELKLKDEECERLSKVRDQLGQELEELTASLFEEAHKMVREANIKQATAEKQLKEAQGKIDVLQAEVAALKTLVLSSSPTSPTQEPLPGGKTPFKKGHTRNKSTSSAMSGSHQDLSVIQPIVKDCKEADLSLYNEFRLWKDEPTMDRTCPFLDKIYQEDIFPCLTFSKIGFSCSGGCGKQYSKH

SEQ ID NO: 35442 - protein, 332 aa, Homo sapiens
VEVAACEELPVVMGLKKMKGLSYDEAFAMANDPLEGFHEVNLASPTSPDLLGVYESGTQEQTTSPSVIYRPHPSALSSVPIQANALDVSELPTQPVYSSPRRLNCAEISSISFHVTDPAPCSTSGVTAGLTKLTTRKDNYNAEREFLQGATITEACDGSDDIFGLSTDSLSRLRSPSVLEVREKGYERLKEELAKAQRELKLKDEECERLSKVRDQLGQELEELTASLFEEAHKMVREANIKQATAEKQLKEAQGKIDVLQAEVAALKTLVLSSSPTSPTQEPLPGGKTPFKKGHTRNKSTSSAMSGSHQDLSVIQPIVKDCKEKMCSHWPE

SEQ ID NO: 35443 - protein, 423 aa, Homo sapiens
VEVAACEELPVVMGLKKMKGLSYDEAFAMANDPLEGFHEVNLASPTSPDLLGVYESGTQEQTTSPSVIYRPHPSALSSVPIQANALDVSELPTQPVYSSPRRLNCAEISSISFHVTDPAPCSTSGVTAGLTKLTTRKDNYNAEREFLQGATITEACDGSDDIFGLSTDSLSRLRSPSVLEVREKGYERLKEELAKAQRELKLKDEECERLSKVRDQLGQELEELTASLFEEAHKMVREANIKQATAEKQLKEAQGKIDVLQAEVAALKTLVLSSSPTSPTQEPLPGGKTPFKKGHTRNKSTSSAMSGSHQDLSVIQPIVKDCKEADLSLYNEFRLWKDEPTMDRTCPFLDKIYQEDIFPCLTFSKSELASAVLEAVENNTLSIEPVGLQPIRFVKASAVECGGPKSLLYVTFLHTFDTFSRDS

SEQ ID NO: 35444 - protein, 488 aa, Homo sapiens
VEVAACEELPVVMGLKKMKGLSYDEAFAMANDPLEGFHEVNLASPTSPDLLGVYESGTQEQTTSPSVIYRPHPSALSSVPIQANALDVSELPTQPVYSSPRRLNCAEISSISFHVTDPAPCSTSGVTAGLTKLTTRKDNYNAEREFLQGATITEACDGSDDIFGLSTDSLSRLRSPSVLEVREKGYERLKEELAKAQRELKLKDEECERLSKVRDQLGQELEELTASLFEEAHKMVREANIKQATAEKQLKEAQGKIDVLQAEVAALKTLVLSSSPTSPTQEPLPGGKTPFKKGHTRNKSTSSAMSGSHQDLSVIQPIVKDCKEADLSLYNEFRLWKDEPTMDRTCPFLDKIYQEDIFPCLTFSKSELASAVLEAVENNTLSIEPVGLQPIRFVKASAVECGGPKKCALTGQSKSCKHRIKLGDSSNYYYISPFCRYRITSVCNFFTYIRYIQQGLVKQQDVDQMFWEVMQLRKEMSLAKLGYFKEEL

SEQ ID NO: 35445 - protein, 51 aa, Homo sapiens
MVAYWRQAGLSYIRYSQICAKVVRDALKTEFKANAKKTSGNSVKIVKVKKE

SEQ ID NO: 35446 - protein, 156 aa, Homo sapiens
LIASGTVRKGHDSMVRTDGHTLSEKRNYQVTNSMFGASRKKFVEGVDSDYHDENMYYSQSSMFPHRSEKDMLASPSTSGQLSQFGASLYGQQSALGLPMRGMSNNTPQLNRSLSQGTQLPSHVTPTTGVPTMSLHTPPSPSRYLLMDQNIFQNVSW

SEQ ID NO: 35447 - protein, 1910 aa, Homo sapiens
LSAMLSHGAGLALWITLSLLQTGLAEPERCNFTLAESKASSHSVSIQWRILGSPCNFSLIYSSDTLGAALCPTFRIDNTTYGCNLQDLQAGTIYNFRIISLDEERTVVLQTDPLPPARFGVSKEKTTSTSLHVWWTPSSGKVTSYEVQLFDENNQKIQGVQIQESTSWNEYTFFNLTAGSKYNIAITAVSGGKRSFSVYTNGSTVPSPVKDIGISTKANSLLISWSHGSGNVERYRLMLMDKGILVHGGVVDKHATSYAFHGLTPGYLYNLTVMTEAAGLQNYRWKLVRTAPMEVSNLKVTNDGSLTSLKVKWQRPPGNVDSYNITLSHKGTIKESRVLAPWITETHFKELVPGRLYQVTVSCVSGELSAQKMAVGRTFPDKVANLEANNNGRMRSLVVSWSPPAGDWEQYRILLFNDSVVLLNITVGKEETQYVMDDTGLVPGRQYEVEVIVESGNLKNSERCQGRTVPLAVLQLRVKHANETSLSIMWQTPVAEWEKYIISLADRDLLLIHKSLSKDAKEFTFTDLVPGRKYMATVTSISGDLKNSSSVKGRTVPAQVTDLHVANQGMTSSLFTNWTQAQGDVEFYQVLLIHENVVIKNESISSETSRYSFHSLKSGSLYSVVVTTVSGGISSRQVVVEGRTVPSSVSGVTVNNSGRNDYLSVSWLLAPGDVDNYEVTLSHDGKVVQSLVIAKSVRECSFSSLTPGRLYTVTITTRSGKYENHSFSQERTVPDKVQGVSVSNSARSDYLRVSWVHATGDFDHYEVTIKNKNNFIQTKSIPKSENECVFVQLVPGRLYSVTVTTKSGQYEANEQGNGRTIPEPVKDLTLRNRSTEDLHVTWSGANGDVDQYEIQLLFNDMKVFPPFHLVNTATEYRFTSLTPGRQYKILVLTISGDVQQSAFIEGFTVPSAVKNIHISPNGATDSLTVNWTPGGGDVDSYTVSAFRHSQKVDSQTIPKHVFEHTFHRLEAGEQYQIMIASVSGSLKNQINVVGRTVPAAVTDLRITENSTRHLSFRWTASEGELSWYNIFLYNPDGNLQERAQVDPLVQSFSFQNLLQGRMYKMVIVTHSGELSNESFIFGRTVPASVSHLRGSNRNTTDSLWFNWSPASGDFDFYELILYNPNGTKKENWKDKDLTEWRFQGLVPGRKYVLWVVTHSGDLSNKVTAESRTAPSPPSLMSFADIANTSLAITWKGPPDWTDYNDFELQWLPRDALTVFNPYNNRKSEGRIVYGLRPGRSYQFNVKTVSGDSWKTYSKPIFGSVRTKPDKIQNLHCRPQNSTAIACSWIPPDSDFDGYSIECRKMDTQEVEFSRKLEKEKSLLNIMMLVPHKRYLVSIKVQSAGMTSEVVEDSTITMIDRPPPPPPHIRVNEKDVLISKSSINFTVNCSWFSDTNGAVKYFTVVVREADGSDELKPEQQHPLPSYLEYRHNASIRVYQTNYFASKCAENPNSNSKSFNIKLGAEMESLGGKCDPTQQKFCDGPLKPHTAYRISIRAFTQLFDEDLKEFTKPLYSDTFFSLPITTESEPLFGAIEGVSAGLFLIGMLVAVVALLICRQKVSHGRERPSARLSIRRDRPLSVHLNLGQKGNRKTSCPIKINQFEGHFMKLQADSNYLLSKEYEELKDVGRNQSCDIALLPENRGKNRYNNILPYDATRVKLSNVDDDPCSDYINASYIPGNNFRREYIVTQGPLPGTKDDFWKMVWEQNVHNIVMVTQCVEKGRVKCDHYWPADQDSLYYGDLILQMLSESVLPEWTIREFKICGEEQLDAHRLIRHFHYTVWPDHGVPETTQSLIQFVRTVRDYINRSPGAGPTVVHCSAGVGRTGTFIALDRILQQLDSKDSVDIYGAVHDLRLHRVHMVQTECQYVYLHQCVRDVLRARKLRSEQENPLFPIYENVNPEYHRDPVYSRH

SEQ ID NO: 35448 - protein, 1910 aa, Homo sapiens
LSAMLSHGAGLALWITLSLLQTGLAEPERCNFTLAESKASSHSVSIQWRILGSPCNFSLIYSSDTLGAALCPTFRIDNTTYGCNLQDLQAGTIYNFRIISLDEERTVVLQTDPLPPARFGVSKEKTTSTSLHVWWTPSSGKVTSYEVQLFDENNQKIQGVQIQESTSWNEYTFFNLTAGSKYNIAITAVSGGKRSFSVYTNGSTVPSPVKDIGISTKANSLLISWSHGSGNVERYRLMLMDKGILVHGGVVDKHATSYAFHGLTPGYLYNLTVMTEAAGLQNYRWKLVRTAPMEVSNLKVTNDGSLTSLKVKWQRPPGNVDSYNITLSHKGTIKESRVLAPWITETHFKELVPGRLYQVTVSCVSGELSAQKMAVGRTFPLAVLQLRVKHANETSLSIMWQTPVAEWEKYIISLADRDLLLIHKSLSKDAKEFTFTDLVPGRKYMATVTSISGDLKNSSSVKGRTVPAQVTDLHVANQGMTSSLFTNWTQAQGDVEFYQVLLIHENVVIKNESISSETSRYSFHSLKSGSLYSVVVTTVSGGISSRQVVVEGRTVPSSVSGVTVNNSGRNDYLSVSWLLAPGDVDNYEVTLSHDGKVVQSLVIAKSVRECSFSSLTPGRLYTVTITTRSGKYENHSFSQERTVPDKVQGVSVSNSARSDYLRVSWVHATGDFDHYEVTIKNKNNFIQTKSIPKSENECVFVQLVPGRLYSVTVTTKSGQYEANEQGNGRTIPEPVKDLTLRNRSTEDLHVTWSGANGDVDQYEIQLLFNDMKVFPPFHLVNTATEYRFTSLTPGRQYKILVLTISGDVQQSAFIEGFTVPSAVKNIHISPNGATDSLTVNWTPGGGDVDSYTVSAFRHSQKVDSQTIPKHVFEHTFHRLEAGEQYQIMIASVSGSLKNQINVVGRTVPASVQGVIADNAYSSYSLIVSWQKAAGVAERYDILLLTENGILLRNTSEPATTKQHKFEDLTPGKKYKIQILTVSGGLFSKEAQTEGRTVPAAVTDLRITENSTRHLSFRWTASEGELSWYNIFLYNPDGNLQERAQVDPLVQSFSFQNLLQGRMYKMVIVTHSGELSNESFIFGRTVPASVSHLRGSNRNTTDSLWFNWSPASGDFDFYELILYNPNGTKKENWKDKDLTEWRFQGLVPGRKYVLWVVTHSGDLSNKVTAESRTAPSPPSLMSFADIANTSLAITWKGPPDWTDYNDFELQWLPRDALTVFNPYNNRKSEGRIVYGLRPGRSYQFNVKTVSGDSWKTYSKPIFGSVRTKPDKIQNLHCRPQNSTAIACSWIPPDSDFDGYSIECRKMDTQEVEFSRKLEKEKSLLNIMMLVPHKRYLVSIKVQSAGMTSEVVEDSTITMIDRPPPPPPHIRVNEKDVLISKSSINFTVNCSWFSDTNGAVKYFTVVVREADGSDELKPEQQHPLPSYLEYRHNASIRVYQTNYFASKCAENPNSNSKSFNIKLGAEMESLGGKCDPTQQKFCDGPLKPHTAYRISIRAFTQLFDEDLKEFTKPLYSDTFFSLPITTESEPLFGAIEGVSAGLFLIGMLVAVVALLICRQKVSHGRERPSARLSIRRDRPLSVHLNLGQKGNRKTSCPIKINQFEGHFMKLQADSNYLLSKEYEELKDVGRNQSCDIALLPENRGKNRYNNILPYDATRVKLSNVDDDPCSDYINASYIPGNNFRREYIVTQGPLPGTKDDFWKMVWEQNVHNIVMVTQCVEKGRVKCDHYWPADQDSLYYGDLILQMLSESVLPEWTIREFKICGEEQLDAHRLIRHFHYTVWPDHGVPETTQSLIQFVRTVRDYINRSPGAGPTVVHCSAGVGRTGTFIALDRILQQLDSKDSVDIYGAVHDLRLHRVHMVQTECQYVYLHQCVRDVLRARKLRSEQENPLFPIYENVNPEYHRDPVYSRH

SEQ ID NO: 35449 - protein, 2000 aa, Homo sapiens
LSAMLSHGAGLALWITLSLLQTGLAEPERCNFTLAESKASSHSVSIQWRILGSPCNFSLIYSSDTLGAALCPTFRIDNTTYGCNLQDLQAGTIYNFRIISLDEERTVVLQTDPLPPARFGVSKEKTTSTSLHVWWTPSSGKVTSYEVQLFDENNQKIQGVQIQESTSWNEYTFFNLTAGSKYNIAITAVSGGKRSFSVYTNGSTVPSPVKDIGISTKANSLLISWSHGSGNVERYRLMLMDKGILVHGGVVDKHATSYAFHGLTPGYLYNLTVMTEAAGLQNYRWKLVRTAPMEVSNLKVTNDGSLTSLKVKWQRPPGNVDSYNITLSHKGTIKESRVLAPWITETHFKELVPGRLYQVTVSCVSGELSAQKMAVGRTFPDKVANLEANNNGRMRSLVVSWSPPAGDWEQYRILLFNDSVVLLNITVGKEETQYVMDDTGLVPGRQYEVEVIVESGNLKNSERCQGRTVPLAVLQLRVKHANETSLSIMWQTPVAEWEKYIISLADRDLLLIHKSLSKDAKEFTFTDLVPGRKYMATVTSISGDLKNSSSVKGRTVPAQVTDLHVANQGMTSSLFTNWTQAQGDVEFYQVLLIHENVVIKNESISSETSRYSFHSLKSGSLYSVVVTTVSGGISSRQVVVEGRTVPSSVSGVTVNNSGRNDYLSVSWLLAPGDVDNYEVTLSHDGKVVQSLVIAKSVRECSFSSLTPGRLYTVTITTRSGKYENHSFSQERTVPDKVQGVSVSNSARSDYLRVSWVHATGDFDHYEVTIKNKNNFIQTKSIPKSENECVFVQLVPGRLYSVTVTTKSGQYEANEQGNGRTIPEPVKDLTLRNRSTEDLHVTWSGANGDVDQYEIQLLFNDMKVFPPFHLVNTATEYRFTSLTPGRQYKILVLTISGDVQQSAFIEGFTVPSAVKNIHISPNGATDSLTVNWTPGGGDVDSYTVSAFRHSQKVDSQTIPKHVFEHTFHRLEAGEQYQIMIASVSGSLKNQINVVGRTVPASVQGVIADNAYSSYSLIVSWQKAAGVAERYDILLLTENGILLRNTSEPATTKQHKFEDLTPGKKYKIQILTVSGGLFSKEAQTEGRTVPAAVTDLRITENSTRHLSFRWTASEGELSWYNIFLYNPDGNLQERAQVDPLVQSFSFQNLLQGRMYKMVIVTHSGELSNESFIFGRTVPASVSHLRGSNRNTTDSLWFNWSPASGDFDFYELILYNPNGTKKENWKDKDLTEWRFQGLVPGRKYVLWVVTHSGDLSNKVTAESRTAPSPPSLMSFADIANTSLAITWKGPPDWTDYNDFELQWLPRDALTVFNPYNNRKSEGRIVYGLRPGRSYQFNVKTVSGDSWKTYSKPIFGSVRTKPDKIQNLHCRPQNSTAIACSWIPPDSDFDGYSIECRKMDTQEVEFSRKLEKEKSLLNIMMLVPHKRYLVSIKVQSAGMTSEVVEDSTITMIDRPPPPPPHIRVNEKDVLISKSSINFTVNCSWFSDTNGAVKYFTVVVREADGSDELKPEQQHPLPSYLEYRHNASIRVYQTNYFASKCAENPNSNSKSFNIKLGAEMESLGGKCDPTQQKFCDGPLKPHTAYRISIRAFTQLFDEDLKEFTKPLYSDTFFSLPITTESEPLFGAIEGVSAGLFLIGMLVAVVALLICRQKVSHGRERPSARLSIRRDRPLSVHLNLGQKGNRKTSCPIKINQFEGHFMKLQADSNYLLSKEYEELKDVGRNQSCDIALLPENRGKNRYNNILPYDATRVKLSNVDDDPCSDYINASYIPGNNFRREYIVTQGPLPGTKDDFWKMVWEQNVHNIVMVTQCVEKGRVKCDHYWPADQDSLYYGDLILQMLSESVLPEWTIREFKICGEEQLDAHRLIRHFHYTVWPDHGVPETTQSLIQFVRTVRDYINRSPGAGPTVVHCSAGVGRTGTFIALDRILQQLDSKDSVDIYGAVHDLRLHRVHMVQTECQYVYLHQCVRDVLRARKLRSEQENPLFPIYENVNPEYHRDPVYSRH

SEQ ID NO: 35450 - protein, 236 aa, Homo sapiens
LFSSLDPLSRVCLRPKNVTDSLSTYINANYIRGYSGKEKAFIATQGPMINTVDDFWQMVWQEDSPVIVMITKLKEKNEKCVLYWPEKRGIYGKVEVLVISVNECDNYTIRNLVLKQGSHTQHVKHYWYTSWPDHKTPDSAQPLLQLMLDVEEDRLASQGRGPVVVHCSAGIGRTGCFIATSIGCQQLKEEGVVDALSIVCQLRMDRGGMVQTSEQYEFVHHALCLYESRLSAETVQ

SEQ ID NO: 35451 - protein, 23 aa, Homo sapiens
LKETRQIEMCAILAGKERDIWKS

SEQ ID NO: 35452 - protein, 159 aa, Homo sapiens
LPFSFQNEAHRTSREEIPMNFVDPKEIDIPRHGTKNRYKTILPNPLSRVCLRPKNVTDSLSTYINANYIRGYSGKEKAFIATQGPMINTVDDFWQMVWQEDSPVIVMITKLKEKNEKRRLTGLAPAHTWHSTFPWAKLSGSRCPHPMTRACAGAITPPC

SEQ ID NO: 35453 - protein, 154 aa, Homo sapiens
MNPSFFIGLLLILLLQVATGILGAVFKSKSDRIVNETLYENTKLLSATGESEKQFQEAIIVFQEEFKCCGLVNGAADWGNNFQHYPELCACLDKQRPCQSYNGKQVYKETCISFIKDFLAKNLIIVIGISFGLAVIEILGLVFSMVLYCQIGNK

SEQ ID NO: 35454 - protein, 363 aa, Homo sapiens
MDTSRLGVLLSLPVLLQLATGGSSPRSGVLLRGCPTHCHCEPDGRMLLRVDCSDLGLSELPSNLSVFTSYLDLSMNNISQLLPNPLPSLRFLEELRLAGNALTYIPKGAFTGLYSLKVLMLQNNQLRHVPTEALQNLRSLQSLRLDANHISYVPPSCFSGLHSLRHLWLDDNALTEIPVQAFRSLSALQAMTLALNKIHHIPDYAFGNLSSLVVLHLHNNRIHSLGKKCFDGLHSLETLDLNYNNLDEFPTAIRTLSNLKELGFHSNNIRSIPEKAFVGNPSLITIHFYDNPIQFVGRSAFQHLPELRTLTLNGASQITEFPDLTGTANLESLTLTGAQISSLPQTVCNQLPNLQVLCVSVRQ

SEQ ID NO: 35455 - protein, 102 aa, Homo sapiens
VRSYPTRTPSGLCSPTSPHPSTPALSRRTVATQFPFLAPPCSSAIGVLPPREKGTLVAAVPETSLPATRRKQRLPVHAIIRPTRYSLGFVVFRLSSGLLFRS

SEQ ID NO: 35456 - protein, 128 aa, Homo sapiens
VLIARPCTQSDKNPMRFLGVTQFSPTHARKAFPCFDEPIYKATFKISIKHQATYLSLSNMPVETSVFEEDGWVTDHFSQTPLMSTYYLAWAICNFTYRETTTKSGVVINVDPNAMRRNLVYITRDVRN

SEQ ID NO: 35457 - protein, 55 aa, Homo sapiens
LAVSPGPGAAERPATRETSKQTEGLGIPEQSPLSLLLQLRTPPTPPPEDWALKGL

SEQ ID NO: 35458 - protein, 60 aa, Homo sapiens
LLNLPAFIFLVCWMLPALKHQTPGSSSFGLSDLHQWFTRCSQAFSHTLKAELSASRLLRF

SEQ ID NO: 35459 - protein, 57 aa, Homo sapiens
MAQAGIALIGLAVMGQNLILCMNDHGFMACAFNSTVSKVDDFLATRQREPKMLMFSP

SEQ ID NO: 35460 - protein, 19 aa, Homo sapiens
VNFLGAMMYCNFILMYFDL

SEQ ID NO: 35461 - protein, 358 aa, Homo sapiens
LTTRQLTVQMMQNPQILAALQERLDGLVETPTGYIESLPRVVKRRVNALKNLQVKCAQIEAKFYEEVHDLERKYAVLYQPLFDKRFEIINAIYEPTEEECEWKPDEEDEISELKEKAKIEDEKKDEEKEDPKGIPEFWLTVFKNVDLLSDMVQEHDEPILKHLKDIKVKFSDAGQPMSFVLEFHFEPNEYFTNEVLTKTYRMRSEPDDSDPFSFDGPEIMGCTGCQIDWKKGKNVTLKTIKKKQKHKGRGTVRTVTKTVSNDSFFNFFAPPEVPESGDLDDDAEAILAADFEIGHFLRERIIPRSVLYFTGEAIEDDDDDYDEEGEEADEEGEEEGDEENDPDYDPKKDQNPAECKQQ

SEQ ID NO: 35462 - protein, 78 aa, Homo sapiens
LLSFLFIVISFLNFAVPESGDLDDDAEAILAADFEIGHFLRERIIPRSVLYFTGEAIEDDDDDYDEEGEEADEVMFTK

SEQ ID NO: 35463 - protein, 380 aa, Homo sapiens
LSHCLRSSGRLAPHTSRRKEQSELDQDLDDVEEVEEEETGEETKLKARQLTVQMMQNPQILAALQERLDGLVETPTGYIESLPRVVKRRVNALKNLQVKCAQIEAKFYEEVHDLERKYAVLYQPLFDKRFEIINAIYEPTEEECEWKPDEEDEISEELKEKAKIEDEKKDEEKEDPKGIPEFWLTVFKNVDLLSDMVQEHDEPILKHLKDIKVKFSDAGQPMSFVLEFHFEPNEYFTNEVLTKTYRMRSEPDDSDPFSFDGPEIMGCTGCQIDWKKGKNVTLKTIKKKQKHKGRGTVRTVTKTVSNDSFFNFFAPPEVPESGDLDDDAEAILAADFEIGHFLRERIIPRSVLYFTGEAIEDDDDDYDEEGEEADEVMFTK

SEQ ID NO: 35464 - protein, 44 aa, Homo sapiens [sequence omitted]

SEQ ID NO: 35465 - protein, 13 aa, Homo sapiens
LYMSASGGLLGLF

SEQ ID NO: 35466 - protein, 10 aa, Homo sapiens
LKMLMSALVF

SEQ ID NO: 35467 - protein, 73 aa, Homo sapiens [sequence omitted]

SEQ ID NO: 35468 - protein, 9 aa, Homo sapiens
VLGAGGLLW

SEQ ID NO: 35469 - protein, 2332 aa, Homo sapiens
MIPWSIFLLHVLLFSLQEYICASSILMGTSKNGFNENRQKRALLAAQFEATSPRYFFHDAINWGESKIKGSCPYECLNGAFCSKTGTCDCQIFQALGTRCQIIPNMGNGRDGICKTWGQYHFETFDGIYYYFPGNCSYIFAKDCGDLEPRYTVWVHNSPKCLGSVYSCYRSISLFFSNQEEIRIYGHEIKKNGISLTLPQTIGQIFIEKLADYILVKTTFGFSLAWDGISGIYLKLSEDHKGKSCGLCGNYNDIQSDDFIILQEDYTEDIAMFANSWSVQTPDDTKCVLTPSDFPNPCSSGMPAFEAIFFKCQILLQFPFLSCHEYIDPYLYIASCVNDLCKTDDDETYCRAATEYARACSHAGYPIQDWRDDFPACTDKCDDSFVHRDCISCCPPTCTFEKQCLGSNLHCLDGCYCPDGLVMDNGTCISLENCPCGFHGLAYSVGSKIEQECTECVCVGGVWNCTEQDCPVQCSVVGDSHFTTFDGRHYSFIGMCQYILVKGTGKDKFTITLQKAPCEQNLGLVCLQSITLILEDDFNKQVTLGRGGQILTSPNQGFNLNGIVEIQTLSSLFILLKTTFGLKILFAIDGERIYIQLTSAWKRRTLGLCGTFNGNIRDDFLSPSGMIEGTPQLHANAWRVSSTCFAPVHVPVVDPCNINQQNIGYAAHCDVIHQELFAPCHIYISPGLYYQLCRHDACKCGSSCLCNALAHYAYLCGQHGVPIDFRTQISFCAVVCQKGMLYHHCSSFCLHSCISLSSPEQCSDDCAEGCNCPEGKFYEDTLNFCVPIFHCRCHYRGSVYQPGELIPTPSGLCQCSNGTVKCDELATPSAVHICPEGKEYFDCRFPDPELPAGGVNCETTCANLAMNFTCTPSSPCISGCVCAPGMAEHRGKCYVPESCPCIWKDWEYLSGEVIATPCYTCVCRRGMFNCTYYPCPAVCTIYGDRHYYSFDGLEYDYISDCQVFLIKSADDSDISVIAQNKKCFDNDIVCSKSVLISVGDTEIYLNDTPYKQKQSGFFLENKSTYQLWKAGYYIVVYFPEKDITILWDRKTTIHIKVGPQWKNKLSGLCGNFDKCTSNDMTTSNNLEVRNARVFGDSWALGQCESPDETIKPCEAHQNKFPYAKKECSILYSDIFASCRNVIDVTSFAKNCHEDTCNCNLGGDCECLCTSIAAYAYKCCQEGISIHWRSSTVCSLDCEYYNEGLGEGPYMLASYGQSGLVLGANMTSRSVFCLPRSSVHTSLFFYFMITPGLFKEKVSSLALVSLESAERPNYFLYVHDNDTLSLELWEANSAFHRRATFFHHQGLWIPGYSAFELYSKKGFFIIFTDSSVKASKYDDSEEFKHSSSFSIEEIQAAVPYRKMCEWRYEPCATPCFKTCSDPEALACKFLPPVEGCLPYCPKNMILDEVTLKCVYPRDCIPVIPTEPTLMPPAKPTVPITVFDMLTPTTGLECEPQKFDPVYDCSQYICLNMEWQLYNWSLNCPKDVEMPDCGFRGRPVQVNSDICCPEWECPCRCSMLSELSIITFDGNNAALYSMASYILVRIPGEIIVAHIEKCSMNQNGNSLKKLAPSGRISGLCFKKLNVTTPIHKIIVNRLARKVEVDSIVVPLPFSSQELSIEDSGSMYVITTPAGLIIKWSHLTGIIDIHFGFRFNLSSYTEGLCGICNEDPDDDLRMQNGTIITNMEDIGLFIESWEIEKSFEVTMRRPVRNCTEHDCSQCIDLLNRRIFIPCHDKVSPEDFCEKMWINYTYFWNYECDALSAYVALCNKFDICIQWRTPDYCSLSCPEGKEYQPCVRPCEARTCLNQWFYGHTSCLNLREDCVCKVGTILHRPHSAQCIPEKECACTDSEDQPRTAGEIWNGGIDECTLYKCLENGSIIPIEPDCDEEPTPVCEREAEVVMGIIDKWTCCSKEVCGCDTTLCETSIPTCTNSQKLIVGHSPLSCCPQYKCECDPLKCPSISTPECREDQFMIQVRQEEPCCFSPFCVCESCTKPVPLCHDGEFLTVDLNSTHFCCPQYYCVCEPNLCPMPLLNCAEDMNLVKENVSGQCCPTWHCECNCENLIMPTCEVGEFTAIDHNFQSDCGCIQYLCEKDDVCVFQEVSVLNPGQSMIKYLEEDFCYAIECLEEKDNHTGFHTLNFTLVNCSKKCDVHQVYTPSPSDYGCCGTCKNVSCKFHMENGTSVVYAVGSTWHYNCTTYECVKTDEGAIILNYTMVCPPFNETECKMNEGIVKLYNEGCCKICKREERICQKVIIKSVIRKQDCMSQSPINVASCDGKCPSATIYNINIESHLRFCKCCRENGVRNLSVPLYCSGNGTEIMYTLQEPIDCTCQWN

SEQ ID NO: 35470 - protein, 743 aa, Homo sapiens
LVAPGRFFPATLVWLPNFWALGSLRNLPPPPTPFPQAPGSCKSTICRTLGDRGWPEEMKPSWLQCRKVTSAGGLGGPLPGSSPARGAGAALRALVVPGPRGGLGGRGCRALSSGSGSEYKTHFAASVTDPERFWGKAAEQISWYKPWTKTLENKHSPSTRWFVEGMLNICYNAVDRHIENGKGDKIAIIYDSPVTNTKATFTYKEVLEQVSKLAGVLVKHGIKKGDTVVIYMPMIPQAMYTMLACARIGAIHSLIFGGFASKELSSRIDHVKPKVVVTASFGIEPGRRVEYVPLVEEALKIGQHKPDKILIYNRPNMEAVPLAPGRDLDWDEEMAKAQSHDCVPVLSEHPLYILYTSGTTGLPKGVIRPTGGYAVMLHWSMSSIYGLQPGEVWWAASDLGWVVGHSYICYGPLLHGNTTVLYEGKPVGTPDAGAYFRVLAEHGVAALFTAPTAIRAIRQQDPGAALGKQYSLTRFKTLFVAGERCDVETLEWSKNVFRVPVLDHWWQTETGSPITASCVGLGNSKTPPPGQAGKSVPGYNVMILDDNMQKLKARCLGNIVVKLPLPPGAFSGLWKNQEAFKHLYFEKFPGYYDTMDAGYMDEEGYLYVMSRVDDVINVAGHRISAGAIEESILSHGTVADCAVVGKEDPLKGHVPLALCVLRKDINATEEQVLEEIVKHVRQNIGPVAAFRNAVFVKQLPKTRSGKIPRSALSAIVNGKPYKITSTIEDPSIFGHVEEMLKQA

SEQ ID NO: 35471 - protein, 48 aa, Homo sapiens
MVKNFLNMFYMFLIYLPLKEGWPEELKEPLILQDRPKHVILLYHMRFI

SEQ ID NO: 35472 - protein, 159 aa, Homo sapiens
LLVGLIMKRLGSVQRKMPCVFVTEVKEEPSSKREHQPFKVLATETVSHKALDADIYSAIPTEKVDGTCCYVTTYKDQPYLWARLDRKPNKQAEKRFKNFLHSKENPKEFFWNVEEDFKPAPECWIPAKETEQINGNPVPDENGHIPGIMISLLVQFCVY

SEQ ID NO: 35473 - protein, 18 aa, Homo sapiens
MTVVSVASLAGLLFLRFS

SEQ ID NO: 35474 - protein, 255 aa, Homo sapiens
LCWIAALPFLMKKTQTWILTCIYLQLLLFNPLVKTEGICRNRVTNNVKDVTKLVANLPKDYMITLKYVPGMDVLPSHCWISEMVVQLSDSLTDLLDKFSNISEGLSNYSIIDKLVNIVDDLVECVKENSSKDLKKSFKSPEPRLFTPEEFFRIFNRSIDAFKDFVVASETSDCVVSSTLSPEKGKAKNPPGDSSLHWAAMALPALFSLIIGFAFGALYWKKRQPSLTRAVENIQINEEDNEISMLQEKEREFQEV

SEQ ID NO: 35475 - protein, 55 aa, Homo sapiens
MCLALQQFLLAASAGLLSLCVAPGVKMTPAVCTRQGYQVRNWLILTERFAPFSLE

SEQ ID NO: 35476 - protein, 517 aa, Homo sapiens
LPLWADGSGSRTVPSPSPSSPLPSPGSPTHRSLGPTTPPMASATEDPVLERYFKGHKAAITSLDLSPNGKQLATASWDTFLMLWNFKPHARAYRYVGHKDVVTSVQFSPHGNLLASASRDRTVRLWIPDKRGKFSEFKAHTAPVRSVDFSADGQFLATASEDKSIKVWSMYRQRFLYSLYRHTHWVRCAKFSPDGRLIVSCSEDKTIKIWDTTNKQCVNNFSDSVGFANFVDFNPSGTCIASAGSDQTVKVWDVRVNKLLQHYQVHSGGVNCISFHPSGNYLITASSDGTLKILDLLEGRLIYTLQGHTGPVFTVSFSKGGELFASGGADTQVLLWRTNFDELHCKGLTKRNLKRLHFDSPPHLLDIYPRTPHPHEEKVETVEINPKLEVIDLQISTPPVMDILSFDSTTTTETSGRTLPDKGEEACGYFLNPSLMSPECLPTTTKKKTEDMSDLPCESQRSIPLAVTDALEHIMEQLNVLTQTVSILEQRLTLTEDKLKDCLENQQKLFSAVQQKS

SEQ ID NO: 35477 - protein, 625 aa, Homo sapiens
LGRRCCSDREALPLWADGSGSRTVPSPSPSSPLPSPGSPTHRSLGPTTPPMASATEDPVLERYFKGHKAAITSLDLSPNGKQLGAGRARELGSRRLSDLQKNTEDLSRPLYKKPPADSRALGEWGKASKLQLNEDELKQQEELIERYAINIYLSDRISLHRHIEDKRMYECKSQKFNYRTLPTTSVIIAFYNEAWSTLLRTIHSVLETSPAVLLKEIILVDDLSDRVYLKTQLETYISNLDRVRLIRTNKREGLVRARLIGATFATGDVLTFLDCHCECNSGWLEPLLERIGRDETAVVCPVIDTIDWNTFEFYMQIGEPMIGGFDWRLTFQWHSVPKQERDRRISRIDPIRSPTMAGGLFAVSKKYFQYLGTYDTGMEVWGGENLELSFRVWQCGGKLEIHPCSHVGHVFPKRAPYARPNFLQNTARAAEVWMDEYKEHFYNRNPPARKEAYGDISERKLLRERLRCKSFDWYLKNVFPNLHVPEDRPGWHGAIRSRGISSECLDYNSPDNNPTGANLSLFGCHGQGGNQFFEYTSNKEIRFNSVTELCAEVPEQKNYVGMQNCPKDGFPVPANIIWHFKEDGTIFHPHSGLCLSAYRTPEGRPDVQMRTCDALDKNQIWSFEK

SEQ ID NO: 35478 - protein, 110 aa, Homo sapiens
LLLLLWGIRVVNAFRSSLYEGLEKPESRSSIHNFMTHPEFRIEDSEPHIPLIDDTDAEDDAPTKRNSSPPPSPNKNNNAVDSGIHLTIEMNKSATSSSPGSPLHSLETSL

SEQ ID NO: 35479 - protein, 12 aa, Homo sapiens
MLLLMLLYKVIQ

SEQ ID NO: 35480 - protein, 44 aa, Homo sapiens
VEREACGCGEKGAPDRNGCVYLMIDMEKLVMGQRSRYFSGKCCC

SEQ ID NO: 35481 - protein, 341 aa, Homo sapiens
LPKMSLSAFTLFLALIGGTSGQYYDYDFPLSIYGQSSPNCAPECNCPESYPSAMYCDELKLKSVPMVPPGIKYLYLRNNQIDHIDEKAFENVTDLQWLILDHNLLENSKIKGRVFSKLKQLKKLHINHNNLTESVGPLPKSLEDLQLTHNKITKLGSFEGLVNLTFIHLQHNRLKEDAVSAAFKGLKSLEYLDLSFNQIARLPSGLPVSLLTLYLDNNKISNIPDEYFKRFNALQYLRLSHNELADSGIPGNSFNVSSLVELDLSYNKLKNIPTVNENLENYYLEVNQLEKFDIKSFCKILGPLSYSKIKHLRLDGNRISETSLPPDMYECLRVANEVTLN

SEQ ID NO: 35482 - protein, 25 aa, Homo sapiens
LEMQLLRSSNAAELEAEAAGEVRAM

SEQ ID NO: 35483 - protein, 35 aa, Homo sapiens
LLGAKMEKKILLIRSNHSTFGILNLLIFSKKYIQS

SEQ ID NO: 35484 - protein, 156 aa, Homo sapiens [sequence omitted]

SEQ ID NO: 35485 - protein, 203 aa, Homo sapiens
VAAAGPPRRRPEQQQQQQEPASMMKFKPNQTRTYDREGFKKRAACLCFRSEQEDEVLLVSSSRYPDQWIVPGGGMEPEEEPGGAAVREVYEEAGVKGKLGRLLGIFEQNQDRKHRTYVYVLTVTEILEDWEDSVNIGRKREWFKVEDAIKVLQCHKPVHAEYLEKLKLGCSPANGNSTVPSLPDNNALFVTAAQTSGLPSSVR

SEQ ID NO: 35486 - protein, 202 aa, Homo sapiens
VAAAGPPRRRPEQQQQQQEPASMMKFKPNQTRTYDREGFKKRAACLCFRSEQEDEVLLVSSSRYPDQWIVPGGGMEPEEEPGGAAVREVYEEAGVKGKLGRLLGIFENQDRKHRTYVYVLTVTEILEDWEDSVNIGRKREWFKVEDAIKVLQCHKPVHAEYLEKLKLGCSPANGNSTVPSLPDNNALFVTAAQTSGLPSSVR

SEQ ID NO: 35487 - protein, 198 aa, Homo sapiens
LNTFPLVYLCEVILLCSTALLPSVLVLPYLLWSPQALNFVVIAAFETRSNLKKKGRETQRLLAEPVPGIKAEPDESNARYFHVVIAGPQDSPFEGGTFKLELFLPEEYPMAAPKVRFMTKIYHPNVDKLGRICLDILKDKWSPALQIRTVLLSIQALLSAPNPDDPLANDVAEQWKTNEAQAIETARAWTRLYAMNNI

SEQ ID NO: 35488 - protein, 71 aa, Homo sapiens
LGNLSCSFLFNFFYLSLTRAYSHWICRRSVGDRGCEGLCHPSSRIWGERAPSLLSLPPFRTPRRDSFWDSH

SEQ ID NO: 35489 - protein, 8 aa, Homo sapiens
MVLMGQVP

SEQ ID NO: 35490 - protein, 427 aa, Homo sapiens
MAAQAWKLLQALALLPRFLVARSRAVQLTSRRWLSLQECQSKKLMSDNRVTVQRFFVADTANEALEAAKRLNAKEIVLKAQILAGGRGKGVFNSGLKRGVHLTKDPNVVGQLAKQMIGYNLATKQTPKEGVKVNKVMVAEALDISRETYLAILMDQSCNGPMLVGSPQEGIDIEEVAASNPELIFKEQIDIFEGIKDSQAQRMAENLGFVGPLKSQAADQITKLYNLFLKIDATQVEVNPFGETPEGQVVCFDAKINFDDNAEFQQKDIFAMDDKSENEPIENEAAKYDLKYIGLDGNIACFVNGAGLAMATCDIIFLNGRKPASFLDLGGGVKEAQVYQAFTLPTADPKVEAILVNIFGGIVNCAIIANGITKACQELELKVPLVVWLEGTNVQEAQEILNSRLPITSAVDLEDAAKKAVASVAKK

SEQ ID NO: 35491 - protein, 30 aa, Homo sapiens
MFFFVTKNRKMHNRGTTKASYKSPTKIPGI

SEQ ID NO: 35492 - protein, 34 aa, Homo sapiens
MFFFVTKNRKMHNRGTTKASYKSPTKTRYPVKSG

SEQ ID NO: 35493 - protein, 55 aa, Homo sapiens
MFFFVTKNRKMHNRGTTKASYKSPTKRISQCYLPSLACSLCFPLGGLCLPGWYGE

SEQ ID NO: 35494 - protein, 446 aa, Homo sapiens
LSPAGGPSPVASRRPSARGDMASGHSLLLENAQQVVLVCARGERFLARDALRSLAVLEGASLVVGKDGFIKAIGPADVIQRQFSGETFEEIIDCSGKCILPGLVDAHTHPVWAGERVHEFAMKLAGATYMEIHQAGGGIHFTVERTRQATEEELFRSLQQRLQCMMRAGTTLVECKSGYGLDLETELKMLRVIERARRELDIGISATYCGAHSVPKGKTATEAADDIINNHLPKLKELGRNGEIHVDNIDVFCEKGVFDLDSTRRILQRGKDIGLQINFHGDELHPMKAAELGAELGAQAISHLEEVSDEGIVAMATARCSAILLPTTAYMLRLKQPRARKMLDEGVIVALGSDFNPNAYCFSMPMVMHLACVNMRMSMPEALAAATINAAYALGKSHTHGSLEVGKQGDLIIINSSRWEHLIYQFGGHHELIEYVIAKGKLIYKT

SEQ ID NO: 35495 - protein, 590 aa, Homo sapiens
LSPMLPQRNLSKRQVPTMHIPVKTRRLLAALKVLDTKDLTIEKVVINGQEVKYALGERQSYKGSPMEISLPIALSKNQEIVIEISFETSPKSSALQWLTPEQTSGKEHPYLFSQCQAIHCRAILPCQDTPSVKLTYTAEVSVPKELVALMSAIRDGETPDPEDPSRKIYKFIQKVPIPCYLIALVVGALESRQIGPRTLVWSEKEQVEKSAYEFSETESMLKIAEDLGGPYVWGQYDLLVLPPSFPYGGMENPCLTFVTPTLLAGDKSLSNVIAHEISHSWTGNLVTNKTWDHFWLNEGHTVYLERHICGRLFGEKFRHFNALGGWGELQNSVKTFGETHPFTKLVVDLTDIDPDVAYSSVPYEKGFALLFYLEQLLGGPEIFLGFLKAYVEKFSYKSITTDDWKDFLYSYFKDKVDVLNQVDWNAWLYSPGLPPIKPNYDMTLTNACIALSQRWITAKEDDLNSFNATDLKDLSSHQLNEFLAQTLQRAPLPLGHIKRMQEVYNFNAINNSEIRFRWLRLCIQSKWEDAIPLALKMATEQGRMKFTRPLFKDLAAFDKSHDQAVRTYQEHKASMHPVTAMLVGKDLKVD

SEQ ID NO: 35496 - protein, 511 aa, Homo sapiens
LSPMLPQRNLSKRQVPTMHIPVKTRRLLAALKVLDTKDLTIEKVVINGQEVKYALGERQSYKGSPMEISLPIALSKNQEIVIEISFETSPKSSALQWLTPEQTSGKEHPYLFSQCQAIHCRAILPCQDTPSVKLTYTAEVSVPKELVALMSAIRDGETPDPEDPSRKIYKFIQKVPIPCYLIALVVGALESRQIGPRTLVWSEKEQVEKSAYEFSETESMLKIAEDLGGPYVWGQYDLLVLPPSFPYGGMENPCLTFVTPTLLAGDKSLSNVIAHEISHSWTGNLVTNKTWDHFWLNEGHTVYLERHICGRLFGEKFRHFNALGGWGELQNSVKTFGETHPFTKLVVDLTDIDPDVAYSSVPYEKGFALLFYLEQLLGGPEIFLGFLKAYVEKFSYKSITTDDWKDFLYSYFKDKVDVLNQVDWNAWLYSPGLPPIKPNYDMTLTNACIALSQRWITAKEDDLNSFNATDLKDLSSHQLNEFLAQTLQRMAAALHSIQVGGRNSFGAKDGN

SEQ ID NO: 35497 - protein, 511 aa, Homo sapiens
LGCRSLCCVIPQSHARDSGYLFVGLSGFRLPDQAPAPALQRRLYSPDADRDCCSHGPVSGGQSAQPGFGYKGPYNRKSSDQWTRSQICSWRKTKLQGIANGNLSSYRFEQWLTPEQTSGKEHPYLFSQCQAIHCRAILPCQDTPSVKLTYTAEVSVPKELVALMSAIRDGETPDPEDPSRKIYKFIQKVPIPCYLIALVVGALESRQIGPRTLVWSEKEQVEKSAYEFSETESMLKIAEDLGGPYVWGQYDLLVLPPSFPYGGMENPCLTFVTPTLLAGDKSLSNVIAHEISHSWTGNLVTNKTWDHFWLNEGHTVYLERHICGRLFGEKFRHFNALGGWGELQNSVKTFGETHPFTKLVVDLTDIDPDVAYSSVPYEKGFALLFYLEQLLGGPEIFLGFLKAYVEKFSYKSITTDDWKDFLYSYFKDKVDVLNQVDWNAWLYSPGLPPIKPNYDMTLTNACIALSQRWITAKEDDLNSFNATDLKDLSSHQLNEFLAQTLQRLLSSKESC

SEQ ID NO: 35498 - protein, 83 aa, Homo sapiens
LDRFNKSVFSLALALLRGTGGGVNPQPPSVKATHTQGANAAARSLLSSPRAAAEPRRRSQRPARQSQPAVGARRARARLLRGD

SEQ ID NO: 35499 - protein, 294 aa, Homo sapiens
MGAVTGVVTALVTKFTKLDCFPLLETALFFLMSWSTFLLAEACGFTGVVAVLFCGITQAHYTFNNLSVESRSRSKQLFEAENFIFSCMILALFTFQKHVFSPVFIIGAFVAVFLGRAAHIYPLSFFLSLGRRHKIGWNFQHTMMFSGLRGAMAFALAICDTASYARQMTFPTTPFIVFFTIWIIGGGTTPMLSWLNIRVSIKEPSKEDHNEHHRQYFRVGVDPDQDPPPNNDSFQVLQGDSPDSARGNWTKQESTWIFRRWYSFDHNYLKPILTHSGSPLTTTLPPGGDTAAPR

SEQ ID NO: 35500 - protein, 711 aa, Homo sapiens
VSGGGKGCGEGASQIPEMPEFLEDPSVLTKDKLKSELVANNVTLPAGEQRKDVYVQLYLQHLTARNRPPLPAGTNSKGPPDFSSDEEREPTPVLGSGAAAAGRSRAAVGRKATKKTDKPRQEDKDDLDVTELTNEDLLDQLVKYGVNPGPIVGTTRKLYEKKLLKLREQGTESRSSTPLPTISSSAENTRQNGSNDSDRYSDNEEGKKKEHKKVKSTRDIVPFSELGTTPSGGGFFQGISFPEISTRPPLGSTELQAAKKVHTSKGDLPREPLVATNLPGRGQLQKLASERNLFISCKSSHDRCLEKSSSSSSQPEHSAMLVSTAASPSLIKETTTGYYKDIVENICGREKSGIQPLCPERSHISDQSPLSSKRKALEESESSQLISPPLAQAIRDYVNSLLVQGGVGSLPGTSNSMPPLDVENIQKRIDQSKFQETEFLSPPRKVPRLSEKSVEERDSGSFVAFQNIPGSELMSSFAKTVVSHSLTTLGLEVAKQSQHDKIDASELSFPFHESILKVIEEEWQQVDRQLPSLACKYPVSSREATQILSVPKVDDEILGFISEATPLGGIQAASTESCNQQLDLALCRAYEAAASALQIATHTAFVAKAMQADISQAAQILSSDPSRTHQALGILSKTYDAASYICEAAFDEVKMAAHTMGNATVGRRYLWLKDCKINLASKNKLASTPFKGGTLFGGEVCKVIKKRGNKH

SEQ ID NO: 35501 - protein, 471 aa, Homo sapiens
VSGGGKGCGEGASQIPEMPEFLEDPSVLTKDKLKSELVANNVTLPAGEQRKDVYVQLYLQHLTARNRPPLPAGTNSKGPPDFSSDEEREPTPVLGSGAAAAGRSRAAVGRKATKKTDKPRQEDKDDLDVTELTNEDLLDQLVKYGVNPGPIVGTTRKLYEKKLLKLREQGTESRSSTPLPTISSSAENTRQNGSNDSDRYSDNEEDSKIELKLEKREPLKGRAKTPVTLKQRRVEHNQSYSQAGITETEWTSGSSKGGPLQALTRESTRGSRRTPRKRVETSEHFRIDGPVISESTPIAETIMASSNESLVVNRVTGNFKHASPILPITEFSDIPRRAPKKPLTRAEVGEKTEERRVERDILKEMFPYEASTPTGISASCRRPIKGAAGRPLELSDFRMEESFSSKYVPKYVPLADVKSEKTKKGRSIPVWIKILLFVVVAVFLFLVYQAMETNQVNPFSNFLHVDPRKSN

SEQ ID NO: 35502 - protein, 431 aa, Homo sapiens
VSGGGKGCGEGASQIPEMPEFLEDPSVLTKDKLKSELVANNVTLPAGEQRKDVYVQLYLQHLTARNRPPLPAGTNSKGPPDFSSDEEREPTPVLGSGAAAAGRSRAAVGRKATKKTDKPRQEDKDDLDVTELTNEDLLDQLVKYGVNPGPIVGTTRKLYEKKLLKLREQGTESRSSTPLPTISSSAENTRQNGSNDSDRYSDNEEDSKIELKLEKREPLKGRAKTPVTLKQRRVEHNQVETSEHFRIDGPVISESTPIAETIMASSNESLVVNRVTGNFKHASPILPITEFSDIPRRAPKKPLTRAEVGEKTEERRVERDILKEMFPYEASTPTGISASCRRPIKGAAGRPLELSDFRMEESFSSKYVPKYVPLADVKSEKTKKGRSIPVWIKILLFVVVAVFLFLVYQAMETNQVNPFSNFLHVDPRKSN

SEQ ID NO: 35503 - protein, 362 aa, Homo sapiens
VSGGGKGCGEGASQIPEMPEFLEDPSVLTKDKLKSELVANNVTLPAGEQRKDVYVQLYLQHLTARNRPPLPAGTNSKGPPDFSSDEEREPTPVLGSGAAAAGRSRAAVGRKATKKTDKPRQEDKDDLDVTELTNEDLLDQLVKYGVNPGPIVGTTRKLYEKKLLKLREQGTESRSSTPLPTISSSAENTRQNGSNDSDRYSDNEEDSKIELKLEKREPLKGRAKTPVTLKQRRVEHNQVGEKTEERRVERDILKEMFPYEASTPTGISASCRRPIKGAAGRPLELSDFRMEESFSSKYVPKYVPLADVKSEKTKKGRSIPVWIKILLFVVVAVFLFLVYQAMETNQVNPFSNFLHVDPRKSN

SEQ ID NO: 35504 - protein, 29 aa, Homo sapiens
MVSLWHVQLGLLFSITVEKHLCTLVDSKN

SEQ ID NO: 35505 - protein, 20 aa, Homo sapiens
MYLVFCVCLFYSIRINVSLM

SEQ ID NO: 35506 - protein, 67 aa, Homo sapiens
LSMANAGPNANSSQFFICAAKTEWLDGKHVVFSKVKEGMNIVETMECFGSRNGKTSKKITIADCGQL

SEQ ID NO: 35507 - protein, 67 aa, Homo sapiens
VSLASSGESAQGEAGKHSPCDNPTEQQIMQLLHEMQNLQEHPGLGSSPCIPFLYQTDENNEVKITII

SEQ ID NO: 35508 - protein, 103 aa, Homo sapiens
MLFPAAFIGLFVFLYGVTTLDHSQVSKEVCQATDIIMCPVCDKYCPFMRLSDSCVYAKVTHLFDNGATVFFAVFMAVWDLRGDCCRVRDRHLPGGDCQHFRCL

SEQ ID NO: 35509 - protein, 57 aa, Homo sapiens
MINFSAFLGAATMYTRYKIVQKQNQTCYFSTPVFNLVSLVLGLVGCFGMGIVANFQV

SEQ ID NO: 35510 - protein, 142 aa, Homo sapiens
LEQTKMITPTVKMHTMSSSHLFYLALCLLTFTSSATAGPETLCGAELVDALQFVCGDRGFYFNKPTGYGSSSRRAPQTGIVDECCFRSCDLRRLEMYCAPLKPAKSARSVRAQRHTDMPKTQKEVHLKNASRGSAGNKNYRM

SEQ ID NO: 35511 - protein, 371 aa, Homo sapiens
LQLQGVELVKLMSTVICMKQREEEFLLTIRPFANRMQKSPCYIPIVSSATLWDRSTPSAKHIPCYERTSVPCSRFINHMKNFSESPKFRSLHFLNFPVFPERTQNSMACKRLLHTCQYIVPRCSVSTVSFDEESYEEFRSSPAPSSETDEAPLIFTARGETEERARGAPKQAWNSSFLEQLVKKPNWAHSVNPVHLEAQGIHISRHTRPKGQPLSSPKKNSGSAARPSTAIGLCRRSQTPGALQSTGPSNTELEPEERMAVPAGAQAHPDDIQSRLLGASGNPVGKGAVAMAPEMLPKHPHTPRDRRPQADTSLHGNLAGAPLPLLAGASTHFPSKRLIKVCSSAPPRPTRRFHTVCSQALSRPVVNAHLH

SEQ ID NO: 35512 - protein, 838 aa, Homo sapiens
VGGPRGWRCEDPNPGVGGGGGSCDRRGLETHRPHAMRALWVLGLCCVLLTFGSVRADDEVDVDGTVEEDLGKSREGSRTDDEVVQREEEAIQLDGLNASQIRELREKSEKFAFQAEVNRMMKLIINSLYKNKEIFLRELISNASDALDKIRLISLTDENALSGNEELTVKIKCDKEKNLLHVTDTGVGMTREELVKNLGTIAKSGTSEFLNKMTEAQEDGQSTSELIGQFGVGFYSAFLVADKVIVTSKHNNDTQHIWESDSNEFSVIADPRGNTLGRGTTITLVLKEEASDYLELDTIKNLVKKYSQFINFPIYVWSSKTETVEEPMEEEEAAKEEKEESDDEAAVEEEEEEKKPKTKKVEKTVWDWELMNDIKPIWQRPSKEVEEDEYKAFYKSFSKESDDPMAYIHFTAEGEVTFKSILFVPTSAPRGLFDEYGSKKSDYIKLYVRRVFITDDFHDMMPKYLNFVKGVVDSDDLPLNVSRETLQQHKLLKVIRKKLVRKTLDMIKKIADDKYNDTFWKEFGTNIKLGVIEDHSNRTRLAKLLRFQSSHHPTDITSLDQYVERMKEKQDKIYFMAGSSRKEAESSPFVERLLKKGYEVIYLTEPVDEYCIQALPEFDGKRFQNVAKEGVKFDESEKTKESREAVEKEFEPLLNWMKDKALKDKIEKAVVSQRLTESPCALVASQYGWSGNMERIMKAQAYQTGKDISTNYYASQKKTFEINPRHPLIRDMLRRIKEDEDDKTVLDLAVVLFETATLRSGYLLPDTKAYGDRIERMLRLSLNIDPDAKVEEEPEEEPEETAEDTTEDTEQDEDEEMDVGTDEEEETAKESTAEKDEL

SEQ ID NO: 35513 - protein, 139 aa, Homo sapiens
MERIMKAQAYQTGKDISTNYYASQKKTFEINPRHPLIRDMLRRIKEDEDDKTVLDLAVVLFETATLRSGYLLPDTKAYGDRIERMLRLSLNIDPDAKVEEEPEEEPEETAEDTTEDTEQDEDEEMDVGTDEEEETAKMS

SEQ ID NO: 35514 - protein, 12 aa, Homo sapiens
MLLSAKQLGTVC

SEQ ID NO: 35515 - protein, 67 aa, Homo sapiens
LAVSFLLVFVETVCRTAEKMEDGRALEGTLSELAAETDLPVVFVKQRKIGGHGPTLKCFVLKEEPWP

SEQ ID NO: 35516 - protein, 566 aa, Homo sapiens
LAVSFLLVFVETVCRTAEKMEDGRALEGTLSELAAETDLPVVFVKQRKIGGHGPTLKAYQEGRLQKLLKMNGPEDLPKSYDYDLIIIGGGSGGLAAAKEAAQYGKKVMVLDFVTPTPLGTRWGLGGTCVNVGCIPKKLMHQAALLGQALQDSRNYGWKVEETVKHDWDRMIEAVQNHIGSLNWGYRVALREKKVVYENAYGQFIGPHRIKATNNKGKEKIYSAERFLIATGERPRYLGIPGDKEYCISSDDLFSLPYCPGKTLVVGASYVALECAGFLAGIGLDVTVMVRSILLRGFDQDMANKIGEHMEEHGIKFIRQFVPIKVEQIEAGTPGRLRVVAQSTNSEEIIEGEYNTVMLAIGRDACTRKIGLETVGVKINEKTGKIPVTDEEQTNVPYIYAIGDILEDKVELTPVAIQAGRLLAQRLYAGSTVKCDYENVPTTVFTPLEYGACGLSEEKAVEKFGEENIEVYHSYFWPLEWTIPSRDNNKCYAKIICNTKDNERVVGFHVLGPNAGEVTQGFAAALKCGLTKKQLDSTIGIHPVCAEVFTTLSVTKRSGASILQAGC

SEQ ID NO: 35517 - protein, 25 aa, Homo sapiens
VMAVETLSPDWEFDRVDDGSQTFAL

SEQ ID NO: 35518 - protein, 131 aa, Homo sapiens
LTALTTARRLLPYEQSSLLELIKTENKVLNKVITVYAALCCEIKKLKYEAETKFYNGLLFYGEGATDASMVEGDCQIQMGRFISFLQELSCFVTRCYEVVMNVVHQLAALYISNKIAPKIIETTGVHFQVF

SEQ ID NO: 35519 - protein, 87 aa, Homo sapiens
MGVAYILKLLDQYREFDSLHWFQSVREKYLKEIRAVAKQQNVQSASQDEKLLQTMNLTQKRLDVYLQVERSLRVTSALTYHLISMTS

SEQ ID NO: 35520 - protein, 59 aa, Homo sapiens
LLTLLLPLSLLFSSQPLPFNSLFVFSFQNGVVHRDLKLENILLDDNCNIKMLEDSYGGC

SEQ ID NO: 35521 - protein, 37 aa, Homo sapiens
VTVLCSVRGRPESPDPGSLRRRSPLVYVLDPGFHASP

SEQ ID NO: 35522 - protein, 51 aa, Homo sapiens
LYWLLFFLNKPSCMTLDQLPEFSLGVNSGWTTDNCFRAAFQNTGYSSLIGT

SEQ ID NO: 35523 - protein, 120 aa, Homo sapiens
VSRPLPLLLGVFLTSGAAAVRARKTPRLARRSAQPAGFLWKSGGPTVNVRPFDRSWRSSVDPRFSLLINVGQFETGSRAYVLRKKNFIETSGGVEKTILTITVYYRSEFHSPKMLKKQAS

SEQ ID NO: 35524 - protein, 107 aa, Homo sapiens
VTNLLGPSVPARAVVAARAPGTCSGSGGPRPSKLCVASRRLRRARAPKGRHTRTPPTRQPPFIFPLRLRRPRLLRSPPRSHFFLFPLCRPFLTPRVRQFSWKRRCRL

SEQ ID NO: 35525 - protein, 129 aa, Homo sapiens
MVLIDMSVDLSTQVVDHYENPRNVGSLDKTSKNVGTGLVGAPACGDVMKLQIQVDEKGKIVDARFKTFGCGSAIASSSLATEWVKGKTVEEALTIKNTDIAKELCLPPVKLHCSKSVLFPAEEKTQLSP

SEQ ID NO: 35526 - protein, 230 aa, Homo sapiens
MCFLVQKNMQEPIALHEMDTSNGVLLPFYDPDTSIIYLCGKGDSSIRYFEITDESPYVHYLNTFSSKEPQRGMGYMPKRGLDVNKCEIARFFKLHERKCEPIIMTVPRKSDLFQDDLYPDTAGPEAALEAEEWFEGKNADPILISLKHGYIPGKNRDLKVVKKNILDSKPTANKKCDLISIPKKTTDTASVQNEAKLDEILKEIKSIKDTICNQDERISKLEQQMAKIAA

SEQ ID NO: 35527 - protein, 522 aa, Homo sapiens
VAGAVAAARAPPPHGAQCQAGGGSGWRLRPALQRGLRRRRLRHLGPDTMRRVVRQSKFRHVFGQAVKNDQCYDDIRVSRVTWDSSFCAVNPRFVAIIIEASGGGAFLVLPLHKTGRIDKSYPTVCGHTGPVLDIDWCPHNDQVIASGSEDCTVMVWQIPENGLTLSLTEPVVILEGHSKRVGIVAWHPTARNVLLSAGCDNAIIIWNVGTGEALINLDDMHSDMIYNVSWNRNGSLICTASKDKKVRVIDPRKQEIVAEKEKAHEGARPMRAIFLADGNVFTTGFSRMSERQLALWNPKNMQEPIALHEMDTSNGVLLPFYDPDTSIIYLCGKGDSSIRYFEITDESPYVHYLNTFSSKEPQRGMGYMPKRGLDVNKCEIARFFKLHERKCEPIIMTVPRKSDLFQDDLYPDTAGPEAALEAEEWFEGKNADPILISLKHGYIPGKNRDLKVVKKNILDSKPTANKKCDLISIPKKTTDTASVQNEAKLDEILKEIKSIKDTICNQDERISKLEQQMAKIAA

SEQ ID NO: 35528 - protein, 2192 aa, Homo sapiens
MVLLLCLSCLIFSCLTFSWLKIWGKMTDSKPITKSKSEANLIPSQEPFPASDNSGETPQRNGEGHTLPKTPSQAEPASHKGPKDAGRRRNSLPPSHQKPPRNPLSSSDAAPSPELQANGTGTQGLEATDTNGLSSSARPQGQQAGSPSKEDKKQANIKRQLMTNFILGSFDDYSSDEDSVAGSSRESTRKGSRASLGALSLEAYLTTGEAETRVPTMRPSMSGLHLVKRGREHKKLDLHRDFTVASPAEFVTRFGGDRVIEKVLIANNGIAAVKCMRSIRRWAYEMFRNERAIRFVVMVTPEDLKANAEYIKMADHYVPVPGGPNNNNYANVELIVDIAKRIPVQAVWAGWGHASENPKLPELLCKNGVAFLGPPSEAMWALGDKIASTVVAQTLQVPTLPWSGSGLTVEWTEDDLQQGKRISVPEDVYDKGCVKDVDEGLEAAERIGFPLMIKASEGGGGKGIRKAESAEDFPILFRQVQSEIPGSPIFLMKLAQHARHLEVQILADQYGNAVSLFGRDCSIQRRHQKIVEEAPATIAPLAIFEFMEQCAIRLAKTVGYVSAGTVEYLYSQDGSFHFLELNPRLQVEHPCTEMIADVNLPAAQLQIAMGVPLHRLKDIRLLYGESPWGVTPISFETPSNPPLARGHVIAARITSENPDEGFKPSSGTVQELNFRSSKNVWGYFSVAATGGLHEFADSQFGHCFSWGENREEAISNMVVALKELSIRGDFRTTVEYLINLLETESFQNNDIDTGWLDYLIAEKVQAEKPDIMLGVVCGALNVADAMFRTCMTDFLHSLERGQVLPADSLLNLVDVELIYGGVKYILKVARQSLTMFVLIMNGCHIEIDAHRLNDGGLLLSYNGNSYTTYMKEEVDSYRITIGNKTCVFEKENDPTVLRSPSAGKLTQYTVEDGGHVEAGSSYAEMEVMKMIMTLNVQERGRVKYIKRPGAVLEAGCVVARLELDDPSKVHPAEPFTGELPAQQTLPILGEKLHQVFHSVLENLTNVMSGFCLPEPVFSIKLKEWVQKLMMTLRHPSLPLLELQEIMTSVAGRIPAPVEKSVRRVMAQYASNITSVLCQFPSQQIATILDCHAATLQRKADREVFFINTQSIVQLVQRYRSGIRGYMKTVVLDLLRRYLRVEHHFQQAHYDKCVINLREQFKPDMSQVLDCIFSHAQVAKKNQLVIMLIDELCGPDPSLSDELISILNELTQLSKSEHCKVALRARQILIASHLPSYELRHNQVESIFLSAIDMYGHQFCPENLKKLILSETTIFDVLPTFFYHANKVVCMASLEVYVRRGYIAYELNSLQHRQLPDGTCVVEFQFMLPSSHPNRMTVPISITNPDLLRHSTELFMDSGFSPLCQRMGAMVAFRRFEDFTRNFDEVISCFANVPKDTPLFSEARTSLYSEDDCKSLREEPIHILNVSIQCADHLEDEALVPILRTFVQSKKNILVDYGLRRITFLIAQEKEFPKFFTFRARDEFAEDRIYRHLEPALAFQLELNRMRNFDLTAVPCANHKMHLYLGAAKVKEGVEVTDHRFFIRAIIRHSDLITKEASFEYLQNEGERLLLEAMDELEVAFNNTSVRTDCNHIFLNFVPTVIMDPFKIEESVRYMVMRYGSRLWKLRVLQAEVKINIRQTTTGSAVPIRLFITNESGYYLDISLYKEVTDSRSGNIMFHSFGNKQGPQHGMLINTPYVTKDLLQAKRFQAQTLGTTYIYDFPEMFRQALFKLWGSPDKYPKDILTYTELVLDSQGQLVEMNRLPGGNEVGMVAFKMRFKTQEYPEGRDVIVIGNDITFRIGSFGPGEDLLYLRASEMARAEGIPKIYVAANSGARIGMAEEIKHMFHVAWVDPEDPHKGFKYLYLTPQDYTRISSLNSVHCKHIEEGGESRYMITDIIGKDDGLGVENLRGSGMIAGESSLAYEEIVTISLVTCRAIGIGAYLVRLGQRVIQVENSHIILTGASALNKVLGREVYTSNNQLGGVQIMHYNGVSHITVPDDFEGVYTILEWLSYMPKDNHSPVPIITPTDPIDREIEFLPSRAPYDPRWMLAGRPHPTLKGTWQSGFFDHGSFKEIMAPWAQTVVTGRARLGGIPVGVIAVETRTVEVAVPADPANLDSEAKIIQQAGQVWFPDSAYKTAQAVKDFNREKLPLMIFANWRGFSGGMKGCLGTWRDVSWWKIRAMLPMHIGEGSV

SEQ ID NO: 35529 - protein, 322 aa, Homo sapiens
MTLYPLHWQEEMSGESVVSSAVPAAATRTTSFKGTSPSSKYVKLNVGGALYYTTMQTLTKQDTMLKAMFSGRMEVLTDSEGWILIDRCGKHFGTILNYLRDGAVPLPESRREIEELLAEAKYYLVQGLVEECQAALQQNKDTYEPFCKVPVITSSKEEQKLIATSNKPAVKLLYNRSNNKYSYTSNSDDNMLKNIELFDKLSLRFNGRVLFIKDVIGDEICCWSFYGQGRKIAEVCCTSIVYATEKKQTKVEFPEARIYEETLNILLYEAQDGRGPDNALLEATGGAAGRSHHLDEDEERERIERVRRIHIKRPDDRAHLHQ

SEQ ID NO: 35530 - protein, 338 aa, Homo sapiens
MKGVIRVKFVNDLGVDEAGIDQDGVFKEFLEEIIKRVFDPALNLFKTTSGDERLYPSPTSYIHENYLQLFEFVGKMLGKAVYEGIVVDVPFASFFLSQLLGHHHSVFYSSVDELPSLDSEFYKNLTSIKRYDGDITDLGLTLSYDEDVMGQLVCHELIPGGKTIPVTNENKISYIHLMAHFRMHTQIKNQTAALISGFRSIIKPEWIRMFSTPELQRLISGDNAEIDLEDLKKHTVYYGGFHGSHRVIIWLWDILASDFTPDERAMFLKFVTSCSRPPLLGFAYLKPPFSIRCVEVSDDQAVHVQARCFISSLAKGEGKPSGLRSSVCLKPGPLWVLK

SEQ ID NO: 35531 - protein, 151 aa, Homo sapiens
LCAAWGAVLAWGAVLACAGASAPPGSCIPVSRAAALRAWKTGTGFSSTFTGERRPKDDQVFEAVGTTDELSSAIGFALELVTEKGHTFAEELQKIQCTLQDVGSALATPCSSAREAHLKYTTFKAGPILELEQWIDKYTSQLPPLTAFILP

SEQ ID NO: 35532 - protein, 14 aa, Homo sapiens
VCILLTGRDEPFSC

SEQ ID NO: 35533 - protein, 23 aa, Homo sapiens
LKYSSGVMAVGLFAVAHSVVRSC

SEQ ID NO: 35534 - protein, 117 aa, Homo sapiens
MHGLHLEMLMAVALPKNLYLKMWKGPRLIQELSGPASNGGISQTNTYDAQYERAIQESLLTSTEGLCPSALSETSRFDNDLQLAMELSAKELEEWELRLQEEEAELQQVLQLSLTDK

SEQ ID NO: 35535 - protein, 68 aa, Homo sapiens
LYLGLCSLLVGEAEAPSPVDPLERSRPYAVLRGQNLESLSPRLECNGAISARCNLRVWGSSDSPASAP

SEQ ID NO: 35536 - protein, 1126 aa, Homo sapiens
VVCRAPPPPARAGPLIASRERGGGSGAAACPPGGRLRAREALPSGEGREGGSGAPNPPCGARGRARGGCLGEGARGDSAPGEAEAAARGGGESPSAPGLPGWHEPAAGVRGGGEEAAGTGGEAGRAPEAMENAHTKTVEEVLGHFGVNESTGLSLEQVKKLKERWGSNELPAEEGKTLLELVIEQFEDLLVRILLLAACISFVLAWFEEGEETITAFVEPFVILLILVANAIVGVWQERNAENAIEALKEYEPEMGKVYRQDRKSVQRIKAKDIVPGDIVEIAVGDKVPADIRLTSIKSTTLRVDQSILTGESVSVIKHTDPVPDPRAVNQDKKNMLFSGTNIAAGKAMGVVVATGVNTEIGKIRDEMVATEQERTPLQQKLDEFGEQLSKVISLICIAVWIINIGHFNDPVHGGSWIRGAIYYFKIAVALAVAAIPEGLPAVITTCLALGTRRMAKKNAIVRSLPSVETLGCTSVICSDKTGTLTTNQMSVCRMFILDRVEGDTCSLNEFTITGSTYAPIGEVHKDDKPVNCHQYDGLVELATICALCNDSALDYNEAKGVYEKVGEATETALTCLVEKMNVFDTELKGLSKIERANACNSVIKQLMKKEFTLEFSRDRKSMSVYCTPNKPSRTSMSKMFVKGAPEGVIDRCTHIRVGSTKVPMTSGVKQKIMSVIREWGSGSDTLRCLALATHDNPLRREEMHLEDSANFIKYETNLTFVGCVGMLDPPRIEVASSVKLCRQAGIRVIMITGDNKGTAVAICRRIGIFGQDEDVTSKAFTGREFDELNPSAQRDACLNARCFARVEPSHKSKIVEFLQSFDEITAMTGDGVNDAPALKKAEIGIAMGSGTAVAKTASEMVLADDNFSTIVAAVEEGRAIYNNMKQFIRYLISSNVGEVVCIFLTAALGFPEALIPVQLLWVNLVTDGLPATALGFNPPDLDIMNKPPRNPKEPLISGWLFFRYLAIGCYVGAATVGAAAWWFIAADGGPRVSFYQLSHFLQCKEDNPDFEGVDCAIFESPYPMTMALSVLVTIEMCNALNSLSENQSLLRMPPWENIWLVGSICLSMSLHFLILYVEPLPLIFQITPLNVTQWLMVLKISLPVILMDETLKFVARNYLEPAILE

SEQ ID NO: 35537 - protein, 890 aa, Homo sapiens
MGKVYRQDRKSVQRIKAKDIVPGDIVEIAGESVSVIKHTDPVPDPRAVNQDKKNMLFSGTNIAAGKAMGVVVATGVNTEIGKIRDEMVATEQERTPLQQKLDEFGEQLSKVISLICIAVWIINIGHFNDPVHGGSWIRGAIYYFKIAVALAVAAIPEGLPAVITTCLALGTRRMAKKNAIVRSLPSVETLGCTSVICSDKTGTLTTNQMSVCRMFILDRVEGDTCSLNEFTITGSTYAPIGEVHKDDKPVNCHQYDGLVELATICALCNDSALDYNEAKGVYEKVGEATETALTCLVEKMNVFDTELKGLSKIERANACNSVIKQLMKKEFTLEFSRDRKSMSVYCTPNKPSRTSMSKMFVKGAPEGVIDRCTHIRVGSTKVPMTSGVKQKIMSVIREWGSGSDTLRCLALATHDNPLRREEMHLEDSANFIKYETNLTFVGCVGMLDPPRIEVASSVKLCRQAGIRVIMITGDNKGTAVAICRRIGIFGQDEDVTSKAFTGREFDELNPSAQRDACLNARCFARVEPSHKSKIVEFLQSFDEITAMTGDGVNDAPALKKAEIGIAMGSGTAVAKTASEMVLADDNFSTIVAAVEEGRAIYNNMKQFIRYLISSNVGEVVCIFLTAALGFPEALIPVQLLWVNLVTDGLPATALGFNPPDLDIMNKPPRNPKEPLISGWLFFRYLAIGCYVGAATVGAAAWWFIAADGGPRVSFYQLSHFLQCKEDNPDFEGVDCAIFESPYPMTMALSVLVTIEMCNALNSLSENQSLLRMPPWENIWLVGSICLSMSLHFLILYVEPLPLIFQITPLNVTQWLMVLKISLPVILMDETLKFVARNYLEPGKECVQPATKSCSFSACTDGISWPFVLLIMPLVIWVYSTDTNFSDMFWS

SEQ ID NO: 35538 - protein, 39 aa, Homo sapiens
LNVTQWLMVLKISLPVILMDETLKFVARNYLEPVLSSEL

SEQ ID NO: 35539 - protein, 17 aa, Homo sapiens
LKWKAPLVLGSMYISLL

SEQ ID NO: 35540 - protein, 49 aa, Homo sapiens
MFRMVLLFIKSLSNFGLFRNLKQCNWSDVVPCTNDSYVRKFTCNIYLYF

SEQ ID NO: 35541 - protein, 197 aa, Homo sapiens
VVVGWLFTDWISYPFKLVLVLGDLHIPHRCNSLPAKFKKLLVPGKIQHILCTGNLCTKESYDYLKTLAGDVHIVRGDFDENLNYPEQKVVTVGQFKIGLIHGHQVIPWGDMASLALLQRQFDVDILISGHTHKFEAFEHENKFYINPGSATGAYNALETNIIPSFVLMDIQASTVVTYVYQLIGDDVKVERIEYKKP

SEQ ID NO: 35542 - protein, 85 aa, Homo sapiens
MGCRGNKLFVLSYCTCLTWLLGTKSQKNPFQVCMSGGWAVSRLETGFQALHDGRASSPLSAACVLDRTVARRWKPPSVPLAHHTK

SEQ ID NO: 35543 - protein, 622 aa, Homo sapiens
LPHPGFAPVSLRQLLAASQAPSRDAPRLAVAVAGQRAVHVAGLAGTPWEMRPRGLPPLLVVLLGCWASVSAQTDATPAVTTEGLNSTEAALATFGTFPSTRPPGTPRAPGPSSGPRPTPVTDVAVLCVCDLSPAQCDINCCCDPDCSSVDFSVFSACSVPVVTGDSQFCSQKAVIYSLNFTANPPQRVFELVDQINPSIFCIHITNYKPALSFINPEVPDENNFDTLMKTSDGFTLNAESYVSFTTKLDIPTAAKYEYGVPLQTSDSFLRFPSSLTSSLCTDNNPAGQAYWFTPVIPALWEAEARGSLEVPDSRKKVPITVQSIVIQSLNKTLTRREDTDVLQPTLVNAGHFSLCVNVVLEVKYSLTYTDAGEVTKADLSFVLGTVSSVVVPLQQKFEIHFLQENTQPVPLSGNPGYVVGLPLAAGFQPHKMSGIIQTTNRYGQLTILHSTTEQDCLALEGVRTPVLFGYTMQSGCKLRLTGALPCQLVAQKVKSLLWGQGFPDYVAPFGNSQAQDMLDWVPIHFITQSFNRKDSCQLPGALVIEVKWTKYGSLLNPQAKIVNVTANLISSSFPEANSGNERTILISTAVTFVDVSAPAEAGFRAPPAINARLPFNFFFPFV

SEQ ID NO: 35544 - protein, 636 aa, Homo sapiens
LPHPGFAPVSLRQLLAASQAPSRDAPRLAVAVAGQRAVHVAGLAGTPWEMRPRGLPPLLVVLLGCWASVSAQTDATPAVTTEGLNSTEAALATFGTFPSTRPPGTPRAPGPSSGPRPTPVTDVAVLCVCDLSPAQCDINCCCDPDCSSVDFSVFSACSVPVVTGDSQFCSQKAVIYSLNFTANPPQRVFELVDQINPSIFCIHITNYKPALSFINPEVPDENNFDTLMKTSDGFTLNAESYVSFTTKLDIPTAAKYEYGVPLQTSDSFLRFPSSLTSSLCTDNNPAAFLVNQAVKCTRKINLEQCEEIEALSMAFYSSPEILRVPDSRKKVPITVQSIVIQSLNKTLTRREDTDVLQPTLVNAGHFSLCVNVVLEVKYSLTYTDAGEVTKADLSFVLGTVSSVVVPLQQKFEIHFLQENTQPVPLSGNPGYVVGLPLAAGFQPHKGSGIIQTTNRYGQLTILHSTTEQDCLALEGVRTPVLFGYTMQSGCKLRLTGALPCQLVAQKVKSLLWGQGFPDYVAPFGNSQAQDMLDWVPIHFITQSFNRKDSCQLPGALVIEVKWTKYGSLLNPQAKIVNVTANLISSSFPEANSGNERTILISTAVTFVDVSAPAEAGFRAPPAINARLPFNFFFPFV

SEQ ID NO: 35545 - protein, 492 aa, Homo sapiens
LSLRLEYSGMITAHCSLDLLGSVAVLCVCDLSPAQCDINCCCDPDCSSVDFSVFSACSVPVVTGDSQFCSQKAVIYSLNFTANPPQRVFELVDQINPSIFCIHITNYKPALSFINPEVPDENNFDTLMKTSDGFTLNAESYVSFTTKLDIPTAAKYEYGVPLQTSDSFLRFPSSLTSSLCTDNNPAAFLVNQAVKCTRKINLEQCEEIEALSMAFYSSPEILRVPDSRKKVPITVQSIVIQSLNKTLTRREDTDVLQPTLVNAGHFSLCVNVVLEVKYSLTYTDAGEVTKADLSFVLGTVSSVVVPLQQKFEIHFLQENTQPVPLSGNPGYVVGLPLAAGFQPHKGGALPCQLVAQKVKSLLWGQGFPDYVAPFGNSQAQDMLDWVPIHFITQSFNRKHFVLQDSCQLPGALVIEVKWTKYGSLLNPQAKIVNVTANLISSSFPEANSGNERTILISTAVTFVDVSAPAEAGFRAPPAINARLPFNFFFPFV

SEQ ID NO: 35546 - protein, 76 aa, Homo sapiens
LGIQVQFSFSTGLSKQVYLSPSPRFSVGPSERKLQLYWGGKSLSLRRLGPEAGRPVRSLWKSPGQAMVAFQQGQVQ

SEQ ID NO: 35547 - protein, 110 aa, Homo sapiens
LGTVSSVVVPLQQKFEIHFLQDSCQLPGALVIEVKWTKYGSLLNPQAKIVNVTANLISSSFPEANSGNERTILISTAVTFVDVSAPAEAGFRAPPAINARLPFNFFFPFV

SEQ ID NO: 35548 - protein, 17 aa, Homo sapiens
MLPSWGFKNRFLILNSN

SEQ ID NO: 35549 - protein, 44 aa, Homo sapiens
LVCFVCFVLFFETEFRSCCPSRSAMAQSRLTATSASQVQVTLLP

SEQ ID NO: 35550 - protein, 54 aa, Homo sapiens
MADLDKLNIDSIIQRLLEDGVSLCRPGWSAVARSQLTATSTSRVQAILLPQPPQ

SEQ ID NO: 35551 - protein, 1271 aa, Homo sapiens
MRSAAAAPRSPAVATESRRFAAARWPGWRSLQRPARRSGRGGGGAAPGPYPSAAPPPPGPGPPPSRQSSPPSASDCFGSNGNGGGAFRPGSRRLLGLGGPPRPFVVLLLPLASPGAPPAAPTRASPLGARASPPRSGVSLARPAPGCPRPACEPVYGPLTMSLKPQQQQQQQQQQQQQQQQQQQQQQQPPPAAANVRKPGGSGLLASPAAAPSPSSSSVSSSSATAPSSVVAATSGGGRPGLGRGRNSNKGLPQSTISFDGIYANMRMVHILTSVVCDLVLDAAHEKSTESSSGPKREEIMESILFKCSDFVVVQFKDMDSSYAKRDAFTDSAISAKVNGEHKEKDLEPWDAGELTANEELEALENDVSNGWDPNDMFRYNEENYGVVSTYDSSLSSYTVPLERDNSEEFLKREARANQLAEEIESSAQYKARVALENDDRSEEEKYTAVQRNSSEREGHSINTRENKYIPPGQRNREVISWGSGRQNSPRMGQPGSGSMPSRSTSHTSDFNPNSGSDQRVVNGGVPWPSPCPSPSSRPPSRYQSGPNSLPPRAATPTRPPSRPPSRPSRPPSHPSAHGSPAPVSTMPKRMSSEGPPRMSPKAQRHPRNHRVSAGRGSISSGLEFVSHNPPSEAATPPVARTSPSGGTWSSVVSGVPRLSPKTHRPRSPRQNSIGNTPSGPVLASPQAGIIPTEAVAMPIPAASPTPASPASNRAVTPSSEAKDSRLQDQRQNSPAGNKENIKPNETSPSFSKAENKGISPVVSEHRKQIDDLKKFKNDFRLQPSSTSESMDQLLNKNREGEKSRDLIKDKIEPSAKDSFIENSSSNCTSGSSKPNSPSISPSILSNTEHKRGPEVTSQGVQTSSPACKQEKDDKEEKKDAAEQVRKSTLNPNAKEFNPRSFSQPKPSTTPTSPRPQAQPSPSMVGHQQPTPVYTQPVCFAPNMMYPVPVSPGVQPLYPIPMTPMPVNQAKTYRAVPNMPQQRQDQHHQSAMMHPASAAGPPIAATPPAYSTQYVAYSPQQFPNQPLVQHVPHYQSQHPHVYSPVIQGNARMMAPPTHAQPGLVSSSATQYGAHEQTHAMYVSTGSLAQQYAHPNATLHPHTPHPQPSATPTGQQQSQHGGSHPAPSPVQHHQHQAAQALHLASPQQQSAIYHAGLAPTPPSMTPASNTQSPQNSFPAAQQTVFTIHPSHVQPAYTNPPHMAHVPQAHVQSGMVPSHPTAHAPMMLMTTQPPGGPQAALAQSALQPIPVSTTAHFPYMTHPSVQAHHQQQL

SEQ ID NO: 35552 - protein, 172 aa, Homo sapiens
MVGHQQPTPVYTQPVCFAPNMMYPVPVSPGVQPLYPIPMTPMPVNQAKTYRAGKVPNMPQQRQDQHHQSAMMHPASAAGPPIAATPPAYSTQYVAYSPQQFPNQPLVQHVPHYQSQHPHVYSPVIQGNARMMAPPTHAQPGLVSSSATQYGAHEQTHAMYGRKHFVCLFQCV

SEQ ID NO: 35553 - protein, 75 aa, Homo sapiens
VTADSGRSPLSLTYLPLQEPGDMAAAVPRAAFLSPLLPLLLGFLLLSAPHGGSGLHTKGALPLDTVTFYKIMVTS

SEQ ID NO: 35554 - protein, 283 aa, Homo sapiens
VTADSGRSPLSLTYLPLQEPGDMAAAVPRAAFLSPLLPLLLGFLLLSAPHGGSGLHTKGALPLDTVTFYKVIPKSKFVLVKFDTQYPYGEKQDEFKRLAENSASSDDLLVAEVGISDYGDKLNMELSEKYKLDKESYPVFYLFRDGDFENPVPYTGAVKVGAIQRWLKGQGVYLGMPGCLPVYDALAGEFIRASGVEARQALLKQGQDNLSSVKETQKKWAEQYLKIMGKILDQGEDFPASEMTRIARLIEKNKMSDGKKEELQKSLNILTAFQKKGAEKEEL

SEQ ID NO: 35555 - protein, 55 aa, Homo sapiens
LQEPGDMAAAVPRAAFLSPLLPLLLGFLLLSAPHGGSGLHTKGALPLDTVTFYKN

SEQ ID NO: 35556 - protein, 42 aa, Homo sapiens
LLPLLLGFLLLSAPHGGSGLHTKGALPLDTVTFYKGPLGKGN

SEQ ID NO: 35557 - protein, 4506 aa, Homo sapiens
LVAERQRRILLLRAAAAAAAAAAAGPGSPGPGSGVWRLGPPRAELHGRGSKWGAAGGRGGRCHGLVIAAAPAPFPPAGRLLLSAKPSAGAMGSSAAAAAAAAAAADSAQWLSVKEETIFLHDGLIRVTDLAELPSEILGAPEAADTDLEILTFETKNPSELAERLRSVCGNQSNAYARLLEYRLNALRGLWNAQRQLALEEQHERESSGDEETLALLKRQGLLQQPEQAPFTSRMGLLLVFPLIQSQSRTDPSLCNITAEVLLNCLRDCQPLSLTKEPADCLNGIETLLCSWLEETSDTGRHIPHKQKENAAAALVALACARGSLKTFVHTVHLLQKQTDLGSLPVADVLYRLLLLEGGPGSPSCLLGGKHIVSWGYEDMLPAPDSNTGSSSENKDADLGRCLTADGLYLYTTNSVGRGVSKLGSGLHGTLRGFVYCRNEELEPGWVAFGSGSLLHRPVSFDNKPHSLFQVIDQNTLQVCQVVPMPANHLPIGSTMSTVHLSSDGTYFYWIWSPASLNEKTPKGHSVFMDIFELVVENGVFVANPLQERTILMRKEGESAKSINEMLLSRLSRYRASPSATLAALTGSTISNTLKEDQAANTSCGLPLKMLRKTPIYTCGTYLVMLVPPPGGSGSSATRSLFGGTSGLSSLKILASSLVYNISDGQFTSRADLIDAAGSSLGRGALVPGLGACYDTVNNMLWTCSNDYIDQWCNPGNQAFHYVCQRLGVSHIITEPKEEAITTNEVINQLLHHVGAMCIHQLNLLATNPNLPITSVLGKQHPIEAHHLSSICDIMEKAMVNGDTCIIRCILVVFQVVFKFFFSPQTERNRDIIRRSGLLLWQLLMAPKDQICPEIQKEVCLAISSGLNILYPGETEINNLLKLVLTEGERNSGLSQLRDVILTNLAEQLQNNRFGSDEDDHYRLNDELLHYILKIVVRESCILITKCQTVSKDDFQKLLSTVPAASSCLRYLMAVQNHLLSNTILIKPDENDDSDSSLQGETLKELKVSILALATQILTGCDEVLEMLQQVTTALINSDIADREQRLKGLEQVTKATMLGHLLPVLLTSLMHPNLQTLIMADALMPQLVQLVLYTSQTALLLKTQCPVFAEVGCSPCGAPDQKCRLFPDERMLEEKEEPGFLTGLKIPAPWAAGKTVETVHPVRDNYKFKETVHIPGARCLYLRFDSRCSSQYDYDKLVIYAGPNTNSRKVAEYGGNTLGYGSRSVLGTGWPKDLVKVEGDTVTFSFEMRSGREHNTPDKAMWGFACTVRAQESSEDVSGGLPFLVDLALGLSVLACSMLRILYNGPEITKEEEACQELLRSKLLQRCQWQVEANGVISPALTPSPSPLPLTIEEDREFTYPSDVLVPPVGNYFDLPRIRLPPGIMIKLREISGRARPQFRPSIKEVIQPDVMEEMVVSCVIKHLNLVDALQSLINFQYQEEHAEEYDLLCKIMGETFKKLNAMERQLQSVAELEQKWQSEVDDAMQGKLENNMPFFYDYHFNENKMKELELLCSMKEVSFDGNDLENMVLSLREKFLQEVNSLIQKPSHPLAKTKTLVKSLMNRAELLLHVTIAAQSGLTRSISGTPAETPACKSASETKVISHAVRQPVFLRSMSAPSDLEMIGNEDLEFTRANQRRRHVTSHRSSSFTLLQSLAIEDSRDKPTYSVLLGQLFAFIGTNPDQAVSSSSFLLAAQTRWRRGNTRKQALVHMRELLTAAVRVGGVTHLVGPVTMVLQGGPRIEELTCGGMVEQVQEAFGETMTSVVSLCARYPIACANSIGLLCTIPYTRSEEKCLVRSGLVQLMDRLCSLSNQTESSSSEKQTKKQKVATMAWAAFQVLANRCVEWEKEEGGSTEAVHSGLARQVSSLLTNHLARATECCGNQAAGNDALQDVLSLLNDLSRSHIGKAILSQPACVSKLLSLLLDQRPSPKLVLIILQLCRAALPLMSVEDCGNVELPPWSYSVPSLNSEQEDPSDPASKIASLLLAKLADYVVPGCQTVLSPTASEPDTTLTKTSPKNSLKGDKDPGEESEAVDGKLSIFIHKREDQSSHEVLQPLLSSSEGRPFRLGTGANMEKVVKMDRDMTKGGCCEVITEEAAAALRKATKWAQSGLIVSIGPPVESINPETVSGLSTGDKKKTAQTSICRERNSELARTDPVRPFISGHVANSMAAEVIALLHSLLMAPESNAAQIWTTTAEKVLSRALMYIPQLGKYAESILENGSSSGRKLAKLQRIARQAVAALCALGGFKETIKIGSEVQVLGRGISGSIGVVASINEQEGIATVRFPPIDCRKTSQASDTLTIPLSRLCVPRSEALPLHKLSITEKVVQAVQSMLLPQEGSLSIHTSLPATGDGSAPVMAVVRLLAEIRTRACLVMAQLLEDSLFCEEFIQQCPAAVEVLNLVAQECSAGERLAVVEVQCERLRMLYRDCARPPPPPLQADRRQPKEITWSPSRVFPPVRACMFSSHLTSVTFLADPSAGGGLPRGTFIYATSPLPVQAPSFYWEIEIVSYGDTDDDTGPIVSFGFTTEAEKRDGAWTNPVGTCLFHNNGRAVHYNGSSLLQWKSVRLDVTLSPGDVAGIGWERTEGTPPPPGQPAKGRVYFTYCGQRLSPYLEDVSGGMWPVVHIQKKNTKTRANFGSRPFAYAEGQAHRNAADLCTDLAEEISANFEALPFAMASDSDNDAGTSIASDPGTHGPPCRIAAVATAQQQYDSDTSCHYKVELSYENFITSGPDPHPPPIADDESDDDDDDDIPQEDHYALLVKAWETKVFPTIRRRFRNEAERKSGLDQIKGALQLGMVDIARQTVEFLYEENGGIPRDLYLPTIEDIKDEANKFTIDKVRKGLTVVTRSPDSNNVASSAVGTALPKFAIRGMLKTFGLHGVVLDVDSVNELVQVETYLRSEGVLVRYWYPIDMLERPPAGYRRTATNGLVTLDNTNLQIHRELLRCEAALARLYCRMALLNIFAPKLPHLFTRLFHIPAIRDITLEHLQLLSNQLLAPPLPDGTISSSSILLAQSLQHCIHSQNCSATDLFYQGNSQTVREWLNVAITRTLHQGEESLLELTKQICSFLQTAPEQFPSEEFPISESKVNMDVNFPGAAFVVVSCKESQSGFRKDSSLYKAPWARVLVYGLGHKVKRNGQLNLIEAACYPRDASPANTGLAPPPTADQYPSVVLSTDRVHIKLGVSPPPGAVLVLHSLPLEFPLAMAFAEQLLSWKSEDSEGKSEDEPDTIPTSVLLQVVELLGNFLWTTDMAACVKELVFHLLAELLRTVHTLEQRRHPAGLSSSIALQLNPCLAMLMALQSELHKLYDEETQNWVSGGACGGSGGAAAGDQGRFSTYFHALMEGCLAVAEVTLPTNMSVTASGVTSATAPNLSDSSSSSSSSPGQTPQSPSLLSKRKKVKMKREKASSSGKRQSSRTVDSDPTVLSIGGSKPEDMLWFHRALTLLIILRHLTRKDPQGLGVTSDAIADACQALVGPTAHSRLLVISGIPTHLDEGVVRGAIRKACNAHGGVFKDEIYIPLQEEDTKKPKDKAEGGDGKVEPEKTLAFPGTDSMEVSTSSSLTPAMSISASASTSQASICSSQGISQTVSDLSVDPLPAGLELPIPPGLLEPHAVSSQESLDISLCSTGSLGSLGSLGEPLDNAETASVSDMGSMYTVTSLDNQPLAARPIKGFAVVEIRSRAKIEKIRASLFNNNDLIGLSSLDGEDELMEMSTEEILTVSVVNQSLFDTQGSPGLEDYFNDKSIKGEKLVPGAREVLTEIFKSCAHSEQTLSLTPAKPIRVSDIYLSKEQINSQTPGNLLHLFFTNVRPPKKVLEDQLTQILRKYGVPKPKFDKSKYSKAGKEQHPVKVVSTKRPITKPPAKDKAVLNSVSRTALSEKKPTVKPKSPEKSKPDEKDPEKSPTKKQEVPEEKYLTLEGFHKFVIDRARQDIRSVWRAILSCGYDLHFERCACIDVRHAQKASRKWTLEMDVALVQYINQLCRHLAITPARLHPHEVYLDPADAADPRVACLLNVPIESLRLRFALLQSLNTTLETFFLPLVELRQTPMYTHSIAALLKEAKGLIFYDTKVTVMNRVLNATVQRTADHAAPEITLDPLEIVGGEIRASENSYFCQAARQLASVPSSQLCVKLASGGDPTYAFNIRFTGEEVHGTSGSFRHFLWQVCKELQSSSLSLLLLCPSSAVNKNKGKYILTPSPITYGEEQLLHFLGQLLGIAIRADVPLPLDLLPSFWKTLVGEPLDPEQDLQEADILTYNYVKKFESINDETELEALCAEIASQHLATESPDSPNKPCCRFTYLTMTGEEVELCSRGRHILVAWENKDIYAAAIRSLRLRELQNVECVTAVRAGLGSIIPLQLLTMLSPLEMELRTCGLPYINLEFLKAHTMYQVGLMETDQHIEFFWGALEMFTQEELCKFIKFACNQERIPFTCPCKDGGPDTAHVPPYPMKIAPPDGTAGSPDSRYIRVETCMFMIKLPQYSSLEIMLEKLRCAIHYREDPLSG

SEQ ID NO: 35558 - protein, 13 aa, Homo sapiens
LMCLCVYVCALVL

SEQ ID NO: 35559 - protein, 18 aa, Homo sapiens
MQQAHSAPSLGARCPRQM

SEQ ID NO: 35560 - protein, 211 aa, Homo sapiens
VGGERPLDFSFSFLALGSSKNSSASHPTIHCLAGSQLRAMGNGESQLSSVPAQKLGWFIQEYLKPYEECQTLIDEMVNTICDVLQEPEQFPLVQGVAIGGSYGRKTVLRGNSDGTLVLFFSDLKQFQDQKRSQRDILDKTGDKLKFCLFTKWLKNNFEIQKSLDGFTIQVFTKNQRISFEVLAAFNALSKHCWVSGEKSQRSGCQTALCNL

SEQ ID NO: 35561 - protein, 758 aa, Homo sapiens
VGGERPLDFSFSFLALGSSKNSSASHPTIHCLAGSQLRAMGNGESQLSSVPAQKLGWFIQEYLKPYEECQTLIDEMVNTICDVLQEPEQFPLVQGVAIGGSYGRKTVLRGNSDGTLVLFFSDLKQFQDQKRSQRDILDKTGDKLKFCLFTKWLKNNFEIQKSLDGFTIQVFTKNQRISFEVLAAFNALSLNDNPSPWIYRELKRSLDKTNASPGEFAVCFTELQQKFFDNRPGKLKDLILLIKHWHQQCQKKIKDLPSLSPYALELLTVYAWEQGCRKDNFDIAEGVRTVLELIKCQEKLCIYWMVNYNFEDETIRNILLHQLQSARPVILDPVDPTNNVSGDKICWQWLKKEAQTWLTSPNLDNELPAPSWNVLPAPLFTTPGHLLDKFIKEFLQPNKCFLEQIDSAVNIIRTFLKENCFRQSTAKIQIVRGGSTAKGTALKTGSDADLVVFHNSLKSYTSQKNERHKIVKEIHEQLKAFWREKEEELEVSFEPPKWKAPRVLSFSLKSKVLNESVSFDVLPAFNALGQLSSGSTPSPEVYAGLIDLYKSSDLPGGEFSTCFTVLQRNFIRSRPTKLKDLIRLVKHWYKECERKLKPKGSLPPKYALELLTIYAWEQGSGVPDFDTAEGFRTVLELVTQYQQLCIFWKVNYNFEDETVRKFLLSQLQKTRPVILDPAEPTGDVGGGDRWCWHLLAKEAKEWLSSPCFKDGTGNPIPPWKVPTMQTPGSCGARIHPIVNEMFSSRSHRILNNNSKRNF

SEQ ID NO: 35562 - protein, 814 aa, Homo sapiens
LESLWLGAMAKSSSLNVRVVEGRALPAKDVSGSSDPYCLVKVDDEVVARTATVWRSLGPFWGEEYTVHLPLDFHQLAFYVLDEDTVGHDDIIGKISLSREAITADPRGIDSWINLSRVDPDAEVQGEICLSVQMLEDGQGRCLRCHVLQARDLAPRDISGTSDPFARVFWGSQSLETSTIKKTRFPHWDEVLELREMPGAPSPLRVELWDWDMVGKNDFLGMVEFSPKTLQQKPPKGWFRLLPFPRAEEDSGGNLGALRVKVRLIEDRVLPSQCYQPLMELLMESVQGPAEEDTASPLALLEELTLGDCRQDLATKLVKLFLGRGLAGRFLDYLTRREVARTMDPNTLFRSNSLASKSMEQFMKLVGMPYLHEVLKPVISRVFEEKKYMELDPCKMDLGRTRRISFKGALSEEQMRETSLGLLTGYLGPIVDAIVGSVGRCPPAMRLAFKQLHRRVEERFPQAEHQQDVKYLAISGFLFLRFFAPAILTPKLFDLRDQHADPQTSRSLLLLAKAVQSIGNLGQQLGQGKELWMAPLHPFLLQCVSRVRDFLDRLVDVDGDEEAGVPARALFPPSAIVREGYLLKRKEEPAGLATRFAFKKRYVWLSGETLSFSKSPEWQMCHSIPVSHIRAVERVDEGAFQLPHVMQVVTQDGTGALHTTYLQCKNVNELNQWLSALRKASAPNPNKLAACHPGAFRSARWTCCLQAERSAAGCSRTHSAVTLGDWSDPLDPDAEAQTVYRQLLLGRDQLRLKLLEDSNMDTTLEADTGACPEVLARQRAATARLLEVLADLDRAHEEFQQQERGKAALGPLGP

SEQ ID NO: 35563 - protein, 812 aa, Homo sapiens
LESLWLGAMAKSSSLNVRVVEGRALPAKDVSGSSDPYCLVKVDDEVVARTATVWRSLGPFWGEEYTVHLPLDFHQLAFYVLDEDTVGHDDIIGKISLSREAITADPRGIDSWINLSRVDPDAEVQGEICLSVQMLEDGQGRCLRCHVLQARDLAPRDISGTSDPFARVFWGSQSLETSTIKKTRFPHWDEVLELREMPGAPSPLRVELWDWDMVGKNDFLGMVEFSPKTLQQKPPKGWFRLLPFPRAEEDSGGNLGALRVKVRLIEDRVLPSQCYQPLMELLMESVQGPAEEDTASPLALLEELTLGDCRQDLATKLVKLFLGRGLAGRFLDYLTRREVARTMDPNTLFRSNSLASKSMEQFMKLVGMPYLHEVLKPVISRVFEEKKYMELDPCKMDLGRTRRISFKGALSEEQMRETSLGLLTGYLGPIVDAIVGSVGRCPPAMRLAFKQLHRRVEERFPQAEHQDVKYLAISGFLFLRFFAPAILTPKLFDLRDQHADPQTSRSLLLLAKAVQSIGNLGQQLGQGKELWMAPLHPFLLQCVSRVRDFLDRLVDVDGDEAGVPARALFPPSAIVREGYLLKRKEEPAGLATRFAFKKRYVWLSGETLSFSKSPEWQMCHSIPVSHIRAVERVDEGAFQLPHVMQVVTQDGTGALHTTYLQCKNVNELNQWLSALRKASAPNPNKLAACHPGAFRSARWTCCLQAERSAAGCSRTHSAVTLGDWSDPLDPDAEAQTVYRQLLLGRDQLRLKLLEDSNMDTTLEADTGACPEVLARQRAATARLLEVLADLDRAHEEFQQQERGKAALGPLGP

SEQ ID NO: 35564 - protein, 784 aa, Homo sapiens
LESLWLGAMAKSSSLNVRVVEGRALPAKDVSGSSDPYCLVKVDDEVVARTATVWRSLGPFWGEEYTVHLPLDFHQLAFYVLDEDTVGHDDIIGKISLSREAITADPRGIDSWINLSRVDPDAEVQGEICLSVQMLEDGQGRCLRCHVLQARDLAPRDISGTSDPFARVFWGSQSLETSTIKKTRFPHWDEVLELREMPGAPSPLRVELWDWDMVGKNDFLGMVEFSPKTLQQKPPKGWFRLLPFPRAEEDSGGNLGALRVKVRLIEDRVLPSQCYQPLMELLMESVQGPAEEDTASPLALLEELTLGDCRQDLATKLVKLFLGRGLAGRFLDYLTRREVARTMDPNTLFRSNSLASKSMEQFMKLVGMPYLHEVLKPVISRVFEEKKYMELDPCKMDLGRTRRISFKGALSEEQMRETSLGLLTGYLGPIVDAIVGSVGRCPPAMRLAFKQLHRRVEERFPQAEHQDVKYLAISGFLFLRFFAPAILTPKLFDLRDQHADPQTSRSLLLLAKAVQSIGNLGQQLGQGKELWMAPLHPFLLQCVSRVRDFLDRLVDVDGDEAGVPARALFPPSAIVREGYLLKRKEEPAGLATRFAFKKRYVWLSGETLSFSKSPEWQVVTQDGTGALHTTYLQCKNVNELNQWLSALRKASAPNPNKLAACHPGAFRSARWTCCLQAERSAAGCSRTHSAVTLGDWSDPLDPDAEAQTVYRQLLLGRDQLRLKLLEDSNMDTTLEADTGACPEVLARQRAATARLLEVLADLDRAHEEFQQQERGKAALGPLGP

SEQ ID NO: 35565 - protein, 813 aa, Homo sapiens
LESLWLGAMAKSSSLNVRVVEGRALPAKDVSGSSDPYCLVKVDDEVVARTATVWRSLGPFWGEEYTVHLPLDFHQLAFYVLDEDTVGHDDIIGKISLSREAITADPRGIDSWINLSRVDPDAEVQGEICLSVQMLEDGQGRCLRCHVLQARDLAPRDISGTSDPFARVFWGSQSLETSTIKKTRFPHWDEVLELREMPGAPSPLRVELWDWDMVGKNDFLGMVEFSPKTLQQKPPKGWFRLLPFPRAEEDSGGNLGALRVKVRLIEDRVLPSQCYQPLMELLMESVQGPAEEDTASPLALLEELTLGDCRQDLATKLVKLFLGRGLAGRFLDYLTRREVARTMDPNTLFRSNSLASKSMEQFMKLVGMPYLHEVLKPVISRVFEEKKYMELDPCKMDLGRTRRISFKGALSEEQMRETSLGLLTGYLGPIVDAIVGSVGRCPPAMRLAFKQLHRRVEERFPQAEHQDVKYLAISGFLFLRFFAPAILTPKLFDLRDQHADPQTSRSLLLLAKAVQSIGNLGQQLGQGKELWMAPLHPFLLQCVSRVRDFLDRLVDVDGDEEAGVPARALFPPSAIVREGYLLKRKEEPAGLATRFAFKKRYVWLSGETLSFSKSPEWQMCHSIPVSHIRAVERVDEGAFQLPHVMQVVTQDGTGALHTTYLQCKNVNELNQWLSALRKASAPNPNKLAACHPGAFRSARWTCCLQAERSAAGCSRTHSAVTLGDWSDPLDPDAEAQTVYRQLLLGRDQLRLKLLEDSNMDTTLEADTGACPEVLARQRAATARLLEVLADLDRAHEEFQQQERGKAALGPLGP

SEQ ID NO: 35566 - protein, 712 aa, Homo sapiens
LESLWLGAMAKSSSLNVRVVEGRALPAKDVSGSSDPYCLVKVDDEVVARTATVWRSLGPFWGEEYTVHLPLDFHQLAFYVLDEDTVGHDDIIGKISLSREAITADPRGIDSWINLSRVDPDAEVQGEICLSVQMLEDGQGRCLRCHVLQARDLAPRDISGTSDPFARVFWGSQSLETSTIKKTRFPHWDEVLELREMPGAPSPLRVELWDWDMVGKNDFLGMVEFSPKTLQQKPPKGWFRLLPFPRAEEDSGGNLGALRVKVRLIEDRVLPSQCYQPLMELLMESVQGPAEEDTASPLALLEELTLGDCRQDLATKLVKLFLGRGLAGRFLDYLTRREVARTMDPNTLFRSNSLASKSMEQFMKLVGMPYLHEVLKPVISRVFEEKKYMELDPCKMDLGRTRRISFKGALSEEQMRETSLGLLTGYLGPIVDAIVGSVGRCPPAMRLAFKQLHRRVEERFPQAEHQDVKYLAISGFLFLRFFAPAILTPKLFDLRDQHADPQTSRSLLLLAKAVQSIGNLGQQLGQGKELWMAPLHPFLLQCVSRVRDFLDRLVDVDGDEEAGVPARALFPPSAIVREGYLLKRKEEPAGLATRFAFKKRYVWLSGETLSFSKSPEWQMCHSIPVSHIRAVERVDEGAFQLPHVMQVVTQDGTGALHTTYLQCKNVNELNQWLSALRKASAPNPNKLAACHPGAFRSARWTCCLQAERSVPR

SEQ ID NO: 35567 - protein, 531 aa, Homo sapiens
LESLWLGAMAKSSSLNVRVVEGRALPAKDVSGSSDPYCLVKVDDEVVARTATVWRSLGPFWGEEYTVHLPLDFHQLAFYVLDEDTVGHDDIIGKISLSREAITADPRGIDSWINLSRVDPDAEVQGEICLSVQMLEDGQGRCLRCHVLQARDLAPRDISGTSDPFARVFWGSQSLETSTIKKTRFPHWDEVLELREMPGAPSPLRVELWDWDMVGKNDFLGMVEFSPKTLQQKPPKGWFRLLPFPRAEEDSGGNLGALRVKVRLIEDRVLPSQCYQPLMELLMESVQGPAEEDTASPLALLEELTLGDCRQDLATKLVKLFLGRGLAGRFLDYLTRREVARTMDPNTLFRSNSLASKSMEQFMKLVGMPYLHEVLKPVISRVFEEKKYMELDPCKMDLGRTRRISFKGALSEEQMRETSLGLLTGYLGPIVDAIVGSVGRCPPAMRLAFKQLHRRVEERFPQAEHQDVKYLAISGFLFLRFFAPAILTPKLFDLRDQHADPQTSRSLLLLAKAGVQWHDLGLLQPLPPRFK

SEQ ID NO: 35568 - protein, 183 aa, Homo sapiens
LESLWLGAMAKSSSLNVRVVEGRALPAKDVSGSSDPYCLVKVDDEVVARTATVWRSLGPFWGEEYTVHLPLDFHQLAFYVLDEDTVGHDDIIGKISLSREAITADPRGIDSWINLSRVDPDAEVQGEICLSVQMLEDGQGRCLRCHVLQARDLAPRDISGTSDPFARVFWGSQSLETSVSGGE

SEQ ID NO: 35569 - protein, 138 aa, Homo sapiens
VLAMCPSWQAHSTLNRHSPPIFPMRKRIQEEPLSPHPIGNVGPPISGSLRGSLSRCSPVSGLGGRGCRLSLTQAGQHGREVLHEQLHLGGPSTKSHPSPRVTVQPPPLNTRGRPKGRAGTGDPLIKRTVMMVVPRGGD

SEQ ID NO: 35570 - protein, 595 aa, Homo sapiens
VESKGQAPWGQMAGRRLNLRWALSVLCVLLMAETVSGTRGSSTGAHISPQFPASGVNQTPVVDCRKVCGLNVSDRCDFIRTNPDCHSDGGYLDYLEGIFCHFPPSLLPLAVTLYVSWLLYLFLILGVTAAKFFCPNLSAISTTLKLSHNVAGVTFLAFGNGAPDIFSALVAFSDPHTAGLALGALFGAGVLVTTVVAGGITILHPFMAASRPFFRDIVFYMVAVFLTFLMLFRGRVTLAWALGYLGLYVFYVVTVILCTWIYQRQRRGSLFCPMPVTPEILSDSEEDRVSSNTNSYDYGDEYRPLFFYQETTAQILVRALNPLDYMKWRRKSAYWKALKVFKLPVEFLLLLTVPVVDPDKDDQNWKRPLNCLHLVISPLVVVLTLQSGTYGVYEIGGLVPVWVVVVIAGTALASVTFFATSDSQPPRLHWLFAFLGFLTSALWINAAATEVVNILRSLGVVFRLSNTVLGLTLLAWGNSIGDAFSDFTLARQGYPRMAFSACFGGIIFNILVGVGLGCLLQISRSHTEVKLEPDGLLVWVLAGALGLSLVFSLVSVPLQCFQLSRVYGFCLLLFYLNFLVVALLTEFGVIHLKSM

SEQ ID NO: 35571 - protein, 539 aa, Homo sapiens
VESKGQAPWGQMAGRRLNLRWALSVLCVLLMAETVSGTRGSSTGAHISPQFPASGVNQTPVVDCRKVCGLNVSDRCDFIRTNPDCHSDGGYLDYLEGIFCHFPPSLLPLAVTLYVSWLLYLFLILGVTAAKFFCPNLSAISTTLKLSHNVAGVTFLAFGNGAPDIFSALVAFSDPHTAGLALGALFGYLGLYVFYVVTVILCTWIYQRQRRGSLFCPMPVTPEILSDSEEDRVSSNTNSYDYGDEYRPLFFYQETTAQILVRALNPLDYMKWRRKSAYWKALKVFKLPVEFLLLLTVPVVDPDKDDQNWKRPLNCLHLVISPLVVVLTLQSGTYGVYEIGGLVPVWVVVVIAGTALASVTFFATSDSQPPRLHWLFAFLGFLTSALWINAAATEVVNILRSLGVVFRLSNTVLGLTLLAWGNSIGDAFSDFTLARQGYPRMAFSACFGGIIFNILVGVGLGCLLQISRSHTEVKLEPDGLLVWVLAGALGLSLVFSLVSVPLQCFQLSRVYGFCLLLFYLNFLVVALLTEFGVIHLKSM

SEQ ID NO: 35572 - protein, 377 aa, Homo sapiens
VESKGQAPWGQMAGRRLNLRWALSVLCVLLMAETVSGTRGSSTGAHISPQFPASGVNQTPVVDCRKVCGLNVSDRCDFIRTNPDCHSDGGYLDYLEGIFCHFPPSLLPLAVTLYVSWLLYLFLILGVTAAKFFCPNLSAISTTLKLSHNVAGVTFLAFGNGAPDIFSALVAFSDPHTAGLALGALFGYLGLYVFYVVTVILCTWIYQRQRRGSLFCPMPVTPEILSDSEEDRVSSNTNSYDYGDEYRPLFFYQETTAQILVRALNPLDYMKWRRKSAYWKALKVFKLPVEFLLLLTVPVVDPDKDDQNWKRPLNCLHLVISPLVVVLTLQSGTYGVYEIGGLVPVWVVVVIAGTALASVTFFATSDSQPPRLHWVRN

SEQ ID NO: 35573 - protein, 64 aa, Homo sapiens
VESKGQAPWGQMAGRRLNLRWALSVLCVLLMAETVSGTRGSSTGAHISPQFPASVPQGVWPECL

SEQ ID NO: 35574 - protein, 119 aa, Homo sapiens [sequence omitted]

SEQ ID NO: 35575 - protein, 239 aa, Homo sapiens
VRGAGRRLRRVLSRGRWVCVFPSQCAELSASPLSPAPGLPRHSRLHALLGLAMPVDLSKWSGPLSLQEVDEQPQHPLHVTYAGAAVDELGKVLTPTQVKNRPTSISWDGLDSGKLYTLVLTDPDAPSRKDPKYREWHHFLVVNMKGNDISSGTVLSDYVGSGPPKGTGLHRYVWLVYEQDRPLKCDEPILSNRSGDHRGKFKVASFRKKYELRAPVAGTCYQAEWDDYVPKLYEQLSGK

SEQ ID NO: 35576 - protein, 131 aa, Homo sapiens
VRTGPGAVAHACNSSTLGGRVGGITREWHHFLVVNMKGNDISSGTVLSDYVGSGPPKGTGLHRYVWLVYEQDRPLKCDEPILSNRSGDHRGKFKVASFRKKYELRAPVAGTCYQAEWDDYVPKLYEQLSGK

SEQ ID NO: 35577 - protein, 236 aa, Homo sapiens
LFGKWIRRCRSSPKGAADREASTDPARPRAPPPPAMARDYDHLFKLLIIGDSGVGKSSLLLRFADNTFSGSYITTIGVDFKIRTVEINGEKVKLQIWDTAGQERFRTITSTYYRGTHGVIVVYDVTSAESFVNVKRWLHEINQNCDDVCRILVGNKNDDPERKVVETEDAYKFAGQMGIQLFETSAKENVNVEEMFNCITELVLRAKKDNLAKQQQQQQNDVVKLTKNSKRKKRCC

SEQ ID NO: 35578 - protein, 187 aa, Homo sapiens
LFGKWIRRCRSSPKGAADREASTDPARPRAPPPPAMARDYDHLFKLLIIGDSGVGKSSLLLRFADNTFSGSYITTIGVDFKIRTVEINGEKVKLQIWDTAGQERFRTITSTYYRGTHGVIVVYDVTSAESFVNVKRWLHEINQNCDDVCRILDVQLHHGAGPPSKERQPGKTAAATTERCGEAHEEQ

SEQ ID NO: 35579 - protein, 212 aa, Homo sapiens
VMPREDRATWKSNYFLKIIQLLDDYPKCFIVGADNVGSKQMQQIRMSLRGKAVVLMGKNTMMRKAIRGHLENNPALEKLLPHIRGNVGFVFTKEDLTEIRDMLLANKVRGQLGWLKRLCCCSLKQNGPFSGCVSGEAFLTVCCLCQVPAAARAGAIAPCEVTVPAQNTGLGPEKTSFFQALGITTKISRGTIEILVSGPGLPVLTRQMGSCF

SEQ ID NO: 35580 - protein, 173 aa, Homo sapiens
VMPREDRATWKSNYFLKIIQLLDDYPKCFIVGADNVGSKQMQQIRMSLRGKAVVLMGKNTMMRKAIRGHLENNPALEKLLPHIRGNVGFVFTKEDLTEIRDMLLANKVPAAARAGAIAPCEVTVPAQNTGLGPEKTSFFQALGITTKISRGTIEILVSGPGLPVLTRQMGSCF

SEQ ID NO: 35581 - protein, 73 aa, Homo sapiens
LTGDGAANRQERYPRFLIGYFVRIIKGTRGREALLSPGVLVEVTSSLNPAWQSLTHRRDAQGRQGDLEVQLLP

SEQ ID NO: 35582 - protein, 413 aa, Homo sapiens
LPSCFSVGPPMSAPSSTGPQYCPGLPSRKEATPEGRPETCLLPSSPQAQRPIQGLEQRADGERCWAAGWPRDGGRSSPGGQDEGGGSWPLEEVVLLVSISSSVQEGEKYPHPCAARHRTPSLRSPDQPPPCPQFMAQGKTGSSSPPGGPPKPGSQLDSMLGSLQSDLNKLGVATVAKGVCGACKKPIAGQVVTAMGKTWHPEHFVCTHCQEEIGSRNFFERDGQPYCEKDYHNLFSPRCYYCNGPILDKVVTALDRTWHPEHFFCAQCGAFFGPEGFHEKDGKAYCRKDYFDMFAPKCGGCARAILENYISALNTLWHPECFVCRECFTPFVNGSFFEHDGQPYCEVHYHERRGSLCSGCQKPITGRCITAMAKKFHPEHFVCAFCLKQLNKGTFKEQNDKPYCQNCFLKLFC

SEQ ID NO: 35583 - protein, 11 aa, Homo sapiens
MRFIRGAIIAN

SEQ ID NO: 35584 - protein, 155 aa, Homo sapiens
MWKTLTFFVALPGVAVSMLNVYLKSHHGEHERPEFIAYPHLRIRTKGSGRITAAVIEHLERLALVDFGSREAVARLEKAIAFADRLRAVDTDGVEPMESVLEDRCLYLRSDNVVEGNCADELLQNSHRVVEEYFVAPPGNISLPKLDEQEPFPHS

SEQ ID NO: 35585 - protein, 87 aa, Homo sapiens
VNTISELSVCSSGIKILGIAVEEEPKLQRSAIASSQPKSVNCQPAYPKNVKMLHLVKCRGRGEAEGARFICLVYSSCPVMSVILKME

SEQ ID NO: 35586 - protein, 59 aa, Homo sapiens
LVIKILVLFFCLFQEFDKKYNPTWHCIVGRNFGSYVTHETKHFIYFYLGQVAILLFKSG

SEQ ID NO: 35587 - protein, 135 aa, Homo sapiens
LPSILIPAPLILLWVPPAPRAMGPSPFLLSAEVQVPMQMLRVGKAKADVWPKTAPKKDENSLVPPAPVDSDGESDNSDRVPVPSFQNSFSQAIEAAFMKLDTPATSDPLSEEKGGKKRKKQKQKLLFSTSVVHTK

SEQ ID NO: 35588 - protein, 322 aa, Homo sapiens
LPLSLHALGCVILCICMCQCVRACVCVCVCACATQRASHSALPGTTISVKDWRLCLLDQFDACARSGLSEPRSLTLRVPSCGKPLPGPGARLGREVTPCLSFAFAWCWLKMCQEEQTSYMVVQTSEEGLAADAELPGPLLMLAQNCAVMHNLLGPACIFLRKGFAENRQPDRSLRPEEIEELREAFREFDKDKDGYINCRDLGNCMRTMGYMPTEMELIELSQQINMNLGGHVDFDDFVELMGPKLLAETADMIGVKELRDAFREFDTNGDGEISTSELREAMRKLLGHQVGHRDIEEIIRDVDLNGDGRVDFEEFVRMMSR

SEQ ID NO: 35589 - protein, 20 aa, Homo sapiens
MMLNLKVFLFLFLFCGSSKI

SEQ ID NO: 35590 - protein, 602 aa, Homo sapiens
LGPGLGVGGAHRAWLVGFWGGSGCKEFGLCLPAGRQTQPTRWGRRLAWWTRAAWPCGSRAMVSKLSQLQTELLAALLESGLSKEALIQALGEPGPYLLAGEGPLDKGESCGGGRGELAELPNGLGETRGSEDETDDDGEDFTPPILKELENLSPEEAAHQKAVVETLLQEDPWRVAKMVKSYLQQHNIPQREVVDTTGLNQSHLSQHLNKGTPMKTQKRAALYTWYVRKQREVAQQFTHAGQGGLIEEPTGDELPTKKGRRNRFKWGPASQQILFQAYERQKNPSKEERETLVEECNRAECIQRGVSPSQAQGLGSNLVTEVRVYNWFANRRKEEAFRHKLAMDTYSGPPPGPGPGPALPAHSSPGLPPPALSPSKVHGVRYGQPATSETAEVPSSSGGPLVTVSTPLHQVSPTGLEPSHSLLSTEAKLVSAAGGPLPPVSTLTALHSLEQTSPGLNQQPQNLIMASLPGVMTIGPGEPASLGPTFTNTGASTLVIGLASTQAQSVPVINSMGSSLTTLQPVQFSQPLHPSYQQPLMPPVQSHVTQSPFMATMAQLQSPHGERPVPHTAGDDDRGWLSMDAGERGAWQALQSACVSGTSVFP

SEQ ID NO: 35591 - protein, 278 aa, Homo sapiens
VVLPRDHLFLRLGNSFFVMTNFLKTEGQEQRLCPEYPTRRTLCSSDRGCKKGWMDPQSKGIQTGRCVVYEGNQKTCEVSAWCPIEAVEEAPRPALLNSAENFTVLIKNNIDFPGHNYTTRNILPGLNITCTFHKTQNPQCPIFRLGDIFRETGDNFSDVAIQGGIMGIEIYWDCNLDRWFHHCRPKYSFRRLDDKTTNVSLYPGYNFRYAKYYKENNVEKRTLIKVFGIRFDILVFGTGGKFDIIQLVVYIGSTLSYFGLVRDSLFHALGKWFGEGSD

SEQ ID NO: 35592 - protein, 255 aa, Homo sapiens
LRVSLEQRPAFLKAAENFTLLVKNNIWYPKFNFSKRNILPNITTTYLKSCIYDAKTDPFCPIFRLGKIVENAGHSFQDMAVEGGIMGIQVNWDCNLDRAASLCLPRYSFRRLDTRDVEHNVSPGYNFRFAKYYRDLAGNEQRTLIKAYGIRFDIIVFGKAGKFDIIPTMINIGSGLALLGMATVLCDIIVLYCMKKRLYYREKKYKYVEDYEQVGPSWPPAGTGLSSLGCGSPGRGPVWGGPSAEAGTSVAWCPR

SEQ ID NO: 35593 - protein, 46 aa, Homo sapiens
MIQWFLIQTSAAITTVNFTTFSSAQEDTLHSLAVPIQLPHPSNHSE

SEQ ID NO: 35594 - protein, 138 aa, Homo sapiens
VGLGMYSAMMFLFQLILGIPEQALSLLHMAIEPILADGAILDKGRAMFLVAKCQVASAASYDQPKKAEALEAAIENLNEAKNYFAKVDCKERIRDVVYFQARLYHTLGKTQERNRCAMLFRQLHQELPSHGVPLINHL

SEQ ID NO: 35595 - protein, 101 aa, Homo sapiens [sequence omitted]

SEQ ID NO: 35596 - protein, 52 aa, Homo sapiens
LAFLHGNFYVIQRELFLSLFLCARLWTCKIDMEFPLMEITSGWGSQLVKVNT

SEQ ID NO: 35597 - protein, 54 aa, Homo sapiens
VSAHLFMTYLMLGPPSSLEPEASLLCLKVAEAGPVFLGMGPEASGSPSVPTPVI

SEQ ID NO: 35598 - protein, 96 aa, Homo sapiens
LGNLGVMVVSLFLLPFCKLHPHVLLLPLLQTFQGWVGKKAASLRTVYCSGYSNGVIVIKRQKAKIQSNQTKGTRRTSRPTTIENTPHLTLVFAGTS

SEQ ID NO: 35599 - protein, 349 aa, Homo sapiens
LPGPWQFMGDGFSDCFLFLSLFLTIFQHSIIKYRIDKCFVLYLLPTVTITFLLKQTFNKLVGKFSQSIFHLNLTQILSATMEGKLVVWDIHRPPSSASTFLGFPYIKPCKLVHLQKEGITVLTTIDSYIVTGDIKGNIKFYDHTLSIVNWYSHLKLGAIRTLSFSKTPATPPTEKSNYPPDCTLKGDLFVLRNFIIGTSDAAVYHLTTDGTKLEKLFVEPKDAICAISCHPYQPLIAIGSICGMIKVWNYENKQYLFSRVFEKGLGVQSLTYNPEGALLGAGFTEGTVYILDAMSLENESPEPFKYSRTSVTHISFSHDSQYMATAVSIFMDNPSSGLAILFETKRGQT

SEQ ID NO: 35600 - protein, 133 aa, Homo sapiens
LVRAAAATLLTALLPAPGLHRSRQGGAKELLSPPGLQVQGDLRHAPSTRHQGPRTRRCWGTVPKGSAPWIRLGTRCALPSLGRLGLGVSKPTMAQMDVQSPWNFLALPLYCPHHHHPHHCFLPDLRIRNGFSG

SEQ ID NO: 35601 - protein, 88 aa, Homo sapiens
LKQSGSCLVLPHPTCRPAGARQPRAADAPALNSFSSSPQRFQEEREEVKRPETKSSASKELQQAPAVRFEGRMGQATELQSWSQRYHC

SEQ ID NO: 35602 - protein, 186 aa, Homo sapiens
MKSDFYFQKSEPHSLSSEALMRRAVSLVTDSTSTFLSQTTYALIEAITEYTKAVYTLTSLYRQYTSLLGKMNSEEEDEVWQVIIGARAEMTSKHQEYLKLETTWMTAVGLSEMAAEAAYQTGADQASITARNHIQLVKLQVEEVHQLSRKAETKLAEAQIEELRQKTQEEGEERAESEQEAYLRED

SEQ ID NO: 35603 - protein, 242 aa, Homo sapiens
LPAQSRLLPWVGAWLWGEALSGGGRAPLRAHEAASLPACASGVRALHNGGSEELAVAQRNFILQKSEPHSLSSEALMRRAVSLVTDSTSTFLSQTTYALIEAITEYTKAVYTLTSLYRQYTSLLGKMNSEEEDEVWQVIIGARAEMTSKHQEYLKLETTWMTAVGLSEMAAEAAYQTGADQASITARNHIQLVKLQVEEVHQLSRKAETKLAEAQIEELRQKTQEEGEERAESEQEAYLRED

SEQ ID NO: 35604 - protein, 101 aa, Homo sapiens
MNSEEEDEVWQVIIGARAEMTSKHQEYLKLETTWMTAVGLSEMAAEAAYQTEVFSSKLEEEDACHSPLPVNIVLKVLVNAVRSKCSTDELIKCIYPDGEIH

SEQ ID NO: 35605 - protein, 136 aa, Homo sapiens
LMLQLIYILDILHIFFLTNQIDFLNSVIVDLQRKNQDLKMKVEMMSEAALNGNGDDLNNYDSDDQEKQSKKKPRLFCDICDCFDLHDTEDCPTQAQMSEDPPHSTHHGSRGEERPYCEICEMFGHWATNCNDDETF

SEQ ID NO: 35606 - protein, 44 aa, Homo sapiens
LTCFLQVVGSVLYFTNFCLDKLGQPLLNENPQLSEGWEIPKYPT

SEQ ID NO: 35607 - protein, 25 aa, Homo sapiens
MDFFVSAVLCTFVLNLVQLFSSLET

SEQ ID NO: 35608 - protein, 69 aa, Homo sapiens
VVLLLQLYLMSMVHDTYFIFERQSYVSHPPATAALVRAGGRRPAWKSAVAGPPPVAALLLTESVGERSP

SEQ ID NO: 35609 - protein, 40 aa, Homo sapiens
MQSGCVLELRNAGLVACLALITVFVAECCYGDSCQVRSGR

SEQ ID NO: 35610 - protein, 23 aa, Homo sapiens
VAAQLQVLARPGLALWMMMALPP

SEQ ID NO: 35611 - protein, 125 aa, Homo sapiens
LSGVLGFSFFICTVASGGWEAPPGNNPVPPQLEQEVERRQRLGQESAARKALIASSYHPARPEVYDSLQDAALAPEFLAVTEYSVSPDADLKGLLQRLETVSGPSKKEQPLLAFLLGDRGSQSHF

SEQ ID NO: 35612 - protein, 318 aa, Homo sapiens
LSGVLGFSFFICTVASGGWEAPPGNNPVPPQLEQEVERRQRLGQESAARKALIASSYHPARPEVYDSLQDAALAPEFLAVTEYSVSPDADLKGLLQRLETVSEEKRIYRVPVFTAPFCQALLEELEHFEQSDMPKGRPNTMNNYGVLLHELGLDEPLMTPLRERFLQPLMALLYPDCGGGRLDSHRAFVVKYAPGQDLELGCHYDNAELTLNVALGKVFTGGALYFGGLFQAPTALTEPLEVEHVVGQGVLHRGGQLHGARPLGTGERWNLVVWLRASAVRNSLCPMCCREPDLVDDEGFGDGFTREEPATVDVCALT

SEQ ID NO: 35613 - protein, 110 aa, Homo sapiens
LRGLESAEKTGVPSAGARGAMAHVGSRKRSRSRSRSRGRGSEKRKKKSRKDTSRNCSASTSQGRKASTAPGAEGEDHRHRGEEAQLLPGEVGRAVVGDAQSCLCAAGPEM

SEQ ID NO: 35614 - protein, 62 aa, Homo sapiens
LWFCSSGIRGPAYSLLNGDPPTPRLIKGDGEVLEEIVTKERHREINKVGVAPLPAIRPQLCL

SEQ ID NO: 35615 - protein, 65 aa, Homo sapiens
LWFCSSGIRGPAYSLLNGDPPTPRLIKGDGEVLEEIVTKERHREINKQATRGDCLAFQMRAGLLP

SEQ ID NO: 35616 - protein, 135 aa, Homo sapiens
MEVQDLNKEMSKSDFAAATHPRAFYLSKPDETPNAWMSDSGTGLTYWKLEEKDMHHSLPETLEKTFISLSSTDVSPNQSNTSNEMKLPSLKDIYYKKQRENKQLPERNLTSASNPNHPPEVKLSTFCRVNVNNAS

SEQ ID NO: 35617 - protein, 81 aa, Homo sapiens
LVAAYLAAAPAADVRVMQAASRDRYPRERARARRLSSDWLPGRRRRQPRMARASTSPFPLAQLQPKRDIQPRGSDKGAGLL

SEQ ID NO: 35618 - protein, 118 aa, Homo sapiens
VCERETVWLWGRQAGSCRGGLAGSVHSPSTSMATSSQYRQLLSDYGPPSLGYTQGTGNSQVPQSKYAELLAIIEELGKEIRPTYAGSKSAMERLKRGIIHARGLVRECLAETERNARS

SEQ ID NO: 35619 - protein, 191 aa, Homo sapiens
LRRQRGGGGGGGGGCGGRSPGPGFGLSPTMVTLAELLVLLAALLATVSGYFVSIDAHAEECFFERVTSGTKMGLIFEVAEGGFLDIDVEITGPDNKGIYKGDRESSGKYTFAAHMDGTYKFCFSNRMSTMTPKIVMFTIDIGEAPKGQDMETEAHQNKLEEMINELAVAMTAVKHEQEYMEVRERIHRASK

SEQ ID NO: 35620 - protein, 230 aa, Homo sapiens
LRRQRGGGGGGGGGCGGRSPGPGFGLSPTMVTLAELLVLLAALLATVSGYFVSIDAHAEECFFERVTSGTKMGLIFEVAEGGFLDIDVEITGPDNKGIYKGDRESSGKYTFAAHMDGTYKFCFSNRMSTMTPKIVMFTIDIGEAPKGQDMETEAHQNKLEEMINELAVAMTAVKHEQEYMEVRERIHRAINDNTNSRVVLWSFFEALVLVAMTLGQIYYLKRFFEVRRVV

SEQ ID NO: 35621 - protein, 51 aa, Homo sapiens
LAFIFLRWSFALVAQAEVISAHHNLLLLGSSDSPASASGELGLQACTTTPG

SEQ ID NO: 35622 - protein, 395 aa, Homo sapiens
VCGPARLGAAAAHRAPPGAGRPAMGSLFRSETMCLAQLFLQSGTAYECLSALGEKGLVQFRDLNQNVSSFQRKFVGEVKRCEELERILVYLVQEINRADIPLPEGEASPPAPPLKQVLEMQEQLQKLEVELREVTKNKEKLRKNLLELIEYTHMLRVTKTFVKRNVEFEPTYEEFPSLESDSLLDYSCMQRLGAKLGFVSGLINQGKVEAFEKMLWRVCKGYTIVSYAELDESLEDPETGEVIKWYVFLISFWGEQIGHKVKKICDCYHCHVYPYPNTAEERREIQEGLNTRIQDLYTVLHKTEDYLRQVLCKAAESVYSRVIQVKKMKAIYHMLNMCSFDVTNKCLIAEVWCPEADLQDLRRALEEGSVRLPSSPLPGTEERLMELINSEKKRK

SEQ ID NO: 35623 - protein, 879 aa, Homo sapiens
VCGPARLGAAAAHRAPPGAGRPAMGSLFRSETMCLAQLFLQSGTAYECLSALGEKGLVQFRDLNQNVSSFQRKFVGEVKRCEELERILVYLVQEINRADIPLPEGEASPPAPPLKQVLEMQEQLQKLEVELREVTKNKEKLRKNLLELIEYTHMLRVTKTFVKRNVEFEPTYEEFPSLESDSLLDYSCMQRLGAKLGFVSGLINQGKVEAFEKMLWRVCKGYTIVSYAELDESLEDPETGEVIKWYVFLISFWGEQIGHKVKKICDCYHCHVYPYPNTAEERREIQEGLNTRIQDLYTVLHKTEDYLRQVLCKAAESVYSRVIQVKKMKAIYHMLNMCSFDVTNKCLIAEVWCPEADLQDLRRALEEGSRESGATIPSFMNIIPTKETPPTRIRTNKFTEGFQNIVDAYGVGSYREVNPALFTIITFPFLFAVMFGDFGHGFVMFLFALLLVLNENHPRLNQSQEIMRMFFNGRYILLLMGLFSVYTGLIYNDCFSKSVNLFGSGWNVSAMYSSSHPPAEHKKMVLWNDSVVRHNSILQLDPSIPGVFRGPYPLGIDPIWNLATNRLTFLNSFKMKMSVILGIIHMTFGVILGIFNHLHFRKKFNIYLVSIPELLFMLCIFGYLIFMIFYKWLVFSAETSRVAPSILIEFINMFLFPASKTSGLYTGQEYVQRVLLVVTALSVPVLFLGKPLFLLWLHNGRSCFGVNRSGYTLIRKDSEEEVSLLGSQDIEEGNHQVEDGCREMACEEFNFGEILMTQVIHSIEYCLGCISNTASYLRLWALSLAHAQLSDVLWAMLMRVGLRVDTTYGVLLLLPVIALFAVLTIFILLIMEGLSAFLHAIRLHWVEFQNKFYVGAGTKFVPFSFSLLSSKFNNDDSVA

SEQ ID NO: 35624 - protein, 4562 aa, Homo sapiens
LRPFPGRPLLGPPLPRTPALRPAPSALRGAMDDLRVLWMRDRVYAAFGITDPQLFEDLLNRDDGQGEDLILHFLNQASEEEGPSALFIYRTMVPEEVEVEIDEIPVLSEEGEEEEETYSQKVESVDKVRAKRVSLRTESLGQPLNREDEEMDKEISEKLPSKRTAKHIMEKMHLHMLCTPLPEEFLDQNVVFFLRNTKEAISEATDMKEAMEIMPETLEYGIINANVLHFLKNIICQVFLPALSFNQHRTSTTVGVTSGEVSNSSEHESDLPPMPGEAVEYHSIQLIRDEFLMNVQKFASNIQRTMQQLEGEIKLEMPIISVEGEVSDLAADPETVDILEQCVINWLNQISTAVEAQLKKTPQGKGPLAEIEFWRERNATLSALHEQTKLPIVRKVLDVIKESDSMLVANLQPVFTELFKFHTEASDNVRFLSTVERYFKNITHGSGFHVVLDTIPAMMSALRMVWIISRHYNKDERMIPLMERIAWEIAERVCRVVNLRTLFKENRASAQSKTLEARNTLRLWKKAYFDTRAKIEASGREDRWEFDRKRLFERTDYMATICQDLSDVLQILEEFYNIFGPELKAVTGDPKRIDDVLCRVDGLVTPMENLTFDPFSIKSSQFWKYVMDEFKIEVLIDIINKIFVQNLENPPLYKNHPPVAGAIYWERSLFFRIKHTILRFQEVQEILDSDRGQEVKQKYLEVGRTMKEYEDRKYEQWMEVTEQVLPALMKKSLLTKSSIATEEPSTLERGAVFAINFSPALREIINETKYLEQLGFTVPELARNVALQEDKFLRYTAGIQRMLDHYHMLIGTLNDAESVLLKDHSQELLRVFRSGYKRLNWNSLGIGDYITGCKQAIGKFESLVHQIHKNADDISSRLTLIEAINLFKYPAAKSEEELPGVKEFFEHIERERASDVDHMVRWYLAIGPLLTKVEGLVVHTNTGKAPKLASYYKYWEKKIYEVLTKLILKNLQSFNSLILGNVPLFHTETILTAPEIILHPNTNEIDKMCFHCVRNCVEITKHFVRWMNGSCIECPPQKGEEEEVVIINFYNDISLNPQIIEQAVMIPQNVHRILINLMKYLQKWKRYRPLWKLDKAIVMEKFAAKKPPCVAYDEKLQFYSKIAYEVMRHPLIKDEHCIRLQLRHLANTVQENAKSWVISLGKLLNESAKEELYNLHEEMEHLAKNLRKIPNTLEDLKFVLATIAEIRSKSLVMELRYRDVQERYRTMAMYNLFPPDAEKELVDKIESIWSNLFNDSVNVEHALGDIKRTFTELTRGEIMNYRVQIEEFAKRFYSEGPGSVGDDLDKGVELLGVYERELARHEKSRQELANAEKLFDLPITMYPELLKVQKEMSGLRMIYELYEGLKVAKEEWSQTLWINLNVQILQEGIEGFLRALRKLPRPVRGLSVTYYLEAKMKAFKDSIPLLLDLKNEALRDRHWKELMEKTSVFFEMTETFTLENMFAMELHKHTDVLNEIVTAAIKEVAIEKAVKEILDTWENMKFTVVKYCKGTQERGYILGSVDEIIQSLDDNTFNLQSISGSRFVGPFLQTVHKWEKTLSLIGEVIEIWMLVQRKWMYLESIFIGGDIRSQLPEEAKKFDNIDKVFKRIMGETLKDPVIKRCCEAPNRLSDLQNVSEGLEKCQKSLNDYLDSKRNAFPRFFFISDDELLSILGSSDPLCVQEHMIKMYDNIASLRFNDGDSGEKLVSAMISAEGEVMEFRKILRAEGRVEDWMTAVLNEMRRTNRLITKEAIFRYCEDRSRVDWMLLYQGMVVLAASQVWWTWEVEDVFHKAQKGEKQAMKNYGRKMHRQIDELVTRITMPLSKNDRKKYNTVLIIDVHARDIVDSFIRGSILEAREFDWESQLRFYWDREPDELNIRQCTGTFGYGYEYMGLNGRLVITPLTDRIYLTLTQALSMYLGGAPAGPAGTGKTETTKDLAKALGLLCVVTNCGEGMDYRAVGKIFSGLAQCGAWGCFDEFNRIDASVLSVISSQIQTIRNALIHQLTTFQFEGQEISLDSRMGIFITMNPGYAGRTELPESVKALFRPVVVIVPDLQQICEIMLFSEGFLEAKTLAKKMTVLYKLAREQLSKQYHYDFGLRALKSVLVMAGELKRGSSDLREDVVLMRALRDMNLPKFVFEDVPLFLGLISDLFPGLDCPRVRYPDFNDAVEQVLEENGYAVLPIQVDKVVQMFETMLTRHTTMVVGPTRGGKSVVINTLCQAQTKLGLTTKLYILNPKAVSVIELYGILDPTTRDWTDGVLSNIFREINKPTDKKERKYILFDGDVDALWVENMNSVMDDNRLLTLANGERIRLQAHCALLFEVGDLQYASPATVSRCGMVYVDPKNLKYRPYWKKWVNQIPNKVEQYNLNSLFEKYVPYLMDVIVEGIVDGRQAEKLKTIVPQTDLNMVTQLAKMLDALLEGEIEDLDLLECYFLEALYCSLGASLLEDGRMKFDEYIKRLASLSTVDTEGVWANPGELPGQLPTLYDFHFDNKRNQWVPWSKLVPEYIHAPERKFINILVHTVDTTRTTWILEQMVKIKQPVIFVGESGTSKTATTQNFLKNLSEETNIVLMVNFSSRTTSMDIQRNLEANVEKRTKDTYGPPMGKRLLVFMDDMNMPRVDEYGTQQPIALLKLLLEKGYLYDRGKELNCKSIRDLGFIAAMGKAGGGRNEVDPRFISLFSVFNVPFPSEESLHLIYSSILKGHTSTFHESIVAVSGKLTFCTLALYKNIVQDLPPTPSKFHYIFNLRDLSRVFNGLVLTNPERFQTVAQMVRVWRNECLRVFHDRLISETDKQLVQQHIGSLVVEHFKDDVEVVMRDPILFGDFQMALHEGEPRIYEDIQDYEAAKALFQEILEEYNESNTKMNLVLFDDALEHLTRVHRIIRMDRGHALLVGVGGSGKQSLSRLAAFTASCEVFEILLSRGYSENSFREDLKSLYLKLGIENKAMIFLFTDAHVAEEGFLELINNMLTSGIVPALFSEEEKESILSQIGQEALKQGMGPAKESVWQYFVNKSANNLHIVLGMSPVGDTLRTWCRNFPGMVNNTGIDWFMPWPPQALHAVAKSFLGYNPMIPAENIENVVKHVVLVHQSVDHYSQQFLQKLRRSNYVTPKNYLDFINTYSKLLDEKTQCNIAQCKRLDGGLDKLKEATIQLDELNQKLAEQKIVLAEKSAACEALLEEIAVNTAVAEEKKKLAEEKAMEIEEQNKVIAMEKAEAETTLAEVMPILEAAKLELQKLDKSDVTEIRSFAKPPKQVQTVCECILIMKGYKELNWKTAKGVMSDPNFLRSLMEIDFDSITQSQVKNIKGLLKTLNTTTEEMEAVSKAGLGMLKFVEAVMGYCDVFREIKPKREKVARLERNFYLTKRELERIQNELAAIQKELETLGAKYEAAILEKQKLQEEAEIMERRLIAADKLISGLGSENIRWLNDLDELMHRRVKLLGDCLLCAAFLSYEGAFTWEFRDEMVNRIWQNDILEREIPLSQPFRLESLLTDDVEISRWGSQGLPPDELSVQNGILTTRASRFPLCIDPQQQALNWIKRKEEKNNLRVASFNDPDFLKQLEMSIKYGTPFLFRDVDEYIDPVIDNVLEKNIKVSQGRQFIILGDKEVDYDSNFRLYLNTKLANPRYSPSVFGKAMVINYTVTLKGLEDQLLSVLVAYERRELEEQREHLIQETSENKNLLKDLEDSLLRELATSTGNMLDNVDLVHTLEETKSKATEVSEKLKLAEKTALDIDRLRDGYRPAARRGAILFFVLSEMALVNSMYQYSLIAFLEVFRLSLKKSLPDSILMKRLRNIMDTLTFSIYNHGCTGLFERHKLLFSFNMTIKIEQAEGRVPQEELDFFLKGNISLEKSKRKKPCAWLSDQGWEDIILLSEMFSDNFGQLPDDVENNQTVWQEWYDLDSLEQFPVPLGYDNNITPFQKLLILRCFRVDRVYRAVTDYVTVTMGEKYVQPPMISFEAIFEQSTPHSPIVFILSPGSDPATDLMKLAERSGFGGNRLKFLAMGQGQEKVALQLLETAVARGQWLMLQNCHLLVKWLKDLEKSLERITKPHPDFRLWLTTDPTKGFPIGILQKSLKVVTEPPNGLKLNMRATYFKISHEMLDQCPHPAFKPLVYVLAFFHAVVQERRKFGKIGWNVYYDFNESDFQVCMEILNTYLTKAFQQRDPRIPWGSLKYLIGEVMYGGRAIDSFDRRILTIYMDEYLGDFIFDTFQPFHFFRNKEVDYKIPVGDEKEKFVEAIEALPLANTPEVFGLHPNAEIGYYTQAARDMWAHLLELQPQTGESSSGISRDDYIGQVAKEIENKMPKVFDLDQVRKRLGTGLSPTSVVLLQELERFNKLVVRMTKSLAELQRALAGEVGMSNELDDVARSLFIGHIPNIWRRLAPDTLKSLGNWMVYFLRRFSQYMLWVTESEPSVMWLSGLHIPESYLTALVQATCRKNGWPLDRSTLFTQVTKFQDADEVNERAGQGCFVSGLYLEGADWDIEKGCLIKSKPKVLVVDLPILKIIPIEAHRLKLQNTFRTPVYTTSMRRNAMGVGLVFEADLFTTRHISHWVLQGVCLTLNSD

SEQ ID NO: 35625 - protein, 117 aa, Homo sapiens
LDVSMAATNLENQLHSAQKNLLFLQREHASTLKGLHSEIRRLQQHCTDLTYELTVKSSEQTDHVSLKPRLAHQTTLTCPPLWGELTCAAVVIDAEGQRVHDVPQAFHEDGIRQRLLQ

SEQ ID NO: 35626 - protein, 71 aa, Homo sapiens [sequence omitted]

SEQ ID NO: 35627 - protein, 26 aa, Homo sapiens
MLTTQDLKQSSVLMSYRIHVEVNVTL

SEQ ID NO: 35628 - protein, 309 aa, Homo sapiens
LGPPTCLQEVITQDYTRHHPQQLSAPLPAPLYSFPGASCPVLDLRRPPSDLYLPPPDHGAPARGSPHSEGGKRSPEPNKTSVLGGGEDGIEPVSPPEGMTEPGHSRSAVYPLLYRDGEQTEPRMGSKSPGNTSQPPAFFSKLTESNSAMVKSKKQEINKKLNTHNRNEPEYNISQPGTEIFNMPAITGTGGGGKAKVSGRPSSRKAKSPAPGLASGDRPPSVSSVHSEGDCNRRTPLTNRVWEDRPSSAGSTPFPYNPLIMRLQAGVMASPPPPGLPAGSGPLAGPHHAWDEEPKPLLCSQYETLSDSE

SEQ ID NO: 35629 - protein, 2078 aa, Homo sapiens
MQHPKNFGLIASFLERKTVAECVLYYYLTKKNENYKSLVRRSYRRRGKSQQQQQQQQQQQQQQQQQPMPRSSQEEKDEKEKEKEAEKEEEKPEVENDKEDLLKEKTDDTSGEDNDEKEAVASKGRKTANSQGRRKGRITRSMANEANSEEAITPQQSAELASMELNESSRWTEEEMETAKKGLLEHGRNWSAIARMVGSKTVSQCKNFYFNYKKRQNLDEILQQHKLKMEKERNARRKKKKAPAAASEEAAFPPVVEDEEMEASGVSGNEEEMVEEAEALHASGNEVPRGECSGPATVNNSSDTESIPSPHTEAAKDTGQNGPKPPATLGADGPPPGPPTPPPEDIPAPTEPTPASEATGAPTPPPAPPSPSAPPPVVPKEEKEEETAAAPPVEEGEEQKPPAAEELAVDTGKAEEPVKSECTEEAEEGPAKGKDAEAAEATAEGALKAEKKEGGSGRATTAKSSGAPQDSDSSATCSADEVDEAEGGDKNRLLSPRPSLLTPTGDPRANASPQKPLDLKQLKQRAAAIPPIQVTKVHEPPREDAAPTKPAPPAPPPPQNLQPESDAPQQPGSSPRGKSRSPAPPADKEAEKPVFFPAFAAEAQKLPGDPPCWTSGLPFPVPPREVIKASPHAPDPSAFSYAPPGHPLPLGLHDTARPVLPRPPTISNPPPLISSAKHPSVLERQIGAISQGMSVQLHVPYSEHAKAPVGPVTMGLPLPMDPKKLAPFSGVKQEQLSPRGQAGPPESLGVPTAQEASVLRGTALGSVPGGSITKGIPSTRVPSDSAITYRGSITHGTPADVLYKGTITRIIGEDSPSRLDRGREDSLPKGHVIYEGKKGHVLSYEGGMSVTQCSKEDGRSSSGPPHETAAPKRTYDMMEGRVGRAISSASIEGLMGRAIPPERHSPHHLKEQHHIRGSITQGIPRSYVEAQEDYLRREAKLLKREGTPPPPPPSRDLTEAYKTQALGPLKLKPAHEGLVATVKEAGRSIHEIPREELRHTPELPLAPRPLKEGSITQGTPLKYDTGASTTGSKKHDVRSLIGSPGRTFPPVHPLDVMADARALERACYEESLKSRPGTASSSGGSIARGAPVIVPELGKPRQSPLTYEDHGAPFAGHLPRGSPVTTREPTPRLQEGSLSSSKASQDRKLTSTPREIAKSPHSTVPEHHPHPISPYEHLLRGVSGVDLYRSHIPLAFDPTSIPRGIPLDAAAAYYLPRHLAPNPTYPHLYPPYLIRGYPDTAALENRQTIINDYITSQQMHHNAATAMAQRADMLRGLSPRESSLALNYAAGPRGIIDLSQVPHLPVLVPPTPGTPATAMDRLAYLPTAPQPFSSRHSSSPLSPGGPTHLTKPTTTSSSERERDRDRERDRDREREKSILTSTTTVEHAPIWRPGTEQSSGSSGGGGGSSSRPASHSHAHQHSPISPRTQDALQQRPSVLHNTGMKGIITAVEPSTPTVLRSTSTSSPVRPAATFPPATHCPLGGTLDGVYPTLMEPVLLPKEAPRVARPERPRADTGHAFLAKPPARSGLEPASSPSKGSEPRPLVPPVSGHATIARTPAKNLAPHHASPDPPAPPASASDPHREKTQSKPFSIQELELRSLGYHGSSYSPEGVEPVSPVSSPSLTHDKGLPKHLEELDKSHLEGELRPKQPGPVKLGGEAAHLPHLRPLPESQPSSSPLLQTAPGVKGHQRVVTLAQHISEVITQDYTRHHPQQLSAPLPAPLYSFPGASCPVLDLRRPPSDLYLPPPDHGAPARGSPHSEGGKRSPEPNKTSVLGGGEDGIEPVSPPEGMTEPGHSRSAVYPLLYRDGEQTEPSRMGSKSPGNTSQPPAFFSKLTESNSAMVKSKKQEINKKLNTHNRNEPEYNISQPGTEIFNMPAITGTGLMTYRSQAVQEHASTNMGLEAIIRKALMGKYDQWEESPPLSANAFNPLNASASLPAAMPITAADGRSDHTLTSPGGGGKAKVSGRPSSRKAKSPAPGLASGDRPPSVSSVHSEGDCNRRTPLTNRVWEDRPSSAGSTPFPYNPLIMRLQAGVMASPPPPGLPAGSGPLAGPHHAWDEEPKPLLCSQYETLSDSE

SEQ ID NO: 35630 - protein, 231 aa, Homo sapiens
LTMQIFVKTLTGKTITLEVEPSDTIENVKAKIQDKEGIPPDQQRLIFAGKQLEDGRTLSDYNIQKESTLHLVLRLRGGMQIFVKTLTGKTITLEVEPSDTIENVKAKIQDKEGIPPDQQRLIFAGKQLEDGRTLSDYNIQKESTLHLVLRLRGGMQIFVKTLTGKTITLEVEPSDTIENVKAKIQDKEGIPPDQQRLIFAGKQLEDGRTLSDYNIQKESTLHLVLRLRGGV

SEQ ID NO: 35631 - protein, 316 aa, Homo sapiens
LFVDRCDRHLTMQIFVKTLTGKTITLEVEPSDTIENVKAKIQDKEGIPPDQQRLIFAGKQLEDGRTLSDYNIQKESTLHLVLRLRGGMQIFVKTLTGKTITLEVEPSDTIENVKAKIQDKEGIPPDQQRLIFAGKQLEDGRTLSDYNIQKESTLHLVLRLRGGMQIFVKTLTGKTITLEVEPSDTIENVKAKIQDKEGIPPDQQRLIFAGKQLEDGRTLSDYNIQKESTLHLVLRLRGGMQIFVKTLTGKTITLEVEPSDTIENVKAKIQDKEGIPPDQQRLIFAGKQLEDGRTLSDYNIQKESTLHLVLRLRGGV

SEQ ID NO: 35632 - protein, 696 aa, Homo sapiens
LFVDRCDRHLTMQIFVKTLTGKTITLEVEPSDTIENVKAKIQDKEGIPPDQQRLIFAGKQLEDGRTLSDYNIQKESTLHLVLRLRGGMQIFVKTLTGKTITLEVEPSDTIENVKAKIQDKEGIPPDQQRLIFAGKQLEDGRTLSDYNIQKESTLHLVLRLRGGMQIFVKTLTGKTITLEVEPSDTIENVKAKIQDKEGIPPDQQRLIFAGKQLEDGRTLSDYNIQKESTLHLVLRLRGGMQIFVKTLTGKTITLEVEPSDTIENVKAKIQDKEGIPPDQQRLIFAGKQLEDGRTLSDYNIQKESTLHLVLRLRGGMQIFVKTLTGKTITLEVEPSDTIENVKAKIQDKEGIPPDQQRLIFAGKQLEDGRTLSDYNIQKESTLHLVLRLRGGMQIFVKTLTGKTITLEVEPSDTIENVKAKIQDKEGIPPDQQRLIFAGKQLEDGRTLSDYNIQKESTLHLVLRLRGGMQIFVKTLTGKTITLEVEPSDTIENVKAKIQDKEGIPPDQQRLIFAGKQLEDGRTLSDYNIQKESTLHLVLRLRGGMQIFVKTLTGKTITLEVEPSDTIENVKAKIQDKEGIPPDQQRLIFAGKQLEDGRTLSDYNIQKESTLHLVLRLRGGMQIFVKTLTGKTITLEVEPSDTIENVKAKIQDKEGIPPDQQRLIFAGKQLEDGRTLSDYNIQKESTLHLVLRLRGGV

SEQ ID NO: 35633 - protein, 105 aa, Homo sapiens
LHPPPPGRRSVSPFPWRYPLPFSITAVAWTPLPSHMSPRPFSCRRMRPCPGLYLSSAAQILPATNTQGSLRGRKCPPTYGKRTMRREGSVDTGSLLGRPRSCTQG

SEQ ID NO: 35634 - protein, 154 aa, Homo sapiens
LDDFLATGTSEQAPQLEFEQLPFSHPLFIMFSSGTTGAPKCMVHSAGGTLIQHLKEHLLHGNMTSSDILLCYTTVGWMMWNWMVSLLATGAAMVLYDGSPLVPTPNVLWDLVDRIGITVLVTGAKWLSVLEEKAMKPGECASSVLIPCTANQGN

SEQ ID NO: 35635 - protein, 11 aa, Homo sapiens
VLSLSCFLHLL

SEQ ID NO: 35636 - protein, 29 aa, Homo sapiens
MYEFTEEAQPNVLFSDSAVSTVGVMRDPE

SEQ ID NO: 35637 - protein, 103 aa, Homo sapiens
MLESGKPSIFTSDIISDSQITRQALNEIESRHKDIMKLETSIRELHEMFMDMAMFVETQGEMINNIERNVMNATDYVEHAKEETKKAIKYQSKARRVSLASKN

SEQ ID NO: 35638 - protein, 252 aa, Homo sapiens
LWGGHVGRWGRGSGAAMGCGAARALASVLCLRRNAAMAAQGEPQVQFKLVLVGDGGTGKTTFVKRHLTGEFEKKYVATLGVEVHPLVFHTNRGPIKFNVWDTAGQEKFGGLRDGYYIQAQCAIIMFDVTSRVTYKNVPNWHRDLVRVCENIPIVLCGNKVDIKDRKVKAKSIVFHRKKNLQYYDISAKSNYNFEKPFLWLARKLIGDPNLEFVAMPALAPPEVVMDPALAAQYEHDLEVAQTTALPDEDDDL

SEQ ID NO: 35639 - protein, 34 aa, Homo sapiens
LGFSSLHSTAALVIATCLLITEESQVLRRGRNTH

SEQ ID NO: 35640 - protein, 69 aa, Homo sapiens
LLCFFFLLFHPASRTHKLTVLPSRNATFVYSNDSAYSNLSATVGEHLCTFVLRSVKFGSTMNSKANSVW

SEQ ID NO: 35641 - protein, 19 aa, Homo sapiens
VQSPHLIFRGYGPTPSMDA

SEQ ID NO: 35642 - protein, 670 aa, Homo sapiens
VRLAMALFYVARYPGPDAAAAAGPEGAEAGAHGRARALLERLQSRARERQQQREPAQTEAAASTEPATRRRRRPRRRRRVNDAEPGSPEAPQGKRRKADGEDAGAESNEEAPGEPSAGSSEEAPGEPSAGSSEEAPGERSTSASAEAAPDGPALEEAAGPLVPGLVLGGFGKRKAPKVQPFLPRWLAEPNCVRRNVTEDLVPIEDIPDVHPDLQKQLRAHGISSYFPVQAAVIPALLESAACGFLVGRGGYRPSDLCVSAPTGSGKTLAFVIPVVQALLSRVVCHIRALVVLPTKELAQQVSKVFNIYTDATPLRVSLVTGQKSLAKEQESLVQKTADGYRCLADIVVATPGRLVDHIDQTPGFSLQQLRFLIIDEADRMIDSMHQSWLPRVVAAAFQSEDPADPCALLQRRQAQAVTAASTCCPQMPLQKLLFSATLTQNPEKLQQLGLHQPRLFSTGLAHRGLEDTDGDGDSGKYAFPVGLTHHYVPCSLSSKPLVVLHLVLEMGFSRVLCFTNSRENSHRLFLLVQAFGGVDVAEFSSRYGPGQRRMILKQFEQGKIQLLISTDATARGIDVQGVELVVNYDAPQYLRTYVHRVGRTARAGKTGQAFTLLLKVQERRFLRMLTEAGAPELQRHELSSKLLQPLVPRYEEALSQLEESVKEERKQRAA

SEQ ID NO: 35643 - protein, 799 aa, Homo sapiens
MAREIVSEDIEDFEFTPKPEYEGPFCVFNEPDEAHLIQRWFEHVQETKPTIMVTYNGDFFDWPFVEARAAVHGLSMQQEIGFQKDSQGEYKAPQCIHMDCLRWVKRDSYLPVGSHNLKAAAKAKLGYDPVELDPEDMCRMATEQPQTLATYSVSDAVATYYLYMKYVHPFIFALCTIIPMEPDEVLRKGSGTLCEALLMVQAFHANIIFPNKQEQEFNKLTDDGHVLDSETYVGGHVEALESGVFRSDIPCRFRMNPAAFDFLLQRVEKTLRHALEEEEKVPVEQVTNFEEVCDEIKSKLASLKDVPSRIECPLIYHLDVGAMYPNIILTNRLQPSAMVDEATCAACDFNKPGANCQRKMAWQWRGEFMPASRSEYHRIQHQLESEKFPPLFPEGPARAFHELSREEQAKYEKRRLADYCRKAYKKIHITKVEERLTTICQRENSFYVDTVRAFRDRRYEFKGLHKVWKKKLSAAVEVGDAAEVKRCKNMEVLYDSLQLAHKCILNSFYGYVMRKGARWYSMEMAGIVCFTGANIITQARELIEQIGRPLELDTDGIWCVLPNSFPENFVFKTTNVKKPKVTISYPGAMLNIMVKEGFTNDQYQELAEPSSLTYVTRSENSIFFEVDGPYLAMILPASKEEGKKLKKRYAVFNEDGSLAELKGFEVKRRGELQLIKIFQSSVFEAFLKGSTLEEVYGSVAKVADYWLDVLYSKAANMPDSELFELISENRSMSRKLEDYGEQKSTSISTAKRLAEFLGDQMVKDAGLSCRYIISRKPEGSPVTERSPYVCSIHHRCFLQ

SEQ ID NO: 35644 - protein, 110 aa, Homo sapiens
LYMKYVHPFIFALCTIIPMEPDEVLRKGSGTLCEALLMVQAFHANIIFPNKQEQEFNKLTDDGHVLDSETYVGGHVEALESGVFRSDIPCRFRMVCFFPGIQILPTLVLW

SEQ ID NO: 35645 - protein, 259 aa, Homo sapiens
LGNIVRPPSLQKIQKKLAERGGARLWSQLLGRLRREPLSLINVRKRNVESGEEELASKLDHYKAKATRHIFLIRHSQYHVDGSLEKDRTLTPLGREQAELTGLRLASLGLKFNKIVHSSMTRAIETTDIISRHLPGVCKVSTDLLREGAPIEPDPPVSHWKPEAVQYYEDGARIEAAFRNYIHRADARQEEDSYEIFICHANVIRYIVCRALQFPPEGWLRLSLNNGSITHLVIRPNGRVALRTLGDTGFMPPDKITRS

SEQ ID NO: 35646 - protein, 395 aa, Homo sapiens
LIVSGGSCLPFSRESCGWFSILKSDEEVLDARVAVAGVTAVGRGWSGEVLGIRVAVAGVTAVGHGWGGAAPWLPVVPITEVLLVVLTGSNSISVRAFLDEDDMSLEEIKNRQNAARNNSPPTVGAFGHTRCSAFPLEQEADLIEAAEPGGPHSSRNGLCHPLNHSRTLAGKRPKAPRGEEAHLPPVSDLTVEFDKLNLQNIGRSVSKTPDESTKTKDQILTSRINAVERDLLEPSPADQLGNGHRRTESEMSARIAKMSLSPSSPRHEDQLEVTREPARRLFLFGEEPSKLDQDVLAALECADVDPHQFPAVHRWKSAVLCYSPSDRQSWPSPAVKGRFKSQLPDLSGPHSYSPGRNSVAGSNPAKPGLGSPGRYSPVHGSQLRRMARLAELAAL

SEQ ID NO: 35647 - protein, 1500 aa, Homo sapiens
LTMDGASAEQDGLQEDRSHSGPSSLPEAPLKPPGPLVPPDQQDKVQCAEVNRASTEGESPDGPGQGGLCQNGPTPPFPDPPSSLDPTTSPVGPDASPGVAGFHDNLRKSQGTSAEGSVRKEALQSLRLSLPMQETQLCSTDSPLPLEKEEQVRLQARKWLEEQLKQYRVKRQQERSSQPATKTRLFSTLDPELMLNPENLPRASTLAMTKEYSFLRTSVPRGPKVGSLGLPAHPREKKTSKSSKIRSLADYRTEDSNAGNSGGNVPAPDSTKGSLKQNRSSAASVVSEISLSPDTDDRLENTSLAGDSVSEVDGNDSDSSSYSSASTRGTYGILSKTVGTQDTPYMVNGQEIPADTLGQFPSIKDVLQAAAAEHQDQGQEVNGEVRSRRDSICSSVSLESSAAETQEEMLQVLKEKMRLEGQLEALSLEASQALKEKAELQAQLAALSTKLQAQVECSHSSQQRQDSLSSEVDTLKQSCWDLERAMTDLQNMLEAKNASLASSNNDLQVAEEQYQRLMAKVEDMQRSMLSKDNTVHDLRQQMTALQSQLQQVQLERTTLTSKLKASQAEISSLQSVRQWYQQQLALAQEARVRLQGEMAHIQVGQMTQAGLLEHLKLENVSLSQQLTETQHRSMKEKGRIAAQLQGIEADMLDQEAAFMQIQEAKTMVEEDLQRRLEEFEGERERLQRMADSAASLEQQLEQVKLTLLQRDQQLEALQQEHLDLMKQLTLTQEALQSREQSLDALQTHYDELQARLGELQGEAASREDTICLLQNEKIILEAALQAAKSGKEELDRGARRLEEGTEETSETLEKLREELAIKSGQVEHLQQETAALKKQMQKIKEQFLQQKVMVEAYRRDATSKDQLISELKATRKRLDSELKELRQELMQVHGEKRTAEAELSRLHREVAQVRQHMADLEGHLQSAQKERDEMETHLQSLQFDKEQMVAVTEANEALKKQIEELQQEARKAITEQKQKMRRLGSDLTSAQKEMKTKHKAYENAVGILSRRLQEALAAKEAADAELGQLRAQGGSSDSSLALHERIQALEAELQAVSHSKTLLEKELQEVIALTSQELEESREKVLELEDELQESRGFRKKIKRLEESNKKLALELEHEKGKLTGLGQSNAALREHNSILETALAKREADLVQLNLQVQAVLQRKEEEDRQMKHLVQALQASLEKEKEKVNSLKEQVAAAKVEAGHNRRHFKAASLELSEVKKELQAKEHLVQKLQAEADDLQIREGKHSQEIAQFQAELAEARAQLQLLQKQLDEQLSKQPVGNQEMENLKWEVDQKEREIQSLKQQLDLTEQQGRKELEGLQQLLQNVKSELEMAQEDLSMTQKDKFMLQAKVSELKNNMKTLLQQNQQLKLDLRRGAAKTRKEPKGEASSSNPATPIKIPDCPVPASLLEELLRPPPAVSKEPLKNLNSCLQQLKQEMDSLQRQMEEHALTVHESLSSWTPLEPATASPVPPGGHAGPRGDPQRHSQSRASKEGPGE

SEQ ID NO: 35648 - protein, 1392 aa, Homo sapiens
LTMDGASAEQDGLQEDRSHSGPSSLPEAPLKPPGPLVPPDQQDKVQCAEVNRASTEGESPDGPGQGGLCQNGPTPPFPDPPSSLDPTTSPVGPDASPGVAGFHDNLRKSQGTSAEGSVRKEALQSLRLSLPMQETQLCSTDSPLPLEKEEQVRLQARKWLEEQLKQYRVKRQQERSSQPATKTRLFSTLDPELMLNPENLPRASTLAMTKEYSFLRTSVPRGPKVGSLGLPAHPREKKTSKSSKIRSLADYRTEDSNAGNSGGNVPAPDSTKGSLKQNRSSAASVVSEISLSPDTDDRLENTSLAGDSVSEVDGNDSDSSSYSSASTRGTYGILSKTVGTQDTPYMVNGQEIPADTLGQFPSIKDVLQAAAAEHQDQGQEVNGEVRSRRDSICSSVSLESSAAETQEEMLQVLKEKMRLEGQLEALSLEASQALKEKAELQAQLAALSTKLQAQVECSHSSQQRQDSLSSEVDTLKQSCWDLERAMTDLQNMLEAKNASLASSNNDLQVAEEQYQRLMAKVEDMQRSMLSKDNTVHDLRQQMTALQSQLQQVQLERTTLTSKLKASQAEISSLQSVRQWYQQQLALAQEARVRLQGEMAHIQVGQMTQAGLLEHLKLENVSLSQQLTETQHRSMKEKGRIAAQLQGIEADMLDQEAAFMQIQEAKTMVEEDLQRRLEEFEGERERLQRMADSAASLEQQLEQVKLTLLQRDQQLEALQQEHLDLMKQLTLTQEALQSREQSLDALQTHYDELQARLGELQGEAASREDTICLLQNEKIILEAALQAAKSGKEELDRGARRLEEGTEETSETLEKLREELAIKSGQVEHLQQETAALKKQMQKIKEQFLQQKVMVEAYRRDATSKDQLISELKATRKRLDSELKELRQELMQVHGEKRTAEAELSRLHREVAQVRQHMADLEGHLQSAQKERDEMETHLQSLQFDKEQMVAVTEANEALKKQIEELQQEARKAITEQKQKMRRLGSDLTSAQKEMKTKHKAYENAVGILSRRLQEALAAKEAADAELGQLRAQGGSSDSSLALHERIQALEAELQAVSHSKTLLEKELQEVIALTSQELEESREKVLELEDELQESRGFRKKIKRLEESNKKLALELEHEKGKLTGLGQSNAALREHNSILETALAKREADLVQLNLQVQAVLQRKEEEDRQMKHLVQALQASLEKEKEKVNSLKEQVAAAKVEAGHNRRHFKAASLELSEVKKELQAKEHLVQKLQAEADDLQIREGKHSQEIAQFQAELAEARAQLQLLQKQLDEQLSKQPVGNQEMENLKWEVDQKEREIQSLKQQLDLTEQQGRKELEGLQQLLQNVKSELEMAQEDLSMTQKDKFMLQAKVSELKNNMKTLLQQNQQLKLDLRRGAAKTVLRPASLPG

SEQ ID NO: 35649 - protein, 1136 aa, Homo sapiens
LTMDGASAEQDGLQEDRSHSGPSSLPEAPLKPPGPLVPPDQQDKVQCAEVNRASTEGESPDGPGQGGLCQNGPTPPFPDPPSSLDPTTSPVGPDASPGVAGFHDNLRKSQGTSAEGSVRKEALQSLRLSLPMQETQLCSTDSPLPLEKEEQVRLQARKWLEEQLKQYRVKRQQERSSQPATKTRLFSTLDPELMLNPENLPRASTLAMTKEYSFLRTSVPRGPKVGSLGLPAHPREKKTSKSSKIRSLADYRTEDSNAGNSGGNVPAPDSTKGSLKQNRSSAASVVSEISLSPDTDDRLENTSLAGDSVSEVDGNDSDSSSYSSASTRGTYGILSKTVGTQDTPYMVNGQEIPADTLGQFPSIKDVLQAAAAEHQDQGQEVNGEVRSRRDSICSSVSLESSAAETQEEMLQVLKEKMRLEGQLEALSLEASQALKEKAELQAQLAALSTKLQAQVECSHSSQQRQDSLSSEVDTLKQSCWDLERAMTDLQNMLEAKNASLASSNNDLQVAEEQYQRLMAKVEDMQRSMLSKDNTVHDLRQQMTALQSQLQQVQLERTTLTSKLKASQAEISSLQSVRQWYQQQLALAQEARVRLQGEMAHIQVGQMTQAGLLEHLKLENVSLSQQLTETQHRSMKEKGRIAAQLQGIEADMLDQEAAFMQIQEAKTMVEEDLQRRLEEFEGERERLQRMADSAASLEQQLEQVKLTLLQRDQQLEALQQEHLDLMKQLTLTQEALQSREQSLDALQTHYDELQARLGELQGEAASREDTICLLQNEKIILEAALQAAKSGKEELDRGARRLEEGTEETSETLEKLREELAIKSGQVEHLQQETAALKKQMQKIKEQFLQQKVMVEAYRRDATSKDQLISELKATRKRLDSELKELRQELMQVHGEKRTAEAELSRLHREVAQVRQHMADLEGHLQSAQKERDEMETHLQSLQFDKEQMVAVTEANEALKKQIEELQQEARKAITEQKQKMRRLGSDLTSAQKEMKTKHKAYENAVGILSRRLQEALAAKEAADAELGQLRAQGGSSDSSLALHERIQALEAELQAVSHSKTLLEKELQEVIALTSQELEESREKVLELEDEVRPGHLLWRQRGAGHVSPGHAATRETRRTKLHRVPSVATFGVATF

SEQ ID NO: 35650 - protein, 81 aa, Homo sapiens
MLAGGPFFLFVLRCHVRGECTRVRACECARVQSPTRPGPFGAARERTKADGLGACAGHGGRAVSRDREAAGARARLGGGVF

SEQ ID NO: 35651 - protein, 429 aa, Homo sapiens
LWPLLGLPFYTFLISSFPSVSYVSDVVSLLEQGKEPWLGKREVKRDLFSVSESSGEIKDFSPKNVIYDDSSQYLIMERILSQGPVYSSFKGGWKCKDHTEMLQENQGCIRKVTVSHQEALAQHMNISTVERPYGCHECGKTFGRRFSLVLHQRTHTGEKPYACKECGKTFSQISNLVKHQMIHTGKKPHECKDCNKTFSYLSFLIEHQRTHTGEKPYECTECGKAFSRASNLTRHQRIHIGKKQYICRKCGKAFSSGSELIRHQITHTGEKPYECIECGKAFRRFSHLTRHQSIHTTKTPYECNECRKAFRCHSFLIKHQRIHAGEKLYECDECGKVFTWHASLIQHTKSHTGEKPYACAECDKAFSRSFSLILHQRTHTGEKPYVCKVCNKSFSWSSNLAKHQRTHTLDNPYEYENSFNYHSFLTEHQ

SEQ ID NO: 35652 - protein, 568 aa, Homo sapiens
LDWRHKNRNILISLLYCAGLCTHKMAVMDLSSPWALTKQDSACFHLRNAEEERMIAVFLTTWLQEPMTFKDVAVEFTQEEWMMLDSAQRSLYRDVMLENYRNLTSVEYQLYRLTVISPLDQEEIRNMKKRIPQAICPDQKIQPKTKESTVQKILWEEPSNAVKMIKLTMHNWSSTLREDWECHKIRKQHKIPGGHWRQMIYAPKKTVPQELFRDYHELEENSKLGSKLIFSQSIFTSKHCQKCYSEIGCLKHNSIINNYVKNSISEKLYESHECDTTLWHFQRNQTVQKEYTYSKHGMHFTHNMFPVPNNLHMAQNACECNKDETLCHQSSLKKQGQTHTEKKHECNQCGKAFKRISNLTLYKKSHMGEKQYECKECGKVFNDSSTLRRHVRTHTGEKPYECNQCGKAFSQKTSLKAHMRTHTGEKPYECNQCGKSFGTSSYLIVHKRIHTGEKLYECSECGKAFNTSSHLKVHKKIHTGENVYECSDCGKVFSGVSSLRMHIRTHTGEKPYECKECRKAFSVSSSLRRHVRIHTGEKPYECIQCGKAFSQSSSLIIHKRIHTERETL

SEQ ID NO: 35653 - protein, 133 aa, Homo sapiens
MRMGDMGPCGAINMGDAFSPAPAGNQGPPPMTGMNMNNRATIPGPPMGPGPAMGPEGAANMGTPMMPDNGAVHNDRFPQGPPSQMGSPMGSRTGSETPQAPMSGVGPVSGGPGGFGRGSQGGNFEGPNKRRRY

SEQ ID NO: 35654 - protein, 185 aa, Homo sapiens
LRAQHEENIKKLVDQFLQEQKEEALKIQSNDGKELGINDQVVPKNIPKVAENVADKNEEPSSNHILHGKEQIKRGGDAGMPGIKKNDLAKVDDLPPALKKPPISVFQHESHQAISHLPTGQPLSPNMPPDSQVNHNGNPGTSKQKPSSPLQCLIPSSNLDSEPRIQTDILKQATKDRISEFHKLK

SEQ ID NO: 35655 - protein, 52 aa, Homo sapiens
LSVNLLQLSLLSVVVCKMRHSCVCASMPESQCSVQTAYFSFSTMWIVHMRII

SEQ ID NO: 35656 - protein, 560 aa, Homo sapiens
VGLAPASLLLTAVCGSAILNVQLQRAPVSGVRGELSKMMLRGNLKQVRIEKNPARLRALESAVGESEPAAAAAMALALAGEPAPPAPAPPEDHPDEEMGFTIDIKSFLKPGEKTYTQRCRLFVGNLPTDITEEDFKRLFERYGEPSEVFINRDRGFGFIRLESRTLAEIAKAELDGTILKSRPLRIRFATHGAALTVKNLSPVVSNELLEQAFSQFGPVEKAVVVVDDRGRATGKGFVEFAAKPPARKALERCGDGAFLLTTTPRPVIVEPMEQFDDEDGLPEKLMQKTQQYHKEREQPPRFAQPGTFEFEYASRWKALDEMEKQQREQVDRNIREAKEKLEAEMEAARHEHQLMLMRQDLMRRQEELRRLEELRNQELQKRKQIQLRHEEEHRRREEEMIRHREQEELRRQQEGFKPNYMENREQEMRMGDMGPRGAINMGDAFSPAPAGNQGPPPMMGMNMNNRATIPGPPMGPGPAMGPEGAANMGTPMMPDNGAVHNDRFPQGPPSQMGSPMGSRTGSETPQAPMSGVGPVSGGPGGFGRGSQGGNFEGPNKRRRY

SEQ ID NO: 35657 - protein, 26 aa, Homo sapiens
VGLFVPRSRSQNRVTLIPAVFPVQGR

SEQ ID NO: 35658 - protein, 61 aa, Homo sapiens
LLSTIWGEKIKMKPCQILEVLSLVLQTLCDDTLRKIKLKFRSCHCHYRQIRRLGLPGNKFT

SEQ ID NO: 35659 - protein, 296 aa, Homo sapiens
LFFVMFVWSYWMTIFTSPASPSKEFYLSNSEKERYEKEFSQERQQEILRRAARALPIYTTSASKTIRYCEKCQLIKPDRAHHCSACDSCILKMDHHCPWVNNCVGFSNYKFFLLFLLYSLLYCLFVAATVLEYFIKFWTNELTDTRAKFHVLFLFFVSAMFFISVLSLFSYHCWLVGKNRTTIESFRAPTFSYGPDGNGFSLGCSKNWRQVFGDEKKYWLLPIFSSLGDGCSFPTRLVGMDPEQASVTNQNEYARSSGSNQPFPIKPLSESKNRLLDSESQWLENGAEEGIVKSGV

SEQ ID NO: 35660 - protein, 200 aa, Homo sapiens [sequence omitted]

SEQ ID NO: 35661 - protein, 235 aa, Homo sapiens
LDIPRLISPGLTPSLLFILVLQKPSPLMAPLGEVGNYFGVQDAVPFGNVPVLPVDSPVLLSDHLGQSEAGGLPRGPAVTDLDHLKGILRRRQLYCRTGFHLEIFPNGTIQGTRKDHSRFGILEFISIAVGLVSIRGVDSGLYLGMNEKGELYGSEKLTQECVFREQFEENWYNTYSSNLYKHVDTGRRYYVALNKDGTPREGTRTKRHQKFTHFLPRPVDPDKVPELYKDILSQS

SEQ ID NO: 35662 - protein, 45 aa, Homo sapiens
LNEQVKAIKELGDQVTNLRKMGAPESGLAEYLFDKHILGDSDNES

SEQ ID NO: 35663 - protein, 79 aa, Homo sapiens [sequence omitted]

SEQ ID NO: 35664 - protein, 26 aa, Homo sapiens
LLLLTLWVHTAFMSCNTHREGLQLHS

SEQ ID NO: 35665 - protein, 102 aa, Homo sapiens
LIRKMALKVLLEQEKTFFTLLVLLGYLSCKVTCESGDCRQQEFRDRSGNCVPCNQCGPGMELSKWHLEHQRDRTIHSPGKGDEARETNGLAQQIQLPWSPAS

SEQ ID NO: 35666 - protein, 427 aa, Homo sapiens
LIRKMALKVLLEQEKTFFTLLVLLGYLSCKVTCESGDCRQQEFRDRSGNCVPCNQCGPGMELSKECGFGYGEDAQCVTCRLHRFKEDWGFQKCKPCLDCAVVNRFQKANCSATSDAICGDCLPGFYRKTKLVGFQDMECVPCGDPPPPYEPHCASKVNLVKIASTASSPRDTALAAVICSALATVLLALLILCVIYCKRQFMEKKPSWSLRSQDIQYNGSELSCFDRPQLHEYAHRACCQCRRDSVQTCGPVRLLPSMCCEEACSPNPATLGCGVHSAASLQARNAGPAGEMVPTFFGSLTQSICGEFSDAWPLMQNPMGGDNISFCDSYPELTGEDIHSLNPELESSTSLDSNSSQDLVGGAVPVQSHSENFTAATDLSRYNNTLVESASTQDALTMRSQLDQESGAVIHPATQTSLQVRQRLGSL

SEQ ID NO: 35667 - protein, 421 aa, Homo sapiens
LIRKMALKVLLEQEKTFFTLLVLLGYLSCKVTCESGDCRQQEFRDRSGNCVPCNQCGPGMELSKECGFGYGEDAQCVTCRLHRFKEDWGFQKCKPCLDCAVVNRFQKANCSATSDAICGDCLPGFYRKTKLVGFQDMECVPCGDPPPPYEPHCASKVNLVKIASTASSPRDTALAAVICSALATVLLALLILCVIYCKRQFMEKKPSWSLRSQDIQYNGSELSCFDRPQLHEYAHRACCQCRRDSVQTCGPVRLLPSMCCEEACSPNPATLGCGVHSAASLQARNAGPAGEMVPTFFGSLTQSICGEFSDAWPLMQNPMGGDNISFCDSYPELTGEDIHSLNPELESSTSLDSNSSQDLVGGAVPVQSHSENFTAATDLSRYNNTLVESASTQDALTMRSQLDQESGAVIHPATQTSLQEA

SEQ ID NO: 35668 - protein, 59 aa, Homo sapiens
LTHHLSEEQRKQLQYIAMLADQRRAAHESKMIEKHGGYKFSAPVVPSSFNFGGPAPGMN

SEQ ID NO: 35669 - protein, 1730 aa, Homo sapiens
LDPLGRMVMGIFANCIFCLKVKYLPQQQKKKLQTDIKENGGKFSFSLNPQCTHIILDNADVLSQYQLNSIQKNHVHIANPDFIWKSIREKRLLDVKNYDPYKPLDITPPPDQKASSSEVKTEGLCPDSATEEEDTVELTEFGMQNVEIPHLPQDFEVAKYNTLEKVGMEGGQEAVVVELQCSRDSRDCPFLISSHFLLDDGMETRRQFAIKKTSEDASEYFENYIEELKKQGFLLREHFTPEATQLASEQLQALLLEEVMNSSTLSQEVSDLVEMIWAEALGHLEHMLLKPVNRISLNDVSKAEGILLLVKAALKNGETAEQLQKMMTEFYRLIPHKGTMPKEVNLGLLAKKADLCQLIRDMVNVCETNLSKPNPPSLAKYRALRCKIEHVEQNTEEFLRVRKEVLQNHHSKSPVDVLQIFRVGRVNETTEFLSKLGNVRPLLHGSPVQNIVGILCRGLLLPKVVEDRGVQRTDVGNLGSGIYFSDSLSTSIKYSHPGETDGTRLLLICDVALGKCMDLHEKDFSLTEAPPGYDSVHGVSQTASVTTDFEDDEFVVYKTNQVKMKYIIKFSMPGDQIKDFHPSDHTELEEYRPEFSNFSKVEDYQLPDAKTSSSTKAGLQDASGNLVPLEDVHIKGRIIDTVAQVIVFQTYTNKSHVPIEAKYIFPLDDKAAVCGFEAFINGKHIVGEIKEKEEAQQEYLEAVTQGHGAYLMSQDAPDVFTVSVGNLPPKAKVLIKITYITELSILGTVGVFFMPATVAPWQQDKALNENLQDTVEKICIKEIGTKQSFSLTMSIEMPYVIEFIFSDTHELKQKRTDCKAVISTMEGSSLDSSGFSLHIGLSAAYLPRMWVEKHPEKESEACMLVFQPDLDVDLPDLASESEVIICLDCSSSMEGVTFLQAKQIALHALSLVGEKQKVNIIQFGTGYKELFSYPKHITSNTMAAEFIMSATPTMGNTDFWKTLRYLSLLYPARGSRNILLVSDGHLQDESLTLQLVKRSRPHTRLFACGIGSTANRHVLRILSQCGAGVFEYFNAKSKHSWRKQIEDQMTRLCSPSCHSVSVKWQQLNPDVPEALQAPAQVPSLFLNDRLLVYGFIPHCTQATLCALIQEKEFRTMVSTTELQKTTGTMIHKLAARALIRDYEDGILHENETSHEMKKQTLKSLIIKLSKENSLITQFTSFVAVEKRDENESPFPDIPKVSELIAKEDVDFLPYMSWQGEPQEAVRNQSLLASSEWPELRLSKRKHRKIPFSKRKMELSQPEVSEDFEEDGLGVLPAFTSNLERGGVEKLLDLSWTESCKPTATEPLFKKVSPWETSTSSFFPILAPAVGSYLPPTARAHSPASLSFASYRQVASFGSAAPPRQFDASQFSQGPVPGTCADWIPQSASCPTGPPQNPPSSPYCGIVFSGSSLSSAQSAPLQHPGGFTTRPSAGTFPELDSPQLHFSLPTDPDPIRGFGSYHPSASSPFHFQPSAASLTANLRLPMASALPEALCSQSRTTPVDLCLLEESVGSLEGSRCPVFAFQSSDTESDELSEVLQDSCFLQIKCDTKDDSILCFLEVKEEDEIVCIQHWQDAVPWTELLSLQTEDGFWKLTPELGLILNLNTNGLHSFLKQKGIQSLGVKGRECLLDLIATMLVLQFIRTRLEKEGIVFKSLMKMDDASISRNIPWAFEAIKQASEWVRRTEGQYPSICPRLELGNDWDSATKQLLGLQPISTVSPLHRVLHYSQG

SEQ ID NO: 35670 - protein, 1112 aa, Homo sapiens
LVPPPRCSGWRSAAEVRAGPAPPPVSPPPTPQPLPLPQPHEAPHRALRRCGPGSALHARSPRRHQPSMHQKTPEIYSVELSGTKDIVKTDKGDGKEKYRGLKNNCLELKKKNHKEEFQKELHLDDHKLSNRELEEKYGTDIIMGLSSTRAAELLARDGPNSLTPPKQTPEIVKFLKQMVGGFSILLWVGAFLCWIAYGIQYSSDKSASLNNVYLGCVLGLVVILTGIFAYYQEAKSTNIMSSFNKMIPQQALVIRDSEKKTIPSEQLVVGDIVEVKGGDQIPADIRVLSSQGCRVDNSSLTGESEPQPRSSEFTHENPLETKNICFYSTTCLEASTSPVGTVTGMVINTGDRTIIGHIASLASGVGNEKTPIAIEIEHFVHIVAGVAVSIGILFFIIAVSLKYQVLDSIIFLIGIIVANVPEGLLATVTVTLSLTAKRMAKKNCLVKNLEAVETLGSTSIICSDKTGTLTQNRMTVAHLWFDNQIFVADTSEDHSNQVFDQSSRTWASLSKIITLCNRAEFKPGQENVPIMKKAVIGDASETALLKFSEVILGDVMEIRKRNRKVAEIPFNSTNKFQLSIHEMDDPHGKRFLMVMKGAPERILEKCSTIMINGEEHPLDKSTAKTFHTAYMELGGLGERVLGFCHLYLPADEFPETYSFDIDAMNFPTSNLCFVGLLSMIDPPRSTVPDAVTKCRSAGIKVIMVTGDHPITAKAIAKSVGIISANSETVEDIAHRLNIAVEQVNKRDAKAAVVTGMELKDMSSEQLDEILANYQEIVFARTSPQQKLIIVEGCQRQDAVVAVTGDGVNDSPALKKADIGIAMGIAGSDAAKNAADMVLLDDNFASIVTGVEEGRLIFDNLKKTIAYSLTKNIAELCPFLIYIIVGLPLPIGTITILFIDLGTDIIPSIALAYEKAESDIMNRKPRHKNKDRLVNQPLAVYSYLHIGLMQALGAFLVYFTVYAQEGFLPRTLINLRVEWEKDYVNDLKDSYGQEWTRYQREYLEWTGYTAFFVGILVQQIADLIIRKTRRNSIFQQGLFRNKVIWVGITSQIIIGLILSYGLGSVTALSFTMLRAQYWFVAVPHAILIWVYDEVRKLFIRLYPGSWWDKNMYY

SEQ ID NO: 35671 - protein, 47 aa, Homo sapiens
MDKVPEGIPRMDGLHGFLCWHPSPANSRSDHQENPEEFHLPAGSLQK

SEQ ID NO: 35672 - protein, 540 aa, Homo sapiens
MSTGFSFGSGTLGSTTVAAGGTSTGGVFSFGTGASSNPSVGLNFGNLGSTSTPATTSAPSSGFGTGLFGSKPATGFTLGGTNTGIATTITTGLTLGTPATTSAATTGFSLGFNKPAASATPFALPITSTSASGLTLSSALTSTPAASTGFTLNNLGGTTATTTTASTGLSLGGALAGLGGSLFQSTNTGTSGLGQNALGLTLGTTAATSTAGNEGLGGIDFSSSSDKKSDKTGTRPEKFVKEQKQVQEEISRMSSKAMLKVQEDIKALKQLLSLAANGIQRNTLNIDKLKIETAQELKNAEIALRTQKTPPGLQHEYAAPADYFRILVQQFEVQLQQYRQQIEELENHLATQANNSHITPQDLSMAMQKIYQTFVALAAQLQSIHENVKVLKEQYLGYRKMFLGDAVDVFETRRAEAKKWQNTPRVTTGPTPFSTMPNAAAVAMAATLTQQQQPATGPQPSLGVSFGTPFGSGIGTGLQSSGLGSSNLGGFGTSSGFGCSTTGASTFGFGTTNKPSGSLSAGLCVSAWISGKFKGVNYLI

SEQ ID NO: 35673 - protein, 27 aa, Homo sapiens
VMPKTLKHEWALDEDKRAFHRRRQCSM

SEQ ID NO: 35674 - protein, 189 aa, Homo sapiens [sequence omitted]

SEQ ID NO: 35675 - protein, 763 aa, Homo sapiens
LLFIEVRGRLGARQADTPLGSSPAAAAARSGLRGSGAAASGRLAARITRGSGCLLAGAARRALRARGRRRRTRGRTLAAGSLAAGSAGTGRAGRVALTMVSYWDTGVLLCALLSCLLLTGSSSGSKLKDPELSLKGTQHIMQAGQTLHLQCRGEAAHKWSLPEMVSKESERLSITKSACGRNGKQFCSTLTLNTAQANHTGFYSCKYLAVPTSKKKETESAIYIFISDTGRPFVEMYSEIPEIIHMTEGRELVIPCRVTSPNITVTLKKFPLDTLIPDGKRIIWDSRKGFIISNATYKEIGLLTCEATVNGHLYKTNYLTHRQTNTIIDVQISTPRPVKLLRGHTLVLNCTATTPLNTRVQMTWSYPDEKNKRASVRRRIDQSNSHANIFYSVLTIDKMQNKDKGLYTCRVRSGPSFKSVNTSVHIYDKAFITVKHRKQQVLETVAGKRSYRLSMKVKAFPSPEVVWLKDGLPATEKSARYLTRGYSLIIKDVTEEDAGNYTILLSIKQSNVFKNLTATLIVNVKPQIYEKAVSSFPDPALYPLGSRQILTCTAYGIPQPTIKWFWHPCNHNHSEARCDFCSNNEESFILDADSNMGNRIESITQRMAIIEGKNKMASTLVVADSRISGIYICIASNKVGTVGRNISFYITDVPNGFHVNLEKMPTEGEDLKLSCTVNKFLYRDVTWILLRTVNNRTMHYSISKQKMAITKEHSITLNLTIMNVSLQDSGTYACRARNVYTGEEILQKKEITIRGSEEMLLPK

SEQ ID NO: 35676 - protein, 12 aa, Homo sapiens
VMDLMAHMSSKE

SEQ ID NO: 35677 - protein, 107 aa, Homo sapiens
LVFAAVKTLSTVTYFLSQAASHLVPCADSSTVARIQYESRGDRRMVGAAGFSTYPSHQGPDALPPAPSAHPCAQLEGCMARSPLFRWVETLMIPAPPCRAPATEQAL

SEQ ID NO: 35678 - protein, 153 aa, Homo sapiens
MSIGTLLAYSLVAACVLVLRYQPEQPNLVYQMASTSDELDPADQNELASTNDSQLGFLPEAEMFSLKTILSPKNMEPSKISGLIVNISTSLIAVLIITFCIVTVLGREALTKGALWAVFLLAGSALLCAVVTGVIWRQPESKTKLSFKVSSSA

SEQ ID NO: 35679 - protein, 39 aa, Homo sapiens
MCLFKALSRGLMKLIFFPLRHALLSPTVTECLFRQHKKG

SEQ ID NO: 35680 - protein, 63 aa, Homo sapiens
VGEGRASEAGGGAMDPLRRRGLHSWAAPGIRSPLSQSLGGAEAATECMFTKGHHTRSCPSLSP

SEQ ID NO: 35681 - protein, 944 aa, Homo sapiens
VRSDLRRLSPAFSQGFLSASRRCPRGSRRLLTGRGCLCVLLSVRGTARPRGPEQNAARAESGGRRSRQGAGGRRPRPEAEADREPAMSVVGLDVGSQSCYIAVARAGGIETIANEFSDRCTPSVISFGSKNRTIGVAAKNQQITHANNTVSNFKRFHGRAFNDPFIQKEKENLSYDLVPLKNGGVGIKVMYMGEEHLFSVEQITAMLLTKLKETAENSLKKPVTDCVISVPSFFTDAERRSVLDAAQIVGLNCLRLMNDMTAVALNYGIYKQDLPSLDEKPRIVVFVDMGHSAFQVSACAFNKGKLKVLGTAFDPFLGGKNFDEKLVEHFCAEFKTKYKLDAKSKIRALLRLYQECEKLKKLMSSNSTDLPLNIECFMNDKDVSGKMNRSQFEELCAELLQKIEVPLYSLLEQTHLKVEDVSAVEIVGGATRIPAVKERIAKFFGKDISTTLNADEAVARGCALQCAILSPAFKVREFSVTDAVPFPISLIWNHDSEDTEGVHEVFSRNHAAPFSKVLTFLRRGPFELEAFYSDPQGVPYPEAKIGRFVVQNVSAQKDGEKSRVKVKVRVNTHGIFTISTASMVEKVPTEENEMSSEADMECLNQRPPENPDTDKNVQQDNSEAGTQPQVQTDAQQTSQSPPSPELTSEENKIPDADKANEKKVDQPPEAKKPKIKVVNVELPIEANLVWQLGKDLLNMYIETEGKMIMQDKLEKERNDAKNAVEEYVYEFRDKLCGPYEKFICEQDHQNFLRLLTETEDWLYEEGEDQAKQAYVDKLEELMKIGTPVKVRFQEAEERPKMFEELGQRLQHYAKIAADFRNKDEKYNHIDESEMKKVEKSVNEVMEWMNNVMNAQAKKSLDQDPVVRAQEIKTKIKELNNTCEPVVTQPKPKIESPKLERTPNGPNIDKKEEDLEDKNNFGAEPPHQNGECYPNEKNSVNMDLD

SEQ ID NO: 35682 - protein, 900 aa, Homo sapiens
VRSDLRRLSPAFSQGFLSASRRCPRGSRRLLTGRGCLCVLLSVRGTARPRGPEQNAARAESGGRRSRQGAGGRRPRPEAEADREPAMSVVGLDVGSQSCYIAVARAGGIETIANEFSDRCTPSVISFGSKNRTIGVAAKNQQITHANNTVSNFKRFHGRAFNDPFIQKEKENLSYDLVPLKNGGVGIKVMYMGEEHLFSVEQITAMLLTKLKETAENSLKKPVTDCVISVPSFFTDAERRSVLDAAQIVGLNCLRLMNDMTAVALNYGIYKQDLPSLDEKPRIVVFVDMGHSAFQVSACAFNKGKLKVLGTAFDPFLGGKNFDEKLVEHFCAEFKTKYKLDAKSKIRALLRLYQECEKLKKLMSSNSTDLPLNIECFMNDKDVSGKMNRSQFEELCAELLQKIEVPLYSLLEQTHLKVEDVSAVEIVGGATRIPAVKERIAKFFGKDISTTLNADEAVARGCALQCAILSPAFKVREFSVTDAVPFPISLIWNHDSEDTEGVHEVFSRNHAAPFSKVLTFLRRGPFELEAFYSDPQGVPYPEAKIGRFVVQNVSAQKDGEKSRVKVKVRVNTHGIFTISTASMVEKVPTEENEMSSEADMECLNQRPPENPDTDANEKKVDQPPEAKKPKIKVVNVELPIEANLVWQLGKDLLNMYIETEGKMIMQDKLEKERNDAKNAVEEYVYEFRDKLCGPYEKFICEQDHQNFLRLLTETEDWLYEEGEDQAKQAYVDKLEELMKIGTPVKVRFQEAEERPKMFEELGQRLQHYAKIAADFRNKDEKYNHIDESEMKKVEKSVNEVMEWMNNVMNAQAKKSLDQDPVVRAQEIKTKIKELNNTCEPVVTQPKPKIESPKLERTPNGPNIDKKEEDLEDKNNFGAEPPHQNGECYPNEKNSVNMDLD

SEQ ID NO: 35683 - protein, 820 aa, Homo sapiens
LESFFVACFIRAAKRLWLGREWAEAGLSQWHGSGPVAAMATAAVLRGPAAHWVESFQKAREEGSGSGTWRGRWRRRSVISFGSKNRTIGVAAKNQQITHANNTVSNFKRFHGRAFNDPFIQKEKENLSYDLVPLKNGGVGIKVMYMGEEHLFSVEQITAMLLTKLKETAENSLKKPVTDCVISVLGTAFDPFLGGKNFDEKLVEHFCAEFKTKYKLDAKSKIRALLRLYQECEKLKKLMSSNSTDLPLNIECFMNDKDVSGKMNRSQFEELCAELLQKIEVPLYSLLEQTHLKVEDVSAVEIVGGATRIPAVKERIAKFFGKDISTTLNADEAVARGCALQCAILSPAFKVREFSVTDAVPFPISLIWNHDSEDTEGVHEVFSRNHAAPFSKVLTFLRRGPFELEAFYSDPQGVPYPEAKIGRFVVQNVSAQKDGEKSRVKVKVRVNTHGIFTISTASMVEKVPTEENEMSSEADMECLNQRPPENPDTDKNVQQDNSEAGTQPQVQTDAQQTSQSPPSPELTSEENKIPDADKANEKKVDQPPEAKKPKIKVVNVELPIEANLVWQLGKDLLNMYIETEGKMIMQDKLEKERNDAKNAVEEYVYEFRDKLCGPYEKFICEQDHQNFLRLLTETEDWLYEEGEDQAKQAYVDKLEELMKIGTPVKVRFQEAEERPKMFEELGQRLQHYAKIAADFRNKDEKYNHIDESEMKKVEKSVNEVMEWMNNVMNAQAKKSLDQDPVVRAQEIKTKIKELNNTCEPVVTQPKPKIESPKLERTPNGPNIDKKEEDLEDKNNFGAEPPHQNGECYPNEKNSVNMDLD

SEQ ID NO: 35684 - protein, 898 aa, Homo sapiens
LESFFVACFIRAAKRLWLGREWAEAGLSQWHGSGPVAAMATAAVLRGPAAHWVESFQKAREEGSGSGTWRGRWRRRSVISFGSKNRTIGVAAKNQQITHANNTVSNFKRFHGRAFNDPFIQKEKENLSYDLVPLKNGGVGIKVMYMGEEHLFSVEQITAMLLTKLKETAENSLKKPVTDCVISVPSFFTDAERRSVLDAAQIVGLNCLRLMNDMTAVALNYGIYKQDLPSLDEKPRIVVFVDMGHSAFQVSACAFNKGKLKVLGTAFDPFLGGKNFDEKLVEHFCAEFKTKYKLDAKSKIRALLRLYQECEKLKKLMSSNSTDLPLNIECFMNDKDVSGKMNRSQFEELCAELLQKIEVPLYSLLEQTHLKVEDVSAVEIVGGATRIPAVKERIAKFFGKDISTTLNADEAVARGCALQCAILSPAFKVREFSVTDAVPFPISLIWNHDSEDTEGVHEVFSRNHAAPFSKVLTFLRRGPFELEAFYSDPQGVPYPEAKIGRFVVQNVSAQKDGEKSRVKVKVRVNTHGIFTISTASMVEKVPTEENEMSSEADMECLNQRPPENPDTDKNVQQDNSEAGTQPQVQTDAQQTSQSPPSPELTSEENKIPDADKANEKKVDQPPEAKKPKIKVVNVELPIEANLVWQLGKDLLNMYIETEGKMIMQDKLEKERNDAKNAVEEYVYEFRDKLCGPYEKFICEQDHQNFLRLLTETEDWLYEEGEDQAKQAYVDKLEELMKIGTPVKVRFQEAEERPKMFEELGQRLQHYAKIAADFRNKDEKYNHIDESEMKKVEKSVNEVMEWMNNVMNAQAKKSLDQDPVVRAQEIKTKIKELNNTCEPVVTQPKPKIESPKLERTPNGPNIDKKEEDLEDKNNFGAEPPHQNGECYPNEKNSVNMDLD

SEQ ID NO: 35685 - protein, 201 aa, Homo sapiens
VRSDLRRLSPAFSQGFLSASRRCPRGSRRLLTGRGCLCVLLSVRGTARPRGPEQNAARAESGGRRSRQGAGGRRPRPEAEADREPAMSVVGLDVGSQSCYIAVARAGGIETIANEFSDRCTPSVISFGSKNRTIGVAAKNQQITHANNTVSNFKRFHGRAFNDPFIQKEKENLSYDLVPLKNGGVGIKSPPSLQMLRGDLC

SEQ ID NO: 35686 - protein, 5938 aa, Homo sapiens
MQKGLLDQDTGLVLLESQVIMSGLIAPETGENLSLEEGIARNLINPQMYQQLRELQDALALISRLTESRGPLSVVEAIEKRIISETVGLKILEAHLATGGFSLSPSENCINLEEAFHQGLISAWLHSVLESYLRTSKNLIDPNTAEKIGLLDLMQRCIVHQESGFKLLPVKQLAGGMVSLKSGRKVSIFRAVQEGLIDRQVTVRLLEAQLFAGGIVDPRTGHRLTVEEAVRHNLIDQDMACAILIRQLQTGGIIDTVTGQRLTIDEAVSNDLVAAKIALVILESLWSFMGLLWPESGEILPITDALEQGIVSTELAHKILSNRQHIKALFLPATTEILSWKKAIESGILDRDLANNLKSICIPDVMPHMQLADSAEQNINPGAAVLPCSKSHPKATASQSENLLFQLMTHSYINVQNGQRLLLLDKELMETLTSRDEYQTSPPKVVEIGHQRQKTPEGLQESANVKISGTFSSGWTVRLPEFQFSSQNKEYPDREDCTTEKGKKTTVETEDSSVENPEQDLFVEQKERNPNIDALKVINKVKLEVQRQLIGTQREDQTAVSVRENASRGHLLTIPPAEAEGVPLVVDKDVFSVETPKKEHQPLRNTSFTCQNEQAHTLETEYIHDETGGSHIKPQSKKLQVQVKKTLGIKLELKSETDGNVHPLDKKEMLKKTFLAKDDHKESQEAQNIAGGSMMMSEKTDEEDSGREIFLSCSHPLELLEEATLNVLSAQLLDGGIFHEQTGQKLLLNEAISRGIVPSHTAVKLMEKLNMFQGFFDSQTCESLTTEEVINEGLMDEKLLHNVLMADKAISGVLDPRTQTLCSVKDAVTVGLLDKETATRILERQVVTGGIIDLKRGKKVSVTLASTLGLVDVADQPELINLEKASKGRDAEKTVRERLISLQMETTGLIDPDSKAPLTVVQSIDRGLLEREEAVRLLTKQVVDGGIIHHISGMRLSVDNAFRHGLIGEDLAEKLKRVENLNIHQIFNPETKENISLPKAIKLDLITSDLKREIQEVQAFTGNFVDLISGQRLTLAEAKKEGLLTNEAVLSPGMMHGIVDPENCRIVPYSELVKKCKIDIESGQRYLEVIPFSDIKDGVSDKVLTLSQAIQLGKVDFASTLKVLEAQANTGGIIDTATGKRLTLASALEEKLVDENMVRIIASHQVLNGGIVDIFSDQRVTLVEAIEKRLISPELANMIQIDSSEFSDHRAQIEKQEGIEVCALQNEFLGKDMLIACNQTAEMSCNKVEESERLFQVENQSAQEKVKVRVSDGEQAKKSREISLKEFGCKDQRKPRMSSDAKEFISIINPHNLKGKSLGQVSLTHPYSECDFKLKEVARNNMGNDTNEEQEKAVTKIEIISHMKQSTSCLDSEEIRENQGEVILEVQETYCETSGKLPSEQVLQQPMNARVKSKREKREVIVEESIRTCKPAFLSEEKLYQETAIRDEHDSHIKSQPREMTSSEKGKEADTEMGFSITFKIEESSSQVVPQGISVKHLDALTLFSSKQANEGKVNNLSLCLTLKPEENLSREIACGAQSEPFPCMTPRPEGLHYQESDGKAQVTGPSQISKTDKSFQGTTRQETNYQDSWVTSKTKETKHQISSSNECKEKSYQEVSFDPARGLKLEEITVSRPDSKEVRYLEFSDRKDLHHQGSKSDDKLCGTLKSEIATQELTGEKFLEMANPNVAGLEAGSIEDIVTQRGSRVLGSFLPEKLFKGVSQKENTGQQNAIISPTVLETSEEKTVSLTVCSAVKTEKTPQEKLRESPGSEQTPFMTAPEGKGNGGVNPEPFRATQNVFTRQLCLEHDEKLVSYLSLLRNIEMRTKQIQPLELNLAELQDLLCQAKVLERELKDLTTLVSQELECVNQIIISQPQEVPAQLLKALEKDAKNLQKSLSSVSDTWNSRLLHFQNAVEIEKTKVLNQHTQLEGRLQDLRAWVGNKNLILNSKGSNSEIDVDSLNLCLQQYEDLKQPMAERKAQLDALAFDIQFFISEHAQDLSPQQNRQMLRLLNELQRSFQDILEQTAAQVDALQGHLQQMEQEALVKTLQKQQNTCHQQLEDLCSWVGQAERALAGHQGRTTQQDLSALQKNQSDLKDLQDDIQNRATSFATVVKDIEGFMEENQTKLSPRELTALREKLHQAKEQYEALQEETRVAQKELEEAVTSALQQETEKSKAAKELAENKKKIDALLDWVTSVGSSGGQLLTNLPGMEQLSGASLEKGALDTTDGYMGVNQAPEKLDKQCEMMKARHQELLSQQQNFILATQSAQAFLDQHGHNLTPEEQQMLQQKLGELKEQYSTSLAQSEAELKQVQTLQDELQKFLQDHKEFESWLERSEKELENMHKGGSSPETLPSLLKRQGSFSEDVISHKGDLRFVTISGQKVLDMENSFKEGKEPSEIGNLVKDKLKDATERYTALHSKCTRLGSHLNMLLGQYHQFQNSADSLQAWMQACEANVEKLLSDTVASDPGVLQEQLATTKQLQEELAEHQVPVEKLQKVARDIMEIEGEPAPDHRHVQETTDSILSHFQSLSYSLAERSSLLQKAIAQSQSVQESLESLLQSIGEVEQNLEGKQVSSLSSGVIQEALATNMKLKQDIARQKSSLEATREMVTRFMETADSTTAAVLQGKLAEVSQRFEQLCLQQQEKESSLKKLLPQAEMFEHLSGKLQQFMENKSRMLASGNQPDQDITHFFQQIQELNLEMEDQQENLDTLEHLVTELSSCGFALDLCQHQDRVQNLRKDFTELQKTVKEREKDASSCQEQLDEFRKLVRTFQKWLKETEGSIPPTETSMSAKELEKQIEHLKSLLDDWASKGTLVEEINCKGTSLENLIMEITAPDSQGKTGSILPSVGSSVGSVNGYHTCKDLTEIQCDMSDVNLKYEKLGGVLHERQESLQAILNRMEEVHKEANSVLQWLESKEEVLKSMDAMSSPTKTETVKAQAESNKAFLAELEQNSPKIQKVKEALAGLLVTYPNSQEAENWKKIQEELNSRWERATEVTVARQRQLEESASHLACFQAAESQLRPWLMEKELMMGVLGPLSIDPNMLNAQKQQVQFMLKEFEARRQQHEQLNEAAQGILTGPGDVSLSTSQVQKELQSINQKWVELTDKLNSRSSQIDQAIVKSTQYQELLQDLSEKVRAVGQRLSVQSAISTQPEAVKQQLEETSEIRSDLEQLDHEVKEAQTLCDELSVLIGEQYLKDELKKRLETVALPLQGLEDLAADRINRLQAALASTQQFQQMFDELRTWLDDKQSQQAKNCPISAKLERLQSQLQENEEFQKSLNQHSGSYEVIVAEGESLLLSVPPGEEKRTLQNQLVELKNHWEELSKKTADRQSRLKDCMQKAQKYQWHVEDLVPWIEDCKAKMSELRVTLDPVQLESSLLRSKAMLNEVEKRRSLLEILNSAADILINSSEADEDGIRDEKAGINQNMDAVTEELQAKTGSLEEMTQRLREFQESFKNIEKKVEGAKHQLEIFDALGSQACSNKNLEKLRAQQEVLQALEPQVDYLRNFTQGLVEDAPDGSDASQLLHQAEVAQQEFLEVKQRVNSGCVMMENKLEGIGQFHCRVREMFSQLADLDDELDGMGAIGRDTDSLQSQIEDVRLFLNKIHVLKLDIEASEAECRHMLEEEGTLDLLGLKRELEALNKQCGKLTERGKARQEQLELTLGRVEDFYRKLKGLNDATTAAEEAEALQWVVGTEVEIINQQLADFKMFQKEQVDPLQMKLQQVNGLGQGLIQSAGKDCDVQGLEHDMEEINARWNTLNKKVAQRIAQLQEALLHCGKFQDALEPLLSWLADTEELIANQKPPSAEYKVVKAQIQEQKLLQRLLDDRKATVDMLQAEGGRIAQSAELADREKITGQLESLESRWTELLSKAAARQKQLEDILVLAKQFHETAEPISDFLSVTEKKLANSEPVGTQTAKIQQQIIRHKALEEDIENHATDVHQAVKIGQSLSSLTSPAEQGVLSEKIDSLQARYSEIQDRCCRKAALLDQALSNARLFGEDEVEVLNWLAEVEDKLSSVFVKDFKQDVLHRQHADHLALNEEIVNRKKNVDQAIKNGQALLKQTTGEEVLLIQEKLDGIKTRYADITVTSSKALRTLEQARQLATKFQSTYEELTGWLREVEEELATSGGQSPTGEQIPQFQQRQKELKKEVMEHRLVLDTVNEVSRALLELVPWRAREGLDKLVSDANEQYKLVSDTIGQRVDEIDAAIQRSQQYEQAADAELAWVAETKRKLMALGPIRLEQDQTTAQLQVQKAFSIDIIRHKDSMDELFSHRSEIFGTCGEEQKTVLQEKTESLIQQYEAISLLNSERYARLERAQVLVNQFWETYEELSPWIEETRALIAQLPSPAIDHEQLRQQQEEMRQLRESIAEHKPHIDKLLKIGPQLKELNPEEGEMVEEKYQKAENMYAQIKEEVRQRALALDEAVSQSTQITEFHDKIEPMLETLENLSSRLRMPPLIPAEVDKIRECISDNKSATVELEKLQPSFEALKRRGEELIGRSQGADKDLAAKEIQDKLDQMVFFWEDIKARAEEREIKFLDVLELAEKFWYDMAALLTTIKDTQDIVHDLESPGIDPSIIKQQVEAAETIKEETDGLHEELEFIRILGADLIFACGETEKPEVRKSIDEMNNAWENLNKTWKERLEKLEDAMQAAVQYQDTLQAMFDWLDNTVIKLCTMPPVGTDLNTVKDQLNEMKEFKVEVYQQQIEMEKLNHQGELMLKKATDETDRDIIREPLTELKHLWENLGEKIAHRQHKLEGALLALGQFQHALEELMSWLTHTEELLDAQRPISGDPKVIEVELAKHHVLKNDVLAHQATVETVNKAGNELLESSAGDDASSLRSRLEAMNQCWESVLQKTEEREQQLQSTLQQAQGFHSEIEDFLLELTRMESQLSASKPTGGLPETAREQLDTHMELYSQLKAKEETYNQLLDKGRLMLLSRDDSGSGSKTEQSVALLEQKWHVVSSKMEERKSKLEEALNLATEFQNSLQEFINWLTLAEQSLNIASPPSLILNTVLSQIEEHKVFANEVNAHRDQIIELDQTGNQLKFLSQKQDVVLIKNLLVSVQSRWEKVVQRSIERGRSLDDARKRAKQFHEAWKKLIDWLEDAESHLDSELEISNDPDKIKLQLSKHKEFQKTLGGKQPVYDTTIRTGRALKEKTLLPEDSQKLDNFLGEVRDKWDTVCGKSVERQHKLEEALLFSGQFMDALQALVDWLYKVEPQLAEDQPVHGDLDLVMNLMDAHKVFQKELGKRTGTVQVLKRSGRELIENSRDDTTWVKGQLQELSTRWDTVCKLSVSKQSRLEQALKQAEVFRDTVHMLLEWLSEAEQTLRFRGALPDDTEALQSLIDTHKEFMKKVEEKRVDVNSAVAMGEVILAVCHPDCITTIKHWITIIRARFEEVLTWAKQHQQRLETALSELVANAELLEELLAWIQWAETTLIQRDQEPIPQNIDRVKALIAEHQTFMEEMTRKQPDVDRVTKTYKRKNIEPTHAPFIEKSRSGGRKSLSQPTPPPMPILSQSEAKNPRINQLSARWQQVWLLALERQRKLNDALDRLEELKEFANFDFDVWRKKYMRWMNHKKSRVMDFFRRIDKDQDGKITRQEFIDGILASKFPTTKLEMTAVADIFDRDGDGYIDYYEFVAALHPNKDAYRPTTDADKIEDEVTRQVAQCKCAKRFQVEQIGENKYRFFLGNQFGDSQQLRLVRILRSTVMVRVGGGWMALDEFLVKNDPCRARGRTNIELREKFILPEGASQGMTPFRSRGRRSKPSSRAASPTRSSSSASQSNHSCTSMPSSPATPASGTKVIPSSGSKLKRPTPTFHSSRTSLAGDTSNSSSPASTGAKTNRADPKKSASRPGSRAGSRAGSRASSRRGSDASDFDLLETQSACSDTSESSAAGGQGNSRRGLNKPSKIPTMSKKTTTASPRTPGPKR

SEQ ID NO: 35687 - protein, 21 aa, Homo sapiens
MGLLCALTLCISFGLPKKPGT

SEQ ID NO: 35688 - protein, 8 aa, Homo sapiens
LHYFLFLF

SEQ ID NO: 35689 - protein, 83 aa, Homo sapiens
LFFFLVQVIYYFFIQGSEQGSTSQEQALSAQQAAVINLTGVGSFMQSQAAAVAILAASNGYGSSSSTNSSATSSSAYRQPVKK

SEQ ID NO: 35690 - protein, 802 aa, Homo sapiens
LSSPKPTASSLRGLTATERLKMIPFLPMFSLLLLLIVNPINANNHYDKILAHSRIRGRDQGPNVCALQQILGTKKKYFSTCKNWYKKSICGQKTTVLYECCPGYMRMEGMKGCPAVLPIDHVYGTLGIVGATTTQRYSDASKLREEIEGKGSFTYFAPSNEAWDNLDSDIRRGLESNVNVELLNALHSHMINKRMLTKDLKNGMIIPSMYNNLGLFINHYPNGVVTVNCARIIHGNQIATNGVVHVIDRVLTQIGTSIQDFIEAEDDLSSFRAAAITSDILEALGRDGHFTLFAPTNEAFEKLPRGVLERIMGDKVASEALMKYHILNTLQCSESIMGGAVFETLEGNTIEIGCDGDSITVNGIKMVNKKDIVTNNGVIHLIDQVLIPDSAKQVIELAGKQQTTFTDLVAQLGLASALRPDGEYTLLAPVNNAFSDDTLSMDQRLLKLILQNHILKVKVGLNELYNGQILETIGGKQLRVFVYRTAVCIENSCMEKGSKQGRNGAIHIFREIIKPAEKSLHEKLKQDKRFSTFLSLLEAADLKELLTQPGDWTLFVPTNDAFKGMTSEEKEILIRDKNALQNIILYHLTPGVFIGKGFEPGVTNILKTTQGSKIFLKEVNDTLLVNELKSKESDIMTTNGVIHVVDKLLYPADTPVGNDQLLEILNKLIKYIQIKFVRGSTFKEIPVTVYRPTLTKVKIEGEPEFRLIKEGETITEVIHGEPIIKKYTKIIDGVPVEITEKETREERIITGPEIKYTRISTGGGETEETLKKLLQEDTPVRKLQANKKVQGSRRRLREGRSQ

SEQ ID NO: 35691 - protein, 770 aa, Homo sapiens
LSSPKPTASSLRGLTATERLKMIPFLPMFSLLLLLIVNPINANNHYDKILAHSRIRGRDQGPNVCALQQILGTKKKYFSTCKNWYKKSICGQKTTVLYECCPGYMRMEGMKGCPAVLPIDHVYGTLGIVGATTTQRYSDASKLREEIEGKGSFTYFAPSNEAWDNLDSDIRRGLESNVNVELLNALHSHMINKRMLTKDLKNGMIIPSMYNNLGLFINHYPNGVVTVNCARIIHGNQIATNGVVHVIDRVLTQIGTSIQDFIEAEDDLSSFRAAAITSDILEALGRDGHFTLFAPTNEAFEKLPRGVLERIMGDKVASEALMKYHILNTLQCSESIMGGAVFETLEGNTIEIGCDGDSITVNGIKMVNKKDIVTNNGVIHLIDQVLIPDSAKQVIELAGKQQTTFTDLVAQLGLASALRPDGEYTLLAPVNNAFSDDTLSMDQRLLKLILQNHILKVKVGLNELYNGQILETIGGKQLRVFVYRTAVCIENSCMEKGSKQGRNGAIHIFREIIKPAEKSLHEKLKQDKRFSTFLSLLEAADLKELLTQPGDWTLFVPTNDAFKGMTSEEKEILIRDKNALQNIILYHLTPGVFIGKGFEPGVTNILKTTQGSKIFLKEVNDTLLVNELKSKESDIMTTNGVIHVVDKLLYPADTPVGNDQLLEILNKLIKYIQIKFVRGSTFKEIPVTVYSPEIKYTRISTGGGETEETLKKLLQEEVTKVTKFIEGGDGHLFEDEEIKRLLQGDTPVRKLQANKKVQGSRRRLREGRSQ

SEQ ID NO: 35692 - protein, 857 aa, Homo sapiens
LSSPKPTASSLRGLTATERLKMIPFLPMFSLLLLLIVNPINANNHYDKILAHSRIRGRDQGPNVCALQQILGTKKKYFSTCKNWYKKSICGQKTTVLYECCPGYMRMEGMKGCPAVLPIDHVYGTLGIVGATTTQRYSDASKLREEIEGKGSFTYFAPSNEAWDNLDSDIRRGLESNVNVELLNALHSHMINKRMLTKDLKNGMIIPSMYNNLGLFINHYPNGVVTVNCARIIHGNQIATNGVVHVIDRVLTQIGTSIQDFIEAEDDLSSFRAAAITSDILEALGRDGHFTLFAPTNEAFEKLPRGVLERIMGDKVASEALMKYHILNTLQCSESIMGGAVFETLEGNTIEIGCDGDSITVNGIKMVNKKDIVTNNGVIHLIDQVLIPDSAKQVIELAGKQQTTFTDLVAQLGLASALRPDGEYTLLAPVNNAFSDDTLSMDQRLLKLILQNHILKVKVGLNELYNGQILETIGGKQLRVFVYRTAVCIENSCMEKGSKQGRNGAIHIFREIIKPAEKSLHEKLKQDKRFSTFLSLLEAADLKELLTQPGDWTLFVPTNDAFKGMTSEEKEILIRDKNALQNIILYHLTPGVFIGKGFEPGVTNILKTTQGSKIFLKEVNDTLLVNELKSKESDIMTTNGVIHVVDKLLYPADTPVGNDQLLEILNKLIKYIQIKFVRGSTFKEIPVTVYTTKIITKVVEPKIKVIEGSLQPIIKTEGPTLTKVKIEGEPEFRLIKEGETITEVIHGEPIIKKYTKIIDGVPVEITEKETREERIITGPEIKYTRISTGGGETEETLKKLLQEEVTKVTKFIEGGDGHLFEDEEIKRLLQGDTPVRKLQANKKVQGSRRRLREGRSQ

SEQ ID NO: 35693 - protein, 17 aa, Homo sapiens
LSCVLDSFRHHHVEGFL

SEQ ID NO: 35694 - protein, 3231 aa, Homo sapiens
LRLQPGRRRATLPSFWPSPGYRRTPRATRGVPGTSRRCLLLSARGPTSHALRLTCPSPNTGTMHSAGTPGLSSRRTGNSTSFQPGPPPPPRLLLLLLLLLSLVSRVPAQPAAFGRALLSPGLAGAAGVPAEEAIVLANRGLRVPFGREVWLDPLHDLVLQVQPGDRCAVSVLDNDALAQRPGRLSPKRFPCDFGPGEVRYSHLGARSPSRDRVRLQLRYDAPGGAVVLPLVLEVEVVFTQLEVVTRNLPLVVEELLGTSNALDARSLEFAFQPETEECRVGILSGLGALPRYGELLHYPQVPGGAREGGAPETLLMDCKAFQELGVRYRHTAASRSPNRDWIPMVVELRSRGAPVGSPALKREHFQVLVRIRGGAENTAPKPSFVAMMMMEVDQFVLTALTPDMLAAEDAESPSDLLIFNLTSPFQPGQGYLVSTDDRSLPLSSFTQRDLRLLKIAYQPPSEDSDQERLFELELEVVDLEGAASDPFAFMVVVKPMNTMAPVVTRNTGLILYEGQSRPLTGPAGSGPQNLVISDEDDLEAVRLEVVAGLRHGHLVILGASSGSSAPKSFTVAELAAGQVVYQHDDRDGSLSDNLVLRMVDGGGRHQVQFLFPITLVPVDDQPPVLNANTGLTLAEGETVPILPLSLSATDMDSDDSLLLFVLESPFLTTGHLLLRQTHPPHEKQELLRGLWRKEGAFYERTVTEWQQQDITEGRLFYRHSGPHSPGPVTDQFTFRVQDNHDPPNQSGLQRFVIRIHPVDRLPPELGSGCPLRMVVQESQLTPLRKKWLRYTDLDTDDRELRYTVTQPPTDTDENHLPAPLGTLVLTDNPSVVVTHFTQAQINHHKIAYRPPGQELGVATRVAQFQFQVEDRAGNVAPGTFTLYLHPVDNQPPEILNTGFTIQEKGHHILSETELHVNDVDTDVAHISFTLTQAPKHGHMRVSGQILHVGGLFHLEDIKQGRVSYAHNGDKSLTDSCSLEVSDRHHVVPITLRVNVRPVDDEVPILSHPTGTLESYLDVLENGATEITANVIKGTNEETDDLMLTFLLEDPPLYGEILVNGIPAEQFTQRDILEGSVVYTHTSGEIGLLPKADSFNLSLSDMSQEWRIGGNTIQGVTIWVTILPVDSQAPEIFVGEQLIVMEGDKSVITSVHISAEDVDSLNDDILCTIVIQPTSGYVENISPAPGSEKSRAGIAISAFNLKDLRQGHINYVQSVHKGVEPVEDRFVFRCSDGINFSERQFFPIVIIPTNDEQPEMFMREFMVMEGMSLVIDTPILNAADADVPLDDLTFTITQFPTHGHIMNQLINGTVLVESFTLDQIIESSSIIYEHDDSETQEDSFVIKLTDGKHSVEKTVLIIVIPVDDETPRMTINNGLEIEIGDTKIINNKILMATDLDSEDKSLVYIIRYGPGHGLLQRRKPTGAFENITLGMNFTQDEVDRNLIQYVHLGQEGIRDLIKFDVTDGINPLIDRYFYVSIGSIDIVFPDVISKGVSLKEGGKVTLTTDLLSTSDLNSPDENLVFTITRAPMRGHLECTDQPGVSITSFTQLQLAGNKIYYIHTADDEVKMDSFEFQVTDGRNPVFRTFRISISDVDNKKPVVTIHKLVVSESENKLITPFELTVEDRDTPDKLLKFTITQVPIHGHLLFNNTRPVMVFTKQDLNENLISYKHDGTESSEDSFSFTVTDGTHTDFYVFPDTVFETRRPQVMKIQVLAVDNSVPQIAVNKGASTLRTLATGHLGFMITSKILKVEDRDSLHISLRFIVTEAPQHGYLLNLDKGNHSITQFTQADIDDMKICYVLREGANATSDMFYFAVEDGGGNKLTYQNFRLNWAWISFEKEYYLVNEDSKFLDVVLKRRGYLGETSFISIGTRDRTAEKDKDFKGKAQKQVQFNPGQTRATWRVRILSDGEHEQSETFQVVLSEPVLAALEFPTVATVEIVDPGDEPTVFIPQSKYSVEEDVGELFIPIRRSGDVSQELMVVCYTQQGTATGTVPTSVLSYSDYISRPEDHTSVVRFDKDEREKLCRIVIIDDSLYEEEETFHVLLSMPMGGRIGSEFPGAQVTIVPDKDDEPIFYFGDVEYSVDESAGYVEVQVWRTGTDLSKSSSVTVRSRKTDPPSADAGTDYVGISRNLDFAPGVNMQPVRVVILDDLGQPALEGIEKFELVLRMPMNAALGEPSKATVSINDSVSDLPKMQFKERIYTGSESDGQIVTMIHRTGDVQYRSSVRCYTRQGSAQVMMDFEERPNTDTSIITFLPGETEKPCILELMDDVLYEEVEELRLVLGTPQSNSPFGAAVGEQNETLIRIRDDADKTVIKFGETKFSVTEPKEPGESVVIRIPVIRQGDTSKVSIVRVHTKDGSATSGEDYHPVSEEIEFKEGETQHVVEIEVTFDGVREMREAFTVHLKPDENMIAEMQLTKAIVYIEEMSSMADVTFPSVPQIVSLLMYDDTSKAKESAEPMSGYPVICITACNPKYSDYDKTGSICASENINDTLTRYRWLISAPAGPDGVTSPMREVDFDTFFTSSKMVTLDSIYFQPGSRVQCAARAVNTNGDEGLELMSPIVTISREEGLCQPRVPGVVGAEPFSAKLRYTGPEDADYTNLIKLTVTMPHIDGMLPVISTRELSNFELTLSPDGTRVGNHKCSNLLDYTEVKTHYGFLTDATKNPEIIGETYPYQYSLSIRGSTTLRFYRNLNLEACLWEFVSYYDMSELLADCGGTIGTDGQVLNLVQSYVTLRVPLYVSYVFHSPVGVGGWQHFDLKSELRLTFVYDTAILWNDGIGSPPEAELQGSLYPTSMRIGDEGRLAVHFKTEAQFHGLFVLSHPASFTSSVIMSADHPGLTFSLRLIRSEPTYNQPVQQWSFVSDFAVRDYSGTYTVKLVPCTAPSHQEYRLPVTCNPREPVTFDLDIRFQQVSDPVAAEFSLNTQMYLLSKKSLWLSDGSMGFGQESDVAFAEGDIIYGRVMVDPVQNLGDSFYCSIEKVFLCTGADGYVPKYSPMNAEYGCLADSPSLLYRFKIVDKAQPETQATSFGNVLFNAKLAVDDPEAILLVNQPGSDGFKVDSTPLFQVALGREWYIHTIYTVRSKDNANRGIGKRSVEYHSLVSQGKPQSTTKSRKKREIRSTPSLAWEIGAENSRGTNIQHIALDRTKRQIPHGRAPPDGILPWELNSPSSAVSLVTVVGGTTVGLLTICLTVIAVLMCRGKESFRGKDAPKGSSSSEPMVPPQSHHNDSSEV

SEQ ID NO: 35695 - protein, 94 aa, Homo sapiens
LVSVPFRTQSSCIQGGETGDRVFGPRADPLCRCKPLQPEAVRSSPRHLRTLPLLASRLVMARFWVCVAGAGFFLAFLVLHSRFCGSPVSWVVRK

SEQ ID NO: 35696 - protein, 339 aa, Homo sapiens
LVSVPFRTQSSCIQGGETGDRVFGPRADPLCRCKPLQPEAVRSSPRHLRTLPLLASRLVMARFWVCVAGAGFFLAFLVLHSRFCGSPVLRNFTFAVSWRTEKILYRLDVGWPKHPEYFTGTTFCVAVDSLNGLVYIGQRGDNIPKILVFTEDGYFLRAWNYTVDTPHGIFAASTLYEQSVWITDVGSDFMILWLHGENGTGPAKFNIPHSVTLDSAGRVWVADRGNKRIQVFDKDTGEWLGAWNNCFTEEGPSSVRFTPDGKYLIVAQLNLSRLSVVAAPPVGSIGECSVISTIQLADQVLPHLLEVDRKTGAVYVAEIGAKQVQKYVPLNSYVPSFGS

SEQ ID NO: 35697 - protein, 139 aa, Homo sapiens
MLKNKPCYPAPPPFFCSYLDGKLNLNCLILFKVLRNFTFAVSWRTEKILYRLDVGWPKHPEYFTGTTFCVAVDSLNGLVYIGQRGDNIPKILVFTEDGYFLRAWNYTVDTPHGIFAASTLYEQSVWITDVGSGMYSNIY

SEQ ID NO: 35698 - protein, 31 aa, Homo sapiens
MFPPEKDSKLCVRPGRGREGGRRPPAMDHHL

SEQ ID NO: 35699 - protein, 648 aa, Homo sapiens
MRMRGRFAHAQYSRCLRGPCLAEVAAGGGTRSAMAEGSGEVVAVSATGAANGLNNGAGGTSATTCNPLSRKLHKILETRLDNDKEMLEALKALSTFFVENSLRTRRNLRGDIERKSLAINEEFVSIFKEVKEELESISEDVQAMSNCCQDMTSRLQAAKEQTQDLIVKTTKLQSESQKLEIRAQVADAFLSKFQLTSDEMSLLRGTREGPITEDFFKALGRVKQIHNDVKVLLRTNQQTAGLEIMEQMALLQETAYERLYRWAQSECRTLTQESCDVSPVLTQAMEALQDRPVLYKYTLDEFGTARRSTVVRGFIDALTRGGPGGTPRPIEMHSHDPLRYVGDMLAWLHQATASEKEHLEALLKHVTTQGVEENIQEVVGHITEGVCRPLKVRIEQVIVAEPGAVLLYKISNLLKFYHHTISGIVGNSATALLTTIEEMHLLSKKIFFNSLSLHASKLMDKVELPPPDLGPSSALNQTLMLLREVLASHDSSVVPLDARQADFVQVLSCVLDPLLQMCTVSASNLGTADMATFMVNSLYMMKTTLALFEFTDRRLEMLQFQIEAHLDTLINEQASYVLTRVGLSYIYNTVQQHKPEQGSLANMPNLDSVTLKAAMVQFDRYLSAPDNLLIPQLNFLLSATVKRPPNGP

SEQ ID NO: 35700 - protein, 11 aa, Homo sapiens
VNLLGIFLMWI

SEQ ID NO: 35701 - protein, 16 aa, Homo sapiens
LLLLLVLLLQLLLPHC

SEQ ID NO: 35702 - protein, 91 aa, Homo sapiens [sequence omitted]

SEQ ID NO: 35703 - protein, 631 aa, Homo sapiens
LVLLFHVTFGWLYLRIITPFRRLMLCAENRKEMEDWISSLKSVQTREPYEVAQFNVEHFSGMHNWYACSHARPTFCNVCRESLSGVTSHGLSCEVCKFKAHKRCAVRATNNCKWTTLASIGKDIIEDEDGVAMPHQWLEGNLPVSAKCAVCDKTCGSVLRLQDWKCLWCKTMVHTACKDLYHPICPLGQCKVSIIPPIALNSTDSDGFCRATFSFCVSPLLVFVNSKSGDNQGVKFLRRFKQLLNPAQVFDLMNGGPHLGLRLFQKFDNFRILVCGGDGSVGWVLSEIDKLNLNKQCQLGVLPLGTGNDLARVLGWGGSYDDDTQLPQILEKLERASTKMLDRWSIMTYELKLPPKASLLPGPPEASEEFYMTIYEDSVATHLTKILNSDEHAVVISSAKTLCETVKDFVAKVEKTYDKTLENAVVADAVASKCSVLNEKLEQLLQALHTDSQAAPVLPGLSPLIVEEDAVESSSEESLGESKEQLGDDVTKPSSQKAVKPREIMLRANSLKKAVRQVIEEAGKVMDDPTVHPCEPANQSSDYDSTETDESKEEAKDDGAKESITVKTAPRSPDARASYGHSQTDSVPGPAVAASKENLPVLNTRIICPGNDFSDMTSTRHKRQINWTSPK

SEQ ID NO: 35704 - protein, 19 aa, Homo sapiens
MSVSCGGCGPQIFLFDTLQ

SEQ ID NO: 35705 - protein, 22 aa, Homo sapiens
LKEPLEIKSHLPNHNKYLYIWR

SEQ ID NO: 35706 - protein, 17 aa, Homo sapiens
LYSSYMHMFLCMFSTQL

SEQ ID NO: 35707 - protein, 20 aa, Homo sapiens
LFCLLYICVCSVTILYNRGL

SEQ ID NO: 35708 - protein, 59 aa, Homo sapiens
LRHFSISFLSSLLGTENASVRLDNSSSGASVVAIDNKIEQAMVCTDEKSFILNVGTAQK

SEQ ID NO: 35709 - protein, 72 aa, Homo sapiens
LKNTLCPSLFLCFWLLKIRDYFNLKKHTNLPCSVCPFKVMWKHKTNVFYVEQNILCAFSFCGSMGNYGLFFK

SEQ ID NO: 35710 - protein, 206 aa, Homo sapiens
VPGARAQLWCATEGQIPRAAAGAGNAGNGGARRTVMGGSVYPADDEMFSDIYKIREIADGLCLEVEGKMVSRTEGNIDDSLIGGNASAEGPEGEGTESTVITGVDIVMNHHLQETSFTKEAYKKYIKDYMKSIKGKLEEQRPERVKPFMTGAAEQIKHILANFKNYQFFIGENMNPDGMVALLDYREDGVTPYMIFFKDGLEMEKC

SEQ ID NO: 35711 - protein, 92 aa, Homo sapiens
LAWKVLWMRLCLLQLYCFFLMQMVSRTEGNIDDSLIGGNASAEGPEGEGTESTVITGVDIVMNHHLQETSFTKEAYKKYIKDYMKSSLLVKT

SEQ ID NO: 35712 - protein, 35 aa, Homo sapiens
MKPLGIPLCFAWLIPCQFQIFTSGQLQGGYPCPSS

SEQ ID NO: 35713 - protein, 1769 aa, Homo sapiens
LVVFLLPFLNLQSLRYFSSCDPVSLDPGEAAGGLVLLLSHPGGSSLAKSRFPGAARASLSPRRRPPGSRRGDRVASPAPRSGGGGGASGLHLRRELGEEYKMSKIRRKVTVENTKTISDSTSRRPSVFERLGPSTGSTAETQCRNWLKTGNCLYGNTCRFVHGPSPRGKGYSSNYRRSPERPTGDLRERMKNKRQDVDTEPQKRNTEESSSPVRKESSRGRHREKEDIKITKERTPESEEENVEWETNRDDSDNGDINYDYVHELSLEMKRQKIQRELMKLEQENMEKREEIIIKKEVSPEVVRSKLSPSPSLRKSSKSPKRKSSPKSSSASKKDRKTSAVSSPLLDQQRNSKTNQSKKKGPRTPSPPPPIPEDIALGKKYKEKYKVKDRIEEKTRDGKDRGRDFERQREKRDKPRSTSPAGQHHSPISSRHHSSSSQSGSSIQRHSPSPRRKRTPSPSYQRTLTPPLRRSASPYPSHSLSSPQRKQSPPRHRSPMREKGRHDHERTSQSHDRRHERREDTRGKRDREKDSREEREYEQDQSSSRDHRDDREPRDGRDRRDARDTRDRRELRDSRDMRDSREMRDYSRDTKESRDPRDSRSTRDAHDYRDREGRDTHRKEDTYPEESRSYGRNHLREESSRTEIRNESRNESRSEIRNDRMGRSRGRVPELPEKGSRGSRGSQIDSHSSNSNYHDSWETRSSYPERDRYPERDNRDQARDSSFERRHGERDRRDNRERDQRPSSPIRHQGRNDELERDERREERRVDRVDDRRDERARERDRERERDRERERERERERDREREKERELERERAREREREREKERDRERDRDRDHDRERERERERDREKEREREREERERERERERERERERERERERARERDKERERQRDWEDKDKGRDDRREKREEIREDRNPRDGHDERKSKKRYRNEGSPSPRQSPKRRREHSPDSDAYNSGDDKNEKHRLLSQVVRPQESRSLSPSHLTEDRQGRWKEEDRKPERKESSRRYEEQELKEKVSSVDKQREQTEILESSRMRAQDIIGHHQSEDRETSDRAHDENKKKAKIQKKPIKKKKEDDVGIERGNIETTSEDGQVFSPKKGQKKKSIEKKRKKSKGDSDISDEEAAQQSKKKRGPRTPPITTKEELVEMCNGKNGILEDSQKKEDTAFSDWSDEDVPDRTEVTEAEHTATATTPGSTPSPLSSLLPPPPPVATATATTVPATLAATTAAAATSFSTSAITISTSATPTNTTNNTFANEDSHRKCHRTRVEKVETPHVTIEDAQHRKPMDQKRSSSLGSNRSNRSHTSGRLRSPSNDSAHRSGDDQSGRKRVLHSGSRDREKTKSLEITGERKSRIDQLKRGEPSRSTSSDRQDSRSHSSRRSSPESDRQVHSRSGSFDSRDRLQERDRYEHDRERERERRDTRQREWDRDADKDWPRNRDRDRLRERERERERDKRRDLDRERERLISDSVERDRDRDRDRTFESSQIESVKRCEAKLEGEHERDLESTSRDSLALDKERMDKDLGSVQGFEETNKSERTESLEGDDESKLDDAHSLGSGAGEGYEPISDDELDEILAGDAEKREDQQDEEKMPDPLDVIDVDWSGLMPKHPKEPREPGAALLKFTPGAVMLRVGISKKLAGSELFAKVKETCQRLLEKPKDADNLFEHELGALNMAALLRKEERASLLSNLGPCCKALCFRRDSAIRKQLVKNEKGTIKQAYTSAPMVDNELLRLSLRLFKRKTTCHAPGHEKTEDNKLSQSSIQQELCVS

SEQ ID NO: 35714 - protein, 101 aa, Homo sapiens
LDCSRCHVLLPRSPSRDELLFPQLLCLLSFWEGWQLIFSPESLSRTCPCLKRAVLPNMMPPPRYNPHPVTNKQGLQRHACLPQFGTTLPGQPSLKALHRNR

SEQ ID NO: 35715 - protein, 400 aa, Homo sapiens
LGLLLLHTVAMKASCAVLQVSPVTETRTYHDVKEICKCDVDEFVILELGDFNDITETCSCSCSSSKSVTYEPDFNSAELLAKELYRVFQKCWILSVVNSQLAGSLSAAGSIVVNEECVRKDFESSMNVVQEIKFKSRIRGTEDWAPPRFQIIFNIHPPLKRDLVVAAQNFFCAGCGTPVEPKFVKRLRYCEYLGKYFCDCCHSYAESCIPARILMMWDFKKYYVSNFSKQLLDSIWHQPIFNLLSIGQSLYAKAKELDRVKEIQEQLFHIKKLLKTCRFANSALKEFEQVPGHLTDELHLFSLEDLVRIKKGLLAPLLKDILKASLAHVAGCELCQGKGFICEFCQNTTVIFPFQTATCRRCSACRACFHKQCFQSSECPRCARITARRKLLESVASAAT

SEQ ID NO: 35716 - protein, 521 aa, Homo sapiens
LLLPGARWPRNAARSRAREDPTRGVYPAQRSTARVWLGAVQVSRRTISSNSFSPEVFVLPVDVEKENAHFYVADMIISAMEKMKCNILSQQQTESWSKEVSGLLGSDQPDSEMTFDTNIKQESGSSTSSYSGYEGCAVLQVSPVTETRTYHDVKEICKCDVDEFVILELGDFNDITETCSCSCSSSKSVTYEPDFNSAELLAKELYRVFQKCWILSVVNSQLAGSLSAAGSIVVNEECVRKDFESSMNVVQEIKFKSRIRGTEDWAPPRFQIIFNIHPPLKRDLVVAAQNFFCAGCGTPVEPKFVKRLRYCEYLGKYFCDCCHSYAESCIPARILMMWDFKKYYVSNFSKQLLDSIWHQPIFNLLSIGQSLYAKAKELDRVKEIQEQLFHIKKLLKTCRFANSALKEFEQVPGHLTDELHLFSLEDLVRIKKGLLAPLLKDILKASLAHVAGCELCQGKGFICEFCQNTTVIFPFQTATCRRCSACRACFHKQCFQSSECPRCARITARRKLLESVASAAT

SEQ ID NO: 35717 - protein, 611 aa, Homo sapiens
LLLPGARWPRNAARSRAREDPTRGVYPAQRSTARVWLGPSPSCLGDSLAETTLSEDTTDSVGSASPHGSSEKSSSFSLSSTEVHMVRPGYSHRVSLPTSPGILATSPYPETDSAFFEPSHLTSAADEGAVQVSRRTISSNSFSPEVFVLPVDVEKENAHFYVADMIISAMEKMKCNILSQQQTESWSKEVSGLLGSDQPDSEMTFDTNIKQESGSSTSSYSGYEGCAVLQVSPVTETRTYHDVKEICKCDVDEFVILELGDFNDITETCSCSCSSSKSVTYEPDFNSAELLAKELYRVFQKCWILSVVNSQLAGSLSAAGSIVVNEECVRKDFESSMNVVQEIKFKSRIRGTEDWAPPRFQIIFNIHPPLKRDLVVAAQNFFCAGCGTPVEPKFVKRLRYCEYLGKYFCDCCHSYAESCIPARILMMWDFKKYYVSNFSKQLLDSIWHQPIFNLLSIGQSLYAKAKELDRVKEIQEQLFHIKKLLKTCRFANSALKEFEQVPGHLTDELHLFSLEDLVRIKKGLLAPLLKDILKASLAHVAGCELCQGKGFICEFCQNTTVIFPFQTATCRRCSACRACFHKQCFQSSECPRCARITARRKLLESVASAAT

SEQ ID NO: 35718 - protein, 76 aa, Homo sapiens
VAPVWEAGGVAASGRRCPLLGSSPPSPFCCYRERGGHGTLPGAARGRTRRAAFTQRSVPPLGFGWNSSPDPQLAMW

SEQ ID NO: 35719 - protein, 57 aa, Homo sapiens
LHLIVPFRMDCLYEACIMQLSSFFCRSQSFLLLLQNVTCNLPVYYCWIQSSSLIRVL

SEQ ID NO: 35720 - protein, 486 aa, Homo sapiens
LRLGPPVACAPARGAEGTGSDSEMAASMFYGRLVAVATLRNHRPRTAQRAAAQVLGSSGLFNNHGLQVQQQQQRNLSLHEYMSMELLQEAGVSVPKGYVAKSPDEAYAIAKKLGSKDVVIKAQVLAGGRGKGTFESGLKGGVKIVFSPEEAKAVSSQMIGKKLFTKQTGEKGRICNQVLVCERKYPRREYYFAITMERSFQGPVLIGSSHGGVNIEDVAAESPEAIIKEPIDIEEGIKKEQALQLAQKMGFPPNIVESAAENMVKLYSLFLKYDATMIEINPMVEDSDGAVLCMDAKINFDSNSAYRQKKIFDLQDWTQEDERDKDAAKANLNYIGLDGNIGCLVNGAGLAMATMDIIKLHGGTPANFLDVGGGATVHQVTEAFKLITSDKKVLAILVNIFGGIMRCDVIAQGIVMAVKDLEIKIPVVVRLQGTRVDDAKALIADSGLKILACDDLDEAARMVVKLSEIVTLAKQAHVDVKFQLPI

SEQ ID NO: 35721 - protein, 314 aa, Homo sapiens
LPPRSFPNLFSRPEPLPEPGRRGCNRSREPAARAPSPPPPFEGAPGRAMVKVTFNSALAQKEAKKDEPKSGEEALIIPPDAVAVDCKDPDDVVPVGQRRAWCWCMCFGLAFMLAGVILGGAYLYKYFALQPDDVYYCGIKYIKDDVILNEPSADAPAALYQTIEENIKIFEEEEVEFISVPVPEFADSDPANIVHDFNKKLTAYLDLNLDKCYVIPLNTSIVMPPRNLLELLINIKAGTYLPQSYLIHEHMVITDRIENIDHLGFFIYRLCHDKETYKLQRRETIKGIQKREASNCFAIRHFENKFAVETLICS

SEQ ID NO: 35722 - protein, 208 aa, Homo sapiens
LPPRSFPNLFSRPEPLPEPGRRGCNRSREPAARAPSPPPPFEGAPGRAMVKVTFNSALAQKEAKKDEPKSGEEALIIPPDAVAVDCKDPDDVVPVGQRRAWCWCMCFGLAFMLAGVILGGAYLYKYFALQAGTYLPQSYLIHEHMVITDRIENIDHLGFFIYRLCHDKETYKLQRRETIKGIQKREASNCFAIRHFENKFAVETLICS

SEQ ID NO: 35723 - protein, 29 aa, Homo sapiens
MFLLGISEKKEIFIKPSKDPDNLQINWRL

SEQ ID NO: 35724 - protein, 9 aa, Homo sapiens
MTEYWVPEI

SEQ ID NO: 35725 - protein, 136 aa, Homo sapiens
LSVFTLGILAGWFPGQMLLIHTCGPQETKGDLCWHGLDFLSTNAHEMWKLSEHPHQNHTLKQAGWGRETPSHHGEAEMLQPPRSLCSRGGTILLCVLPALSEVCEGRGQCSKELALPQRREWNVRGHMKAVTLPTF

SEQ ID NO: 35726 - protein, 26 aa, Homo sapiens
LLHFLTCLLLVGTVHKYNLLFHFSLK

SEQ ID NO: 35727 - protein, 125 aa, Homo sapiens
LPAPAFCFTRGTTNAAAAMLTTEPGGGARSRRAECGCAGPADGARGRDPEPPPRARRAGALSPERESPRGHRRVAAERPRLAPGAPTPSRASGFLPRPGCAWLVVASAVARLGATLRKSGVNGGS

SEQ ID NO: 35728 - protein, 1162 aa, Homo sapiens
VYYAVSLLDFLVLCCYCKNEMSGPAQVPMMSPNGSVPPIYVPPGYAPQVIEDNGVRRVVVVPQAPEFHPGSHTVLHRSPHPPLPGFIPVPTMMPPPPRHMYSPVTGAGDMTTQYMPQYQSSQVYGDVDAHSTHGRSNFRDERSSKTYERLQKKLKDRQGTQKDKMSSPPSSPQKCPSPINEHNGLIKGQIAGGINTGSAKIKSGKGKGGTQVDTEIEEKDEETKAFEALLSNIVKPVASDIQARTVVLTWSPPSSLINGETDESSVPELYGYEVLISSTGKDGKYKSVYVGEETNITLNDLKPAMDYHAKVQAEYNSIKGTPSEAEIFTTLSCEPDIPNPPRIANRTKNSLTLQWKAPSDNGSKIQNFVLEWDEGKGNGEFCQCYMGSQKQFKITKLSPAMGCKFRLSARNDYGTSGFSEEVLYYTSGCAPSMPASPVLTKAGITWLSLQWSKPSGTPSDEGISYILEMEEETSGYGFKPKYDGEDLAYTVKNLRRSTKYKFKVIAYNSEGKSNPSEVVEFTTCPDKPGIPVKPSVKGKIHSHSFKITWDPPKDNGGATINKYVVEMAEGSNGNKWEMIYSGATREHLCDRLNPGCFYRLRVYCISDGGQSAVSESLLVQTPAVPPGPCLPPRLQGRPKAKEIQLRWGPPLVDGGSPISCYSVEMSPIEKDEPREVYQGSEVECTVSSLLPGKTYSFRLRAANKMGFGPFSEKCDITTAPGPPDQCKPPQVTCRSATCAQVNWEVPLSNGTDVTEYRLEWGGVEGSMQICYCGPGLSYEIKGLSPATTYYCRVQALSVVGAGPFSEVVACVTPPSVPGIVTCLQEISDDEIENPHYSPSTCLAISWEKPCDHGSEILAYSIDFGDKQSLTVGKVTSYIINNLQPDTTYRIRIQALNSLGAGPFSHMIKLKTKPLPPDPPRLECVAFSHQNLKLKWGEGTPKTLSTDSIQYHLQMEDKNGRFVSLYRGPCHTYKVQRLNESTSYKFCIQACNEAGEGPLSQEYIFTTPKSVPAALKAPKIEKVNDHICEITWECLQPMKGDPVIYSLQVMLGKDSEFKQIYKGPDSSFRYSSLQLNCEYRFRVCAIRQCQDSLGHQDLVGPYSTTVLFISQRTEPPASTNRDTVESTRTRRALSDEQCAAVILVLFAFFSILIAFIIQYFVIK

SEQ ID NO: 35729 - protein, 17 aa, Homo sapiens
MSDWERFPWQQRTLGLG

SEQ ID NO: 35730 - protein, 86 aa, Homo sapiens
MDILWMLQTFLLPCIVFLAFKKIKLSDEPVEAKEDYTKFNTKDLKTEKKNSKMTAAQKALAKVDKSGMKSIDTFFGVKNKKKIGKV

SEQ ID NO: 35731 - protein, 135 aa, Homo sapiens [sequence omitted]

SEQ ID NO: 35732 - protein, 75 aa, Homo sapiens
LPLERGGRRVVAARSRVGARGRRAPDARPRPSLPPRGLDHSPQTRKSLAALGSGRAVPWGSAGRSGFSRRKGPHG

SEQ ID NO: 35733 - protein, 72 aa, Homo sapiens
LTKALEQKPDDAQYYCQRAYCHILLGSYYVAVADTKKSYELNPNNSTAMLRKGGWRHGVLLCHPSSSAMAPS

SEQ ID NO: 35734 - protein, 14 aa, Homo sapiens
LIQWIKEGKLGVSN

SEQ ID NO: 35735 - protein, 28 aa, Homo sapiens
LLLAARHGTVRNEPVSPELVAAASAALF

SEQ ID NO: 35736 - protein, 803 aa, Homo sapiens
LSIRMKPMLKDFSNLLLVVLCDYVLGEAEYLLLREPGHVALSNDTVYVDFQYFDGANGTLRNVSVLLLEANTNQTVTTKYLLTNQSQGTLKFECFYFKEAGDYWFTMTPEATDNSTPFPWWEKSAFLKVEWPVFHVDLNRSAKAAEGTFQVGLFTSQPLCPFPVDKPNIVVDVIFTNSLPEARRNSRQPLEIRTSKRTELAQGQWVEFGCAPLGPEAYVTVVLKLLGRDSVITSTGPIDLAQKFGYKLVMVPELTCESGVEVTVLPPPCTFVQGVVTVFKEAPRYPGKRTIHLAENSLPLGERRTIFNCTLFDMGKNKYCFDFGISSRSHFSAKEECMLIQRNTAFQPSSPSPLQPQGPVKSNNIVTVTGISLCLFIIIATVLITLWRRFGRPAKCSTPARHNSIHSPSFRKNSDEENICELSEQRGSFSDGGDGPTGSPGDTGIPLTYRRSGPVPPEDDASGSESFQSNAQKIIPPLFSYRLAQQQLKEMKKKGLTETTKVYHVSQSPLTDTAIDAAPSAPLDLESPEEAAANKFRIKSPFPEQPAVSAGERPPSRLDLNVTQASCAISPSQTLIRKSQARHVGSRGGPSERSHARNAHFRRTASFHEARQARPFRERSMSTLTPRQAPAYSSRTRTCEQAEDRFRPQSRGAHLFPEKLEHFQEASGTRGPLNPLPKSYTLGQPLRKPDLGDHQAGLVAGIERTEPHRARRGPSPSHKSVSRKQSSPISPKDNYQRVSSLSPSQCRKDKCQSFPTHPEFAFYDNTSFGLTEAEQRMLDLPGYFGSNEEDETTSTLSVEKLVI

SEQ ID NO: 35737 - protein, 856 aa, Homo sapiens
LSIRMKPMLKDFSNLLLVVLCDYVLGEAEYLLLREPGHVALSNDTVYVDFQYFDGANGTLRNVSVLLLEANTNQTVTTKYLLTNQSQGTLKFECFYFKEAGDYWFTMTPEATDNSTPFPWWEKSAFLKVEWPVFHVDLNRSAKAAEGTFQVGLFTSQPLCPFPVDKPNIVVDVIFTNSLPEARRNSRQPLEIRTSKRTELAQGQWVEFGCAPLGPEAYVTVVLKLLGRDSVITSTGPIDLAQKFGYKLVMVPELTCESGVEVTVLPPPCTFVQGVVTVFKEAPRYPGKRTIHLAENSLPLGERRTIFNCTLFDMGKNKYCFDFGISSRSHFSAKEECMLIQRNTETWGLWQPWSQCSATCGDGVRERRRVCLTSFPSSPVCPGMSLEASLCSLEECAAFQPSSPSPLQPQGPVKSNNIVTVTGISLCLFIIIATVLITLWRRFGRPAKCSTPARHNSIHSPSFRKNSDEENICELSEQRGSFSDGGDGPTGSPGDTGIPLTYRRSGPVPPEDDASGSESFQSNAQKIIPPLFSYRLAQQQLKEMKKKGLTETTKVYHVSQSPLTDTAIDAAPSAPLDLESPEEAAANKFRIKSPFPEQPAVSAGERPPSRLDLNVTQASCAISPSQTLIRKSQARHVGSRGGPSERSHARNAHFRRTASFHEARQARPFRERSMSTLTPRQAPAYSSRTRTCEQAEDRFRPQSRGAHLFPEKLEHFQEASGTRGPLNPLPKSYTLGQPLRKPDLGDHQAGLVAGIERTEPHRARRGPSPSHKSVSRKQSSPISPKDNYQRVSSLSPSQCRKDKCQSFPTHPEFAFYDNTSFGLTEAEQRMLDLPGYFGSNEEDETTSTLSVEKLVI

SEQ ID NO: 35738 - protein, 390 aa, Homo sapiens
VAAAMDRFVWTSGLLEINETLVIQQRGVRIYDGEEKIKFDAGTLLLSTHRLIWRDQKNHECCMAILLSQIVFIEEQAAGIGKSAKIVVHLHPAPPNKEPGPFQSSKNSYIKLSFKEHGQIEFYRRLSEEMTQRRWENMPVSQSLQTNRGPQPGRIRAVGIVGIERKLEEKRKETDKNISEAFEDLSKLMIKAKEMVELSKSIANKIKDKQGDITEDETIRFKSYLLSMGIANPVTRETYGSGTQYHMQLAKQLAGILQVPLEERGGIMSLTEVYCLVNRARGMELLSPEDLVNACKMLEALKLPLRLRVFDSGVMVIELQSHKEEEMVASALETVSEKGSLTSEEFAKLVGMSVLLAKERLLLAEKMGHLCRDDSVEGLRFYPNLFMTQS

SEQ ID NO: 35739 - protein, 148 aa, Homo sapiens
VAAAMDRFVWTSGLLEINETLVIQQRGVRIYDGEEKIKFDAGTLLLSTHRLIWRDQKNHECCMAILLSQIVFIEEQAAGIGKSAKIVVHLHPAPPNKEPGPFQSSKNSYIKLSFKEHGQIEVSFYMNKIVLERCVCVCVCVCVCVVAC

SEQ ID NO: 35740 - protein, 1230 aa, Homo sapiens
LFGWRTPGVKPVVDPSASSLRLAEWPPSFRSPELRGKMERHQPRLHHPAQGSAAGTPYPSSASLRGCRESKMPRRKGPQHPPPPSGPEEPGEKRPKFHLNIRTLTDDMLDKFASIRIPGSKKERPPLPNLKTAFASSDCSAAPLEMMENFPKPLSENELLELFEKMMEDMNLNEDKKAPLREKDFSIKKEMVMQYINTASKTGSLKRSRQISPQEFIHELKMGSADERLVTCLESLRVSLTSNPVSWVESFGHEGLGLLLDILEKLISGKIQEKVVKKNQHKVIQCLKALMNTQYGLERIMSEERSLSLLAKAVDPRHPNMMTDVVKLLSAVCIVGEESILEEVLEALTSAGEEKKIDRFFCIVEGLRHNSVQLQVACMQLINALVTSPDDLDFRLHIRNEFMRCGLKEILPNLKCIKNDGLDIQLKVFDEHKEEDLFELSHRLEDIRAELDEAYDVYNMVWSTVKETRAEGYFISILQHLLLIRNDYFIRQQYFKLIDECVSQIVLHRDGMDPDFTYRKRLDLDLTQFVDICIDQAKLEEFEEKASELYKKFEKEFTDHQETQAELQKKEAKINELQAELQAFKSQFGALPADCNIPLPPSKEGGTGHSALPPPPPLPSGGGVPPPPPPPPPPPLPGMRMPFSGPVPPPPPLGFLGGQNSPPLPILPFGLKPKKEFKPEISMRRLNWLKIRPHEMTENCFWIKVNENKYENVDLLCKLENTFCCQQKERREEEDIEEKKSIKKKIKELKFLDSKIAQNLSIFLSSFRVPYEEIRMMILEVDETRLAESMIQNLIKHLPDQEQLNSLSQFKSEYSNLCEPEQFVVVMSNVKRLRPRLSAILFKLQFEEQVNNIKPDIMAVSTACEEIKKSKSFSKLLELVLLMGNYMNAGSRNAQTFGFNLSSLCKLKDTKSADQKTTLLHFLVEICEEKYPDILNFVDDLEPLDKASKVSVETLEKNLRQMGRQLQQLEKELETFPPPEDLHDKFVTKMSRFVISAKEQYETLSKLHENMEKLYQSIIGYYAIDVKKVSVEDFLTDLNNFRTTFMQAIKENIKKREAEEKEKRVRIAKELAERERLERQQKKKRLLEMKTEGDETGVMDNLLEALQSGAAFRDRRKRTPMPKDVRQSLSPMSQRPVLKVCNHENQKVQLTEGSRSHYNINCNSTRTPVAKELNYNLDTHTSTGRIKAAEKKEACNVESNRKKETELLGSFSKNESVPEVEALLARLRAL

SEQ ID NO: 35741 - protein, 95 aa, Homo sapiens
VLLRLKWGSGPVHISGQHLVAGEENAESEDEEEEDLKLLSISGKPSPPGGGSKFPQKKVKLASDEDDDEADDDEDDGDDFDDEETEEKAPVKKSI

SEQ ID NO: 35742 - protein, 499 aa, Homo sapiens
LKVLVIILISMNKLSPVLLFLNQQNYQIDKDVEDKRQKAIEEFFTKDVIVPSPWTDHEGKQLSQCHSSKCTNINSDSPVGKKLTIHSEKSDAACQTLLSLPVDFNLENILGDYFRADEFADQSPGNLSSSSLRRKLFLDGNGSISDSLPSASPGSPHSGVQTSLEMFYSIDLSPVKCRSPLQTPSSGQFSSSPIQASAKKYSLGSITSPSPISSPTFSPIEFQIGETPLSEQRKFTVHSPDASSGTNSNGITNPCIRSPYIDGCSPIKNWSPMRLQMYSGGTQYRTSVIQIPFTLETQGEDEEDKENIPSTDVSSPAMDAAGIHLRQFSNEASTHGTHLVVTAMSVTQNQSSASEKELALLQDVEREKDNNTVDMVDPIEIADETTWIKEPVDNGSLPMTDFVSGIAFSIENSHMCMSPLAESSVIPCESSNIQMDSGYNTQNCGSNIMDTVGAESYCKESDAQTCEVESKSQAFNMKQDHTTQRCWMKTASPFQCSSP

SEQ ID NO: 35743 - protein, 302 aa, Homo sapiens
MSASVWVGCISGTESAAKKAVTEKNFETKDFRASLENGVLLCDLINKLKPGVIKKINRLSTPIAGLDNINVFLKACEQIGLKEAQLFHPGDLQDLSNRVTVKQEETDRRVKNVLITLYWLGRKAQSNPYYNGPHLNLKAFENLLGQALTKALEDSSFLKRSGRDSGYGDIWCPERGEFLAPPRHHKREDSFESLDSLGSRSLTSCSSDITLRGGREGFESDTDSEFTFKMQDYNKDDMSYRRISAVEPKTALPFNRFLPNKSRQPSYVPAPLRKKKPDKHEDNRRSWASPVYTEADGTFSRY

SEQ ID NO: 35744 - protein, 253 aa, Homo sapiens [sequence omitted]

SEQ ID NO: 35745 - protein, 35 aa, Homo sapiens
VAAVAVAAVAAAAAAGRRAERASGFRGSGEGGCSS

SEQ ID NO: 35746 - protein, 145 aa, Homo sapiens [sequence omitted]

SEQ ID NO: 35747 - protein, 122 aa, Homo sapiens
LMAQEVDTAQGAEMRRGAGAARGRASWCWALALLWLAVVPGWSRVSGIPSRRHWPVPYKRFDFRPKPDPYCQAKYTFCPTGSPIPVMEGDDDIEVFRLQAPVWEFKYGDLLGHLLLYLAPGR

SEQ ID NO: 35748 - protein, 192 aa, Homo sapiens
LMAQEVDTAQGAEMRRGAGAARGRASWCWALALLWLAVVPGWSRVSGIPSRRHWPVPYKRFDFRPKPDPYCQAKYTFCPTGSPIPVMEGDDDIEVFRLQAPVWEFKYGDLLGHLKIMHDAIGFRSTLTGKNYTMEWYELFQLGNCTFPHLRPEMDAPFWCNQGAACFFEGIDDVHWKENGTLVQVATISGKL

SEQ ID NO: 35749 - protein, 198 aa, Homo sapiens
LMAQEVDTAQGAEMRRGAGAARGRASWCWALALLWLAVVPGWSRVSGIPSRRHWPVPYKRFDFRPKPDPYCQAKYTFCPTGSPIPVMEGDDDIEVFRLQAPVWEFKYGDLLGHLKIMHDAIGFRSTLTGKNYTMEWYELFQLGNCTFPHLRPEMDAPFWCNQGAACFFEGIDDVHWKENGTLVQVATISDGETEAQRG

SEQ ID NO: 35750 - protein, 208 aa, Homo sapiens
LMAQEVDTAQGAEMRRGAGAARGRASWCWALALLWLAVVPGWSRVSGIPSRRHWPVPYKRFDFRPKPDPYCQAKYTFCPTGSPIPVMEGDDDIEVFRLQAPVWEFKYGDLLGHLKIMHDAIGFRSTLTGKNYTMEWYELFQLGNCTFPHLRPEMDAPFWCNQGAACFFEGIDDVHWKENGTLVQVATISEISCALKNGIKLAELGFLL

SEQ ID NO: 35751 - protein, 274 aa, Homo sapiens
LMAQEVDTAQGAEMRRGAGAARGRASWCWALALLWLAVVPGWSRVSGIPSRRHWPVPYKRFDFRPKPDPYCQAKYTFCPTGSPIPVMEGDDDIEVFRLQAPVWEFKYGDLLGHLKIMHDAIGFRSTLTGKNYTMEWYELFQLGNCTFPHLRPEMDAPFWCNQGAACFFEGIDDVHWKENGTLVQVATISGFHHVGQDSIELRTSSDPPILASQSAGITDVSHCTRPTIRILPQRGTLYYLSLALLPGWSTVVRPRLTATSASRIQTIFLPQPPK

SEQ ID NO: 35752 - protein, 271 aa, Homo sapiens
LMAQEVDTAQGAEMRRGAGAARGRASWCWALALLWLAVVPGWSRVSGIPSRRHWPVPYKRFDFRPKPDPYCQAKYTFCPTGSPIPVMEGDDDIEVFRLQAPVWEFKYGDLLGHLKIMHDAIGFRSTLTGKNYTMEWYELFQLGNCTFPHLRPEMDAPFWCNQGAACFFEGIDDVHWKENGTLVQVATISGFHHVGQDSIELRTSSDPPILASQSAGITDVSHCTRPTIRILPQRGTLYYLLWTKTFLLCSLQFSWDFQNIATPYFNLLPKP

SEQ ID NO: 35753 - protein, 19 aa, Homo sapiens
LLFFLQSPASVFQGVILLL

SEQ ID NO: 35754 - protein, 95 aa, Homo sapiens
MIVKEARYIAITMMKVYENYSFEELRFASPTPKRPSENMLIRVNNDGTYCANWTPGAIGLYTLHVTIDGIEIGIFFKAMSYYLLQITRVKIIFIF

SEQ ID NO: 35755 - protein, 31 aa, Homo sapiens
LAKRLRAVLAFAATWLGQLTQVSCLPSSACL

SEQ ID NO: 35756 - protein, 143 aa, Homo sapiens [sequence omitted]

SEQ ID NO: 35757 - protein, 584 aa, Homo sapiens
LPLAGFRLEGQGEERTGRGVYRAGFVCCTMPSWIGAVILPLLGLLLSLPAGADVKARSCGEVRQAYGAKGFSLADIPYQEIAGEHLRICPQEYTCCTTEMEDKLSQQSKLEFENLVEETSHFVRTTFVSRHKKFDEFFRELLENAEKSLNDMFVRTYGMLYMQNSEVFQDLFTELKRYYTGGNVNLEEMLNDFWARLLERMFQLINPQYHFSEDYLECVSKYTDQLKPFGDVPRKLKIQVTRAFIAARTFVQGLTVGREVANRVSKVSPTPGCIRALMKMLYCPYCRGLPTVRPCNNYCLNVMKGCLANQADLDTEWNLFIDAMLLVAERLEGPFNIESVMDPIDVKISEAIMNMQENSMQVSAKVFQGCGQPKPAPALRSARSAPENFNTRFRPYNPEERPTTAAGTSLDRLVTDIKEKLKLSKKVWSALPYTICKDESVTAGTSNEEECWNGHSKARYLPEIMNDGLTNQINNPEVDVDITRPDTFIRQQIMALRVMTNKLKNAYNGNDVNFQDTSDESSGSGSGSGCMDDVCPTEFEFVTTEAPAVDPDRREVDSSAAQRGHSLLSWSLTCIVLALQRLCR

SEQ ID NO: 35758 - protein, 237 aa, Homo sapiens
MSPLWWGFLLSCLGCKILPGAQGQFPRVCMTVDSLVNKECCPRLGAESANVCGSQQGRGQCTEVRADTRPWSGPYILRNQDDRELWPRKFFHRTCKCTGNFAGYNCGDCKFGWTGPNCERKKPPVIRQNIHSLSPQEREQFLGALDLAKKRVHPDYVITTQHWLGLLGPNGTQPQFANCSVYDFFVWLHYYSVRDTLLGGFFPWLKVYYYRFVIGLRVWQWEVISCKLIKRATTRQP

SEQ ID NO: 35759 - protein, 444 aa, Homo sapiens
LETGMGGLRLLAVALTCCWWPQGSQGKTLRGSFSSTAAQDAQGQRIGHFEFHGDHALLCVRINNIAVAVGKEAKLYLFQAQEWLKLQQSSHGYSCSEKLSKAQLTMTMNQTEHNLTVSQIPSPQTWHVFYADKYTCQDDKENSQVEDIPFEMVLLNPDAEGNPFDHFSAGESGLHEFFFLLVLVYFVIACIYAQSLWQAIKKGGPMHMILKVLTTALLLQAGSALANYIHFSSYSKDGIGVPFMGSLAEFFDIASQIQMLYLLLSLCMGWTIVRMKKSQSRPLQWDSTPASTGIAVFIVMTQSVLLLWEQFEDISHHSYHSHHNLAGILLIVLRICLALSLGCGLYQIITVERSTLKREFYITFAKGCILWFLCHPVLACISVIFSDYQRDKVITIGVILCQSVSMVILYRLFLSHSLYWEVSSLSSVTLPLTISSGHKSRPHF

SEQ ID NO: 35760 - protein, 27 aa, Homo sapiens
MMRWRSLGHLVLPDVPGVTVNGKDRQS

SEQ ID NO: 35761 - protein, 1146 aa, Homo sapiens
LFSLIRILAALNRGKKFLREHCSESTAACLQMPEDQVGKLEATENTISAMAAAAAEQQQFYLLLGNLLSPDNVVRKQAEETYENIPGQSKITFLLQAIRNTTAAEEARQMAAVLLRRLLSSAFDEVYPALPSDVQTAIKSELLMIIQMETQSSMRKKVCDIAAELARNLIDEDGNNQWPEGLKFLFDSVSSQNVGLREAALHIFWNFPGIFGNQQQHYLDVIKRMLVQCMQDQEHPSIRTLSARATAAFILANEHNVALFKHFADLLPGFLQAVNDSCYQNDDSVLKSLVEIADTVPKYLRPHLEATLQLSLKLCGDTSLNNMQRQLALEVIVTLSETAAAMLRKHTNIVAQTIPQMLAMMVDLEEDEDWANADELEDDDFDSNAVAGESALDRMACGLGGKLVLPMIKEHIMQMLQNPDWKYRHAGLMALSAIGEGCHQQMEGILNEIVNFVLLFLQDPHPRVRYAACNAVGQMATDFAPGFQKKFHEKVIAALLQTMEDQGNQRVQAHAAAALINFTEDCPKSLLIPYLDNLVKHLHSIMVLKLQELIQKGTKLVLEQVVTSIASVADTAEEKFVPYYDLFMPSLKHIVENAVQKELRLLRGKTIECISLIGLAVGKEKFMQDASDVMQLLLKTQTDFNDMEDDDPQISYMISAWARMCKILGKEFQQYLPVVMGPLMKTASIKPEVALLDTQDMENMSDDDGWEFVNLGDQQSFGIKTAGLEEKSTACQMLVCYAKELKEGFVEYTEQVVKLMVPLLKFYFHDGVRVAAAESMPLLLECARVRGPEYLTQMWHFMCDALIKAIGTEPDSDVLSEIMHSFAKCIEVMGDGCLNNEHFEELGGILKAKLEEHFKNQELRQVKRQDEDYDEQVEESLQDEDDNDVYILTKVSDILHSIFSSYKEKVLPWFEQLLPLIVNLICPHRPWPDRQWGLCIFDDVIEHCSPASFKYAEYFLRPMLQYVCDNSPEVRQAAAYGLGVMAQYGGDNYRPFCTEALPLLVRVIQSADSKTKENVNATENCISAVGKIMKFKPDCVNVEEVLPHWLSWLPLHEDKEEAVQTFNYLCDLIESNHPIVLGPNNTNLPKIFSIIAEGEMHEAIKHEDPCAKRLANVVRQVQTSGGLWTECIAQLSPEQQAAIQELLNSA

SEQ ID NO: 35762 - protein, 437 aa, Homo sapiens
VAVLSAMAHSPVQSGLPGMQNLKADPEELFTKLEKIGKGSFGEVFKGIDNRTQKVVAIKIIDLEEAEDEIEDIQQEITVLSQCDSPYVTKYYGSYLKDTKLWIIMEYLGGGSALDLLEPGPLDETQIATILREILKGLDYLHSEKKIHRDIKAANVLLSEHGEVKLADFGVAGQLTDTQIKRNTFVGTPFWMAPEVIKQSAYDSKADIWSLGITAIELARGEPPHSELHPMKVLFLIPKNNPPTLEGNYSKPLKEFVEACLNKEPSFRPTAKELLKHKFILRNAKKTSYLTELIDRYKRWKAEQSHDDSSSEDSDAETDGQASGGSDSGDWIFTIREKDPKNLENGALQPSDLDRNKMKDIPKRPFSQCLSTIISPLFAELKEKSQACGGNLGSIEELRGAIYLAEEACPGISDTMVAQLVQRLQRYSLSGGGTSSH

SEQ ID NO: 35763 - protein, 69 aa, Homo sapiens
LMDEILKQQQELLGLDCSKYSPEFANRNDKGDQVLNCRLAVKVLSPVDGKADILRAAQDFCQLVAQKQK

SEQ ID NO: 35764 - protein, 14 aa, Homo sapiens
VWLSGTVFFILGRF

SEQ ID NO: 35765 - protein, 85 aa, Homo sapiens
LFSFQLVFFYISFIGHFPISNSEVSPREQHKANNIKHNKNANKYFIFICKRIHQKEALLITPNVKSFVLIKNLIIISCQQMARKD

SEQ ID NO: 35766 - protein, 11 aa, Homo sapiens
VKWIVFWFIVT

SEQ ID NO: 35767 - protein, 244 aa, Homo sapiens
LWIWILRQHFLEETSLQSVAQTQASGKYLPSRWSQDRCGESREAPLPSKTLEGETPEGVGAELRCVRLPGPEWNSVLKPGFSLQLDSSSARMALVFVYGTLKRGQPNHRVLRDGAHGSAAFRARGRTLEPYPLVIAGEHNIPWLLHLPGSGRLVEGEVYAVDERMLRFLDDFESCPALYQRTVLRVQLLEDRAPGAEEPPAPTAVQCFVYSRATFPPEWAQLPHHDSYDSEGPHGLRYNPRENR

SEQ ID NO: 35768 - protein, 18 aa, Homo sapiens
LIWITFFHLLFFLHSGLS

SEQ ID NO: 35769 - protein, 1755 aa, Homo sapiens
LGLQTVVLCLLTKANLSMLKRKQSSRVEAQPVTDFGPDESLSDNADILWINKPWVHSLLRICAIISVISVCMNTPMTFEHYPPLQYVTFTLDTLLMFLYTAEMIAKMHIRGIVKGDSSYVKDRWCVFDGFMVFCLWVSLVLQVFEIADIVDQMSPWGMLRIPRPLIMIRAFRIYFRFELPRTRITNILKRSGEQIWSVSIFLLFFLLLYGILGVQMFGTFTYHCVVNDTKPGNVTWNSLAIPDTHCSPELEEGYQCPPGFKCMDLEDLGLSRQELGYSGFNEIGTSIFTVYEAASQEGWVFLMYRAIDSFPRWRSYFYFITLIFFLAWLVKNVFIAVIIETFAEIRVQFQQMWGSRSSTTSTATTQMFHEDAAGGWQLVAVDVNKPQGRAPACLQKMMRSSVFHMFILSMVTVDVIVAASNYYKGENFRRQYDEFYLAEVAFTVLFDLEALLKIWCLGFTGYISSSLHKFELLLVIGTTLHVYPDLYHSQFTYFQVLRVVRLIKISPALEDFVYKIFGPGKKLGSLVVFTASLLIVMSAISLQMFCFVEELDRFTTFPRAFMSMFQILTQEGWVDVMDQTLNAVGHMWAPVVAIYFILYHLFATLILLSLFVAVILDNLELDEDLKKLKQLKQSEANADTKEKLPLRLRIFEKFPNRPQMVKISKLPSDFTVPKIRESFMKQFIDRQQQDTCCLLRSLPTTSSSSCDHSKRSAIEDNKYIDQKLRKSVFSIRARNLLEKETAVTKILRACTRQRMLSGSFEGQPAKERSILSVQHHIRQERRSLRHGSNSQRISRGKSLETLTQDHSNTVRYRNAQREDSEIKMIQEKKEQAEMKRKVQEEELRENHPYFDKPLFIVGREHRFRNFCRVVVRARFNASKTDPVTGAVKNTKYHQLYDLLGLVTYLDWVMIIVTICSCISMMFESPFRRVMHAPTLQIAEYVFVIFMSIELNLKIMADGLFFTPTAVIRDFGGVMDIFIYLVSLIFLCWMPQNVPAESGAQLLMVLRCLRPLRIFKLVPQMRKVVRELFSGFKEIFLVSILLLTLMLVFASFGVQLFAGKLAKCNDPNIIRREDCNGIFRINVSVSKNLNLKLRPGEKKPGFWVPRVWANPRNFNFDNVGNAMLALFEVLSLKGWVEVRDVIIHRVGPIHGIYIHVFVFLGCMIGLTLFVGVVIANFNENKGTALLTVDQRRWEDLKSRLKIAQPLHLPPRPDNDGFRAKMYDITQHPFFKRTIALLVLAQSVLLSVKWDVEDPVTVPLATMSVVFTFIFVLEVTMKIIAMSPAGFWQSRRNRYDLLVTSLGVVWVVLHFALLNAYTYMMGACVIVFRFFSICGKHVTLKMLLLTVVVSMYKSFFIIVGMFLLLLCYAFAGVVLFGTVKYGENINRHANFSSAGKAITVLFRIVTGEDWNKIMHDCMVQPPFCTPDEFTYWATDCGNYAGALMYFCSFYVIIAYIMLNLLVAIIVENFSLFYSTEEDQLLSYNDLRHFQIIWNMVDDKREGVIPTFRVKFLLRLLRGRLEVDLDKDKLLFKHMCYEMERLHNGGDVTFHDVLSMLSYRSVDIRKSLQLEELLAREQLEYTIEEEVAKQTIRMWLKKCLKRIRAKQQQSCSIIHSLRESQQQELSRFLNPPSIETTQPSEDTNANSQDNSMQPETSSQQQLLSPTLSDRGGSRQDAADAGKPQRKFGQWRLPSAPKPISHSVSSVNLRFGGRTTMKSVVCKMNPMTDAASCGSEVKKWWTRQLTVESDESGDDLLDI

SEQ ID NO: 35770 - protein, 44 aa, Homo sapiens
LGNRLWKLCWGTYVFLFILCHHCLHHAKSACSHNCGEFLLVLFH

SEQ ID NO: 35771 - protein, 83 aa, Homo sapiens
LSAEESIRKCQGSSDLPCSGRGKCECGKCTCYPPGDRRVYGKTCECDDRRCEDLDGVVCGGSNLSHSCMLPACNLLYLPLLFY

SEQ ID NO: 35772 - protein, 282 aa, Homo sapiens [sequence omitted]

SEQ ID NO: 35773 - protein, 33 aa, Homo sapiens
MPIKGAHGSGGAAQVFALVTLPSARGEGRHKAP

SEQ ID NO: 35774 - protein, 18 aa, Homo sapiens
LIGSVFLSGAHFAALKLL

SEQ ID NO: 35775 - protein, 11 aa, Homo sapiens
VASVLFAIFVV

SEQ ID NO: 35776 - protein, 142 aa, Homo sapiens [sequence omitted]

SEQ ID NO: 35777 - protein, 12 aa, Homo sapiens
LVLLTFCFFIYL

SEQ ID NO: 35778 - protein, 33 aa, Homo sapiens
MFPFLIIALYFNLCRMIKNVPFRSVLCLYLSEE

SEQ ID NO: 35779 - protein, 8 aa, Homo sapiens
LLAVFFWI

SEQ ID NO: 35780 - protein, 1397 aa, Homo sapiens
VLAPAGLPGPSPPPGPEGRVIGRAAGRKGGREPPPPAPPPPLAPTPGRRARAARPEAPAMASPPRHGPPGPASGDGPNLNNNNNNNNHSVRKCGYLRKQKHGHKRFFVLRGPGAGGDEATAGGGSAPQPPRLEYYESEKKWRSKAGAPKRVIALDCCLNINKRADAKHKYLIALYTKDEYFAVAAENEQEQEGWYRALTDLVSEGRAAAGDAPPAAAPAASCSASLPGALGGSAGAAGAEDSYGLVAPATAAYREVWQVNLKPKGLGQSKNLTGVYRLCLSARTIGFVKLNCEQPSVTLQLMNIRRCGHSDSFFFIEVGRSAVTGPGELWMQADDSVVAQNIHETILEAMKALKELFEFRPRSKSQSSGSSATHPISVPGARRHHHLVNLPPSQTGLVRRSRTDSLAATPPAAKCSSCRVRTASEGDGGAAAGAAAAGARPVSVAGSPLSPGPVRAPLSRSHTLSGGCGGRGSKVALLPAGGALQHSRSMSMPVAHSPPAATSPGSLSSSSGHGSGSYPPPPGPHPPLPHPLHHGPGQRPSSGSASASGSPSDPGFMSLDEYGSSPGDLRAFCSHRSNTPESIAETPPARDGGGGGEFYGYMTMDRPLSHCGRSYRRVSGDAAQDLDRGLRKRTYSLTTPARQRPVPQPSSASLDEYTLMRATFSGSAGRLCPSCPASSPKVAYHPYPEDYGDIEIGSHRSSSSNLGADDGYMPMTPGAALAGSGSGSCRSDDYMPMSPASVSAPKQILQPRAAAAAAAAVPSAGPAGPAPTSAAGRTFPASGGGYKASSPAESSPEDSGYMRMWCGSKLSMEHADGKLLPNGDYLNVSPSDAVTTGTPPDFFSAALHPGGEPLRGVPGCCYSSLPRSYKAPYTCGGDSDQYVLMSSPVGRILEEERLEPQATPGPSQAASAFGAGPTQPPHPVVPSPVRPSGGRPEGFLGQRGRAVRPTRLSLEGLPSLPSMHEYPLPPEPKSPGEYINIDFGEPGARLSPPAPPLLASAASSSSLLSASSPASSLGSGTPGTSSDSRQRSPLSDYMNLDFSSPKSPKPGAPSGHPVGSLDGLLSPEASSPYPPLPPRPSASPSSSLQPPPPPPAPGELYRLPPASAVATAQGPGAASSLSSDTGDNGDYTEMAFGVAATPPQPIAAPPKPEAARVASPTSGVKRLSLMEQVSGVEAFLQASQPPDPHRGAKVIRADPQGGRRRHSSETFSSTTTVTPVSPSFAHNPKRHNSASVENVSLRKSSEGGVGVGPGGGDEPPTSPRQLQPAPPLAPQGRPWTPGQPGGLVGCPGSGGSPMRRETSAGFQNGLNYIAIDVREEPGLPPQPQPPPPPLPQPGDKSSWGRTRSLGGLISAVGVGSTGGGCGGPGPGALPPANTYASIDFLSHHLKEATIVKE

SEQ ID NO: 35781 - protein, 35 aa, Homo sapiens
MKPDSANVTTWCYFFFFLLTATNPRNISCVPHCPI

SEQ ID NO: 35782 - protein, 1689 aa, Homo sapiens
LSAAAPARRAAVPRRLGRATMGPRLSVWLLLLPAALLLHEEHSRAAAKGGCAGSGCGKCDCHGVKGQKGERGLPGLQGVIGFPGMQGPEGPQGPPGQKGDTGEPGLPGTKGTRGPPGASGYPGNPGLPGIPGQDGPPGPPGIPGCNGTKGERGPLGPPGLPGFAGNPGPPGLPGMKGDPGEILGHVPGMLLKGERGFPGIPGTPGPPGLPGLQGPVGPPGFTGPPGPPGPPGPPGEKGQMGLSFQGPKGDKGDQGVSGPPGVPGQAQVQEKGDFATKGEKGQKGEPGFQGMPGVGEKGEPGKPGPRGKPGKDGDKGEKGSPGFPGEPGYPGLIGRQGPQGEKGEAGPPGPPGIVIGTGPLGEKGERGYPGTPGPRGEPGPKGFPGLPGQPGPPGLPVPGQAGAPGFPGERGEKGDRGFPGTSLPGPSGRDGLPGPPGSPGPPGQPGYTNGIVECQPGPPGDQGPPGIPGQPGFIGEIGEKGQKGESCLICDIDGYRGPPGPQGPPGEIGFPGQPGAKGDRGLPGRDGVAGVPGPQGTPGLIGQPGAKGEPGEFYFDLRLKGDKGDPGFPGQPGMPGRAGSPGRDGHPGLPGPKGSPGSVGLKGERGPPGGVGFPGSRGDTGPPGPPGYGPAGPIGDKGQAGFPGGPGSPGLPGPKGEPGKIVPLPGPPGAEGLPGSPGFPGPQGDRGFPGTPGRPGLPGEKGAVGQPGIGFPGPPGPKGVDGLPGDMGPPGTPGRPGFNGLPGNPGVQGQKGEPGVGLPGLKGLPGLPGIPGTPGEKGSIGVPGVPGEHGAIGPPGLQGIRGEPGPPGLPGSVGSPGVPGIGPPGARGPPGGQGPPGLSGPPGIKGEKGFPGFPGLDMPGPKGDKGAQGLPGITGQSGLPGLPGQQGAPGIPGFPGSKGEMGVMGTPGQPGSPGPVGAPGLPGEKGDHGFPGSSGPRGDPGLKGDKGDVGLPGKPGSMDKVDMGSMKGQKGDQGEKGQIGPIGEKGSRGDPGTPGVPGKDGQAGQPGQPGPKGDPGISGTPGAPGLPGPKGSVGGMGLPGTPGEKGVPGIPGPQGSPGLPGDKGAKGEKGQAGPPGIGIPGLRGEKGDQGIAGFPGSPGEKGEKGSIGIPGMPGSPGLKGSPGSVGYPGSPGLPGEKGDKGLPGLDGIPGVKGEAGLPGTPGPTGPAGQKGEPGSDGIPGSAGEKGEPGLPGRGFPGFPGAKGDKGSKGEVGFPGLAGSPGIPGSKGEQGFMGPPGPQGQPGLPGSPGHATEGPKGDRGPQGQPGLPGLPGPMGPPGLPGIDGVKGDKGNPGWPGAPGVPGPKGDPGFQGMPGIGGSPGITGSKGDMGPPGVPGFQGPKGLPGLQGIKGDQGDQGVPGAKGLPGPPGPPGPYDIIKGEPGLPGPEGPPGLKGLQGLPGPKGQQGVTGLVGIPGPPGIPGFDGAPGQKGEMGPAGPTGPRGFPGPPGPDGLPGSMGPPGTPSVDHGFLVTRHSQTIDDPQCPSGTKILYHGYSLLYVQGNERAHGQDLGTAGSCLRKFSTMPFLFCNINNVCNFASRNDYSYWLSTPEPMPMSMAPITGENIRPFISRCAVCEAPAMVMAVHSQTIQIPPCPSGWSSLWIGYSFVMHTSAGAEGSGQALASPGSCLEEFRSAPFIECHGRGTCNYYANAYSFWLATIERSEMFKKPTPSTLKAGELRTHVSRCQVCMRRT

SEQ ID NO: 35783 - protein, 275 aa, Homo sapiens
LSELGSHCRQPRGGGRETGKRFQWLCFRRRRGGSWESGMLPDGPGSSLWGNPGLQTSDSPNAVHEVEKWLPRLHALVVGPGLGRDDALLRNVQGILEVSKARDIPVVIDADGLWLVAQQPALIHGYRKAVLTPNHVEFSRLYDAVLRGPMDSDDSHGSVLRLSQALGNVTVVQKGERDILSNGQQVLVCSQEGSSRRCGGQGDLLSGSLGVLVHWALLAGPQKTNGSSPLLVAAFGACSLTRQCNHQAFQKHGRSTTTSDMIAEVGAAFSKLFET

SEQ ID NO: 35784 - protein, 168 aa, Homo sapiens
MIPTGPSRADRTGDGHGEGLQWGLTWPLVLSQEKALEDLRHAGPGAVMALRRPGERQYRGHVCLGSSTAVSLGMFASSKDTGNCGFSQHSSWQCRPRVSFCCLCGWFSWSGLTLTCSLVPCLSGAWYGFVPDACIRVFSYTFSSIFPQQGPNPPGSLQSLFGLMMTLE

SEQ ID NO: 35785 - protein, 226 aa, Homo sapiens
LQLMLHNFLLLRNSSLWEYDLEKVPRLEPPASLPGEGLVWGPPGESGAPSAVTVLSSSLRLSSTKRAVKAALADDFDTPRVVDAILGLAHHGNGQLRASLKEPEGPRSPAVFGAIISYFEQFFETVGISLANQQYVSGDGSEATLHGVVDELVRFRQKVRQFALAMPEATGDARRQQLLERQPLLEACDTLRRGLTAHGINIKDRSSTTSTWELLDQRTKDQKSAG

SEQ ID NO: 35786 - protein, 144 aa, Homo sapiens
LQLMLHNFLLLRNSSLWEYDLEKVPRLEPPASLPGEGLVWGPPGESGAPSAVTVLSSSLRLSSTKRAVKAALADDFDTPRVVDAILGLAHHGNGQLRASLKEPEGPRSPAVFGAIISYFEQFFETVGISLANQQLANSRAQNQR

SEQ ID NO: 35787 - protein, 108 aa, Homo sapiens
LQLMLHNFLLLRNSSLWEYDLEKVPRLEPPASLPGEGLVWGPPGESGAPSAVTVLSSSLRLSSTKRAVKAALADDFDTPRVVDAILGLAHHGNGQLRASLKKPGERPD

SEQ ID NO: 35788 - protein, 53 aa, Homo sapiens
LVWARPTVDVGFLVKLESSPLLLSGSGQVVNPQHLGFLLCELGDWKGPAWHGP

SEQ ID NO: 35789 - protein, 95 aa, Homo sapiens
LRVMFVALLDTKFPLTSCRNCMLQVSCPSAHECAMFQRSGVWEKPRRVAHVGVECICKSLSQVGWLHCSHLSLKVFIPKRYHNLLRLLNLKCSKL

SEQ ID NO: 35790 - protein, 85 aa, Homo sapiens
LVREGAEIGAAPEEEKRVYPEPRSESECLSNIREFLRGCGASLRLETFDANDLYQGQNFNKVLSSLVTLNKVTAVSYEGRSREQN

SEQ ID NO: 35791 - protein, 857 aa, Homo sapiens
LGQRARSRPSGAARQRRPLCWERGPWASLGLVRGVPAAGHGAQRLCSVLQVYPEPRSESECLSNIREFLRGCGASLRLETFDANDLYQGQNFNKVLSSLVTLNKVTADIGLGSDSVCARPSSHRIKSFDSLGSQSLHTRTSKLFQGQYRSLDMTDNSNNQLVVRAKFNFQQTNEDELSFSKGDVIHVTRVEEGGWWEGTLNGRTGWFPSNYVREVKASEKPVSPKSGTLKSPPKGFDTTAINKSYYNVVLQNILETENEYSKELQTVLSTYLRPLQTSEKLSSANISYLMGNLEEICSFQQMLVQSLEECTKLPEAQQRVGGCFLNLMPQMKTLYLTYCANHPSAVNVLTEHSEELGEFMETKGASSPGILVLTTGLSKPFMRLDKYPTLLKELERHMEDYHTDRQDIQKSMAAFKNLSAQCQEVRKRKELELQILTEAIRNWEGDDIKTLGNVTYMSQVLIQCAGSEEKNERYLLLFPNVLLMLSASPRMSGFIYQGKLPTTGMTITKLEDSENHRNAFEISGSMIERILVSCNNQQDLQEWVEHLQKQTKVTSVGNPTIKPHSVPSHTLPSHPVTPSSKHADSKPAPLTPAYHTLPHPSHHGTPHTTINWGPLEPPKTPKPWSLSCLRPAPPLRPSAALCYKEDLSKSPKTMKKLLPKRKPERKPSDEEFASRKSTAALEEDAQILKVIEAYCTSAKTRQTLNSTWQGTDLMHNHVLADDDQPSLDSLGRRSSLSRLEPSDLSEDSDYDSIWTAHSYRMGSTSRSRKESAPQVLLPEEEKIIVEETKSNGQTVIEEKSLVDTVYALKDEVQELRQDNKKMKKSLEEEQRARKDLEKLVRKVLKNMNDPAWDETNL

SEQ ID NO: 35792 - protein, 798 aa, Homo sapiens
LGQRARSRPSGAARQRRPLCWERGPWASLGLVRGVPAAGHGAQRLCSVLQVYPEPRSESECLSNIREFLRGCGASLRLETFDANDLYQGQNFNKVLSSLVTLNKVTADIGLGSDSVCARPSSHRIKSFDSLGSQSLHTRTSKLFQGQYRSLDMTDNSNNQLVVRAKFNFQQTNEDELSFSKGDVIHVTRVEEGGWWEGTLNGRTGWFPSNYVREVKASEKPVSPKSGTLKSPPKGFDTTAINKSYYNVVLQNILETENEYSKELQTVLSTYLRPLQTSEKLSSANISYLMGNLEEICSFQQMLVQSLEECTKLPEAQQRVGGCFLNLMPQMKTLYLTYCANHPSAVNVLTEHSEELGEFMETKGASSPGILVLTTGLSKPFMRLDKYPTLLKELERHMEDYHTDRQDIQKSMAAFKNLSAQCQEVRKRKELELQILTEAIRNWEGDDIKTLGNVTYMSQVLIQCAGSEEKNERYLLLFPNVLLMLSASPRMSGFIYQGKLPTTGMTITKLEDSENHRNAFEISGSMIERILVSCNNQQDLQEWVEHLQKQTKVTSVGNPTIKPHSVPSHTLPSHPVTPSSKHADSKPAPLTPAYHTLPHPSHHGTPHTTINWGPLEPPKTPKPWSLSCLRPAPPLRPSAALCYKEDLSKSPKTMKKLLPKRKPERKPSDEEFASRKSTAALEEDAQILKVIEAYCTSAKTRQTLNSSSRKESAPQVLLPEEEKIIVEETKSNGQTVIEEKSLVDTVYALKDEVQELRQDNKKMKKSLEEEQRARKDLEKLVRKVLKNMNDPAWDETNL

SEQ ID NO: 35793 - protein, 93 aa, Homo sapiens
LRVMFVALLDTKFPLTSCRNCMLQVSCPSAHECAMFQRSGVWEKPRRVSHVGVECICKSLSQVGWLHCSHLSLKVFIAKRYHNLLRLLKLSML

SEQ ID NO: 35794 - protein, 954 aa, Homo sapiens
LVAGGARALACQEQGACGAQEGRGPRSLRVRRQWRLCPDHRARLRARMATPDQKSPNVLLQNLCCRILGRSEADVAQQFQYAVRVIGSNFAPTVERDEFLVAEKIKKELIRQRREADAALFSELHRKLHSQGVLKNKWSILYLLLSLSEDPRRQPSKVSSYATLFAQALPRDAHSTPYYYARPQTLPLSYQDRSAQSAQSSGSVGSSGISSIGLCALSGPAPAPQSLLPGQSNQAPGVGDCLRQQLGSRLAWTLTANQPSSQATTSKGVPSAVSRNMTRSRREGDTGGTMEITEAALVRDILYVFQGIDGKNIKMNNTENCYKVEGKANLSRSLRDTAVRLSELGWLHNKIRRYTDQRSLDRSFGLVGQSFCAALHQELREYYRLLSVLHSQLQLEDDQGVNLGLESSLTLRRLLVWTYDPKIRLKTLAALVDHCQGRKGGELASAVHAYTKTGDPYMRSLVQHILSLVSHPVLSFLYRWIYDGELEDTYHEFFVASDPTVKTDRLWHDKYTLRKSMIPSFMTMDQSRKVLLIGKSINFLHQVCHDQTPTTKMIAVTKSAESPQDAADLFTDLENAFQGKIDAAYFETSKYLLDVLNKKYSLLDHMQAMRRYLLLGQGDFIRHLMDLLKPELVRPATTLYQHNLTGILETAVRATNAQFDSPEILRRLDVRLLEVSPGDTGWDVFSLDYHVDGPIATVFTRECMSHYLRVFNFLWRAKRMEYILTDIRKGHMCNAKLLRNMPEFSGVLHQCHILASEMVHFIHQMQYYITFEVLECSWDELWNKVQQAQDLDHIIAAHEVFLDTIISRCLLDSDSRALLNQLRAVFDQIIELQNAQDAIYRAALEELQRRLQFEEKKKQREIEGQWGVTAAEEEEENKRIGEFKESIPKMCSQLRILTHFYQGIVQQFLVLLTTSSDESLRFLSFRLDFNEHYKAREPRLRVSLGTRGRRSSHT

SEQ ID NO: 35795 - protein, 871 aa, Homo sapiens
LVAGGARALACQEQGACGAQEGRGPRSLRVRRQWRLCPDHRARLRARMATPDQKSPNVLLQNLCCRILGRSEADVAQQFQYAVRVIGSNFAPTVERDEFLVAEKIKKELIRQRREADAALFSELHRKLHSQGVLKNKWSILYLLLSLSEDPRRQPSKVSSYATLFAQALPRDAHSTPYYYARPQTLPLSYQDRSAQSAQSSGSVGSSGISSIGLCALSGPAPAPQSLLPGQSNQAPGVGDCLRQQLGSRLAWTLTANQPSSQATTSKGVPSAVSRNMTRSRREGDTGGTMEITEAALVRDILYVFQGIDGKNIKMNNTENCYKVEGKANLSRSLRDTAVRLSELGWLHNKIRRYTDQRSLDRSFGLVGQSFCAALHQELREYYRLLSVLHSQLQLEDDQGVNLGLESSLTLRRLLVWTYDPKIRLKTLAALVDHCQGRKGGELASAVHAYTKTGDPYMRSLVQHILSLVSHPVLSFLYRWIYDGELEDTYHEFFVASDPTVKTDRLWHDKYTLRKSMIPSFMTMDQSRKVLLIGKSINFLHQVCHDQTPTTKMIAVTKSAESPQDAADLFTDLENAFQGKIDAAYFETSKYLLDVLNKKYSLLDHMQAMRRYLLLGQGDFIRHLMDLLKPELVRPATTLYQHNLTGILETAVRATNAQFDSPEILRRLDVRLLEVSPGDTGWDVFSLDYHVDGPIATVFTRECMSHYLRVFNFLWRAKRMEYILTDIRKGHMCNAKLLRNMPEFSGVLHQCHILASEMVHFIHQMQYYITFEVLECSWDELWNKVQQAQDLDHIIAAHEVFLDTIISRCLLDSDSRALLNQLRAVFDQIIELQNAQDAIYRAALEELQRRLQFEEKKKQREIEVEMCLYCV

SEQ ID NO: 35796 - protein, 486 aa, Homo sapiens
LVAGGARALACQEQGACGAQEGRGPRSLRVRRQWRLCPDHRARLRARMATPDQKSPNVLLQNLCCRILGRSEADVAQQFQYAVRVIGSNFAPTVERDEFLVAEKIKKELIRQRREADAALFSELHRKLHSQGVLKNKWSILYLLLSLSEDPRRQPSKVSSYATLFAQALPRDAHSTPYYYARPQTLPLSYQDRSAQSAQSSGSVGSSGISSIGLCALSGPAPAPQSLLPGQSNQAPGVGDCLRQQLGSRLAWTLTANQPSSQATTSKGVPSAVSRNMTRSRREGDTGGTMEITEAALVRDILYVFQGIDGKNIKMNNTENCYKVEGKANLSRSLRDTAVRLSELGWLHNKIRRYTDQRSLDRSFGLVGQSFCAALHQELREYYRLLSVLHSQLQLEDDQGVNLGLESSLTLRRLLVWTYDPKIRLKTLAALVDHCQGPTRVFPTHVFPTRDFPTRDFPTRDFPMHVFPTRVFPTRVWHSLCFRTRL

SEQ ID NO: 35797 - protein, 237 aa, Homo sapiens [sequence omitted]

SEQ ID NO: 35798 - protein, 139 aa, Homo sapiens
LGSMTVRRLSLLCRDLWALWLLLKAGADEIMHQDIVPLCAADIQDQLKKRFAYLSGGRGQDGSPVITFPDYPAFSEIPDKEFQNVMTYLTSIPSGGQESSIRPVSCRLTWEGCRGGLSSDVLVPASRKMLRMSASHQTV

SEQ ID NO: 35799 - protein, 987 aa, Homo sapiens
LGSMTVRRLSLLCRDLWALWLLLKAGADEIMHQDIVPLCAADIQDQLKKRFAYLSGGRGQDGSPVITFPDYPAFSEIPDKEFQNVMTYLTSIPSLQDAGIGFILVIDRRRDKWTSVKASVLRIAASFPANLQLVLVLRPTGFFQRTLSDIAFKFNRDDFKMKVPVIMLSSVPDLHGYIDKSQLTEDLGGTLDYCHSRWLCQRTAIESFALMVKQTAQMLQSFGTELAETELPNDVQSTSSVLCAHTEKKDKAKEDLRLALKEGHSVLESLRELQAEGSEPSVNQDQLDNQATVQRLLAQLNETEAAFDEFWAKHQQKLEQCLQLRHFEQGFREVKAILDAASQKIATFTDIGNSLAHVEHLLRDLASFEEKSGVAVERARALSLDGEQLIGNKHYAVDSIRPKCQELRHLCDQFSAEIARRRGLLSKSLELHRRLETSMKWCDEGIYLLASQPVDKCQSQDGAEAALQEIEKFLETGAENKIQELNAIYKEYESILNQDLMEHVRKVFQKQASMEEVFHRRQASLKKLAARQTRPVQPVAPRPEALAKSPCPSPGIRRGSENSSSEGGALRRGPYRRAKSEMSESRQGRGSAGEEEESLAILRRHVMSELLDTERAYVEELLCVLEGYAAEMDNPLMAHLLSTGLHNKKDVLFGNMEEIYHFHNRIFLRELENYTDCPELVGRCFLERMEDFQIYEKYCQNKPRSESLWRQCSDCPFFQECQRKLDHKLSLDSYLLKPVQRITKYQLLLKEMLKYSRNCEGAEDLQEALSSILGILKAVNDSMHLIAITGYDGNLGDLGKLLMQGSFSVWTDHKRGHTKVKELARFKPMQRHLFLHEKAVLFCKKREENGEGYEKAPSYSYKQSLNMAAVGITENVKGDAKKFEIWYNAREEVYIVQAPTPEIKAAWVNEIRKVLTSQLQACREASQHRALEQSQSLPLPAPTSTSPSRGNSRNIKKLEERKTDPLSLEGYVSSAPLTKPPEKGKEP

SEQ ID NO: 35800 - protein, 1126 aa, Homo sapiens
LGSMTVRRLSLLCRDLWALWLLLKAGADEIMHQDIVPLCAADIQDQLKKRFAYLSGGRGQDGSPVITFPDYPAFSEIPDKEFQNVMTYLTSIPSLQDAGIGFILVIDRRRDKWTSVKASVLRIAASFPANLQLVLVLRPTGFFQRTLSDIAFKFNRDDFKMKVPVIMLSSVPDLHGYIDKSQLTEDLGGTLDYCHSRWLCQRTAIESFALMVKQTAQMLQSFGTELAETELPNDVQSTSSVLCAHTEKKDKAKEDLRLALKEGHSVLESLRELQAEGSEPSVNQDQLDNQATVQRLLAQLNETEAAFDEFWAKHQQKLEQCLQLRHFEQGFREVKAILDAASQKIATFTDIGNSLAHVEHLLRDLASFEEKSGVAVERARALSLDGEQLIGNKHYAVDSIRPKCQELRHLCDQFSAEIARRRGLLSKSLELHRRLETSMKWCDEGIYLLASQPVDKCQSQDGAEAALQEIEKFLETGAENKIQELNAIYKEYESILNQDLMEHVRKVFQKQASMEEVFHRRQASLKKLAARQTRPVQPVAPRPEALAKSPCPSPGIRRGSENSSSEGGALRRGPYRRAKSEMSESRQGRGSAGEEEESLAILRRHVMSELLDTERAYVEELLCVLEGYAAEMDNPLMAHLLSTGLHNKKDVLFGNMEEIYHFHNRIFLRELENYTDCPELVGRCFLERMEDFQIYEKYCQNKPRSESLWRQCSDCPFFQECQRKLDHKLSLDSYLLKPVQRITKYQLLLKEMLKYSRNCEGAEDLQEALSSILGILKAVNDSMHLIAITGYDGNLGDLGKLLMQGSFSVWTDHKRGHTKVKELARFKPMQRHLFLHEKAVLFCKKREENGEGYEKAPSYSYKQSLNMAAVGITENVKGDAKKFEIWYNAREEVYIVQAPTPEIKAAWVNEIRKVLTSQLQACREASQHRALEQSQSLPLPAPTSTSPSRGNSRNIKKLEERKTDPLSLEGYVSSAPLTKPPEKGKGWSKTSHSLEAPEDDGGWSSAEEQINSSDAEEDGGLGPKKLVPGKYTVVADHEKGGPDALRVRSGDVVELVQEGDEGLWYVRDPTTGKEGWVPASSLSVRLGPSGSAQCLSSSESSPGSAVLSNSSSCSEGGQAPFSDLQG

SEQ ID NO: 35801 - protein, 111 aa, Homo sapiens
MRAGSGTAGMGLPGPPCAMPLTWYCRNGIMNMGDRSPKRFSEGFRGQPASHLHTLTAASLPHCSLQDAGIGFILVIDRRRDKWTSVKASVLRIAVSATRGSALRPAPPWAA

SEQ ID NO: 35802 - protein, 146 aa, Homo sapiens
LLTEAPFSSVERGHNVGVPFQHERGSASSPPPSVLHTLSPVVFLPPPPLAASPTSPDKKAKRHEVKSDPTPFGVRGWSKTSHSLEAPEDDGGWSSAEEQINSSDAEEDGGLGPKKLVTTASLWALGVGAALRGLGVLLAGPPRLGS

SEQ ID NO: 35803 - protein, 87 aa, Homo sapiens
MGRPLHLVLLSASLAGLLLLGESLFIRREQANNILARVTRANSFLEEMKKGHLERECMEETCSYEEAREVFEDSDKTPASCLGLRSR

SEQ ID NO: 35804 - protein, 287 aa, Homo sapiens
MGRPLHLVLLSASLAGLLLLGESLFIRREQANNILARVTRANSFLEEMKKGHLERECMEETCSYEEAREVFEDSDKTNEFWNKYKDGDQCETSPCQNQGKCKDGLGEYTCTCLEGFEGKNCELFTRKLCSLDNGDCDQFCHEEQNSVVCSCARGYTLADNGKACIPTGPYPCGKQTLERRKRSVAQATSSSGEAPDSITWKPYDAADLDPTENPFDLLDFNQTQPERGDNNLTRIVGGQECKDGECPWQVTVGCPLGPAGETTCPAVHLGEASLTLGIAIREGTVPN

SEQ ID NO: 35805 - protein, 225 aa, Homo sapiens
LWWNHSERVLHPNGSPLSLPSQEIQGDRNTEQEEGGEAVHEVEVVIKHNRFTKETYDFDIAVLRLKTPITFRMNVAPACLPERDWAESTLMTQKTGIVSGFGRTHEKGRQSTRLKMLEVPYVDRNSCKLSSSFIITQNMFCAGYDTKQEDACQGDSGGPHVTRFKDTYFVTGIVSWGEGCARKGKYGIYTKVTAFLKWIDRSMKTRGLPKAKSHAPEVITSSPLK

SEQ ID NO: 35806 - protein, 466 aa, Homo sapiens
VAGPLASGNAAVSNASPWRPRPATAAPGSPRPNRRPRPRSPHRTRPPRAMAAPGSARRPLLLLLLLLLLGLMHCASAAMFMVKNGNGTACIMANFSAAFSVNYDTKSGPKNMTFDLPSDATVVLNRSSCGKENTSDPSLVIAFGRGHTLTLNFTRNATRYSVQLMSFVYNLSDTHLFPNASSKEIKTVESITDIRADIDKKYRCVSGTQVHMNNVTVTLHDATIQAYLSNSSFSRGETRCEQDRPSPTTAPPAPPSPSPSPVPKSPSVDKYNVSGTNGTCLLASMGLQLNLTYERKDNTTVTRLLNINPNKTSASGSCGAHLVTLELHSEGTTVLLFQFGMNASSSRFFLQGIQLNTILPDARDPAFKAANGSLRALQATVGNSYKCNAEEHVRVTKAFSVNIFKVWVQAFKVEGGQFGSVEECLLDENSMLIPIAVGGALAGLVLIVLIAYLVGRKRSHAGYQTI

SEQ ID NO: 35807 - protein, 89 aa, Homo sapiens
LNTILPDARDPAFKAANGSLRALQATVGNSYKCNAEEHVRVTKAFSVNIFKVWVQAFKVEGGQFGSGECHRGQLSRGVEDVLQTPPVDV

SEQ ID NO: 35808 - protein, 247 aa, Homo sapiens
LASLGARLPPRMQPAERSRVPRIDPYGFERPEDFDDAAYEKFFSSYLVTLTRRAIKWSRLLQGGGVPRSRTVKRYVRKGVPLEHRARVWMVLSGAQAQMDQNPGYYHQLLQGERNPRLEDAIRTDLNRTFPDNVKFRKTTDPCLQRTLYNVLLAYGHHNQGVGYCQGMNFIAGYLILITNNEEESFWLLDALVGRILPENIFRTWKLIHGHRRQAPRELQGPAAGTGVSVPVPCVARLYTDDAPFQS

SEQ ID NO: 35809 - protein, 347 aa, Homo sapiens
LASLGARLPPRMQPAERSRVPRIDPYGFERPEDFDDAAYEKFFSSYLVTLTRRAIKWSRLLQGGGVPRSRTVKRYVRKGVPLEHRARVWMVLSGAQAQMDQNPGYYHQLLQGERNPRLEDAIRTDLNRTFPDNVKFRKTTDPCLQRTLYNVLLAYGHHNQGVGYCQGMNFIAGYLILITNNEEESFWLLDALVGRILPDYYSPAMLGLKTDQEVLGELVRAKLPAVGALMERLGVLWTLLVSRWFICLFVDILPVETVLRIWDCLFNEGSKIIFRVALTLIKQHQELILEATSVPDICDKFKQITKGSFVMECHTFMQKIFSEPGSLSMATVAKLRESCRARLLAQG

SEQ ID NO: 35810 - protein, 355 aa, Homo sapiens
LASLGARLPPRMQPAERSRVPRIDPYGFERPEDFDDAAYEKFFSSYLVTLTRRAIKWSRLLQGGGVPRSRTVKRYVRKGVPLEHRARVWMVLSGAQAQMDQNPGYYHQLLQGERNPRLEDAIRTDLNRTFPDNVKFRKTTDPCLQRTLYNVLLAYGHHNQGVGYCQGMNFIAGYLILITNNEEESFWLLDALVGRILPDYYSPAMLGLKTDQEVLGELVRAKLPAVGALMERLGVLWTLLVSRWFICLFVDILPVETVLRIWDCLFNEGSKIIFRVALTLIKQHQELILEATSVPDICDKFKQITKGSFVMECHTFMQVCGAARGSVPSQGAPPHLQPGGCSDHPEGAQDGHQWA

SEQ ID NO: 35811 - protein, 17 aa, Homo sapiens
MKVIFPELGLSIAFWMC

SEQ ID NO: 35812 - protein, 59 aa, Homo sapiens [sequence omitted]

SEQ ID NO: 35813 - protein, 448 aa, Homo sapiens
LGSQQLEAGWPLPRHRRDSGPAARPGRGAQGSRSEGHIPDRRGPRPWQDILPCVPFSVAKSVKSLYLGRMFSGTPVIRLRFKRLQPTRLVAEFDFRTFDPEGILLFAGGHQDSTWIVLALRAGRLELQLRYNGVGRVTSSGPVINHGMWQTISVEELARNLVIKVNRDAVMKIAVAGDLFQPERGLYHLNLTVGGIPFHEKDLVQPINPRLDGCMRSWNWLNGEDTTIQETVKVNTRMQCFSVTERGSFYPGSGFAFYSLDYMRTPLDVGTESTWEVEVVAHIRPAADTGVLFALWAPDLRAVPLSVALVDYHSTKKLKKQLVVLAVEHTALALMEIKVCDGQEHVVTVSLRDGEATLEVDGTRGQSEVSAAQLQERLAVLERHLRSPVLTFAGGLPDVPVTSAPVTAFYRGCMTLEVNRRLLDLDEAAYKHSDITAHSCPPVEPAAA

SEQ ID NO: 35814 - protein, 492 aa, Homo sapiens
LRLAGFFLLADIDECADSEACGEARCKNLPGSYSCLCDEGFAYSSQEKACRDVDECLQGRCEQVCVNSPGSYTCHCDGRGGLKLSQDMDTCEDILPCVPFSVAKSVKSLYLGRMFSGTPVIRLRFKRLQPTRLVAEFDFRTFDPEGILLFAGGHQDSTWIVLALRAGRLELQLRYNGVGRVTSSGPVINHGMWQTISVEELARNLVIKVNRDAVMKIAVAGDLFQPERGLYHLNLTVGGIPFHEKDLVQPINPRLDGCMRSWNWLNGEDTTIQETVKVNTRMQCFSVTERGSFYPGSGFAFYSLDYMRTPLDVGTESTWEVEVVAHIRPAADTGVLFALWAPDLRAVPLSVALVDYHSTKKLKKQLVVLAVEHTALALMEIKVCDGQEHVVTVSLRDGEATLEVDGTRGQSEVSAAQLQERLAVLERHLRSPVLTFAGGLPDVPVTSAPVTAFYRGCMTLEVNRRLLDLDEAAYKHSDITAHSCPPVEPAAA

SEQ ID NO: 35815 - protein, 686 aa, Homo sapiens
LTARPRPAMAPSLSPGPAALRRAPQLLLLLLAAECALAALLPAREATQFLRPRQRRAFQVFEEAKQGHLERECVEELCSREEAREVFENDPETDYFYPRYLDCINKYGSPYTKNSGFATCVQNLPDQCTPNPCDRKGTQACQDLMGNFFCLCKAGWGGRLCDKDVNECSQENGGCLQICHNKPGSFHCSCHSGFELSSDGRTCQDIDECADSEACGEARCKNLPGSYSCLCDEGFAYSSQEKACRDVDECLQGRCEQVCVNSPGSYTCHCDGRGGLKLSQDMDTCEDILPCVPFSVAKSVKSLYLGRMFSGTPVIRLRFKRLQPTRLVAEFDFRTFDPEGILLFAGGHQDSTWIVLALRAGRLELQLRYNGVGRVTSSGPVINHGMWQTISVEELARNLVIKVNRDAVMKIAVAGDLFQPERGLYHLNLTVGGIPFHEKDLVQPINPRLDGCMRSWNWLNGEDTTIQETVKVNTRMQCFSVTERGSFYPGSGFAFYSLDYMRTPLDVGTESTWEVEVVAHIRPAADTGVLFALWAPDLRAVPLSVALVDYHSTKKLKKQLVVLAVEHTALALMEIKVCDGQEHVVTVSLRDGEATLEVDGTRGQSEVSAAQLQERLAVLERHLRSPVLTFAGGLPDVPVTSAPVTAFYRGCMTLEVNRRLLDLDEAAYKHSDITAHSCPPVEPAAA

SEQ ID NO: 35816 - protein, 156 aa, Homo sapiens
LQLVVLAVEHTALALMEIKVCDGQEHVVTVSLRDGEATLEVDGTRGQSEVSAAQLQERLAVLERHLRSPVLTFAGGLPGRCSLLRSTRVKSSREAQLGHPRSNLDRLGFLVVNAEEDLCFKRKEKSRWVVSGYYGVSVLVRSLAETEKHVRGPALA

SEQ ID NO: 35817 - protein, 100 aa, Homo sapiens
MRGVSASPPWPQMKRLWGQEGVRHVQGRRPVQGPTLRHQNLTSSEAPTMEGCLGDAVRCRYDVWLEIKAISEVDTCPCDAKGWEPGLDFAWNAFRKDLCP

SEQ ID NO: 35818 - protein, 13 aa, Homo sapiens
LFFFIYYRLFAVV

SEQ ID NO: 35819 - protein, 819 aa, Homo sapiens
VLVTDRRMEAFQELRKPSARLECDHCSFRGTDYENVQIHMGTIHPEFCDEMDAGGLGKMIFYQKSAKLFHCHKCFFTSKMYSNVYYHITSKHASPDKWNDKPKNQLNKETDPVKSPPLPEHQKIPCNSAEPKSIPALSMETQKLGSVLSPESPKPTPLTPLEPQKPGSVVSPELQTPLPSPEPSKPASVSSPEPPKSVPVCESQKLAPVPSPEPQKPAPVSPESVKATLSNPKPQKQSHFPETLGPPSASSPESPVLAASPEPWGPSPAASPESRKSARTTSPEPRKPSPSESPEPWKPFPAVSPEPRRPAPAVSPGSWKPGPPGSPRPWKSNPSASSGPWKPAKPAPSVSPGPWKPIPSVSPGPWKPTPSVSSASWKSSSVSPSSWKSPPASPESWKSGPPELRKTAPTLSPEHWKAVPPVSPELRKPGPPLSPEIRSPAGSPELRKPSGSPDLWKLSPDQRKTSPASLDFPESQKSSRGGSPDLWKSSFFIEPQKPVFPETRKPGPSGPSESPKAASDIWKPVLSIDTEPRKPALFPEPAKTAPPASPEARKRALFPEPRKHALFPELPKSALFSESQKAVELGDELQIDAIDDQKCDILVQEELLASPKKLLEDTLFPSSKKLKKDNQESSDAELSSSEYIKTDLDAMDIKGQESSSDQEQVDVESIDFSKENKMDMTSPEQSRNVLQFTEEKEAFISEEEIAKYMKRGKGKYYCKICCCRAMKKGAVLHHLVNKHNVHSPYKCTICGKAFLLESLLKNHVAAHGQSLLKCPRCNFESNFPRGFKKHLTHCQSRHNEEANKKLMEALEPPLEEQQI

SEQ ID NO: 35820 - protein, 55 aa, Homo sapiens
LSLHFLSLSVLVGWLKMKSTEEGSPAPCVPVQNWPICRPPENHMGLDLDILNRKG

SEQ ID NO: 35821 - protein, 28 aa, Homo sapiens
MLFLACFHVGLCSTGFAFRLRVLVTQEQ

SEQ ID NO: 35822 - protein, 162 aa, Homo sapiens
LGDIEIAIKLVKTELQSPEHPLDQHYRNLHCALRPLDHESYEFKVISQYLQSTHAPTHSDYTMTLLDLFEVEKDGEKEAFREDLHNRMLLWHGSRMSNWVGILSHGLRIAPPEAPITGYMFGKGIYFADMSSKSANYCFASRLKNTGLLLLSEVRQEYVCDL

SEQ ID NO: 35823 - protein, 192 aa, Homo sapiens
MPAVLGFEGSANKIGVGVVRDGKVLANPRRTYVTPPGTGFLPGDTARHHRAVILDLLQEALTESGLTSQDIDCIAYTKGPGMGAPLVSVAVVARTVAQLWNKPLVGVNHCIGHIEMGRLITGATSPTVLYVSGGNTQVPVILATPEAGQENHLNPGGGSCGEPRSHHCIPAWATRAKLRLKQTNKQKTKKNN

SEQ ID NO: 35824 - protein, 90 aa, Homo sapiens [sequence omitted]

SEQ ID NO: 35825 - protein, 305 aa, Homo sapiens
LGAEASFPPSALRGGSALAAAARWGPAEEGARIPGSFFAWAAPAAPGAGAAAAPAPRADPGGRGLLGEAGRGPNYAEAGTPTLHTSPRPHLRPCTHTHTRTPTPPRCKAGFKRTSLRFLPAPHHRTREEEAGEKQNFFPLSCPFLRTCSEAEEPVLEEMVMGLGVLLLVFVLGLGLTPPTLAQDNSRYTHFLTQHYDAKPQGRDDRYCESIMRRRGLTSPCKDINTFIHGNKRSIKAICENKNGNPHRENLRISKSSFQVTTCKLHGGSPWPPCQYRATAGFRNVVVACENGLPVHLDQSIFRRP

SEQ ID NO: 35826 - protein, 20 aa, Homo sapiens
MQSRIQKNIFAFSTGSPSSY

SEQ ID NO: 35827 - protein, 167 aa, Homo sapiens
LKGNCQIFVRFFLLGTSKILMALQRTHSLLLLLLLTLLGLGLVQPSYGQDGMYQRFLRQHVHPEETGGSDRYCNLMMQRRKMTLYHCKRFNTFIHEDIWNIRSICSTTNIQCKNGKMNCHEGVVKVTDCRDTGSSRAPNCRYRAIASTRRVVIACEGNPQVPVHFDG

SEQ ID NO: 35828 - protein, 181 aa, Homo sapiens
LQKLAFHLSQTPSCRSRLFWESEATMALEKSLVRLLLLVLILLVLGWVQPSLGKESRAKKFQRQHMDSDSSPSSSSTYCNQMMRRRNMTQGRCKPVNTFVHEPLVDVQNVCFQEKVTCKNGQGNCYKSNSSMHITDCRLTNGSRYPNCAYRTSPKERHIIVACEGSPYVPVHFDASVEDST

SEQ ID NO: 35829 - protein, 163 aa, Homo sapiens
LGNMVPKLFTSQICLLLLLGLMGVEGSLHARPPQFTRAQWFAIQHISLNPPRCTIAMRAINNYRWRCKNQNTFLRTTFANVVNVCGNQSIRCPHNRTLNNCHRSRFRVPLLHCDLINPGAQNISNCTYADRPGRRFYVVACDNRDPRDSPRYPVVPVHLDTTI

SEQ ID NO: 35830 - protein, 164 aa, Homo sapiens
LGNMVPKLFTSQICLLLLLGLLAVEGSLHVKPPQFTWAQWFETQHINMTSQQCTNAMQVINNYQRRCKNQNTFLLTTFANVVNVCGNPNMTCPSNKTRKNCHHSGSQVPLIHCNLTTPSPQNISNCRYAQTPANMFYIVACDNRDQRRDPPQYPVVPVHLDRII

SEQ ID NO: 35831 - protein, 79 aa, Homo sapiens [sequence omitted]

SEQ ID NO: 35832 - protein, 191 aa, Homo sapiens [sequence omitted]

SEQ ID NO: 35833 - protein, 657 aa, Homo sapiens
LALEENATSQKVLDIFEQRLEQVESGLHRALRLQRFFQQAHEWVDEGFARLAGAGPGREAVLAALALRRAPEPSAGTFQEMRALALDLGSPAALREWGRCQARCQELERRIQQHVGEEASPRGYRRRRADGASSGGAQWGPRSPSPSLSSLLLPSSPGPRPAPSHCSLAPCGEDYEEEGPELAPEAEGRPPRAVLIRGLEVTSTEVVDRTCSPREHVLLGRARGPDGPWGVGTPRMERKRSISAQQRLVSELIACEQDYVATLSEPVPPPGPELTPELRGTWAAALSARERLRSFHRTHFLRELQGCATHPLRIGACFLRHGDQFSLYAQYVKHRHKLENGLAALSPLSKGSMEAGPYLPRALQQPLEQLTRYGRLLEELLREAGPELSSECRALGAAVQLLREQEARGRDLLAVEAVRGCEIDLKEQGQLLHRDPFTVICGRKKCLRHVFLFEHLLLFSKLKGPEGGSEMFVYKQAFKTADMGLTENIGDSGLCFELWFRRRRAREAYTLQATSPEIKLKWTSSIAQLLWRQAAHNKELRVQQMVSMGIGNKPFLDIKALGERTLSALLTGRGEGQGAGGWPPGVKTLTMRIQRGGMVESQERHLVPKSVGLAGRPSVRLRVIPGSQEGFPTPAPHPPLPTLCSRPHPGLRGRVIL

SEQ ID NO: 35834 - protein, 28 aa, Homo sapiens
LFFYSEIFLIFSYTAATWMPSLEQQQPG

SEQ ID NO: 35835 - protein, 22 aa, Homo sapiens
MMVMMMMIMTLMIFNRIKIEFF

SEQ ID NO: 35836 - protein, 948 aa, Homo sapiens
LGTEIMSHLVDPTSGDLPVRDIDAIPLVLPASKGKNMKTQPPLSRMNREELEDSFFRLREDHMLVKELSWKQQDEIKRLRTTLLRLTAAGRDLRVAEEAAPLSETARRGQKAGWRQRLSMHQRPQMHRLQGHFHCVGPASPRRAQPRVQVGHRQLHTAGAPVPEKPKRGPRDRLSYTAPPSFKEHATNENRGEVASKPSELAHIMASNTMQVEEPPKSPEKMWPKDENFEQRSSLECAQKAAELRASIKEKVELIRLKKLLHERNASLVMTKAQLTEVQEAYETLLQKNQGILSAAHEALLKQVNELRAELKEESKKAVSLKSQLEDVSILQMTLKEFQERVEDLEKERKLLNDNYDKLLESMLDSSDSSSQPHWSNELIAEQLQQQVSQLQDQLDAELEDKRKVLLELSREKAQNEDLKLEVTNILQKHKQEVELLQNAATISQPPDRQSEPATHPAVLQENTQIEPSEPKNQEEKKLSQVLNELQVSHAETTLELEKTRDMLILQRKINVCYQEELEAMMTKADNDNRDHKEKLERLTRLLDLKNNRIKQLEGILRSHDLPTSGDFNLTDPAEKPNGSIQVQLDWKFPYIPPESFLKPEAQTKGKDTKDSSKISSEEEKASFPSQDQMASPEVPIEAGQYRSKRKPPHGGERKEKEHQVVSYSRRKHGKRIGVQGKNRMEYLSLNILNGNTPEQVNYTEWKFSETNSFIGDGFKNQHEEEEMTLSHSALKQKEPLHPVNDKESSEQGSEVSEAQTTDSDDVIVPPMSQKYPKADSEKMCIEIVSLAFYPEAEVMSDENIKQVYVEYKFYDLPLSETETPVSLRKPRAGEEIHFHFSKVIDLDPQEQQGRRRFLFDMLNGQDPDQGHLKFTVVSDPLDEEKKECEEVGYAYLQLWQILESGRDILEQELDIVSPEDLATPIGRLKVSLQAAAVLHAIYKEMTEDLFS

SEQ ID NO: 35837 - protein, 1253 aa, Homo sapiens
LGTEIMSHLVDPTSGDLPVRDIDAIPLVLPASKGKNMKTQPPLSRMNREELEDSFFRLREDHMLVKELSWKQQDEIKRLRTTLLRLTAAGRDLRVAEEAAPLSETARRGQKAGWRQRLSMHQRPQMHRLQGHFHCVGPASPRRAQPRVQVGHRQLHTAGAPVPEKPKRGPRDRLSYTAPPSFKEHATNENRGEVASKPSELAHIMASNTMQVEEPPKSPEKMWPKDENFEQRSSLECAQKAAELRASIKEKVELIRLKKLLHERNASLVMTKAQLTEVQEAYETLLQKNQGILSAAHEALLKQVNELRAELKEESKKAVSLKSQLEDVSILQMTLKEFQERVEDLEKERKLLNDNYDKLLESMLDSSDSSSQPHWSNELIAEQLQQQVSQLQDQLDAELEDKRKVLLELSREKAQNEDLKLEVTNILQKHKQEVELLQNAATISQPPDRQSEPATHPAVLQENTQIEPSEPKNQEEKKLSQVLNELQVSHAETTLELEKTRDMLILQRKINVCYQEELEAMMTKADNDNRDHKEKLERLTRLLDLKNNRIKQLEEQLKDVAYGTRPLSLCLETLPAHGDEDKVDISLLHQGENLFELHIHQAFLTSAALAQAGDTQPTTFCTYSFYDFETHCTPLSVGPQPLYDFTSQYVMETDSLFLHYLQEASARLDIHQAMASEHSTLAAGWICFDRVLETVEKVHGLATLIGAGGEEFGVLEYWMRLRFPIKPSLQACNKRKKAQVYLSTDVLGGRKAQEEEFRSESWEPQNELWIEITKCCGLRSRWLGTQPSPYAVYRFFTFSDHDTAIIPASNNPYFRDQARFPVLVTSDLDHYLRREALSIHVFDDEDLEPGSYLGRARVPLLPLAKNESIKGDFNLTDPAEKPNGSIQVQLDWKFPYIPPESFLKPEAQTKGKDTKDSSKISSEEEKASFPSQDQMASPEVPIEAGQYRSKRKPPHGGERKEKEHQVVSYSRRKHGKRIGVQGKNRMEYLSLNILNGNTPEQVNYTEWKFSETNSFIGDGFKNQHEEEEMTLSHSALKQKEPLHPVNDKESSEQGSEVSEAQTTDSDDVIVPPMSQKYPKADSEKMCIEIVSLAFYPEAEVMSDENIKQVYVEYKFYDLPLSETETPVSLRKPRAGEEIHFHFSKVIDLDPQEQQGRRRFLFDMLNGQDPDQGHLKFTVVSDPLDEEKKECEEVGYAYLQLWQILESGRDILEQELDIVSPEDLATPIGRLKVSLQAAAVLHAIYKEMTEDLFS

SEQ ID NO: 35838 - protein, 63 aa, Homo sapiens [sequence omitted]

SEQ ID NO: 35839 - protein, 120 aa, Homo sapiens
MKIEAAERGDRRRRRCEAAFKLKEIARREKQQRWTRREQTDFYRVVSTFGVEYDPDTMQFHWDRFRTFARLDKKTDESLTKYFHGFVAMCRQVCRLPPAAGDGKQDCRVGEDGCQQKQLC

SEQ ID NO: 35840 - protein, 9 aa, Homo sapiens
MVRGCPAAL

SEQ ID NO: 35841 - protein, 28 aa, Homo sapiens
LGNTLKMNYSPGLVSLILLLLGRTRGIQ

SEQ ID NO: 35842 - protein, 77 aa, Homo sapiens
VYQKRGRALKYRKVLFSVTVVLLGPVAKCAPTPAVRSQLILRGKSSHQATERKSVLCGLQEELGHTAGNEVAGHKLS

SEQ ID NO: 35843 - protein, 12 aa, Homo sapiens
MLCLCFLLVRML

SEQ ID NO: 35844 - protein, 133 aa, Homo sapiens
VWSTGPPRVWGADRSTLRAVMSASVVSVISRFLEEYLSSTPQRLKLLDAYLLYILLTGALQFGYCLLVGTFPFNSFLSGFISCVGSFILAVCLRIQINPQNKADFQGISPERAFADFLFASTILHLVVMNFVG

SEQ ID NO: 35845 - protein, 79 aa, Homo sapiens
LETGTIAMGLVLVTGHLQAPAHGPMGSLQPQVPCPYQPLGGSHCMTLYPCHLSPWFPAQSTPDPSVSFFPGSRFRGSGQ

SEQ ID NO: 35846 - protein, 30 aa, Homo sapiens
MLGAFVWPSLLLLAGKEEHQTTDPGRHFSP

SEQ ID NO: 35847 - protein, 34 aa, Homo sapiens
MLIPEILAFVWPSLLLLAGKEEHQTTDPGRHFSP

SEQ ID NO: 35848 - protein, 16 aa, Homo sapiens
LLSMAALGTVLFSEWV

SEQ ID NO: 35849 - protein, 23 aa, Homo sapiens
LLSMAALGTVLFSEWVSGGCTAA

SEQ ID NO: 35850 - protein, 57 aa, Homo sapiens
LLSMAALGTVLFSVRRLHCSVAAWAGGQWRLQQGLAANPSGYGPLTELPDWSYAGKR

SEQ ID NO: 35851 - protein, 113 aa, Homo sapiens
LLSMAALGTVLFSVRRLHCSVAAWAGGQWRLQQGLAANPSGYGPLTELPDWSYADGRPAPPMKGQLRRKAERETFAVSETSCTAVTGNGRWITSMAAQAAEVAGRTKEAGKCS

SEQ ID NO: 35852 - protein, 126 aa, Homo sapiens
LLSMAALGTVLFTGVRRLHCSVAAWAGGQWRLQQGLAANPSGYGPLTELPDWSYADGRPAPPMKGQLRRKAERETFARRVVLLSQEMDAGLQAWQLRQQKLQEEQRKQENALKPKGASLKSPLPSQ

SEQ ID NO: 35853 - protein, 125 aa, Homo sapiens
LLSMAALGTVLFSVRRLHCSVAAWAGGQWRLQQGLAANPSGYGPLTELPDWSYADGRPAPPMKGQLRRKAERETFARRVVLLSQEMDAGLQAWQLRQQKLQEEQRKQENALKPKGASLKSPLPSQ

SEQ ID NO: 35854 - protein, 93 aa, Homo sapiens
LTRWSRTMSPAPRPPRCLLLPLLTLGTALASLGSAQSSSFSPEAWLQQYGYLPPGDLRTHTQRSPQSLSAAIAAMQKFYGLQVTGKADADTMK

SEQ ID NO: 35855 - protein, 43 aa, Homo sapiens
MKAMRRPRCGVPDKFGAEIKANVRRKRYAIQGLKWQHNEITFW

SEQ ID NO: 35856 - protein, 30 aa, Homo sapiens
VVVGGLFPSSRAPSPQPPCFSLSPGWPPSP

SEQ ID NO: 35857 - protein, 13 aa, Homo sapiens
LALIWCGMCPLCL

SEQ ID NO: 35858 - protein, 956 aa, Homo sapiens
MDLLYGLVWLLTVLLEGISGQGVYAPPTVRIVHSGLACNIEEERYSERVYTIREGETLELTCLVTGHPRPQIRWTKTAGSASDRFQDSSVFNETLRITNIQRHQGGRYYCKAENGLGSPAIKSIRVDVYYLDDPVVTVHQSIGEAKEQFYYERTVFLRCVANSNPPVRYSWRRGQEVLLQGSDKGVEIYEPFFTQGETKILKLKNLRPQDYANYSCIASVRNVCNIPDKMVSFRLSNKTASPSIKLLVDDPIVVNPGEAITLVCVTTGGEPAPSLTWVRSFGTLPEKTVLNGGTLTIPAITSDDAGTYSCIANNNVGNPAKKSTNIIVRALKKGRFWITPDPYHKDDNIQIGREVKISCQVEAVPSEELTFSWFKNGRPLRSSERMVITQTDPDVSPGTTNLDIIDLKFTDFGTYTCVASLKGGGISDISIDVNISSSTVPPNLTVPQEKSPLVTREGDTIELQCQVTGKPKPIILWSRADKEVAMPDGSMQMESYDGTLRIVNVSREMSGMYRCQTSQYNGFNVKPREALVQLIVQYPPAVEPAFLEIRQGQDRSVTMSCRVLRAYPIRVLTYEWRLGNKLLRTGQFDSQEYTEYAVKSLSNENYGVYNCSIINEAGAGRCSFLVTGKAYAPEFYYDTYNPVWQNRHRVYSYSLQWTQMNPDAVDRIVAYRLGIRQAGQQRWWEQEIKINGNIQKGELITYNLTELIKPEAYEVRLTPLTKFGEGDSTIRVIKYSAPVNPHLREFHCGFEDGNICLFTQDDTDNFDWTKQSTATRNTKYTPNTGPNADRSGSKEGFYMYIETSRPRLEGEKARLLSPVFSIAPKNPYGPTNTAYCFSFFYHMYGQHIGVLNVYLRLKGQTTIENPLWSSSGNKGQRWNEAHVNIYPITSFQLIFEGIRGPGIEGDIAIDDVSIAEGECAKQDLATKNSVDGAVGILVHIWLFPIIVLISILSPRR

SEQ ID NO: 35859 - protein, 132 aa, Homo sapiens
MIPIQVLLRCLTLLQRLLQEHRLKTQSELDRINAQYLEVKCGAMILKLRMEELKILSDTYTVEKVEVHRLIRDRLEGAIHLQEQDMENSRQVLNSYEVLGEEFDRLVKEYTVLKQATENKRWALQEFSKVYR

SEQ ID NO: 35860 - protein, 49 aa, Homo sapiens
LARVLGATFSFFSFSINAVGPLGKPEIGNINLTNVILANVNKKDCAILG

SEQ ID NO: 35861 - protein, 31 aa, Homo sapiens
VKMVFRIWLFFLEACLPAVKMAPFRNRFNRK

SEQ ID NO: 35862 - protein, 630 aa, Homo sapiens
LGRRWWDLGTRKVWFFFFIFFRIFFVWFLLFLPFQKGINSTSRGRKKIMLSESKEGEEKEEVTMDTSENRPENDVPEPPMPIADQVSNDDRPEGSVEDEEKKESSLPKSFKRKISVVSTKGVPAGNSDTEGGQPGRKRRWGASTATTQKKPSISITTESLKSLIPDIKPLAGQEAVVDLHADDSRISEDETERNGDDGTHDKGLKICRTVTQVVPAEGQENGQREEEEEEKEPEAEPPVPPQVSVEVALPPPAEHEVKKVTLGDTLTRRSISQQKSGVSITIDDPVRTAQVPSPPRGKISNIVHISNLVRPFTLGQLKELLGRTGTLVEEAFWIDKIKSHCFVTYSTVEEAVATRTALHGVKWPQSNPKFLCADYAEQDELDYHRGLLVDRPSETKTEEQGIPRPLHPPPPPPVQPPQHPRAEQREQERAVREQWAEREREMERRERTRSEREWDRDKVREGPRSRSRSRDRRRKERAKSKEKKSEKKEKAQEEPPAKLLDDLFRKTKAAPCIYWLPLTDSQIVQKEAERAERAKEREKRRKEQEEEEQKEREKEAERERNRQLEREKRREHSRERDRERERERERDRGDRDRDRERDRERGRERDRRDTKRHSRSRSRSTPVRDRGGRR

SEQ ID NO: 35863 - protein, 631 aa, Homo sapiens
LGRRWWDLGTRKVWFFFFIFFRIFFVWFLLFLPFQKGINSTSRGRKKIMLSESKEGEEKEEVTMDTSENRPENDVPEPPMPIADQVSNDDRPEGSVEDEEKKESSLPKSFKRKISVVSATKGVPAGNSDTEGGQPGRKRRWGASTATTQKKPSISITTESLKSLIPDIKPLAGQEAVVDLHADDSRISEDETERNGDDGTHDKGLKICRTVTQVVPAEGQENGQREEEEEEKEPEAEPPVPPQVSVEVALPPPAEHEVKKVTLGDTLTRRSISQQKSGVSITIDDPVRTAQVPSPPRGKISNIVHISNLVRPFTLGQLKELLGRTGTLVEEAFWIDKIKSHCFVTYSTVEEAVATRTALHGVKWPQSNPKFLCADYAEQDELDYHRGLLVDRPSETKTEEQGIPRPLHPPPPPPVQPPQHPRAEQREQERAVREQWAEREREMERRERTRSEREWDRDKVREGPRSRSRSRDRRRKERAKSKEKKSEKKEKAQEEPPAKLLDDLFRKTKAAPCIYWLPLTDSQIVQKEAERAERAKEREKRRKEQEEEEQKEREKEAERERNRQLEREKRREHSRERDRERERERERDRGDRDRDRERDRERGRERDRRDTKRHSRSRSRSTPVRDRGGRR

SEQ ID NO: 35864 - protein, 629 aa, Homo sapiens
LPLRQYNRASHYQQPGPLPPSPERPIQPNSGFAKGINSTSRGRKKIMLSESKEGEEKEEVTMDTSENRPENDVPEPPMPIADQVSNDDRPEGSVEDEEKKESSLPKSFKRKISVVSATKGVPAGNSDTEGGQPGRKRRWGASTATTQKKPSISITTESLKSLIPDIKPLAGQEAVVDLHADDSRISEDETERNGDDGTHDKGLKICRTVTQVVPAEGQENGQREEEEEEKEPEAEPPVPPQVSVEVALPPPAEHEVKKVTLGDTLTRRSISQQKSGVSITIDDPVRTAQVPSPPRGKISNIVHISNLVRPFTLGQLKELLGRTGTLVEEAFWIDKIKSHCFVTYSTVEEAVATRTALHGVKWPQSNPKFLCADYAEQDELDYHRGLLVDRPSETKTEEQGIPRPLHPPPPPPVQPPQHPRAEQREQERAVREQWAEREREMERRERTRSEREWDRDKVREGPRSRSRSRDRRRKERAKSKEKKSEKKEKAQEEPPAKLLDDLFRKTKAAPCIYWLPLTDSQIVQKEAERAERAKEREKRRKEQEEEEQKEREKEAERERNRQLEREKRREHSRERDRERERERERDRGDRDRDRERDRERGRERDRRDTKRHSRSRSRSTPVRDRGGRR

SEQ ID NO: 35865 - protein, 117 aa, Homo sapiens
MSPADRCRSANTIEPATTSSLALFLLLQRDQSSRTRGLPEEKEEVTMDTSENRPENDVPEPPMPIADQVSNDDRPEGSVEDEEKKEVNIQATYWGGWAGMDLGERVEHSSDPSYTVG

SEQ ID NO: 35866 - protein, 20 aa, Homo sapiens
VAFLYFTWIPLAGFTTPIRL

SEQ ID NO: 35867 - protein, 19 aa, Homo sapiens
MRSRNIFRVLFYLLAFFRE

SEQ ID NO: 35868 - protein, 604 aa, Homo sapiens
LLEQGWVDRRAPGDGGGGSPGFGHRWGGLGAAAPGSNPTPTRRPPALSPTSPRPMVRGWEPPPGLDCAISEGHKSEGTMPPNKEASGLSSSPAGLICLPPISEELQLVWTQAAQTSELDSNEHLLKTFSYFPYPSLADIALLCLRYGLQMEKVKTWFMAQRLRCGISWSSEEIEETRARVVYRRDQLHFKSLLSFTHHAGRPPEEVPPPPVPAPEQVGIGIGPPTLSKPTQTKGLKVEPEEPSQMPPLPQSHQKLKESLMTPGSGAFPYQSDFWQHLQSSGLSKEQAGRGPNQSHGIGTASWNHSTTVPQPQARDKPPPIALIASSCKEESASSVTPSSSSTSSSFQVLANGATAASKPLQPLGCVPQSVSPSEQALPPHLEPAWPQGLRHNSVPGRVGPTEYLSPDMQRQRKTKRKTKEQLAILKSFFLQCQWARREDYQKLEQITGLPRPEIIQWFGDTRYALKHGQLKWFRDNAVPGAPSFQDPAIPTPPPSTRSLNERAETPPLPIPPPPPDIQPLERYWAAHQQLRETDIPQLSQASRLSTQQVLDWFDSRLPQPAEVVVCLDEEEEEEEEELPEDDEEEEEEEEEDDDDDDDDVIIQD

SEQ ID NO: 35869 - protein, 18 aa, Homo sapiens
LAGGWPTQKGGKKIGKTE

SEQ ID NO: 35870 - protein, 650 aa, Homo sapiens
LTAFLALPPTCPLPLLCGFLRFTLLLPPPAPQQQVGTLGDAVPTEQLQGEREREREGEGDAGGDGLGSSLSLAVPPGPLSFEALLAQVGALGGGQQLQLGLCCLPVLFVALGMASDPIFTLAPPLHCHYGAFPPNASGWEQPPNASGVSVASAALAASAASRVATSTDPSCSGFAPPDFNHCLKDWDYNGLPVLTTNAIGQWDLVCDLGWQVILEQILFILGFASGYLFLGYPADRFGRRGIVLLTLGLVGPCGVGGAAAGSSTGVMALRFLLGFLLAGVDLGVYLMRLELCDPTQRLRVALAGELVGVGGHFLFLGLALVSKDWRFLQRMITAPCILFLFYGWPGLFLESARWLIVKRQIEEAQSVLRILAERNRPHGQMLGEEAQEALQDLENTCPLPATSSFSFASLLNYRNIWKNLLILGFTNFIAHAIRHCYQPVGGGGSPSDFYLCSLLASGTAALACVFLGVTVDRFGRRGILLLSMTLTGIASLVLLGLWDCEHPIFPTVWAQQGNPNRDLNEAAITTFSVLGLFSSQAAAILSTLLAAEVIPTTVRGRGLGLIMALGALGGLSGPAQRLHMGHGAFLQHVVLAACALLCILSIMLLPETKRKLLPEVLRDGELCRRPSLLRQPPPTRCDHVPLLATPNPAL

SEQ ID NO: 35871 - protein, 321 aa, Homo sapiens
LTAFLALPPTCPLPLLCGFLRFTLLLPPPAPQQQVGTLGDAVPTEQLQGEREREREGEGDAGGDGLGSSLSLAVPPGPLSFEALLAQVGALGGGQQLQLGLCCLPVLFVALGMASDPIFTLAPPLHCHYGAFPPNASGWEQPPNASGVSVASAALAASAASRVATSTDPSCSGFAPPDFNHCLKDWDYNGLPVLTTNAIGQWDLVCDLGWQVILEQILFILGFASGYLFLGYPADRFGRRGIVLLTLGLVGPCGVGGAAAGSSTGVMALRFLLGFLLAGVDLGVYLMRKWHPPRIPSLGSHAYLPASPGHPHCPLGHISAA

SEQ ID NO: 35872 - protein, 1958 aa, Homo sapiens
LRPRFFRILREGITRGSTKMTDAQMADFGAAAQYLRKSEKERLEAQTRPFDIRTECFVPDDKEEFVKAKILSREGGKVIAETENGKTVTVKEDQVLQQNPPKFDKIEDMAMLTFLHEPAVLFNLKERYAAWMIYTYSGLFCVTVNPYKWLPVYNAEVVAAYRGKKRSEAPPHIFSISDNAYQYMLTDRENQSILITGESGAGKTVNTKRVIQYFASIAAIGDRGKKDNANANKGTLEDQIIQANPALEAFGNAKTVRNDNSSRFGKFIRIHFGATGKLASADIETYLLEKSRVIFQLKAERNYHIFYQILSNKKPELLDMLLVTNNPYDYAFVSQGEVSVASIDDSEELMATDSAFDVLGFTSEEKAGVYKLTGAIMHYGNMKFKQKQREEQAEPDGTEDADKSAYLMGLNSADLLKGLCHPRVKVGNEYVTKGQSVQQVYYSIGALAKAVYEKMFNWMVTRINATLETKQPRQYFIGVLDIAGFEIFDFNSFEQLCINFTNEKLQQFFNHHMFVLEQEEYKKEGIEWTFIDFGMDLQACIDLIEKPMGIMSILEEECMFPKATDMTFKAKLYDNHLGKSNNFQKPRNIKGKQEAHFSLIHYAGTVDYNILGWLEKNKDPLNETVVALYQKSSLKLMATLFSSYATADTGDSGKSKGGKKKGSSFQTVSALHRENLNKLMTNLRTTHPHFVRCIIPNERKAPGVMDNPLVMHQLRCNGVLEGIRICRKGFPNRILYGDFRQRYRILNPVAIPEGQFIDSRKGTEKLLSSLDIDHNQYKFGHTKVFFKAGLLGLLEEMRDERLSRIITRMQAQARGQLMRIEFKKIVERRDALLVIQWNIRAFMGVKNWPWMKLYFKIKPLLKSAETEKEMATMKEEFGRIKETLEKSEARRKELEEKMVSLLQEKNDLQLQVQAEQDNLNDAEERCDQLIKNKIQLEAKVKEMNERLEDEEEMNAELTAKKRKLEDECSELKKDIDDLELTLAKVEKEKHATENKVKNLTEEMAGLDEIIAKLTKEKKALQEAHQQALDDLQVEEDKVNSLSKSKVKLEQQVDDLEGSLEQEKKVRMDLERAKRKLEGDLKLTQESIMDLENDKLQLEEKLKKKEFDINQQNSKIEDEQVLALQLQKKLKENQARIEELEEELEAERTARAKVEKLRSDLSRELEEISERLEEAGGATSVQIEMNKKREAEFQKMRRDLEEATLQHEATAAALRKKHADSVAELGEQIDNLQRVKQKLEKEKSEFKLELDDVTSNMEQIIKAKANLEKVSRTLEDQANEYRVKLEEAQRSLNDFTTQRAKLQTENGELARQLEEKEALISQLTRGKLSYTQQMEDLKRQLEEEGKAKNALAHALQSARHDCDLLREQYEEETEAKAELQRVLSKANSEVAQWRTKYETDAIQRTEELEEAKKKLAQRLQDAEEAVEAVNAKCSSLEKTKHRLQNEIEDLMVDVERSNAAAAALDKKQRNFDKILAEWKQKYEESQSELESSQKEARSLSTELFKLKNAYEESLEHLETFKRENKNLQEEISDLTEQLGEGGKNVHELEKVRKQLEVEKLELQSALEEAEASLEHEEGKILRAQLEFNQIKAEIERKLAEKDEEMEQAKRNHQRVVDSLQTSLDAETRSRNEVLRVKKKMEGDLNEMEIQLSHANRMAAEAQKQVKSLQSLLKDTQIQLDDAVRANDDLKENIAIVERRNNLLQAELEELRAVVEQTERSRKLAEQELIETSERVQLLHSQNTSLINQKKKMESDLTQLQSEVEEAVQECRNAEEKAKKAITDAAMMAEELKKEQDTSAHLERMKKNMEQTIKDLQHRLDEAEQIALKGGKKQLQKLEARVRELEGELEAEQKRNAESVKGMRKSERRIKELTYQTEEDKKNLLRLQDLVDKLQLKVKAYKRQAEEAEEQANTNLSKFRKVQHELDEAEERADIAESQVNKLRAKSRDIGAKQKMHDEE

SEQ ID NO: 35873 - protein, 198 aa, Homo sapiens
LQCLKSSLLLTHILILSCRLPDRRAAKLHSRQTGAQPGLIQQEASQTPTTMLSAVARGYQGWFHPCARLSVRMSSTGIDRKGVLANRVAVVTGSTSGIGFAIARRLARDGAHVVISSRKQQNVDRAMAKLQGEGLSVAGIVCHVGKAEDREQLVAKALEHCGGVDFLVCSAGVNPLVGSTLGTSEQIWDKGPQGGTHF

SEQ ID NO: 35874 - protein, 73 aa, Homo sapiens [sequence omitted]

SEQ ID NO: 35875 - protein, 78 aa, Homo sapiens [sequence omitted]

SEQ ID NO: 35876 - protein, 26 aa, Homo sapiens
VASYSGFLLLLWPWVKASPENTGQAC

SEQ ID NO: 35877 - protein, 60 aa, Homo sapiens
MGCLWAAPCALSPLLQQNTKDFWEQEVRDIRSYLTEQVNQDLPKEVLAELEALERRVHKM

SEQ ID NO: 35878 - protein, 218 aa, Homo sapiens
LLLPVQASLAMGEVEISALAYVKMCLHAARYPHAAVNGLFLAPAPRSGECLCLTDCVPLFHSHLALSVMLEVALNQVDVWGAQAGLVVAGYYHANAAVNDQSPGPLALKIAGRIAEFFPDAVLIMLDNQKLVPQPRVPPVIVLENQGLRWVPKDKNLVMWRDWEESRQMVGALLEDRAHQHLVDFDCHLDDIRQDWTNQRLNTQITQWVGPTNGNGNA

SEQ ID NO: 35879 - protein, 37 aa, Homo sapiens
MQSGPPPGLGRGRTPGPRAPGAGGLPASRVSVVAEPK

SEQ ID NO: 35880 - protein, 232 aa, Homo sapiens
LSDISLSIFCDSPPLQCNPQAEEFLYRFLPQKIIYLNQLLQEDSLNVADLTSLRAPLDIPIPDPPPKDDEMETDKQEKKEVHKCGFLPGNEKVLSLLALVKPEVWTLKEKCILVITWIQHLIPKIEDGNDFGVAIQEKVLERVNAVKTKVEAFQTTISKYFSERGDAVAKASKETHVMDYRALVHERDEAAYGELRAMVLDLRAFYAELYHIISSNLEKIVNPKGEEKPSMY

SEQ ID NO: 35881 - protein, 128 aa, Homo sapiens
LSDISLSIFCDSPPLQCNPQAEEFLYRFLPQKIIYLNQLLQEDSLNVADLTSLRAPLDIPIPDPPPKDDEMETDKQEKKEVHKCGFLPGNEKVLSLLALVKPEVWTLKEKCILVSLGNGGSRKRRHTR

SEQ ID NO: 35882 - protein, 86 aa, Homo sapiens
LSDISLSIFCDSPPLQCNPQAEEFLYRFLPQKIIYLNQLLQEDSLNVADLTSLRAPLDIPIPDPPPKDDEMETDKQEKKEGKRDKR
